United States Patent Application Publication US 2008/0114160 A1 - sequence listing, part 57

SEQ ID NO: 19527 - DNA, 23130 bp, Oryza sativa
tactccatgtgtcccataatataagagatttgggtgaatgcgatacatcatgtctagattcatcgtattaggatgtgtcacatccataaaaaaatctcttatattatgagacagaggaagtatacaaaattagagaccgtacccatatcgatcgtaaacaatttttttctaaaaaaggtaatcagagtgaaattaattatgtatacaacgacctacctccctagatcgagatccatggcgatcgacagtgcatgcagctagctaggttttggccgtcggttcagctccggcggcggcggcggagagcgcggcgagggcgtcgtccatgagggcgaggtagttggcgcgcatggcctcgaactcccacccctccatctcctccacggccgcctccacccgccgccgctcctcctcctccctccgccgccgattccgccggtacgccgacacgccggccaccaccccggccgccgcgcacaggaagcacagcagctcgttgctcgggctatcccccttccccatcgctcgccgtcgatcgatcgtcgtcggcaattaataatgcaagctcgatcgatcgatctagggtttatctctctctcttgttttggttgtggaaagagcaaaagtatatattcgtgatttcgtctatatatattcgatcacgtgcacgaagtcatgcaatgcctagatggggcacgtttggcggctaaactaaagggctttctgttattcctagcaaaagggggaaaaaaaggacttctgttttggtggttccgtgatctaatctacgtttaaaccggacgattagacttttttttatataaaaaaattatacgatagagtcccctaacggttgggcgggttggcaggattggtcctgcgtgttcgctggctctggcttcagcgctcagggcacccctactgggatggcctgaagctcaagtcgagcagaccgtctctgacatgttcgcggcatccactttcttcgtgcgggaaaatggtgagtctatgctcttctggtctgaccaatggatcgacagctgctcggtggcgtccttggctccagatctcctcttcgttgtttcccagcatctccgaggttcgcgcacagttgcttctggtctgacgaacaactcctgggtctctgacatctgtggtgccctcactgtcccggtcatctcctagtttctccttatttgggatgcggtgcttcatgtacagctctcgccaggtgtcgaggatcgtctcgtttggcgttggatgtctgaccagcgctactcagcgcgttcggcataccaggctttcttccatggccagcattcctttgcctgtggtgatcttctctggcacgcaaaaggtcctgctaaatgcaggttcttcctttggtttgcattccagcagcgctgcgagatggctgatctcctccagaagcgtggcatcgatagtcactcagcctgccctttttgcgctcaggattttgagatggcgaaccacatcctcctcgaatgtgtgtttgctcggcaggtctggctccatgtgctgtcgcctcctggctgggctgccctctctccccccgtggcagctggttccaggactggtggtcttcctccagggcctgcttacctgagcatctccgagctggcttcgactccctggtgttcctggtctcttggtagctgtggaaggaataaaactctagggttttcgactatgcgctctcctcggtcttagtggttctggagtccatccacttagagggccatctgtggtctttagctggcattgccgcttttggggacttgttgggagtgtagagtggctcggccccttcccgctgcttggagtttgtatttagccaccgtagttttttaagctccagcttcttttttgcttttattttctccttccctttgcataagctggtctggctgattgcgtcgtgtaactataactcttttcttctaatatattgacgtgtaatccttttgcccgttcgcgaaaaagatagtcccctaacacatcttctaagagacatatacgtacattcttgatctcactaaaattcttatacgtaggcaccaaaatttaaaccctgatgggtggagtcacgtacctacgactccatcaccgcactattggttttcctcggattagacttattgatttttaaatattagtacttaagatagatatctatggttagttagcatggaaaccactacgaaaattgtccgtttaattgatatgcatatatctcacatggttttcttacaaagttaacaaaatgatagttttctttagaaatatagtataaacacaaacctttacaacatgcgcacattcacctatatgaatacacaccataccatacccgctatgagcatatttgtatttgtatgttacctacgactgaaagaataattagctgtatgcccgtaaaagcaagcaccagggttcaaatggattggtttcacaacaagaaactaaccagttaagttacactcactttgcaaaatgatcgttttttatctgtcacagcatataagacatatctctcctgccttagatttttttcgccaattaagtaaagctcactttgcaaaatgattgtttttagatctatgcacaatatatgagacatatctctcctccctctcttgccttagagactcagccctccaattccattatcagaaatgatgagttttctacaagatatctacgggttgagaaggcatagaatgagccttcaaaactagacatgaaaaaaaaccccaaatgatgagttggcatgcaatcctagccttcgctcacccatccctaaaaaaaaattgtggtaaggcggcaatacagggccaatacccctcttgctactaaaagtcataaacaatgtggtaaggcggcaagtatctccacagtaccacattggagattctgttccacgtctaagtgaatgcacaaacagcacaacatgcgtatcacttacacagttctttctaagtatactatagccacataagcccacaaagtatttttctacgaatttgctagacctaattaataagaaataaacctctaaggaaaaaaaaagaaaacaaatgcaaatcgcaaatttaagaggtcgaaaaaataaaaatttcggaagcaacgcttgtggccattaactgaaaacatcaaagtgatcgatatattggtgatgcaaatgcgtgaagtaaatctcttcaaagtttccaagccaacaaattgcatcacagccgcctacgaaatccaacggaaattcaaatcaaattaattaataactagaacaaagatctgtaataatgcgcatgatggatcatatcaatcctactactcgatcttggcgagcttaattaattagctccagtctgcggcggcggcggcggccttcttgtgcgccgaccaccagtcgaccgccttgccgcggatctcccgcttgaggccctcgagccgcgccgccctcgcctcggcgacgtactgctccctccggcgcgccgcccgcctcttctcctcgcggtggccccgcgccacgagggcgcccagcctcgccaggtggtacagcaggaccccgccggcggcgaccgcgatcaccaccttctccagcgccggcgccgccgccggggccgccgccctgcaattcgccattaattagttaattggtagagctaatcgatctgtgttaattagttacgagttacgacgctaagctataattaactaacctcttcgtcgcacacacgtatataatgcggccgtaccgtattatccgttagtaattttcccgacttacggggcgtctcgtgttaaaagaggcatcgaatatatatattttaataatataattattttgtgttggaaatgctcgtatatttttctataaactttatcaaagtgacttaggctgagttcgtttggaggagttcccaacactcccctctaaaaaatgacgggtcagacatacaagtgctagcttgcttctgttagttctaaaaaaaaaaagcttgactctgttagagtaatttgaacagaatgggtggagggagcaatgacgacctaattacaaagtatgatttcttaattatatctctcaaatacaacttatagaggtgattgggaaagcacaaaatgtatacgtatggtgtggaatctgggggcaaagacagagagtagggattggagctctactccccagcctaaataccgattgaaattacactttgaaatttcaaaaaaaaaagagataaaaaaataaacttgtgtaaattacactaatcctgcccttggcttcatctgattttagctgtacaaatactggggcactaatatcatgcacacacaccgttgtttcgctctcactgggactcccgtcacctgcaggatcttcaagcccgcgagttgaatgtttcaagtcatagatttaggttggtatgggtacatttatgcacggctaatttttttcgatgttgacttcgtcaatcttaacataacgagagagctatatatatcttgagatattttaagttcgtcaacttgaaaagttactttctttagacgcacgttcatagtttaggaagcacaataaacgagggagttgcaaaaactaaatgaagttttaaacagagccatggatgatggaataaatattgtggctttaatttattaatttttaatttcgatgcagtgaacaccgtaaggatgcaggttcagactatactctgtaccattgtcacagtaaaacttcatgaacccaaccgggtaatattcatatgaaatgaatgaaaaactaagtttacacacgagatggtctttttttttggagcaatccaaagctaaacaatttaactgaactaataatcaaaaacgatgaatctgtattgaactgaacaacttcgagtggaaaagtaaaggattgatggtcttcgaatctcacgtagtagtcctttttagcatgtgtgtaggcgtcgtatacaccgagctgtgacacaatcaaattaaccgaagagaataaaacatcatgtcagggagtaaattaaaagaagaaattactaaaggatatatatgtgctccttctgttttatactagtataaatagttttgatatttttctaatcgaatttcttttaagtttaaagaagcttgtagaaaaatataaaatatattcaatatcatattaataagactaatttagtatttagatgttattatttttttataaacttgatcatacttaacaaagtttgagattataggagaaaaggcaataaaacctaacaaagtttgattggtaaaatagtcgaaacgaaatataatacgataaaacggaaaaagaggatcaaacttgatcgaagaaaaagttggtatattatctcgcttaatcaatcctcgatcgatctaaactcgatagggggtgcagtggctacgtaccttacatgatcagtccaagacctggttgaggatggccatctgcttggcgatggccatctcgacctcgccctcgtcctcgtcctccccgacgccgccgcggcggcggagctcgccggcgacgtcgtccatgaacctcgcggcctcctcgtcggcggccgcctgggagccgatgagcgcgaggtcgacgagccaggcggcgcagtacgacaccatcatggcggcgccgaagcagaggaacccgtcttccattgccctagctaattactccagctatatatctgccttttcttttttcctttctgtgtgaaaaaaaataaaagctagtactagtaattaacaataattgggtataaggcgccgtatgtaacaccggcctccctcagcttcacggtgcgtacgtgtgcatgacacgtacgtacgtttatacggaacccgtaggatgtacgtatgtacgactcatggaattaggtaacaaaccctaaagtaaatactagagggccctttaaatcaaaagaattatgaaggaatttcatagaattgaaatcctgtaggaaattttccaacgtagtcctttgatttaaaggattgaagttttccaaatcttacaaaattcctatggaatggcttattgcatataggttttggaggaaacttagccggaggtccaacctcttggtaagggcctccttgaatcacagaaatgaaaaaacggaggaataggaaaaacataggattctgacaggaatgcaagtgtaaaacagaggattgcaaaacacaggaaaagcataggaatgaccgtttgattggaccacaggaaaaacacaggaatttgaggagagataaagactcttctatgaggttctacctcttgttaaaattcctccaaaacttatataggaagatcaggcatctcataggaattttataggattccatagggttcattcctttattcaaagggctttgtaggaaaaattcctacaggaataaaattcctatgaatttcctttgaattaaaggggcccaaatcgtaggaatgaaaaaacggaggaataggaaaaacataggattctggcaggaatgtaagtgtaaaacagaggattgcgaaacacagaaaaaacataggaatgatcatttgattggaccacagaaaaaacacaggaatcggatgagagagatagactcaaaggatttttaccaagaggttagacctcttgctaaatttcctccaaaacctatatgcaataaaccattccataggaattttataggaataggaaaagttcaatcctttgaatcaaagggctacataggaaaatttcgtataggatttcaatcctatgaaattccttcataattcctttgattcaaaggggccctaagaatccttttgagtctatctctctcatccgattcctgtgtttttcttttggtccaatcaaacgatcattcctatgttttttttgtgttttacaattctctgttttacgcttatattcttgtcaaaatcatatgtttttcatattcctctgttttttcattcctacgattctaaggggccctctacttatgtttcccttgcccaagaaacaaagggtctaaaaatttaggtaccgtttgacatgatttcagattaaacgcggacgctcacacatacacacgcgtgcacatgtactttatccagtattatccatatacacacctccgagatattgtgccagcatatccgattagatcaccattgacatatcttgacattgtggtggcgtgagttgcgaacttacaacgattgtggtgacgtgatagtgtgaggtgtggacttacaacggacatgcagtatgagggctagttcggtgatgggggtggggggggggggggttattacttattaggtgatgaggaaggcatacaagaaagacggattatgtctttagataaggtattggcaggaaacaatatgtttgttgtatgatattgttattagttaaaaaaagtatttgcaaaagaacaacagttttttttattaacttttaaaattttactaactgttacaaagttttatatgtaaaataacttgttttccttctttttttactcttttcagaatttgatctgttgcaaatgaccattgggcctaagcagcacaaccagcccattaagcctaccaacatgagatgaatttttttatttataattttttttattaaaagttttacaaaaataattttccattttgaaaattgacggaagtagtcgcctaccgccctctgggaaaaatcgccctctcagagggcggcgaaaatgacgtggcagacggccgttcgctctcgggcgacggccgtcaacgaaatttgcaggcggcccccttgccgtcctccgctagggcgattttatactgtgcggggggccgcatgcaaatgggcggcgagggggggcatggaattttgcaggcggcccccttgccgccctccgcttgggcgattttgtactgtggggggggccgcctgcaaatgggcggcgagggggcatggaattttgcaggcggcccccttgccgccctccgcgagggcgatttttgcctctccccctataaagcccagtccctcctctgtgaaatttcattatattcactaaaaatcaaaaaaaacgaaagagagagaggggagggcagcagaaggggagcggcgaagccctgctggttcgctcaattcatcacgggtatgctcccatacatcttttgcatttgtactaatatgttatgtttgagtatatatgttgcgttttagttttagttccatatattttagcacatctgtaacacacagcacatatgtgtagatccagagcatagaatataatagtatgaattgagacatagacagtagtgttaattataagatgtagtttagtttgatctggagaatgtaacgtaattttagaaatttagagaacaatattgtagagaatgtaacttagggcgtagtacagaaatgcgaggttaacgcagttattgttttcatcaggcacaatgtcaagtaaggtcacatttcagatagttcacggtgaaggaaatattagatttgatccagatggtgttgatctgtcagattttgtaatgacatctaagggcatcgataggcctgcggagagaacatttcagtcaatttatagttggttgttgagaggatttagaatagaccaagaagtctacacaatgtcagtgtcagttgtagtgagtcgtgcaacagaaggttatttttgggaactaatgccgatggacagcactgatgcttggagacggtatgtggaaatggcttttgaacggtcatggcccctcgttatatttgtgtcggtacaagagaaagatataaatgtttcaatgcaaaccgaagatgtagagggtcctatcaatgcaggggatgttgttggaccatcgatgcaaaatgaggaaaatcaaccaagggaggagcaggctatgggcatggcggatgagggggagagagtcggtataattgttgatgaaatggagagggaagattcggataatgaggaagtggatgacgacgcatcatccgatgaggaaggtgatgtaatggccactgattgggcaaatgaggacttctctggacttgttatatcagagggtgatcatgtaccctgggagtataaggagaacgaggtaattgagggtgcaaggtatgctcataaggatgagatgaaggaggcggtgaagcattgggcagtttccttgcagagagagtttagggtggtcaagtcaacaaattatgtgtatgaagtgaggtgcatgaaggaagattgtccgtggcgtgtccatgcatataagggtaaatggaatgattattggaaagttagcattgtgaccgagcacaagtgctacttacaaggggtggagaagtatcaccgaaacatcacttcagcttttgtggcaagtgagatgtacagcagtgttgttggtaacattggctttgaaccaaaatcaattattaggcacatcgagaacaaattcaagtacaccataagctatgcaaaggcctggagagccaaacaaaatatcattgagatgaggtatggcacatttgaagcttcttatgataatttgcctcgtttgttagccaccattgcccagaggaataataatacgtactatgacctacatacatttacatcggttgatgatcgaacaaagagtgtgctgcaaagagcctttttctcattgggtgcttgcatcaatgcttttgtgcattgtcgacctgttctatgcatagatggaacttttatgacaggtaaataccgaggtcagatattgacagcaattgggtgtgatgggaacaaccaggttctacctatggcttttgcatttgtagagagtgagaacactgaaagctggtactggttcctagagagagtgcacattgcagtggtgcgtatgaggcccaacgtttgccttatacatgatcgtcatgcgggtatgttgcgggctattgactacttgcagaacggttgggatgagaagggacttccagctaagtggcctgatgttcggagtcggtggtgcatgcgtcacatgggtgcaaatttctacaagcaattcaagaacaaacatcttatggagctctttaagaggctctgtgcacagaaccaagagaagaaatttaatgagttgtgggacaagttggatgagttgacaacgaagcaaacagatgagcaatctcgcagatcactagttgaaggtgacgagcctcccatacctcttggtgcattacatgatgacccaccaacaatgagaaggaggtcagggtcgtccatcagaaatttcactcagtggattgagaatgagcctaaggagaagtggtctctattgttcgacaccgatggatctcggtatggcataatgacaaccaatttggcagaggtgtacaactgggtaatgcgaggagttcgggtacttccattggttgctattgttgaattcatcattcacggcacgcaagcgtactttagggatcgatacaagaaaattcgtccgtccatggccgataacaacatagtgtttggcaacgtagtgacaaagtacatggaagataaaatcaaaaaggcacggagacatcgagttgttgctcaaggcacacaagtgcatcggtatgaaataatgtgtgttgataggagcaggcgtggtatctatcgcaagcaagccgtgcaggaatgtgtcttgaaggcggatggtggatgtacctgcagttgtatgaagccgaagcttcatcaccttccttgctcatacgttcttgctgctgccggtgattgtggcatatctcccaatgtgtacgtctcaaattatttcaggaaagaagcaatctttcatacatggagtgaggagatatatgggttcgggatctcaggatcttacacaacgctgagtgcccaagttttttatattccagatccatctaagttaagggtgacaaagggtcgacgccaaactagacgcatcagaaatgatatggatgagtcagaagcaggtgggaggactttacgctgcagcaagtgtgatctgcgcggccatacttacaagaaatgcccgaagaatgcagaagttccaagcggcgcagatgctagtccatctggacaggcaagtgatggtaggcgaccacctggtgaaggaacaacaagcaggcgcgcaagaccaaggcgtcgtcgcgcagcaggcgattccatggtgtaacaatgctttcgatttaggaaataaaatgctgttgtgatgtaatgagtgttcggactaaatacttctatcgtgtaatttcaattcaatgttgttgtaatgagtacctccgactattgttgtactagtagtattgcgaattattcggtgttgtatcataatgttatcgtgatgagtgttcggactaaacacttttgtttgtttgtactcttgtttaatatgtgttagtaattcgcttatgaacatttattacttatgttgaactaattatttatatgtttctgatcaacctatttgatgcaggtatggcgtacgacacaccggcgctgtttaaccgtgggattgacaggaaccaccgctcgttcctgtcagcagtcgagggtgcacagctcggcaccttccgtccacgcacgtcgcgcgagtggttgcgtgtcgacccccgtcacgttccttggtacgcgtatgttcacatttcaactcaactttgctttgtgttgtacttatgtttgaagtttgctctatacaggttgcgtgcggcaggccttctaccactttgtaggcttgttgaggcggcggcggacgaccgtgacccagcgaagcggtgggatgcagaccggtcactccttgccgctcttatagaccgctggagacctgagacgcacacgttccaccttccctgtggggagatggctccgacactgcaggacgtgtcgtacctgctcgggctaccgctggcgggagcagcagttggtcccgtggacggtgtttttgggtggaaggaggatatcactgcgcgcttcgagcaggtgatgcgccttccacacctaggaccgaccaccacccttcctccgtactctacagtcgggcctagcaaggcttggttgctccagttcactgtaagtaaataagttgttattatcatacgtgcttatttgcgaccgaatgagtgttttgtactaacatttcattcttaattgtaggcggaccttctgcaccctgacgctgatgattactcggtccgacgctcccttgaggcgtacctgttgtggttgttcgggtgggtgatgttcactagcacccacgggcacgctgtggacttccggctggtccactacgcacggtccatcgcggatgctcagccacaggacgtgccgcagtggagctggggttctgccgtgctagcagccacgtaccgtgccctctgtgaggcgtgcacgaagactgacgcgggagcgatcatcgctggctgccctatgttgcttcagctttgggcagccgagaggtttgccataggtcgaccagtggtggacagcgcaccctacggggttggtcgcagcgcgcagtggccagaggacggacccacgatggagacttactggtgtcgacgtggggttagtgcaacttcgctgcgttataagtttatcagtcgtctttttttttcttcacataacatgtctaattccgatcatgtttattgcaacgtcgttacgctcacgtccaggtgagacgtggttacccggacttcgtgttcgagtttgaccgtctccagccgagcgacgtcatctgggagccgtacacagaagaggccgtcgctgcgagagcaccgctaggactttcgtccttgtgcacacgcgaccaggcttactggctcaccatcctgccaatggtgttcgacattttcgttgagcctcactgcccgcagcgtgtgatgagacagttcggacttaggcaggtgtttccgggcaacgtgcagccgaccgtcctccctgccgaccactcgtgagttcggattgttcatttctaaatttttatgataattacttcatcgagccatataatttacctctcttcacaggttgactcgacggggacagctagcaggcgcactttgggctccatgtgtacagcagtacgttgacgactgggtgttagctacagaggaggtgatcaacgagctcttcccacacacggaggagaactaccgtgactaccttcgctggtaccttcctcgcactcgtgcgcgtgtgaccttcactccagacgccccagagccgcacgttgccgctgtcacggacgcgtatcccacgcaccgtgaccgagactacttcgtggcggtacgtccaatttgtattacttcttacaattatttcatttatcttgcataatataggacaactactgaatttgttatttccatcttgcataggctgatgccgcacgggatatcagtgccgatatcaccgcagtccaagtgaggttgaacagaggtttgcacttgactgacgttgagcagagggtgaccttcgaccggatgcaggagaagatgcgtgcggtcatgcgcgtcttctcctgtcgcagcgccgtggacgtcgtacctccagctggtccggtacaaccacggcctcgtgcgcctaccgtcggagcaggacctcgacctacggcacctatttcgcacggtactgctcagcccagaggtttcttaagttttgtttctgtttttgtacgaaaacatcaccccgtcgtaacttgatgatccatcctcgcaggacctcgtttgccttcgagcgcccctagcttcggatcagtgcgacctacagcaccggtttcgcacggtacagttcagcccagatattacttcatttttgtttcagcttttgcacgattatgtcaccatgttttaactgcacgtttcctcatcgcaggacctcgtctgccttcgagcgcgttcgcaggcacgaccggcgcttccacgagctccgcaggggcgttcgccacctcttcgggcgcgttcgccagctcttcctctcacggagcgtcgatccctcgcccacacggtactttactttttattaatactgttaaatacctgtacgaaactgatggtccttgtccagcaggatttgcagccgggatcttcggtactggggcctcttcgtctcacgccggtaggactggtcctactagccagttctacgacgacgacttgcacggtgcagaccaccacgacgtactaggctcctctcagcttggaggagctccagaggcgcacactcaggagcagccagaggtcacacctgtacaggcaggacgggttggccgtgccgtacccccggaccgactcacgtactcccacgggcacattagggcgcagggtaggagggacaggggtaagaggcctcgtcagtagtgttctacctcttcagtccttatgtgaccgtttcttttggcttacaaacttgtaaagcagtactacttttgctattactactggagtactacttgtgtttgtctcgtctacatagttcttttaattcatatggtgctagaacaacttatgctcacgacaacacactttcggcgctgcacggtagtgtcagatccagtagcgcgcacagtccacaacagcacacatgaaaagcggcagctcgagttatcactatcaactttcggcgctgcctgtttacataaagtgaatcacgcccacgcgtgatcgtcttgtcacatctaatgaataatgtatctcattgagttcacatatattgcagtgaaaacgacgctatataattgacaatctgaaggcaacctcttcatattttctttcccactagcacacaacacacgaaaatgaaagcctattcattggtaatacgtaatctagatttgagattatgtagaacattcttcactacaattttacattttggcagcaaaccaaatatgatcaaatgcaattttaccttaccaaatatttggtcgtgaagaaaaatttggcactaacaatccaaatatgccctaaaaattaataaaatatttgtacggtaacaaaatatttgtacggtaacaatccaaatatgccctaaaaaataataaaattgtattttaccagtcttggagattttaatcttgtatagttttcaatataaaaagatttgataactattgatatttatacaaaaatatagagcacagtataaaatcgcccgagcggagggcggcaagggggccgcctgcaaaattccatgccccctcgccgcccatttgcaggcggccccccgcacagtacaaaatcgccctcgcggagggcggcaagggggccgcctgcaaaattccatgccccccctcgccgcctatttgcaggcggccccccgcacagtacaaaatcgccctcgcggaaggcggcaaggggggccgcctacaaatttcgttgacggccgtcgcccgaaagcgaacggccgtctgccacgtcattttcgccgccctctgggagggcagggcggtaggcgactacttccgttaatttttaaaatgaaaaattatttttgtaaaacttttaataaaaaaaattaaaaataaaaaaaaattcgacatgagatgtccagagccctttatctccctctctcgtctcactctccataacgccaccgctttgactgctgtcgatacgtttcaatgtctcggctttgactgccacttgagctcgggcaatcttcatgccctgtttagatgggactaacactaagtccctatcacatcggatgtttaaatattaattataaatattaaacgtagattattaataaaacccatccataatcttggactaattcacgagacgaatctattgagcctaactaattcatgattagcctatgtgatgctacagtaaacattctctaattatagattaattaggcttaaaaaatttgtctcgtgaattagctttcatttatgtaattagttttataagtagtctatatttaatactctaaattagtgtctaaagacagagactaaagttaagtccctggattcaaacaccacctgaaaccacacactttttactgccatcccccctagtgtgcagtcgctggcgttgcccatctcgatctatcttccccaagcttcaagtgtcaaatccagacaacgaccgacgacatcaaccttcatgtgtgtcgggaagccagggatccggaccgggctttggtaagcttccctccatggcttgtcaattcacggcgataaggtgttgcctgttgtcatctgtccatctctagttctattgtgcgaggcggatagcaatgtcagagagataggatgttcacggtgtttttttttttccagagtattatttgtcaacttcctagctaatttttttttcttgggaagttgttctggcttgtcccgagtcctgacctcactctttagtctaggtgtttttagtgagatgtggatttgacggtgattttcgggaaggctcttgttgacccatcttttttttttttaatttgcatgaccatatccaacggtatatattgaatttgtgttgcatgtgacgagtgacgactattattcaacatgacgtgggttattctagaattatcacatgattcacttttcactttgatagttggggctgttgccagtcaaggctgcagctacggctgcacattgcttctgccgtacttgcttgactgtttctgttggctgcagcgctattgttgaccaggcaatcgaactaccaccatcttgacatacctcttcaacttacttctctggttctctagtatctagtatcactctatagccatatcttaatttgtacaccacccctacagtacaccttaacaactctttttttataactataccataacaacttgcacctgtgttcgttccagtgacattgggtgagaaagctcctcgttttacgcgcgcacgcttctcaaactactaaacggtgcgttttttaaaaaaatttctataggaaagttgctttaaaaaatcatattaatccatttttgcaatttaaaatagttaatactcaattaataatatgctaatggcccacctcgttttgcgtatcttctcaatctctccaatccccttctcctcaaacacaccctaagtagcctttctactattccctataataatttctaaaaagaaaaataaacagaacaaaccaagattctatcaagtcacatcttgctttttagacaaaagtgaactcacatctatctagtctgatttaaccaaccatatgaaatttttttcacaaattaaaattccatctgtcgaccacataaaatgtagccaagtcttagacgcatgacatatcatattcggtagatgtatttttcttataacggggatgcatatacacatatagagatatagtttgatttatcaaggtggagcatatcaatttgatactaattcagtagaatttagtcgattctgaatttgcccttcctttcctactactactcgtggagaaatttgcatatgtgccatccttaaaaactggcttcactagaatactatcgttaaaatggcattcgcctcttaagctgtgggaattcgcaacaatgccattttctctatttgttgcacttgtaaatcattttccatccatttatttttttctcggacctttttgtccctggttgcaccttctctcttctcctctcatcctttcttctctcttttctctcctccacacgcagggagaaggcgaggtgacggcggcgcgccgcgagccgaggctgtgcgccggcagagagagggcaaggtggtggcgacgacggggaggtaagaggatgctcaaagctcgcacgtccatcccccaccggatctgcctgccacagcccaagcaccaccgccactcctcgtcgttgctcgagctccactaccaggaccaccgccttccttcctctgcgcgccggcaactcctcttccctctacgatgccagtggacagcgccgccgcctccctccttccgcacgcctgccgcagtcgccgccggcccatcgccgcctccttccttcctccttccgcgctagcgccggtgccgcctccctccttccacgcgcttgcaccgccaggttcgcttcctggtttgctgcgagtggaggagagagaatagaggagaagagtgaagatgcagccggaggcaaaaaggtctgaaaaaattaaatggatgaaaaatgacttataagtgtataagaaatagcgaaaataatattataacgaatgctcacagcttaaaagtaggataaaagcgaatcccattttaacgatgaacatcctaacaaagccagttgttaaggatggctaatgtgcaaatttcttctcctcgtgcaattcgtatctcatttccactcgtgccattttcgctcccaagtcccaaaccacggcgacccgccgccatccatccccctaaacccctagctagggtttccaaccaccatggcgaccacgccggcggcagcggcagcggcggcggcggcggggggcgcggcgatcctcgacactctcggggacttcacctcgcgggagaactgggacaagttcttcgcgctccgcggcaccggcgacagcttcgagtggtacgcggagtgggacgacctccgcgccccgctcctctccctcctccatggcggcggcggcgcggagggcggaggcaaggccccggagatcctggtgcccgggtgcgggagctcggtgctctcggagaggctctacgacgccgggttccgccgcgtcaccaacgtcgacttctcccgcgtcctcgtcgccgacatgctccgccgccacgcccgcgcgcgcccggagatgcgctggcgcgtcatggacatgaccgacatgcaggtacggccacgaccccccgtgcgcttcatccgcttcggtgtatttgttggctgctttggagctaggattttcgtagtgctgttgcggtgtgtgtgggggcgaatctatacggaattgcggctctgcttggaattgattttgtactggaccacgcaattaggcattagccaccgaattgaggataaatcggcaccgaccatttttggtactcgttgtctttagtggaatggttaactgaatttcgtatctgatggctagaatggaggctcttgctaatgccatgctcttggaggttgatgagtaggcaatgctgagaattcaagcatatttggttgattgtgaatgcttctgaacatattgtcatgcaaatcatctaaatgaatgaacgcatgtggtgtgttattttcacccttgggcagcttgcaccagatgctcatgattttagtttgtcgcgtgtgtgacatgatggatcaagcaaattacagaagggggcaactcatttggttgaaaccctgaatgagcctagtggaataattgtggggcttttatgttttatgcttcttacaatggtagcgaactgttacattctcaatgttttctgtacacaatacacttttaaagagttcttttcattttcccttgccattttttaagaattagagggttcttcacttcttctgactgagtgtttttttttttgttttctgtttgtccatcaacctgtaactcgatatcttattgaacctacctgatgcatcaaattgccagttcacagatggatcatttgatgtcatacttgataagggtggactggatgctcttatggagccagaggctggcacaaaactagggatgaaatatctaaatgaggtattaagtgtaacatgtttccaaatttaaatactgatgtttgatgttgtaatagaaataccattttgaattttaaatggtgcatgttagtgttgcattcttgattttttatatatctaatggaatttatggaaatgttttgttctttatgttatgtctgacttagtaagcgcctcttgcttgtcttacaggcaaagagagttttgaaatcaggagggaaatttgcttgccttacccttgcagaatcccatgtcctaggtgagcttctgtcaattattgagagaactgattacctgacaattgaagtcttttcctgttacatagttacacttaggacctccaatatgtcttacagttttgaagtattctagtgaatatactttcaaattttcagctatacttcttttgttttgcttttagttgaccaaagatatcgagtattgatttttcatgtttccatagaaactttgatcattgcttttatgactgcatcaatattcttcttatacatcttagtgactttgactattcttaataaatatacttccaatgtttccagggaagctttaataactatattagcgtgaaactataagttaaaaaaaaaaactttatgattatgaatgtgtttttaacaatagaaataatggtgttttcttctcttctttcttggaaatcaatgatgtactttttgcagataatctgcatactttcatagatattgtggtctgaatcaaaatttcaaaactgttccacaaatgatataaataaccaatttaatatctcggaggttattttcgtaattgactaacagtgttttgctcctttctctcctgcagctctgcttttgtctgagttcaggtttggatgggatatgagcattcaagctataggtaatgaatcctctaagtctgccttccagactttcatggtggtcatggtaaaaggaaagatgggtgtagtacacccaatacaatcactattagaccaatctggtaaattctgtaacatgaaacaggtactgctatattcttctgatggaaaacaaataattaattcctgtcggtactcttactcttatattttatattggtgctgcaggcaaatgatgtgattcattctcttgagaaggaaaacaccatccgggagtcatacagttctggtgttgatattactttgtcattacgcgatcttcagttaggagctgtaggagatctgaaggtgattatcccaggacgacgaaggatgttcattcttggtgatcagggaaattcactttattgctataaggctgttctcttggatgccagaaagcgaactgagacctttgtatatcattgtggagtttttattgtgcctaaggtcagctatatactgtcaatatgcagctttgatttttgttgcagtacttactgttatttaattttactcaatcccctactgatcattttcttgatctactatgtcgtataagaaacaagcatatgataaaatgatcagaaaatatacttgaaaatcaaattacactagatggaatagaaaactgtgttgatcaatgttatttagggtccacatgtatccatgttgttcacttcctataccaatttcaatgcatatatcaaatactacatcattttcaaaatatatgacgccgttgacttttctcataacatttgttttattaaaaaagttagtataaatatgtaatactataagttaagattatagtctctttgatgataaaacaggtcacaacaaaataaatgatacttatataattttttgaataagacgaatggtcaaatgtcatgcgaaaagtcaacgacatagtacattttgggatggaaggagtattgtgttacttttttaagcacatgcctgttgcccgctgaaatgtgattctgtattgcatacttggtgagggatgcatccagtttattcaaattgtatgaaacacaaatcttgaggccacccaatctatttccttcttggcatgatttatctttttatgtggttttgacctgccgtaccttacattgaagtattacgagggagatggtaaaccttcatgcaaatatgttaattgtgcatgttgcaatggaaagattatgtggtgcaacagaagtttaggatttgggacaagtaacatcactgcaagataataattaacttactagtacacaatatggtaaatagtattaaaagaggtgtgcgctgcatattatagggaaattgtaacggaagaaataaattatacatagctgaatagtatggagatgtgcgcatagtggggatatagctgagagtggggatagggtaatcactcctgtagtcctgctcccatccccatttatagtggaaggtatgggacgcacttcaaatttgtaaatttgagtcttgtataggcttaaagtctttctctatctctatttcaccgttttgttcctctgctttatgtctattgtggttctgcatcaaaaggtttgctatgtgggtactagctaggcttcttttgacaaccagagttgctgagtagccctctagtatttgtgttctcttccattaagctatatgaaagccaaaacagttactctggcactcatgattgctaatgaacataatttgctttcaggttcgagcacatgaatggctttttgcttcagaagaaggacagtggcatgttgttgaaagtgcaaaggctgctcgtctaattatggtacaactgtgatggatgcaagcctagtgtgattataatttgatatttgggatcactttacagcattttcattgcttatatttgtgccatgaacttacctttaccttaggtattcttggatagcagacatgcaaatgctgacatggatgttatcaaggtgattgtttgcaaattaggatgttgtgcaaattccacaggctaatacacactatcctaatgttattgttttgcttctttttttttcagaatgatttatctccccttgttaaggatctggaacctggaaatcctgaagaggaagctcgtataccgtaggtgtcaatgcattctatttgaaattttgtcagcatttttttcctagaattcgtgtttccatgttaaggaaataaaaatgtcaatttctttggaagtacaactgtaggaaaaggatcctaatgaaaatgtcaaattattaagacaaactttacagtttggtagttagtaaaagaggggtttatcagtgcccacgattatagtaaggctttgcaattggtccagcatgaaaactcaatctagttctaatagaaattcgctgatgccaaattagtctggtgcacctatcctgtatgtagtcctatttgagacagcatgatcatcaccattattatatctcctggtgctgtttgtttatttcaatgcacattccctggttattatatatattacatccccttat

SEQ ID NO: 19528 - DNA, 14145 bp, Oryza sativa
tcgtctgggcctccgtcgtgccaatcgttgtcgtcgccggacttggaggtttcgccgtactcaagtaatcaatggtgcagatgagttacgttgggtgcctgcttgttcttgccagtttaatctgcagtcgtttgcttagtgccagtaatgagtgtgtttttgtagcggtttgatatcaaattactgttttatttctgcactgtatatgctgtttctgaattaatttacctatcaatttgtgattcgagtgtacattgatcaaaacagagctactgatttttgtccttgacgggcgacaagctcgccggaaaacgcggttgctgcgaagtcgctgaacccggtgtctctcaccacctcgtgttctcgtcgtcgtttgcgcgcggcggagctccggcgagctccggaagcgggggagatgacatctttgttttttatgtgaaccgttggatgtgatttcatcggcccagatggagacggataagctgtacaaatggcagggcacgttaccactggcccagaaaaatacggccggtctggtttagtaggccgaggaaaagattggcccattatgattggcagcgatccatatcaccaattcattcttgtcattctggcccaacttgctctttggcgcatgtaattatcagactattcaaatttgttgttttttttatattattaatacatttaaaaaagactattcaaatatatagtattaggttatgtcccattgaatatttggttgctatatttttgaacggagagattagcctttacgctattgccaaaatttgaatttttaaaaaaataagtttgatgtttttctcatcgtaatttattttacaatttaggttttaaaacactaaaaacatattgtcagggttacgggttaggtataccctttgcccttcgatatacgttacatattgatatggcatacccacgcgcatacggatatttcctgtatattctaaggaaacctttcacggaatctatagatgggaagaatcctactcgggcagaactgggtcgttggcgtatcgtatagggtctgatacctccgagttctatgaggagacctccacatctgcgatataaaaggggccccccgagagggggtttagacatcgaatctcaaagccaacacaacctccacagcctacgaagccggagcttacgaggagccaactcatcgagagctagtcgaatcaactcgactacaatctcgccggatccgacaagttcccttgttctctttgtaacctgtgttttctaccatataatcccacatcaactggattagggctattacctatcaaggggcctgaactagtataattcttatcttttgtttgcttgatgtcgtactacgtagatccttgtaccaacgtaccctaataccttctatatccggtctacgggtatcacccgtcgacagtggcgcgccaggtagggggccttggtactcaaggttctactactatgtcatccagcttcgttgacaacaacgtcagcaccagcctcagccaagtactccctgcttcaacaatgctggtatggactcaagtcggcgaaatcatcttcccgatttacaccacgacgccgatctcaaccggtcctccaatgaccggagacgagaacgcagtggctacgaaccaaggcgattccatgtcgaaaaatcctcccgtcgagacggagaacggaatattgacgacatccaagctcaagaaggattctgatacggccaaaccttgtccttccgatatgaacacgagccgacaaagatgacttccgaagccacaaggtcttggtgtcctatccacaaaactaagaaacacaccctgcaagattgctgggttttcctcaacgtccgtgctgaaattcgtgcctgcaaagaacgtggaattcagcgtacttctctaactcgggatgtctattgtcctattcacaagacaaagaatcacgacctctcgagctgcaaagtctttctcggcgccatgaaagctcagtctcctaagtcatatatccccatcagggataacagcaaggaacaaggagcgactccaacttcagatcgattcgttggggtaatcgatatcgatcctcacgaaccatcggtcttacatctcctcgaggactatgggtcatcgacaacgagcgcgccgcgggaggtattggctatcgatgacgttggcacatcagcgcacgccaacacagaagcggggaatcaatcgactactccagcccagcacatcagggttgttcaagcgatactgagggaaactccctacgatcccgttctgaacgttgacctcgagcgttggacagaacgactacgggaatcggtgactaacctcagcaacgcgtttgaagaagccgctaccgcagcacaccaggagcagccaccaactagcaaggccaatggtgaagatccggaacggagggaatcacctcaacaagctacccctccacctcgcggcactggcgatcttccagatcaaatcaacggccaccgagaagcacgacgcacacgagacaacgtgaatcgctctcggcgtcatgtctcttcacggcgccatgacggcgccatgataacggaaatcgaggaaattgctcaaacgaggaccgggaccatgacaaccaccacgatcacaacgatcgagaacgacgggtgccagacaatactggtcatggccgccgccgtatcgacgacgacgatggagattggcgccgagacaacagtggaagacgacgacaggattcccgagatccaggccgtcatcctcgtaatcgtacgccggaaccaagtgacccatcgtcatcgtcatcatccgcgtcctcctcattgtcagacagacatccacgaaggacacacgaccgccggcaacccaccgcccccaacgctgggagtagggctttcggtcgttccctacgttatgtccgatggcctgagagattccgacccggagcaatagaaaagtatgatgggagcactgacccagaggagttccttcaagtctactccacagtactctatgctgccggagcagacaacaacgcgttagcgaactatttaccaactgcgttgaagggttctgcacgttcatggctgatgcatcttcctccctactcaatcccttcatgggcagacctgtggcaacaattcatcgccaatttccaagtaacatacaagcgccacgcgatcgaagacgacctacacgcgttgacacagaactcgggtgaatcattgagggaatatgttcgacgtttcaacgagtgcagaaacacaattcctgaaatcaccgatgcttctgtaattcgcgccttcaaatccggtgtcagagatcgctacactacccaggagttggcgacaagacgcatcacaaccactcggagattattcgagatcgttgagcgatgcgcccacgctgatgatgcgctaagacgcaagaacgataggctgaagaccgggggagagaagaaaccagccacggacacatctgagtcaagcaagaagaaaaatcgcaaaaacgggaaaaggaaagctcaagcggaagtcctcgcagcagaatacgcgaaccctcccaaacgcccagacccacaaagcagcgacacaaagaaatcatggtgccccatacacaagacggacagacattctctggaagattgccttgttttcaaaaagtcgctcgagaagcacatggcatttgaaaaaggcaagcgagtacgcgttgtcgagacgaacgaagagacggctcctcacgaatcggactcagcgtatctagactccgacctccacatctcacacatcttcggcggttccacaacgtactcctccaagcgagaatacaagaaagtggaacgtgaagtctgctcgacatggcagggggctgcacccaagatgaagtggtctgagtagaagatagagttctcggaagaagaccaccccaagaccgccgttatcccaggacgatatccgatcgtggtcgaacccactattcggaacatcaaggtagcgcgagttctcattgacggtggtagctcaatcaatcttcttttcgccagcactttggacgcgatgggaattccgcaaaacgagttgacaccaactgatcaacccttccatggaattactccccaatcatcgtccagacctttgggcaagattacgttgcccgtgactttcggtcaagccaacaacttccgaacaaaacagatcacctttgatgttgctgaattcgatacagcttacaacgccatcatcgggagaactgcacttgcgaagttcatggccgcatctcactacgcatatcaagtgcttaagatgccgagaccgaagggaacaatcactattcaggggaacgcaaagctggcggtgcaatgcgaaaagcaaagcctcgacatggtcgagcaaacgcccagcccacccgccacgactgagccacccaagaaagtgaccaagacaaacaagacgccgaaattagacagcgccatcaagattgttccactctccagtgccaaccccgacaagaccgtcaagatcggggcgacactaaacgagaaataggaactcgcgctcatcaccttcctccgcgacaatgccgacgtgttcgcttggcaactgtccgacatgccgggggtccccagggaggtgattgagcacaaactcatggtgcgacccgatgccaagccagtaaagcaaagattgcggagatttgcaccagaccggaaacaagccatacgagaagagctcgacaaacttctcaaagctggcttcatcagagaagtacttcatcccgagtggctagccaatccagtcatgttgcggaagtccaacggaaaatggagaatgtgcgtcgacttcaccgacctcaacaaggcgtgccccaaggatcactttccacttcctcgaatagaccaactggtggattcaacagccggttgcgagttattgagcttcctcgacgcttactctggctaccaccaaatcagcatggcaaaagaggacgaagagaagacagcattcatcacgccgttcagggtattttgctatgttaagatgccgttcggactgataacagctgggaatactttccagcgcacggtccagggcgcacttagcaaccagcttggcaacaatgtcgaggcttacgtcgacgacatcgttgtcaaaaccaagacaggcgactcattgattgacgatctgtgggaaacgttcgacaacctccgacgatatcgcctcatgctcaatcctgagaagtgcacgttcggagtaccgtcgggcaggctgctcggattccttgtctctggcagaggaatagaagcaaaccccgagaagatcaaggcaatcgagaacatgaagtcgcctacaagactcaaggaggtacaaaagctaaccggatgcatggcagcactaagcagattcgtcgctaggatgggagaacgaggacaacctttcttcgctctgttgaagaaacaagacaaatttgtatggacacaggaagccgaagaagcattcattgcactcaagcgctacctatcaaacccccccgtacttgttgctcccccaacctaatgaagaattattcctctatattgccgccacgccacactccgttagcactgtcattgttgtcgagagagagaaagtacagcgactagtttattacgtcagcgaagctctccacgacgcaaagacaagatacccacaaatccaaaagctgctttacgcagttatcatgacatcaaggaagctacgccactattttcaagcccacagagtcacagttgtctcctctttccctcttggtgaagttgtgagaaacaaagacgttgtcggccgcattgcgaaatgggtagtcgagctaagccagtttgatgtccactttgtgccacgaacagccatcaagtcctaggtactcgccgacttcgttgccgatcggactatgccagataacaaatcagacaaccaaggcgacaatgcaacatggacaatggcgttcgatggcgcactcaacagccaaggagcaggggtaggatttatcttgacgtctccctccggagatcaattcaagcacgcaatccacctcaacttcagggcgaccaataacactgcagaaggactactcgccggggtacgagctgcagctacacttggggccaagcgactaatcgtcaaaggggactccgaactagtcgcgaaccaggtacacaaagattataaatgctctaaccctgagttatccaagtatctcgcaaaagtcaggaagctagagaaaaagttcgatgggatcgaggtccgacacgtctaccgcaaggacaacgtcgagccagacgacctagcacgacgtgcgtccagacgagaatcgctcgagcctggcacttttctcgatatcctgacgaagtcatcggtgaaagaggttagcggtgaagtcagcccgaacacccccgacattagctcggaggtcaccgaggcagaacgcgccgttgccgacatctaaaccacagacgactggcgcatcccactaatcaaattcatcagcagcgaggagttgcccgaggacgacacagtggccgagaaaataacccgtaaagcaaagatctactgtatggtcggcaatgatttatacaagaaagcgccaaacagggtacttctcaaatgcgtctcgaccgacgacggcagacacctcctcctcgacatacatgaaggcatatgtgggtcacacgccgccggtcggacattggtcggcaaagcttttcgacaaggctttttctggccaaccgcccttaaaaatgcatgcgacatggtccagcgatgtgaagcctgtcaattccacagtaaacacacaaagctacccgcgcaagcactccagactatccctctgacttggccattctcgtgctgggggctagatatacttgggccattcccacgaggacagggcggctacagattcctattcgtggcgatcgacaaattcaccaaatggatcgaagcagtactcacgggggaaatcaaggccgacaacgccatcaaattcatcaaagggatattttgcagatacggactaccacaccgcatcataactgataacggctctcagttcatcagcgccgatttccaggactactgcatcgggctgggggtcaaaatatgcttcgcctcggtctctcaccctcaaagcaacggacaagttgagagggcaaacggcatagtactacaagcgatgaaaacccgcgtctacgacaggatcatgtcacacgacaaaaggtgggttgaagaactcccgtcagtactatgggccgtacgcaccacaccgacaacgtctaataaggaaacatccttcttcctcgtgtacggctctgaggccatgctcccaggcgagctacaacatcagagtacacgagtacagaagcactccgacgagaaccaggaggagcagcgagatatcgctgtaaatcttctcgagaagcatcgggaacgagttgccgtccgagcagccagctatcaacagaccctccgccgttatcacgagaagcgcatccgtgcacgcatactttcgatcggcgactatgtcctccgacgagttcaaagccaagcagggcaaaacaaactctcacctaaatgggaaggaccttacacgatcacacaagtcttgcggccaggcgcattcaaaatcgcagacggcgacggtcgcgaattagcaaattcttggaacattgaccaactacgtaaattctttgtatgagtcaatatcattcatacctgtaagcacccttacagtatcaataaaggctatttctaggcccatatcacaatcaacgtgtttcgcccgatgatccctcactctgatgacacctagcgttgaaacatgtccttatgtccctttacgccgtctcgacaaggcctccgaggaacctaagggatcttcggctggggacgcccagagccgataaggccttgtcagatcctgtagagacgaaagaccatgtaagatctggtcgtgtaagagttctcaccgtgcgtattaaccacgccgtgaaatcggaaatcaactttccaacttcacggctgggggctaggatcagagcttattcaaccaaggcaggtcaaaggtccaagagccttatcctccgagaaaactcctccgacgacaaggctaggggctagggagagtgtacgaatcaaacggctgactaaagtcgttaaccgagaacgcactcttacacatgacatccagagtaagagacatttgtcaaagatagatttctttattcacaaaatactccttacagttttttcacaaatctttcgctacattacatcttttcctaagatatttgtcacagggtacgagtactaccaagaaggccaacgccagtccatagactggaagatcttctcggccaacggtgacattgaccttgccagatggtctatctccgccggagtcctccgagaacgagcaaaaccctcacgaagatgttcgaggtccaggtgcgggcgatgatctcgtaagcaagccaacacgtgccccccggcatatcggctcgatcaacgacactcctgtttcaaggcctcgtcgatacgcttgccgattccattgagttgggcacaggccccattaagccacgagatgtacccggctgccgactcctcgggatctccgcggactactcgaagctccctgcatactctggccatggatgtgtagcaactcttcaagtacaagttaaaccatacctcacggcctcggagcgtttccacaacctgctctttcttcacggccagcatggttctctcgagctccgccacttcaaacttcgtcttccagtattggatacgacgatcttggctagcaagggcaccctcgagatctgctaaacgtgataaccactaagtcaagctatacatctctttcgggaacatggctgacctagtcaggtgggcattaaggggtgaagggactactaacctgaggaagtcgttgccatccttccctctatatcaaggggttgatccacatggtcaggcgagacgtgtggttcaaactcgagtaccggaattactgccagtgactcgggctgcccgcgctgctggatatcctcgtcatcaatatctctacagaggacaaaagttcccgaggacagcataccaaagtaagccgggatagtaatcgcacgcacaaaggcggtcagagttcgagttttacacattatctaggaaatacaagaagtcctactcttcaaaaagagggagaacggactcccccagatcaccgacttcttccatcacctccttatgcgtgtcgctagccgctccctggtccaagatctcgcgcagatcgagttcaggacgcgacagccttacacacgcgaggacatgacacgccccggtgtagattccgtttgacgtctcctccgcaatcctggccgcatgcttggagggatttcccccatcgccgtcgccagttccgcgagagaggaggtcagcgaaaactcatcgggattcgccgggatcgtggacgtgacgccgcattccccggtgagctggtgaagcctagtgtaggtgaccctcaacgagccccggatctcagataggttgttcccgagttccgacattcagtcctcgagccccttccattgtcgctcgttgccggccgccaactccctcatcttcgtgaggtcttcacgggcttcagccaactcgcgcaccagtctgtcagcacgcgcgttcgccgtcgccgcttccgacctcgcctccgcaatctcgcggccgatgccgcgagcaccggcttcgaggaggcgccccatctcgacttggagctcctcctaggtgaggactgcagctggcaggtcacgacctgccgcggggcactgactgggccactaggtgtcacctcccggctcccggctacgggcacgacatccgtcgaggccacgacgggcgacgcactagaagctccttcggacttggctcgcgcagcctttgcccgcgcctccctacaggacgactacgagtcagacaacaatcgaataagaggcgcggggattcaagaattcatctacttacttctcgccgattgtcacaatgcgttgtcgtcatggaggtgggggagacgcgtccgaggcctagaagacaatcaacgcaaagtaaggaaaaatccttcttgctgcacgatttaacgataaaataaattaccgagggggtcgacgccttgcgacgttgtccgattacagacgagagtttcctcggctttgtcagaacattgccaccgctagtggtggcagcatcagacgcctccttgacgaccttcactttcagagatgacgccacctgatggtccgcgagcggtccgatgatatcagtcaaaggaagggcctacgctcaatcaagtcataaagtgatttcgaaaggagaatgcgggatgttcatcgaatatacttacgttgatggcttcatcacgttccgccgcccccttttcacaaagggacatagggatgtcactcgccgtggtcgggccactgatcatcacttggccgacgcggcgctccacggtttccccgctcagacctgttaatcgagaaccaaccttcgataagtcaagaggaatgcgaacacaagtatgtcaagataaatgcgagaaagataccccgaggagaaacccgggtcacgtcctctggcccggaatagttataagctggatgggcccgagcctgaagcggttggatccgcctaccaacgaagtctgcaacgacttcatatcccgacaaaccccgtactcagagattgtcgatgatgtcgataaacgactgaagagagggggtcaaggggggctttgcggtccaagacggaatcttgttcggttgatcttcgggaaccacgaagtcagggttcgagtccttgatctcaagataaaaccacctattcctccacttgctgtgagaagaagggcactggaagggaatgtaacgcgacttcaggccatcccgaagtcggaacccgacgcaaccagataccctgttggattccatccaacgcagttcatagtaaaagcgaaaaagatcaaggaaaggctctaccccgatgtaggcctcacaaagatgcacaaagatgctaaggaaggcgatggaattggggttcaaatggagaagagagaggccatagaaattcaaaaccaggagaagaaatttggaaggtggagggagaaaaccgcagagaacataatcttcgatcgcaaccatgcgacccaatatgggctgaggattagtacctcctgcttccctctccatggttccatggccaggaagagcgccatcctcctggagtttcttcaacgttgcactagtggaagctgatttgccgaggtccattgccgatagaaggtcgccgaaaagcgagcctaggttgatgaactagggtttcttgcggcggcagagaaggcaaagagtgcttggaggtggtgtgtgtttaacaggtttggcggacttcaagatggactcccaaaattcctttaaataggcgcactaccgacggtgcgaattccagggaacagagagagatgtccgccggaaatttctggtcccgttacgcgcggcggttttttggacttcagtttaaaattcgctcgtgaccgttgagcttcaaatggtgtgctcgactacggtctatctccgcggttctcgcaccgggaatgacaacagtctcgacacccgaagtcgcaaatggttgcacgagttcattttaagcagaagtcgggggctactgtcagggttacgggttaggcataccctttgcccttcgatatacgttacatatcgatatggcatacccacgcgcatgcggatatttcctgtatattctaaggaaacctttcacggaatctatagatgggaagaatcctactcgggtagaactgggtcgttggcgtatcgtatagggtctgatacctccgagttctatgaggagacctccacatctgtgatataaaaggggcccccggggggggtttagacatcgaatcttagagccaacacaacctccacagcctatgaagccggagcttacgaggagccaagtcatcgagagctagtcgaatcaactcgactacaatctcgccggatccgacaagttcccttgttctctttgtaacctgtgttttctaccatataatcccacatcaactggattagagctattacctatcaaagggcctgaaccagtataattcttgtcttttgtttgcttgatgtcgtactacgtatccttgtaccaacgtaccccaataccctctatatccggtctacgggtatcacccgtcgacacatataacatataaaaggttctccataaattacatgtaaaacaacttatcagctataggccaaaacgatagaagattaaatactactccctccgtttcgaaatgtttgacaccgttgactttttagcatatagttaaccgttcgttttattatatttaacaatgaataaaatgataggaaaagaattaataattacttaaattttttgaataagacgaatggtcaaataagtacttaaaaagtcaacgatgtcaaacattttgaaacggatggagtaaaactactccacattaagtaacaaaatttattgatagtaaaaggtaaaattatatcggtcaacaacgacagctatttgaagtcggaggaagcatcaaatcgtccttcgccgcggcggcggcggaggcgtcagtagccgagacggcggcggaaggtgtaccaccccttcttgcacggcgcgccgatgaccctcatgccgcgcttgcacggcttggtgaccaccttcgccaccatcctcctcacgaccgacctgcgtttcttcgccggcagcacgggcaatgcctgctgctgctgctgcgctccggctccgccgccgctcttcctcggcggcgccgccgtacatggcggcgatgaagacgacgccgacggcgagcgcatgaagacgacgcctctctctatcgtctcgccggcgatcgagcagggagatgatggaaacgacgagtcctgtagagaatggctggcaacgcgcggctgctgcggcgacttgtcgaataatttgcgcgcactcgccgttggtttggtttatgtttaggctgcatcgatttgggcggtggttggcacggttagtcttgctaatcctttttttgagtttttgtttttatttattttcgaaagaatgaaaaataatggattaatgcgacagggtacaatgttaaaaaaaaaacgatcagctggaagaaggaaattgttgtcgaaagctggaagaaggttctccagtaatgacgcttcaattaccattggttgatccatgtacaaagtccaatacactcaggactcctttggaacgaattttacaggatttagttgaaatcctctaaaattctccaaaattcctccgattcgaactcccttcctaaagttaaattacatctatctcacaaatagctctgctatgtatgtgtgtgtatgtgtgtgctttgcttcagttacgcgcgtcgctcaggcgtgtcggcgtgccggcgccggtgccggggcaggagcctccgggcgtccgcgtcagcgaggcgaacccgggcatcgacatcgacctcgtcatgccgccgccgcggggcgacggcgacgacggcgccgacagcgacgaggcctgccgctgcagcatcgggtgcgagctgccctgcgtcgacacgctgtgcaacggcgggagcccgacgacgccggggtggcacggcgtgccgggcctagcgctgccaccgccgctgcggagcggctgcagctggatcttcaggtacggccgcgacggcgtggtctcgacgaactggccgtgctcgtcgtcgccgtcgtcgtcgtcgagggagcagacggtgctggtctccgtgcggatggtggagtcgtcgccgccgcggtgcttcttcctcctcctcctcgcgtctttcccccacccatgcatcgtctctctgatccttcgcgggatcagggcagccttgtactttgaccccatctgttgtcgtaccagcacagtgagattagttcaatcttttttttttggggttcaaaattaaatactagaccttccattttcagaatatatgataccgttaaattttg

SEQ ID NO: 19529 - DNA, 1304 bp, Oryza sativa
aactgagaagctgcttaccccaatatgaggcggcaatatactatcaggtggttcttgatgaagcatgaatcataaccaaattgccactgcagcataatgatacaaccctgttaatattttaccactttacaaatgaatgctagctcacagcgtcttatcatgccgtacgaatttcccagaaaatgttgctgttaacaaaggttgagacagaagtagttacccagaaccagaagaaagaagccaattcaaatgagttctgcagcaattagcaaaccaaagagtgtataagttcaggcttgcccttaatccttttcaaaagttaactagcaatgcaaatgtacctgaaagagaatgaaatggatcagccacaggagaaattctggtttcttgaaccaaaagagatcatcccgtggctttatccttggtccgtatgcattcatctttgcaccctctgctgttaaagttgctatgacgtatgcagctttgcgccaactagaagaacaagctgcaggacattcagattatggtcaataccacatcatacatgttacggattgtgcacgaagcaagctgcaacttacagtaacaggaagaatggctatccaaaagtacaagttcgatcctacaagaaaataaccatgtataatgctggataatgagacagaaatatgatagtagtgacgatattaaaagagtggttggaactttaccgttgatattgaataacatgaaagcaacaacaaaaccccacagcagcccactgcataaaaggattaaatgagtaagttttctgattatatatctccaatgagaaaaataaaatggaagtaacatccataaataagcagcgcatagacaaaattataagggtgtactattaaaccaacctcactccaacaatcttctcaaactcctcttccattgagcgtaccatgtaatcatggaaatcatatgttggtgcaagattgtgggtctgcaatcattcttaagtcaaacaagagagtacaactaacaaatttcagcacacgccaaaccagcatatggcgacagaattttgagaacaagaatattcaagaacaatgaaaacaatatatatctactctgttcaaaacagaaaaaaaatatgtatatccactcaacatggccatagaaaaacaactgcttaccattatgaaacccttgcggaggataaggtaatctgctcgaacaacagattgaccaaattgtgcgagaaagcaaaactgtatggtaacacaataaaaaaaatgttagctgtgaacacagcaaagccttatgcctcacat

SEQ ID NO: 19530 - DNA, 1282 bp, Oryza sativa
caattagctcaaaatatgagaaaagtatgtggctttcagtaaaagtagctcagtagttactaaaacttacccatcaaccaaatacttttgcatgttgccctggaacttctggttcatcttgtagctcacctcctttcttctgtagaaaaacatagtctactatgtagtaaaattaaagtaattcataaactgagtaagctataagattcatattagctatgcctctgcacatgcaagaaacagaacatgtgacaaagtacacatgaaattgatgttccagcagtataattagctaaaaataatcgactaccccaactagagctgaataaaacttgttcacgtccaagggtataatcatcatgatggtttcttctcatgccaacattgattcataattcttaatgctgttgcatatttcaccttaagagtttgcactttgcagaccaaatgtggcatgccaaatatattgctgtttcctttttacaataaataaaagcattactagttgcatagcatccttagggccaaacagttacaccaaaatttcagtaagttgacatatatgataacatatcaggccccccggcatgccaaagacagcgctggcaaaccactaaggcaaaattagcaccagaaatctgacattctggattgaaattatacagttggttcatcgacttctgatctatagaggaagttgcaagtctgcggcgcacttgaagcacccagcgctggtggagatggatgaggccttaccgatcgcgcacctcgacaaataccctcagttggagcagcctatcgatggcgaccctgtgcttggcggcgtactcgtcgagcacccactcctccatggccgcagcggccaccggcgccgacacgtacagcatctgcagcgcgtacttcttcgcgagcggcgggagcgacctgcacaacgaagtggcgaaaacactcgcgatgaaatacagcacggaaacgcatcgccgcagccaagggcaaggccggcgcggagtgggcacctgagcacggcctcgcagatgaaggcggagtcgtagagcatgtcgagcttggcggccggcagcgcggccaccatgtccatgaagttccgcgcgaccaccattacctgcggcatcttcgccggggggtggggggttagctcccagcgccgatccggtgcgccgccgtgccacacacgtagagggagcaagagcgaggaggggataggatgggaatatccggcgaccaggcgagagcgtcggcgggagccctaccggggagatagcgg

SEQ ID NO: 19531 - DNA, 3922 bp, Oryza sativa
  unsure (1)..(3922): unsure at all n locations
tccctcggaggttttgctaacgtgtcgcatacgtagcagcaaggactcggtcttctttccatgtagcgttgatgtggcgctcaagtggcactagaaataaaaaaaaaagtgtggggcccatttgtcattcaaaaaatatatagtgtgggacccactgccatgtggggcccacatgccatcctctctcttcttcttcctccgctcttcctcccttctctctttctttccctttctcttctctccccttcggccggccgcggggagcacgggctggagcggcggcgagcggcggcggcggcggcggcggtggaagctgacgcggcggcggcaagattggaagttcgggactcgctgctctgtgggctgtatgcctcgctgctctgcctcctccaccgcggcgctcccggcgccggcgggtccagatccttcgagacggtggactcgctcaacatcttcagggccaaggactacgacgccaccatcgagttatactgggcgcccatgctcgccgagtccaactctgacggtgccgctgtcctcgacgaccgcctcatccgcagtgcccccatgaacaagcactccaccttctggaagggcgccgacgtcctcgtcttcaactcccaccgctagtggatgaccgacgacaagatccagatcctataagctgctagctagcaaacacatagtcatacatggcgtgaacgattgatggattcgtttgtgagattgtttgtgtgtgatttgtctggatcgatggattcatctggcggcggcgactgctacaaccagacgttgccggtgggcgcggccaacgcggcgtcgtaccgcgggagcacgagccgagggatgctgcaggtccccggcgctgccgctttagcttcttggggaagaaggggagagaaagagagagaagggagagagggaggaggaagaaggaagaggactaacatgtgggccccacatgtcagttggcccacatttctttttctgtgaatgattaatgggttccacacatatttttaattctaatgccacctaagtgtcacgtggaacgaagactcggtcaatatcgtcacgtaggcgccacgtcagcaaaaccgccctccaaaaccgccgagggagttaaattgcaccagttttaggagtttgggggtcgaaatatccggttttgtggtttagggttatggattagatttcgatcacagttgagggtcacgaagtgaacttattcccttttatgttagattgggctacaggcctcttgaatgaaaggattgggctacccaaccctagcccattttggcccattggcaagtttgtgtttcaaagttgtccatgcatggataattatttatattttttttcttgttttttttcgtttagacgaaagactcatgcataactacacagcacgctcacgctcccatgaatgtgcttttattttaaaactacccatgaacgtgcttaacatactcctaactacaatttcctatcctaactaaaatctgatgaaaagaacccccgaacgtgtataatatttgctcgtttttttcaatttcagtaccgtactcgtactttccaggatcaatccgtcaattagccgtccaattttttttccatgtgaaagaaataaaatgtactagaaaaatgaaatcatttcacaggtatactggcaccaacatgacaatttacaagtctagagtctggacatcaccaatgttgacgtacacgtacgtgtcaaatcgctttccgtgttaaaatcttcctcgccacacaaaaccaaaggtgcgcgttacatgactttcgccgagcactcgtctgctgcgacgtcaaactccaaatttatacatcaatacatgtggttttgaatttttgctaaaaggaaattcatgtgtggtttaagtagacaagtagtagttggaattttgaaatggtgttcctgtactacttcctactaccaagtactacgaaccaatgaaaaaaaaatccggcggacaagttgaagctggaaatggtcagatcaaaagtcaatacgaaaatgaaactgatacttgccgactgtcacgcaattaataccgataccaagcactacccctgtttaaagaattaatagtaagattatactaagaaactagggttggcagccagattttagcatataggagtagttcgatctttgggttttacaaatacatctttctcaaatcctagactgtcatcagaagcttgttgttgacgaatatcgtctaccaccgaaaaaataattagccacaaatacaagtaataatgtcaagtttagaatttaaactcaggtgagctagttctatcacaggataatcattttagttacgcctattttgctttgtaattttttttagacatgctaccacaaggagtaatatagaatttgttttttttttcttttttctactttggaaaggatggtttttacacgaaattttacatgaactgactatttcctaataaaatcaaataaaaaaacctacgatccaatagtcacaaaactccaaacctaattcattttccatgtgactggggagatcagtcggttgatgaacgataatgtttttctttttctcaacacaatttcataaatcatcgtagcgttacacacaagctagcgcgtaatgaacattattaacccaggtgcaaaatcacaaatcacattcacccaggtgcatatgctaactacaggtgccaggattaaaacctactccgtactcattgtccgcatggccgtgactccacaccacacaagtactacttccctaatttacgcgctaacttttcttaatcaaacactctacacacgacttatttgattaccacgtaacagtagctagtaatttctcccccaacttgttctccggtctccacatctcataggatttatagcacatcattacgtatatcatcataacaaaacatatcactccccatcaaacattatgacgtagtactatgtaataattagctcccttcatttttaataattaagatatgccttttaaattgttaaatagtacatttctatgtgaaaactttctatataagaatttcctctaaaatatatcaaataaatataatttgaagtatgtaattattgaaacgcaattgatcatacgctaatgctttctcattatgggtgtacttacttagtcctcttgttcgtcttgcgaagagccgagagatttgtcattttgctatgtctaggtgtttcatattataagttgtttattttttttctctagccaaacttctttaaatttaattaagtttataaatgaatatagtagcattttttaacataaaacagacatccaatgctggattttattaaactaatttgttatttttgatattactaaatttttctataaatttagttaatcatcttaaccaagtttgactaagaaaaaaaactacaagtacacttcttttcaaggtacagcagcgtcacggcaaacccgtatttccacaagtatatacggtagtacaaaatacaatagagtagaagcaacaatcatttaatctttcacggaaaaacaataataagtaatatataaaataaaaacaaaataaatgaagcaggcagcaattaactcatgtcacatccgtgccgaaacaatccaacccaaaattcccacatccatttctccagcgaccatccatccatcgcctcctctttccctcccacctccacacgtcccctcctcttccccaatattccacgccaccgccgccggtcaacccctccgccatnncatgcagcagcagcagcggtttctcccattcccattctttgctcccacgcgaggctgcgcggagaacagccgcacaggtggggtgggggtgcagaccgagctgaggagtagccggagttggtggtgagagacgcggg

SEQ ID NO: 19532 - DNA, 2037 bp, Oryza sativa
tgtaaccctgtgctaactgctaactgtcccatatgctttgcttccgcgaaacttcgagacgaattcgtcgaagcaaaatgcatatactccatactgtttcattggagaaaatggttttctctatacagtttatctgaggattccgtgcaagaacagggaggtttggaaattgcgtgttagccgaacccacccccaccacccaaaggaaaaagcaagcacctctctttttctcctgtggaagttaaagtttaccctttttctgatgggtgatggacaatactcggctcagcataccactattgctccaaatttgggtacagtgatgcggaagaaaagtagtggatgttagaatttagagaatttcggtggttgaggtgatcaccatgaagtagtattgtttttggaatcataccccaaaaatttaggtggcggctgcaatgtagctagggccatattggagcatgacgcaatggcttaatgcaatggatggcccaaccaaaagggacatgcgacagttgattggatctggttgggcgatagcacttgcgaaggagataaacgaataatttttgggttggacaatcgctttcctagacttggtgcctgcttggctgagcttcagattagattttaaactttaggactaattttagtggttttcttcgccactttcttgtctggctctagtttcatagtaattgctaaaatggaaagctgaaaaacctatctaaaactagtctttagaaatcaagctttaaaattcgaaattgttttaagttataatctgatgcagaaacaagcaggaccgatgacgattatacctctccgcacctttttttttacaataatgcccctccacatttctattactgctaactaagatggtagtataaatagatctaaacccttcgatcaaatgagattaacggttcagattgctttctaatgccaatggagagcaccatagtggggctccaattaatttgggctgttattcatacctttcttgccgttaggatgtcaaaggtgctattctgtatactagatgcatactttaccatataaacatctagacatttacattccttgtaagtttgtgatatgaactagtaattcttttactaaaactttcactcaccgtgcaggtttatctacacttttattggcctgggagtctttatgtgcttgttgacttgctctggtcatattgcagctgaaactgcaaacagccactgtctctcttgtgtatccttcaagcagcttggtttatggagttgttttggtgcctaactttacacttttatgtttttagttaataaagtgaagttacctgcgtgttcgttgaccggatatgttctatagtacagaactatgtttttttactggtttatataattgaaatgccacaaaaaaaaatttcggttgagcagatctttctttttaacatgagcagatcatttctgaaatgacagtgcaaacttctattcccttttatttgcgggccaactcttgatccatttaagcctccaaccttacatgtaactcaacctggtgatgcaaggactattttgccttaacctgacattcagtacatgatttttgtgtttattattattatattggaaggagcaatcaccactgacgtatttctgaatagcaactgggaggaggtaaggatcatttccttctgttgttttttcccctctctctctctctctctctctctctctctctctctctctctcaatacaacattatggtttttaactgcttcaccaacattacggtatgcatgtatgtattcctttgtaatggcatgtattttcttctattcgatcggtgattgtttggtattttccaacccttcaggatttccctgatgacccatctggaaagtttgaagaattcaaggattttataagatcaaattttgagatttgtgaatggataggcctctcggttgtcgctgcccaggtgatattttctgctcctttgctgaactaggacccaattcattttttttccttctataacttg

SEQ ID NO: 19533 - DNA, 5745 bp, Oryza sativa
ctctgaagaaagacaacaatgttgacattggatcaggaattcgaaagatactgaaatgtgatgatgaaatgcaacagtttaggaacctttgtgattatatgccctttatacttgtgttgtaggccatcgattgtgttcatagagttagattggacctctgtatcctcagctagtttctcttgcttgaagagttattgccgttgttggacgatcaatctatattgcagtgttacacaaggtaactgatgaactgatattactatgctgtcgctcaagctgtattcaagccagacaattttgtcttctttttgagctttatggacttgattgctaactactcaattgtagattgagaatttgagttttgatcaagaagagcggtaccattttactcctgaaagatataagctactcctccgtagcattttttttcctgtgaaactaatgcctttgcaaacgagacctacctttttgtgccggcaggagtacacaatctcgggccctgtgatttagatgactgattggatttttgtcacagattatctacttacttaattatagagataaattaagacttctataacaagtggtctaagcaatgcatagaagatttttttttttgaagtgtgaagtaaataatctgtttcaataatccggtgagtaatacgtaatatcaaaagaacagaggccggcgtgcaaggttgttcagaaccatctgttcatccatgaagtgcaagtactgcccagcccaatgccccaagagcccacagtacccttgtcagaaatcacgagtagtacaagggcttgaacacaaaatgacccatttgaaaattcgacctcctccgctttggcgttgaacagcaaatcgcgtgtcaaaactcaaaagcggacagaattagaaacttataaaatctctctcgctgcctccacttcttcttcctcctcctcctcctcagatccagcaatccgcgataccaccattagtaccattcgaagcgccgccctctactcgccggagaggaggaagacggagcaaagggagcgcatcagataagcagaaggcatggggctccccggcgccgagccgccggcggccagcggcggcggcctccctggattcttcggcggcaagagcaagtacgtccgcatggacgacgtgctgccgcaggagcaggaggaggacggcgtcggcggcggaggcggaggcgtccgcgtccgccggagccacagcagcaggcgctacgtcttcgcctgctctgtcttcgcctccctcaactccgtcctcctcggctacggtaactaatctcctccgtttccacatgaatctctctcgcacgtatatgtgttcgtgttggctgaatcgatggagaatttcgatacgcgtgcttggatcttggcaagttcttggtgatcctgcacaaggagtaggaaatgttttggccaatcgcgttgactatttcttcttcattagtcttcggtctttgatggcgactctccagcttattccatgtctgttaccttgtggcgtttagtaggagttgttgagtagtctaaactacggttactagttaactggttagtaattagcaatgcagtttcttcataatcaagaatcagtagtaactagtatcacaatgttttgttcagatggatttctattcactactgatatcgaatagtccacttatttggaatcatcgcgatgctaatttcagtcaacggcagctagctcgtagtagctttttttttttcgacagcattttagcaacacactaaaaatttgactagaactaactttttcttttaagataatggaattgatttcattaagatgaaattgcacccgggcaaaaattaagtttaagataattacacacaaaatgcatatataattcaatttctgtgtggtaataaaccttttgttcccagatgttggtgtgatgagcggctgcattctcttcatccagagagacctccacatcaatgaagtgcagcaagaagtgctcgtcgggtgcctcagcttcatctccctcctcggcagcctcgccggcggaaggacgtcggacgccgtcggccggaaatggacgatcggcctcgccgccatcgtgttccaggccggcgcggccgtcatgacgctcgccccgtcgttcgaggtgctcatggtcgggaggctgctggccggcgtcggcatcgggttcggcgtcatgatcgcgccggtgtacatcgccgagatctccccggcggcgtcgcggggctccttcacctccttcccggagatcttcatcaacctcggcatcctcctcgggtacatctccaactacgccttctccggcctcccggaccacgtcagctggcgcgtcatgctcgccgtcggcatcctcccgtcggtgtccatcgcctttgcactgctggtgatcccagagtcgccgcggtggctggtcatgaagaacagggccgacgaggcgcgcgaggtgcttctcaaggtcaccgacagcgaggacgaggcgaaggagaggcttgccgagatcgaggccgccgccgccgtcgcgagcgccggcaagtacggcgacaagacggtgtggcaggagctgacgaggccgtctccggtgatccggcggatgctcatcaccgggctaggcatccagtgcttccagcagatcaccggcatcgacgcgctcgtctactacagcccgacgatattccgggacgccgggatcaccaccgagagccagctcctcgtcgccaccgtcgccgtcgggttcttcaagacggcgttcatcgcgcttgccatcgtgctcatcgaccgcgtcgggaggaagccgctgctgtacgtcagcacggtcggcatgacggcctgcctcgtcgtgctcgcggcgacgctcgccgcgctcgcgcacgggtcggcgtccaggagcgctggcatcgccgtcgccatcctgaccgtgtgcggcgacgtcgcgttcttctccgtcgggatagggcccatctgctgggtgatgagctcggagatcttcccgctccggctgcggtctcaggcggcggcgctcggcgcggtgatgaacagggtgaccagcggcgccgtggccatgtccttcctgtccgtctgccgcgccatctcggttgccggcgccttctccgtcttcgccgtcatatccgccctgtccgtcgtgttcgtctaccggtacgtgccggagacgagcggcaagacgctggaagagatcgagctgctcttcggcggcggcggcggcgacggcgaggcggcgcggggagaggtggagctcggtgacggcgagcacctggtgcacaagggatgaggatcttgagttattgaccaaatggatcaatgtgaacttggccatttttttaggtgggttttaacagtattactagatactggtgttgcggtgaatgcaaattgcaaaccaaattgttttgttttagagcactaataggaaagaaaatatctcatactcttttccaacttcagaatcctctgtagcatcaacgaatcatacagtgtaaatgttggtgccactgtgccagtcaatcagtcacagttggtaatgctagtaagctacacttgcacatccatgaaaccattacagtgaatgtaaatagattctgaactgaattattcaaattcattgaaaaagagcgaatttccagtgagttatatgatattttagcaaatagaagaaattttatgccaaatggaagtttgacatctaaccacatggtataagagcaattatctcgagtgaatattcagaacaaggtgatacctcaagtttaatactctgcaattcagcaattgtgcaagttcatgccaaaatgactgaccacagctccaaaatttcactctaagccttactactgaatacacaataacacaaccatgaaaatgtgggcagattcctgatacaaattttgacaatttgactttttgcaaaaactatttttacaaatgaaccgctgccaaaacttatttcaaatctgacccttttgctcaatgccaaatcatgtggcgctgaacttagacatctcagcgccacgttagctggcgctgaatgcggtgccacgacggatgggagactaagtcagcgtgccaacgtacattcagcgtcatgctatttggcgctgaggtgtctaaattcaacgctacacaatttggcgttgagcaaaagagtcagatttgaaataagttttggcaacgattcatttgtaaaaatagtttttgcaaagagtcaaattgtcaaaatttgtggattcctgactccaactcttttaagctgaacaggtagtcatcaggttaccaaacatataaaaacgcctcattagtcttaaacaaatggttccctccttgtttcttcctcctcctacagtctcctccttcctccagatccaattgctagtccttttcccattcacaagccacattcttggagcttgcaagaggagagaagaggatgagccaaccatagccagagcacagcacaagaaagacggtgagaatggggcttcgtgccaccgaggcggcgacgggcaacggcggcggcatgaggagccttccggatttcttggggaggaagagcaagtacgtgcgcatggacgacgtgctcccggatgagcagggagatggcggcggcggcggcggcgtcgttcgtgtccgcggcggcggcggcagcgggagatacgtctttgcctgctctgtcttcgcctccctcaaccatgtcctgctcggctacggtgagcccctctcctgaatttgactgttcttgattcagatttggttgtattacacataatcaggggtttattttctgattaaagcaagatttgcagctagtaaaatatggggattgtatgtcatgttaatatgcttttagaagatgaagtgtttgaaaagttatcatcactgacagcccactctgcttcagattcagatgaaatgtaaattttgaccggtaatttggttcagatacttgttatggttgttaatctttatctgagtctctctctcagacagccattgacattgtttgtctcgtgaacaatcgatcaaactttcaaatggatgaaatatctttgcacaaattgtcaaatcctgtgttacatcgtggctgttaattttcagatgttggtgtgatgagtggctgcatcatattcatccagaaggacctccacatcagtgaagtgcagcaagaagtgctcgtcgggtgcctcagcttcatctccctcctcggcagcctcgccgccgggaggacgtccgacgccgtcggccggaaatggaccatcgggctcgccgctgccgtgttccaggccggcgcggccgtcatgacgctcgcgccgtccttcgccgtgctcatgatgggccggctgctggccggcatcggcatcgggatcgggatcatggtggcgccggtgtacatatcggagatcacgccggccacgctgcgggggtcgtacgcctcgttcccggagatcttcatcagcctcggcatcctcctcggctacgtctccaacctcgccttctccggtctccccgaccacatcaactggcgagtcatgctcgccgccggcatcgtcccttccatctccgtcgcgttcgtgctgctggtgatcccggagtcgccgcggtggctcgtcatgcagggccgggccgccgaggcgcgcgcggtgcttctcaaggtcaccgatggcgaggacgaggcgcaggagaggctcgccgagatcgaggaggcggcg

SEQ ID NO: 19534 - DNA, 1832 bp, Oryza sativa
  unsure (1)..(1832): unsure at all n locations
gacggtgttcatcgtgatcgccatcgtcctcgtcgaccgcgtcgggcggaagccgctgctgtacgtcagcacggccgggatcaccgcgtgcctggccgcgctcgccgcgtcgctctccctgctcgcgcacggcgcgctgccgcgggcggcggcgatcggggcggccatcctgacggtgtgcggcttcgtggcgttcttctcggtggggatcgggccgatcaacatggtgctgagctcggagatctacccgctgcggctgcgcgcgcaggcggtggcgctcggcttcgccgtgaacaggctgaccagcggcgcggtggccatgtcgttcctgtccatctgcggcgccgtgtccgtcgcgggtgccttcgccgcgttcgccgccatctcggcgctgtccgtggtgttcgtccacgtgttcgtgccggagatgagcggcaagtcctggagcagatcgagtccctgttcggcgccggcgccggcgccggcgaggtggagctcggtgacgcggaacatctggtacaagggaaagaaatgagctgataagtagcatgccaacgaagtagcatctcactcttatgagcttcttggtcatagttgtgattactgattactaagcagtaaacacgggatatcaacttgcaaactctgccatgactcttcaccacgcaccccgcggttcggcggttaccatggtaaccacgaaaacatgataaccacacggtttggtaaaacctgcttacgatacgtatgagtgtattgggcgtagataacagcaaggagaaaagctcgttctcttttcttagacgccaataaatgaaattacgaacggattacgcaaacgaagggagcagcctggcacaacagacagtacactacacagaggaagcagcatctgttccacttccacaccagaaaatgggcgtgcgctcgtttctttgcgtgcgaacattttccgacggcccaccagcaaaatttttcaaggtcgcaccacgaatcggattggggcattgggccatttttgcttgctgcacgagacgtttttctgccagttttattgagtttttctatagtgattttggataaatttaaaacacaaatagaaatctgactagtactacttagattttttttaacacaaactttaggcataaacaaagatagagttcgatatgatttcttagttaatgaacaccacttaaagaccatatttctacaaaagactcagattcttcctattgcatgttcgcatttgaatgcccccaatgtaatccagcacttcccgagtaccttatcatcctttccaacaacatacctaggtctgccccttcatctgcgcaagtcgaggaaaatcgattacgtcccactgcttgataaaattggatctaaaatcccgggttggaaggggagatattactcatcagttggaagggagactctcgttaagtcagtgttcacggcaatgccggtgcactatctcactgccctgccggccccaaagtgggtgatcaaaatgattgacaaaatgagaaggactttcctctggaagggagaggaaccggagaacgtcaaaccggggacgagtctagtaaactggcagaccgtgtgcatgccgagagatttgggaggactggggatccttgatttggaaagattttcattggctttgtgactgnnnnnnnnnnnnnnnnnnnnnnnngatcacaacaggccttggaatgagatggaactacctcgcaacgcaaaagatgtacaactattctaggcttgcactgaaattgttattggaaacgaaaagaaaatcctattctggaaagacaactggctacaaggaa

SEQ ID NO: 19535 - DNA, 3886 bp, Oryza sativa
aaacgacaagtattatcagctcggagggagtagtaaatttcaccttaattaaactatataacaataataaaattaaaatagccttcacccgttgtaacacacggacatcttttccagtaaaaagaaaaaaagggaaaaataattctccgtattgggcctaacgtatatgaggcccatgctctctagtagcacctaaaattaagcccaaaagggaccgatcagttctattacgaacggattagcgaccattaattaagagagcgcgtgacggattaagcgaagcgaaccacgcaaataatactacacacgcgcgtcacggacaccacccagtcccctccccacaccacgcgccgcccaaaacctccgccgcgtttcgcaccaccaccaccgccgccgaccatggcctccttcttcgccgacgacggcgccgacgagctcccccgcaccgcctcccaccccttcgacgccgacgacgacgccgcgcccgatgcatcaggaggcgccgccgccgacgacaccggatacggcggctacgcctccttcgtcgacggcggcgtagaggatgtggaggaggaggaggaggagatcgccgtggagtccgagggggtcccgatcggccacgtctccggagggttctcgccctcgcccttctcccccgacccggagctggacggcggcgacggccctatcctcccgccgccggcccagatgggggcggaggaggggatcctcctccgcgagtggcgcaggtgagcaccgcatctgatctgtccgggcctttgccgtttcggctactgcttgcttgctttcgctggtgctagggttccgacgcatcgagcgagatctaacgcttagatctgatatttcgcctaattttcagctaggtggggcggaatagagtttgtagtgaggctgtattatcgtattatatgtcgattttagttaggatgaaacttgaacttgttgtttaggaattgcagtgattgattaggctgaggcttcaactggttctgaattcttagctagtggtactgaatttagttagtgcaattgaatctggtttggcaggagctgttgttaaatgcctttgcttgtgaggaaagtttgttagctctggtactggtatatgtacaaaataatcgctagttagcttctactcatagaacaacaagatgcttgatcagtgttgcacacactccaaagggaattgatgtctttgcatgtgcattaaaaggctcatgtttcttgtttagtgaagttaaaacactttaagtacttgaaccattcttctctatcatcatggtgtggaaatgagcataaggccaatctcattttgcaattcacccatggtctgttacatgtttcaactttcaagataagcctcaggcttaagcaataatgcagtacacgtaacagttttctgagttaatgagcaaatgcttagtttatcttgagctatcttacatgtttcttggtgaatggtgatattaatcctaggtcttaccatgatgatggttcgcacccttactccttttgatgcttgtcttaggatgctttaattgatcttaaaatcagcttgatttgccagaacataaatcaccatttttagtgctatgccacatgggcatggaacgtgctcggcaaaggtgtgtgccaacaggagcaaactggctacttgtttgtgcttctgaaatttgcattttgtctgtcatgatcttatattctgcacttgcacgctcttctgcacctgtcaaatttttagtagtttcatgtatatccattctcagctcaaattttgtaaggtggtaatgttagcagttttactaccagtggtatgtgtttttgtgcctaatttatcctgtgcttggtataatctggtcattacaattgcaacagtatattttgcattagtatatagcgcaggtgagccacatctgatctgtttcggctatgccatttctgctattgtttgtttgcttccgtgggagctagggttccaccccttcaagcgagatccaacgcttagatctgctatcttccctaattttcagctagggagggcgtcatacagttgtagtgaaattgtcgttaaggaaatggcaagtgatcgattagtttgaaggtacaaccaattctgatctggttctcatgcccctgcagtatcgttcttcaagagctgctgtttaactgcctttgcttgtgaggaaagttttctagctctggtatacgtacaaaataatcattacttaacttttaccgatggaacaacaaggtgcttgattcattatgcgcacactccaaaggggggctgatgtctttccatgtgcaataaaaggcttatgttgatttgtttagtgaagaaaacctaagtacatgcaccgatttcttttttcagcctggcatggaaattagtgtgaggccagtgtcattttacaatacatgtatggtctattacatgtttcaactctcaagataagcctaaagcttaagcagcactgcagtaggctaacagttttgtgatttatgatcacaggcttgtaaggctagtttgtcttgagctacattatctgttttcttccagttggatatcttggtgaatcctaatatttatccagaacttactcctttggatatttatgtcctctaatgtatcagatgctttatgtgatcttaaaatgagtttgtagtgccagaacataagtcactgcttttagcgctatggttggccaaaggtgtatgccagcatgagcaagctgtctacttgtttgtgcttctgtaatgagcactttgtctggcatgatcttatattctgcacttgcacactcttctgcaccagcctatccagattttttgttagtttctcgtatatccattctcagctcaaaagtttgtaaggtggtaattagcaattttactaccagtggaatcgtgttatgcctaatttatcctgtgcttggtatgatctgaacattgtaatcacaatattatacatcttgctataatgtttttgctttggctgttctctagtaactgttttccttatcatgtagaattatattatgttcatgatctatcttttgaacagcatcactattgtttcaggcaaaatgctatagttcttgaggaaaaagagcggaaggagaaggagctacgggcccagatacttgctgaagccgaagagtttaagaaggctttctatgagaagaggatacagaactgtgagacaaacaaggtccataacagagaaagagagaaggtatggggctcagagcaacttctttagttattatatgtcaatgttcatagcatgtccattaagttctcatgagtgacaacttattgtgtgctgcagattttcgtagctggccaggagaaattccatgccgaagcagacaagcagtactggaagtcgatatcggagctcatcccacatgaaatagctaccattgagaagcggggaaagaaggacaaggacaagaagccatccatcacagtcattcagggccctaagcctggcaagccgacagacctctcacgaatgcgccagatcttagtgaagctgaagcacgctcctccaccgcacatgatgcaacctccaccagcgtctgctgctaaagacggcgcaaaggatggtgctaaagacggcacaccagccccagcaaatggaaccaagaagcctgcagagagcaaagagaaacctgccaacggatcgcctgcggaagcagagaaggagcagcctgcagcatcggagtaacttatggtagctctacaggaacgcccgaaccttgactgcagatatggaaatgcattttatttctaatccctggatctgtctatcctgtatttatctttttatggagatttgcgtcaggatggctatgtatca

SEQ ID NO: 19536 - DNA, 3388 bp, Oryza sativa
aacaacacgattcacaattggcacacatctaaacgtgtgccctctatgcactgtcactcaactcaacatgcaaaggtaagacaagaaacatagacccagcatcagcatcaatcagcctggtgatgttttccttccattttcaccttggctgatctcggacaccgtgggtggcaccaccgtgctgaacatgtcggaggtgtcggacgccgagtgcttgaacctcgagttgctggagttggtggccttggagaccgtgccattgtagtcgtggatgtagcccggcgccgtgagctcgcgctcgttgatgcggatgggcttggacagcatcgtcaccacctgcggcatcgacggccgccgcgccgccgccgcctgcgtgcagaagagggccgtcttgatgtaccggaggacctcctcttcagggtaatctcccatttctgaatccaccagctccttgagcttccctacctcatgtagctcccatgcctgttaattgtgaaagctaggctgagtttggcagcaagagttggtaactcatcccccacacgcacgtaaaacggagcgactcattagtacataattaactaactttttttttttcaaaatatggattaatatgttctttttaaaaacaacttctcttttgcaaaaaaaaaatagcgtttaacagtttaaaagacatgcgcgtggaaaacgatagagatgagttgggaaatatagctgcgtaattaacacggccttaattgatgcagaggctggaattatacttccattctctaataaaagatttagatggagagtccagcgattacggcttaattggaatgtctctagagcaaatgtctgaaggtgaaagcaaatctctgaattttggatagtaaagatgatagtaagactgaccttctctaggagaatcttatcgtcagccaggagactccttgaactactcttgccacttacgatctcaagtacaaggacgccaaaactgtatatatcggctctcttcgtcaattggccatgccatgcatattccggtgcaaggtagcctctgcattgaacaaatagatcagttcagttactgcaactgcaaggttactttctactcaaacaaactgctaaatgctgaaatactcacgtcgttccagcaacacgggtactgatgtgggtgatattatcagggaataacttggctaaaccgaagtccccgatcttggggttgtaaagcttgtcaagaagtatattgctagccttgatatctctgtgcacaatcggtgacgcaatctcttcatgcaggtatgcaagtcctttggcgattcctatgcatatagcagatcttatgctccaagtaaaatttgcaggttcgctattagaacctacagaacacaagataaaaggttaagcaacaaacgaaatcaatgcacttatatagaaaaatagtcattgtaacatatcaatattcatacccaacaatgcacggtcaaggctgctgttttctaaatactcgtataccaaaattcgattgtttccttcaacacaacagccaattaattcaacaaggttgggatgcttcacattggtaataacatcaatttctgtcaaaaattctcgaacgccctgcctggattcagcagaaagaactttcaccgcaacatctcgcccatttctaatagttccctgaaacatcaaagcattggtaagaatgcaaggactgatggcttcagatttgaaagggatataaccctcaatggactcctcccttccacatataaagaaaaacaaacattaccttgtatactgtcccaaagccacctcggccaattttattactgcggttgaagttttctgttgctgatctcaactcagaataagagaaaagccccttatgtttttctcaggcggaatacctgaaagttagttacatttagttaagtaaagcatggaatcttaaaatggagcttcagtactggcattctctagcctaatatgatcgaatctgtgatagggacaatatacatgtttctatttcataaactctgttggctgctatgcaaattcagcataaattttgcaagcaaatacagttcgtaccgctaacgccatgagagtaaggattctctcctttcttggattttggaatgcaacaccaccagctcatatcctcagttgttgtggctgtcttgtacacttcaacatgcagaagaggaatcttcaggaataattattctgcaggaattcattgcgaaacaaccacttagagagttgcaaattgagttcatttgtacattttatatattttggatatatagtacagaaaagggaaaataaaaagtaggacatgactctctttagacagaagtctgcgcaaaacttcttgttagaactgataggtagatgcagatccacccacattagcctgtactagagtaggtcaggaactggagtacaattaaatctcctttttgaaaccgagtacaattagatcttaaatccatcattcctcatgattaaagcacaaaagaacctcatactggcaagctttcaatgataactgattaatcggtgccatgattgtgaacttgcgattctcatgatgaaaagaaacatgacccaaaattttggggatgccaggtgcatttggaccacatagctccaatctcaggtgaatataccagatgttccactggatccaatggccatgtatggcacatgtaaatactaggttagcacctcatccactgaacagttcacatgatttgcaaagcaaacggccagatggcatagctgccaagaacaatcaccaaagcaagctgaagtttggtgatttcttctaacaccatggtccactcgcctcaatctgtatgcttgtacatatgcatattttcatgggagtatcagcatgtcttaaaccattatcatccacttcttttccccaatcaattcaaacacctcataagtaacggatcatccaacttgtttattcagaccacaattccaagaattcttttgttcgcatcccagcggatgattcgacggcatcacttattttcagaatctctgtccgaatgatgctttgccactcaagaaaaactcttgacagatcgtcatctgatgaacacaaactcccagagcatcaccacatcacaggtcaggactccagacgcatcatcagaaatcaggtggagaaactctaggctaaaactagtgtgcgagaaagcccaagaactaggaaatcaagaacacgaggggataaaaacaacaagaggcaagaaatgctcgagaaagcagcagaaaagtaccaaagaaaaacaaaacgttgaacactatggttacctttcttgcttggcgctctcttccgatgagatcgacggcagaggagatcgaagaggacgga

SEQ ID NO: 19537 - DNA, 2003 bp, Oryza sativa
cacatcatgttctagatttgtttttttatgagacgaatgtgttatttctgttgctgatgaacctgccaatgtcccatgataatgtcctatcttgatccataaatcctctggaatctgaatgctcaaaaataggattggcatttgggtactgagtacggtatgactgaatttattgccaccggctgcattcaccagccggtttggcccataaaatccagcacggtggagtgggttctctattaagaaatctgtactacgaagcctgtatacaagagtggctttaccaaacggcaatgtagtacaactgttcatcaaccagtttttcagcagctaactggtcctcgtaagcaatttatctggtaagcgtatcgaccaatgtttgttagtagtgtcaggttcagcactacacctcctacatcatggtctttccccaacagtgatgagcctgtaacaagctgactcatggttgctggaatgctggtaattgcaaaagagaagaaactgtcatggtaatgagcatatatgtacttggaatttcacactaggagttcaatgtggaacacaaggtttttcctcactaatttttttacactgcaaattacaaatctgtacaagcatttacaacatctgaccacagcattggatctagtcagaattcacaagttctcttgacaaagttcaatctgctcctggggttagccacatcctacgacaaggaacatcctctgcatgaatgaataagacatgcgtcactctccgaaaacaattatgagtaggtcattatgagtagctctggttattttacatgagaatcataggcatagaagatgttgtccggagcaacaagaggcagcttctcaatgtacataaacaggcgcctaaggttctctctagtaatcgttgccatgtcaatgacatctcggtcatctgtgagcatccacagatcaccagaatttactcttttgaggctgtcacggcagaaggggcaggactgggatcttgagcgcctgcaacaaggatagcacatggttcaaagaatgcagcaatatcttaagagagttcgtaaccagtgaccacatagttattcatatagcagagaagctatttttaagttcatgtactgaagatataaattgatatgtatgtcctttgaattccttatgttcatgtaactggtaaggtattttatacataaacattagtactgtcatttacgtgcggtactacatgctttggtggcagagtttttgcagagctatgtattgacataagtttgggaaattatgaaactgaactgatgttcttaaggctgtttttccctttgcaagggatcatttgcttagtggggttatgccatagaagggatttcacaggagctaaattatagtgtcaaagaaaaagtgatctctgaaagaccagtaagagttaagcacaaagctgacaaccttgctgcaatgactgaaaaatatgcaatgtcttgctgtaataatcaggtacagatctattaatgaggttgcagcatagcaccatcttatttattgtgcagagccattcatacagagtaaaacagcgtgctgctattaacctctcagaaccaaaatggtccactatatctggacagagttttactcgtgttttgactaaactaactttgaattgaagaactaaacacatctcagactgttaccaaggaccaatacggcatcgattaaccattagtgatgaacatgacaaacaatttttgggatggaaggatttgattctcaccattgacggtaacacttcatgcacatagcatggctgcagttgggcaagacaaccttgttattcatctccatgcaaatcccgcactcttcctctctctcgacatcaatctcagaaacatgcctcttgctctcatcctcatctcttcttctgtatctctcagtacagattgccttctgcctccggtcatcgacatcgctgataccctttgagtgcatgagtgagggaaatataacagc

SEQ ID NO: 19538 - DNA, 7333 bp, Oryza sativa
agattaagcttttacaactttgaccattaataactttaaaaatatttagtttaaagaaactagaaaaacatatatagatttgtctttcaacacattataataaaagtaaacatgcatttatttattgtatatattataatagaaaattaaggtcaaatgtatatcttgtagagcgtgtcattgtccaaagcgtcaattaaaatgaaaccgaagggagtataatacagattgtactacctccgtttctaaggatcgttcattttactaccatttttaaccttatctttttagataaagttataaaaaatagctacatttaatttattgtcaaagtttagtaagtacatataaagtcttaccaaaatttagcaaccttgctaaaattttggtaaccttaccaaaatttggcaatgccaaaacttgataaggttgaaatggtagcaaagtgaacaaaccctaaatatttgataccgttgaatttttagcacatatttgattgttcgttttatttaaaaacttttgtgaaatatataaaattgtatgtatacatataagtatatttaacaatgaatcaaatgataggaaagaattaataatttcttaaatttttttaataaaacgaacggtcaaacatatttaaaaaagtcaacaacgtcaaatatttagaaacggagggagtatatgacaaccacgccctctagctggtgatcagttaaattcatatatagtgtgagaaagaaataggagaaaaaacaaagctaatcttatatttaatttattatacatgttagctaaaatataaaatggttaagtatactattataaacatgcttattataaacatgctgtcatatgcaatctgtatattcctacaaccaaattgtaaaaaaaaaagacgcaaatattatagaatgatctaatatcaaataattagaattggtgagacttcgaatctatatcatttagcccattaacttatgagggcattcccaacccaatgactagaatggtgtccatagcattaaatgagttgccacctagaaaaaaaatgatgtgacaagtgaataaatgaggaaagagaaggaaaccatgtcttgcatgagacatggttcctacacaatatccaatacatcatgtgagataagtagcattaaattgaagttatggaatagtggtgtttgcattgaaagagtagtgtctagtactattttcttaatgatgtggagtttatagaaatcatgtctagtgttatgggttggtactgtcctgaagctgatacgaaacctttagacgtttcaatccaattgtacagactacaaaaaatacacagctagcccaatttgtctttcgttggacgcactggcaaggtaagcaactaaagtagtaagcacccaccacgtatatatgtatgtgaagcatatggattatgaagtttattattcaaattcatgcacttgccacgtgcaatcccaactatactgttttgacatgctgacgatgatgtaaagttataaacagcagatcgattaagcttagtcgtactaattaattcctcgcaaaaaaaggctaattaattaattaattaatagtcgtaattaaacaaactaattattatcggtctcacgctagcacgtcattactgtttctcaccgatcacaagggaaccgggcgatgcgtatcgttgccacgtccaagtaggctagctacttcttcagcttaacaacgcaacagacgtgtctacgaatgacgccgacgtctcgaccgtttaagcatacataaccgcttctgttgatcggctcaatcaacgaaatccccgaaaacgagcgggtgcactccacttattactattatgctaccaatattattaagaataaaatagttatttactaataaaataattaggagttattttgcatttatattttttccgggtaaattgattatgatcatccattgtgtgctagcacaattcgtatttcatacaaaagccgaaaaagagagaaaaaaataaagtttattcactatgacaagacaattatatccctctatacttattttataataatactttttaatattggtggtagtataaataaatccaaacaattcaatcatttatgagataaacggttgttttctactactgaaccgtttgggcgaagaaaacgctggtagagatttaactcgatgatgatgtcgccacgacgccttgtatatatttagcgccgctcgcatatctcagactccagtcctcaccagctacagatgattcttgcgcttttgattttccctacgcttttttgactaaaaccctcgattcctcctccaagatcctggagagactagcagcagccgtcgctgtacgtgtgtatcgttgcatggtgctgcaatctcacgatgtatcggatctctgcatcggcaagccgccggtgaggtggctgccgccgtcctccaccgtcgccgatgccatcgccgagatcgaggccggcggcggccggggtccggacgctgccgtcgccgtgtgggacgggacgaagggggaagtggatggcagggtgtgcatggccgacgtgcacctcttcctctgcggcggcgacggcgaggcggccagcctggcttccccggccgccgcgcttcaggccacgctctccgacctcctcgccgccggcgcgccgcccgtccgccgcatcgagccccacgcgaggtcgcgcgcacgccacgtgtatcgatcttgaccgccggcgccacatgcgtttcgtctgacgaaatttgttggttacagtgtggtggaagcggtggacgccttcttggacggcgcgcactgcctcgtcgtgccgatccgggagcggtggcggcgcgcggcggcggcgggggagatgtgcatgtgctggctcacggtggaggacgtcgtgcgcttcttcgtcggctgcatcggcctcttcgccccgacggcctcgctctcggtttctcagctcggcatcgtccgcgaggccacgctcgccgtcgccgccggcgacagggcgctctccgccgtgccgctcctcagcgccgcgctggcgacgcactcctccgtcgccgtcatcacgggcgcaggcatcgccccccgcctcgccggcgaggtgtcgccgtcggcgctctgctcctgcgacgtatccgtcgcggcggccatcgccgcgctctcggctggcgacctcacggccttcctccaccgcagcgacctccggtgccgccgcaacctccccggcatggtcgacctcctgtacgccggcgacccttcgtcgtggcccccctccccctcctcctcttcctcctcctcgtcgtcatcgtcgtcgttatcctccttctcgtcttcctccgacgacgaggcggaggacgggtacaaacactatgcgccagcgccgtgcgcgcggcgagacaacaacaggcagatcatcgcgtgccacccggggagctcgctggtggcggtgatggcgcaggcggtcgcgcaccgcgtgacgcaggtgtgggtggtggacttcgacgacggcgagctggtcggcgtcgtccgcttcctcgacgtgctctgggttcttcgcgaacacctcaaccaaccaccccctgatctacccatcgaatttctcatcaattaatcccagtactaagcttcgttgatgtacatacgaggacaaaaattgcgaccatgaactgaaccttttgttcatcttaaatttacgccatgtgtttcgtcggcggatgaacttgaaacgaaggaagagtcaaaagattgatggaggacagaaaccacctgtcccgacaaattttgcaaagtttgttggtcgatatgtgacgtctggattggatgatgcatacatatggtttcagcgagagtaaattcgggttggtggccaggcgagctacataccagattagtccaaggtggattctaatatatcgaatagacattcacccgtttcttccgtattaactatataattataaaaaatattaaaaaatatacacagtagattaatatgtataaataaatcactagtatacgtatatataaaaattattatttttattataagttgtagaagtcgaattttaatatgtatatttgtaaaataatatattacatagtattaatctactttgtcaatttttttaaataaaaactgtttagtttcccagcttagtcagagagattttttggcgatcgcaacgagtttgatcagatgagagcccgtacacgaatgacatttcccgatgttcttttgtatccatactggagtaggagcatatgaaagagggttttgtgttttggcggtagcaaactctgcatattgctccagcatatgcatggctggcaccaacataatcttgttttatctgccttctcggcaactcaacgttttgtctcgacgcgccacaaaaacgcacgaggccaactgaactgatgcatatgctgttgtggcatttgcatctagcaacacgtcactaggctctggatgtttgtgaatcgtgtgagacgcaactggatctccttgcctatgggctatggcccgtgaggcatggcccatatcagcgacaactccggtttcactcttcaatgggccttacttgattgtcaccagacgtgggccacctatcaggcctgattccaactggcaagttaatttaggaataggccgctatccacagaacaaattaggcatgggctttgggtcgttgggtgtcctgatagataaaaaaaggaaaatgtccactatagatacctcaagtatgagtcttagttacattcggatatcttgactgcaaaaccggatacagtgttggaattaatagatgggctaaggcccattcgaagattaattctttggaaaatctcaaaagcccacctcatgggatggcatgcatgtggagtttagtaccaccttgcttattctaggagagggggacctccttaaaaaggaggatgccctccttgctacttgaaacatgtgtggtggagagaagaggggaaacacgcgcgctcacttgcctcgccacgtagggacccttgcgcagatgcagcctccttttgcagttttgttttgctgcgggattcggatgtgttttgttttggaaacattccgaaatgcagttttgttttgctgcgggattcggatgtgttttgttttggaaacattccgaaaatccggtgcgtgaaaatggcatggagtccggataggttacgcgcgacttatccggttcggtttacgcgggcgccctgatcaggcgatctatctctatataaaccgagccgccaccttcacgcaacacacgcgaaatcaatctagggtttgcctcctactctgtactgcgccgtcgctcgtagactactccatcccgctcgccggcgtgcaccggcgatcgggagagcaggtctccagaacctctgccttcgacgtcctgtaccgggagaaggcggcaataaggtttttgggaagcgcttcgcgcgactgctccctgttcgttcgcgacggctcgccttcctcttcgctcgcgtgctttgcgccttcgttgacgctcgcaactgcgagtagttcatgccgagcaaccggactttccgccacctcggtacgtattcgacatattgcgcatatttgatttgttcatgttttattgcttagtttacatgtgtagatctaatgatgcgttcaatctagtttacatctgcaatgtcatgatttatttatggaataaattaaatcattatgtgcttataatttcaacaatccaaaaaccttattataggcgctgtgattttactatggctggttttgccgaagcactgaggccggataaattcaccggtgtgcactttaagagatggcagatcagggtcactctgtggctgacgtctatgaaatgcttctaggtgagtactggcaaacctgaaggaattcttactgctgatcagcagaagcaattcgaggaagccactactctctttgtgggatgcattcttagcgttcttggcgatcgtccggtcgaggtgtatatgcaaatgaccgacgctaaggagttgtgggatgcactgaatactaaattcggtgctactgatgttagcaatgatctgtatatcatggagcagtttcatgactacaagatggctggcaaccgttctatagtcgaacaggctcatgagatacaaaccatggctaaggaactcgaactccttaagtgtgtcttacccgacaaatttgtggccgggtgtattattgcgaaactacctccatcatggagaagtttcggtactgcactcaaacacaagagacaggaatactccgttgaggggttgatagcgtctcttgatgttgaggagaaagctcgggaaaaagacgccgcgtctaagggcgatggtgggcagtcctgtgccaatgttgtgcacaaggcccagaacaagagtaaggggaaatacaaagctcaacaaaccaccaatttcaagaagcagaagaagaagaagaagaagaacaacaacaatcctaactaggatgagaggacttgctttgtgtgtgggcaacctggtcatctggctaggaagtgtccacagcgcaaggggatgaaggcacctgcagcgcagacttctaagtctgctaatgtgaccattggcaacactggagatggaagtgggtatggtaatttacctactgttttttcagttaatcagtctactaattggtgggttgatattggggccaatgtacatgtttgtgctgacatctcattgttttcttcttatcaggtcgcacggggttccaccgtcctaatggggaatgggtcacatgcttctgttcatggtgttggcacggtagttctgaagtttacttcgggaaagatcgtgcagctgaagaacatgcagcatgtcccttctatcgacaggaatcttgttagtggctcccgtctgggtagagatggatttaagttggtttttgagtctaataaagtagtcgtgtctaaacatggatattttatggtaaaggatatgagtgcggaggcctgttccgcttttccctttctgatttctgcaataattctgtgaaccatatttgtggcagtgtggatgatgaggctaatgtttggcactcacgtttatgtcatattaattttggcttgatgtctcggctttccagcatgtggttaattcctaagttttccattgtcaaaggttctaagtgccatagttgtgtgcaattgaagcaacctcgcaagcctcacaaggctgccgaggagagaaacttggcaccactagaactcctacattcagatatttgtgaaatgaatggggtgttgacgaagggtggaaaacgat

SEQ ID NO: 19539 - DNA, 7676 bp, Oryza sativa
actcttgcagtcccattatgtggagaagatcttgaatcgctttggctacattgatagtaagccttctccaacaccttatgatcctagcttgttgcttctcaagaacaaaagaattgctaagaatcaactggaatactcccaaatcattggctcgctgatgtacctggctagtacaactaggcctgatatctcctttgctgtgagcaagttgagccggtttacctctaatccaagagatgatcactggcgtgcgctcgagcgagtaatgcgctatctaaaacgtactatggaattggggcttcactatactgggtatcctgcgatactggaggaatatagtgattctaactggatctctgatgtggatgagatcaaagccactagtggatatgtcttcacactaggtggtggtgctgtttcgtggaggtcttgcaaacaaaccattttgacgaggtcaaccatggaagcagaactgacgggactggatacttctactgttgaggcagaatggctacgcgatctattaatggatctgcctattgttgaaaaaccagtgccggctatccttatgaactgtgacaatcaaacggtaattgtcaaagtgaatagttctaaggataatatgaaatcgtctagacatgtgaaaagacgattgaagtctgtcaaaaaattgagaaactccggagttataacgttggattacatccaaacagctagaaacctggcagatccattcacgaaagggattatcacgaaatgtgatagataatgcatcgaaggagatgggtttgagacccatatgagttatactatggtggtaacccagtctatgtgatcggagatcccgtgaattagaacctgggaagaacaaaccattagtaaactagaggagagtaccaatctataccctctctaagtgaagatgcatgtactcttgtgagttgcaaggcaggttggctatgccttaatgagttctgttggctttaattagtgaagatgttgtcctgcagagcagtcttgaaagaactcacctttgtaagcttgactgttggtcgcagtctatggagattttgggtgaatcttctaggaagcttactaaagacctaggagtatgacttatacgctccacccgaggggtagtctacagacggtctagtaccagataagactctgagtgaaacttgcttgcacaagacttgcaattcaaggcgtagtccattgttcaagttgtgagtaagtgtagcttggagttctaggtggatattcaatcttaatcggtctccatcgaaccgctggtatataaacagtacattggaaaaggcaaatctcagtgggattttgagatttggttggggattgttggaattaatagatgggctaaggcccattcgaagattaattctttggaaaatcacaaaagcccacctcatgggatggcatgcatgtggaatttagtaccacattgcttattctaggagagggggacctccttaaaagggagaatgccctactagccacttgaagcatgtgtggtggagagaataggggaaacacgcgcgcgcgcgctcgctcgcctcgccgggcagggcaggcggcgcgcgtgcacgacgtacgcgtcgaatggtccgcaaaattggctcctcacccttgcgcagatgcagcctccttttgcagttttgttttgctgcggaaaatcaatatagggtttgcctcctactctgtactgggccatcgctcgtaaactactccatcccgctcgccggcgtgcaccggcgatcgggaaaacaagtcttccgaacctttgacttcgacgttctgcgccgggagaaggccgcaataagggttttgggaagcgcttcgcgcgactgcttcttgttcgttcacgatggctcgccttcctcttcgctcgcgtgcttcgcgccttcgtcgacgctcgcaaccacgagtagttcctgccgaacaaccgttttttccgccacctcggtacatgttcgacatgttacgcatatttgatctgttcatgttttactgcttagtttacatgtgtagatctaatgatgcgttcaatctagtttatatctgcaatgtcatgatttatttatggaataaattaaatcattatgtgcttataatttcaacatacagagcatccgctgaccatcaaaaccagtataaattgagtatcttgcttaactgcaagatagtttatcttacgtaacatattaactttgtcttcatatcctgtaacgtctacataacacttagtacatggcaaatcgaaccgtatcttgtcaagatcaacgtcgaggaacgcaaatgaaaatcatctcgtctaaaattttccaccaaaaaggcccaaactacaaaagcattgggttctttacttgttagggcatgcgcaatgtatcttacccaactagtaaataagatgggcccatgaccaggaggtagtaagctgcaactcttctcacaatgcttatatgagtgtagtggtaaacaaggtggggtccacctgaaaaaatccatccatcccaaccctccattacctggatcctgtcagaatcttcatattttatttggttgttaccggcaatagcacaaatatcaggtattaactactacctcttcccacaatgcttactactgggtagtaggcttgaaataaatgcttgttacctggttttttgccacattgtggttgctcttagccgctccacatgtttgaggtggtcccacatggaaggggagagatcccgtggatgttgggacgtttggtgcagattgaacatgatatacgcacagtacgctaatgaattttgtaagtacgcactagtaagtactctagctaggtgtttatcatgcagggtacgtaccgatgcttaccgttaactgtaagaagcggtacgccgttgaataaaccagtcgacgtggcgatgtggcagctgaacacgcagcggtccacgcgcccgccgatggacgagtctcaccacaccttacgcgccgctagatctggccaagccgtgtgcaccaccgctccagtgaaaagtgacagttaatataaaagttaatcttgatcaagttttcaaacaaaaagttaatcttcatcagtgcgactctgtcccacacactccttaaaccctcatcgatttttttttagttttaacttaactagtggtggattattggtgctatatatgtaaataaaggtaattaatctgctgagtcacatctccgtcagctgctcggaccaatcagagcttgtgaaacgcacgtctccgtcgagtaaagcagaacggaaagttggcaagtatcaagaatccaacggcgtaggatagaaacatgccaaagaaatgtactcctggagcaaaattaaaatggcataattacaaagtatgacgacgaaagcgaccgtttctgacttactagctagtattcctggagctgtcgagcatgagatgagcgtgtggcagtagtaagcgtgcaaaaggctatagatatagaatttctacaataccatcggataacaataaatatgtttttaattcctaactattacaactggcaacctgcatgcactcgatcccttagcagtactccctctgtttcaagtcataagatttttttttaatttgatcaaagtcaaaatactttaaatttaattaaatttatagaaataataataatattttcaagccaagacaaatttattatgaaaatatattaaattattgacttaaatcagtttgattttggctaaagtcaaaatgccttataacatgaaacacagagggagtaacttacactagtacaacaatttcatgcgagttgttccttggctccttgcgatgcagcatctgttgacatcttccatactgcttatgtaaacacacagtttggactgtcatgatccggtagaggatactagatctcatcagcaggattctgtcagccgtaagctacatctaagtagcaatatagagattattaacaactctggcctggataagcgtctggccaatctactggccatccaagatcagcgctaccgacctggcgacctgtactctagtcacgcctcctgatccaatgcatgtgctcaactgctcatcgctcgccgctcgatcgacctgaccagtttttaatcaccataattaacacgcgtaacagcgaccacaaacttgggattactactagtataaacacgttcgttgccgccctgacaagagagagaaaagagagaaaaaaaaaaggtgactcgctgccgagtcggacacgtgacaacacgttggtgccgcgtccggctcaaccgcttgctcgcgcggaccttatcgctccggtccgacgcgcgggtgacgtgtaccgagcgaccataccgtgccagccttatccccaatccgggcccacacttttgtcgtcgctcggtgtgggccccaccctgtcagtgtacggctcggcgctcaccggcgtttacctccccagcccacgggaaggaggcggcgcgcacgtggcagttgcggtgggtgaggctgtgagggcggtgcgcgagcctacgtggcacgccgcgtccacggaggccgtagagaggtggcccccgtgagcacgcagttcgagtaggcgatgacgtgtccgacaggtggttcagcgagcaataattacggggtaatataataaaccgctcccgccaaactaacggcggcagcccacggaaaaggcgtccctcgctgctgtttcctccgtttttcgctcacctccggtcatcctactcggctaccccggcggcaaaaacatgaagttctacagatctacgacatcagtttactagtttgtcttttgttctactttgctctttctttcttgcgaatttctttttaatcacgttttgtgtagaccatgtacagcatcctcacttgtgcagggtaggaatttcacaagaaaacagtgctcgtgcagcgactcgatagaaacggaagaaaaccgtatcaacaaccaacacgaggaggtgtgtaatactcctttcgccttgtaatataaaagatttatatagatggataaattttaatactataaatttaaacaaattttctatgtagattagtagtatgtgttatatctatttaattttttttatattttaaaacggaagtagtaaacaattacttatgtaggctttgggtgcagggtaccgtagggggtgagggcaccgcacgtcacggttaaggtggccggttactactactggtgtcacatcggcagcggcaactggtattacgtgatgatcttatcctcgtcgtctcgccgtctttatcccgttcgctgcttgctttggcttctcacatcagcactgactccaataacacgctcatcaaacagcgcgcgcgagcgagggatggataggatattttcgttcgcgttcgtgccatcctaaatcccgtctataaagccgtgcacatctctatcctcacctccattccattccactcgccaacccgacacgtctctcatcttcacgcaacgaacagcagcagcagctcaagctaagctaagctaaagtactacgtgttctttcgtcttcgtcggcgccggagtttgattcgtcggagctagctagcaagaggaagaagaaaatgttggccatattccagaagcaggtggcgcacgcgccggcggagctgaacagcccgcggagcagcgcggcgaagcccaagaaccccgacgagatcctcagggacttccacgccctccaccccatcgaggccttctccacctccttcggcggcggcgccgccctcgcctgcgtcgccggccacgcccgcaatggcctctctggctacgagaggtaaattaaatcaatttaatcgatgaggcaatgaatccgaataattaaggtgattaaaacgtaggggatcgataataatggtaaatgggtgtgtacacaggatgttctgtgggctggatgacatctactgcgtgttcatggggaggctggacaacctgagcagcctgatccggcagtacgggctgtgcagccgctccaccaacgaggcgctgctcgtcatcgaggcctaccgcaccctccgcgaccgcggcccctaccccgccgaccaggtcgtcaaggatctctccggctccttcgccttcgtcgtcttcgacaacaagtccggcgccgtcttcgccgccctggtaatttaaaccactactagactggttttctgaatcgaattgatgaatttgtgcttcaaattgaacttcctgtgagtgtagcgtggccctgtccccttcccgctgttaggagttgtgtttagccgccgtagtagttcctaagcttcagtttctgattgttctgcttttctttttcttatatattgacgttcattcgctttgcgcgatgcagagtacggatggggaggtgccgttgtattgggggatcgcggcggatgggtcggtggtgatctgcgacgagagggagatcgtgaagggagggtgcggcaagtcgtacgcgccgttcccggtggggtgcatgttccacagcgagggggggctcaagagcttcgagcacccgatgaaccggctgaaggcgatgccgcgggtggacagcgagggcgtcatgtgcggcgccaccttcaaggtcgacaccttcaccaagatcaactccatgccccgcgtcggcagcgccaccaactgggccgccacctgggacgacgctgccgcctgatgatggcgctccgtacgccgtcgtctcgtcgccgtgcgcctgccctcgccgccggcctcctcgccgtttgccgccgccgctcatctcttcctcctcttcttcctcctctctatatccgatgtgcttctccgtccgaagcatgcagattattagagcgatatttgcagctagcgtggaagcgcgccaatctatttttctgcggtgtttttacttaattttcacctcttctttttaaatttttatgtccatctttgggctctcgcctctcggcaatgtatattctcggtcgcgggtggcatgtcatggtacatactatgaatgatgaataagaaagagtttgcttcactcaatccagttcggtctcttttttgggttgcttataattgcccatgatagtaaatggtgtttggctatgcacatctcatttttgggttggttcgttttggcttatttgctaattgctgtgtttagatctaaagtttggatttaaatttcagtctttttccatcgcatcaacctgtcatacacacataacttttcagttacatcatctataattttaattaaaatttaaactttgtgctgaactaaacacaacctaaaacggttggagtgaacactgatgagctcgcgagttacatcatctctaatttcaatcaaaatttaaactttgtgctaaactaaacacaacctaaaacggttggagtgaacactgatgagctcgctttgtactactccctctgtttcgaaatgtttgacgtcgttgactttttatcacatatttgaccattcgtctaagtaattattaattatttttatatcatttgattcattgttaaatatatttttatgtaggcatataattttatatatctcacaaaagtttttaaataagacgaacggttaaacatgtgctaaaaatcaagtgtcaaacatttcgaaacggagggagtatctccgtcca

SEQ ID NO: 19540 - DNA, 849 bp, Oryza sativa
atttgttaacaatttaaataatgatcaaagttgtttttttagagaccatgtccttgtccaaaacgacaaggtattatcaatccggagggagtatgagttacaaatcgcttaggagcgtattattagagacgtaacggaacaactttcagcaagcaaaaagaaagcagacaaacgataggaggtagactgcaatagagaaagaaagaaagcagtagagcagacttcatcaaggaggctgaaaaacaaactcattttcttgaatgtcttccccgatctgctgggccgcttgttgtgcatatggctcttgttgcttgaagaccttagcatttatttgtagccaaacgtgtcaccaggttttgatcagaattcccactcttcgttttgattcagccttattggttccatgagctaaagccatcatccattcagcggtggagtttgaatttatcgcagtttgcatgccctgagctaccgccactaggctccaagtggttctaatgaaatcacactccctaaaaagatggtcagtgtcttcacaggcgcttctacaaaggggatatatccaatcacattcccaatggtggattagcagattttcagctgttagagctcttttgtgcaggatgagccagccgaagaacctttgcttgggtaatgcctgggctctccagttggctttgaaggtctgatcatgttgacaggtaatgaattggaattgatatgcactttgggctgaatatatacctttgctatttctcttctagattatgtagtcttcattttctgacgttagttgtgtttgagtaagaaggctgccgagatgcacaagctcttggattacttcaccat

SEQ ID NO: 19541 - DNA, 730 bp, Oryza sativa
tcctgcagccccgaattgtggtcaatctagcaacaggtgagtaattgtcaaagaaatcttcgccttctttctgagtatagcccttagcaacaagccgagcattgtacttttcaatagtaccgtcaggcctaagcttcttcttgaacacccacttgcaccccacaggtttacacccatagggtcgctctgtcacctcccaagtcccgttagcgataatggaatccatttcactacggacagcctccttctagtagtctgcatcaggagatgcatatgcttctgaaattgacttaggagtgtcatccacgaggtacacagtgaaatcatcactaatggacttagccgtcctttatctcttactccttcaaggagcttcaccgacatcctcctcaggtgtatgttcagtttgttctggtggtgtgattgaactgggaattatttcagagggttggctcgaaccactatgtgtatccttcattgggaaaaaggctctcaaagaaggtagcatcacgagactccataattgtaccaacatgcatgtcaggtacctcgcatttaactattaaaaatctataggcaatgctatgatgagcatatcccagaaagacacagtccacagtcttaggtccaagtttgcgcttcttcgttattggtacattgactttcgccaagcaccccccatgtgcgcaaataagaaagtgatggttttctcccaatccatatctcatat

SEQ ID NO: 19542 - DNA, 734 bp, Oryza sativa
gatatgacttaattagaggaaaaaaagagagagataatttggaccatagattaatcatttaagaactaagtgagaatgaactatataagtatataggatatcataaaacataataaagatatacattgaaacattatgtaattatgttggatgataatttaacatgtttgtatttgaaaagctcttaaattataaaaactgtaaagatatatcatgtttgtatgatgtttaaatgtgatgattgttagtggatgatgatgtaacatcttgttaattagtgaatgatgatgtggcatcttgttagtggatgatgatgtggcatctttgcatgttaagcttaagaagttagtgggggataactttatagtaagataggataaactcttgtgcttatgcttatttgtaacatcccggtctagggcttaataggattaatagaatactcatatcaacaagttgcaacttcttttacagaagccaatctccaaagaactccagggttaagcgtgcttggcctggagcaatttgggatgggtgaccgaccgggaaattcttcccgggtgcacatgagtgaggataaagtgtgcagaaaagatatgtgttggtctgtgaggacagtctatgacctatgaaagctatcagatgtaagcgggccccggcctgggggaggcgggacgttacaaaatggtatcagagccaactctcgcggtttcacgggtgcgacaggcctgggg

SEQ ID NO: 19543 - DNA, 4506 bp, Oryza sativa
  unsure (1)..(4506): unsure at all n locations
agtggtgacgagcggggcggcagacgagaaaggagcagcgcacgtgcgcgggcgccggccgatgggaggagaggagcggtgcgcgtacacgggcggcggccggagaggataggagcggcgcgggcgtgcggggggaggtgtcgctgaccacgctcggggaggggtcgctgactgcggccacgtgtgcgggggaaggcgtcggccatggagcgcgcgagttcggcggcggagatgaagccgttgccgccgccggcctacccacccccttgccagcctcgccggccggccgccccgctccgacacgccagtcgcccgcttcggtcgccggccgcccgtcccactcaaccggccgaagagagaggatagagaggaggggagagtagtgaggccctgataggctgtcaatgtcatcgtccacgtggcatgctatgtaggtaagaccacagtcaaatgaggctttggaccgggatgatacattaaaccaagtttagagatctcgatgctcgttttgcaagtttgtggatttaagtaaaaccttgttacaagtttaagtactactagtgtaatttactcttgatttttcaaggtaaaattctctcctcgttgatcaatcaatccatccatcttcaggagtagattcagatcagattttgagtgagaacccagatcccagattatactacttagtatcattttatttgattgtatgatatgttattgttttaagccaatttcattgacacaagaactaaaacggctggcaatactggggcaaagcaaacctagcaagacagcaataacactggtatgccgtttgcccacccgactagccgaaccgagcaatagctcaggctaaccagcaaataaagcatttctaacatcacgcgtttattattccagttcatctacataaacagctgataaagtaactgaattacacttccacgtaaactagattacaggagtatctgaataatataaaaaatacaatcactatacgctgtccacatgaagtacaatgtagcacaatcgaatggagagtggtatataacaatggaagagccgggctaaattatacacacagggacattgccatttgcagttttgccgcaaatcaaaatgtgtagcgcatacgatcatatacactacaaatcaacaactgtaagcactggatccacctgaaagacaagaacaggagcaatatgtattaacataaatattttcgatacttgtgtgcagtgagctaaacagaagcatctcactactacacctgaattttatttggcgaggattggagcaccacatgcagcctttgcatgtttgtcttcagcgaacacaagattcccacccacaaaggtggacagtatcttccctgaaagctgctttcccaaatatgccgaaatattctgcaaaaatgtgaaataaactttacacatagaatccagacttcacatataaaatgtgatcttcaatttgtagcattttctagctgattgttgaggaagaggtcaaaagttccacatggtccgacattttatatggaaacaagtggaattctaacgggttcgagttagaaagcaaacccgatgcttatggtagacaggatggctgtcatcaagatggaattgagcctcaggtttccataccacaatatcagcacggtatcccggcagaacagcaccctacaaattgagtttaatttctttttagcaatatcagcatgtactgtatcgagtgagacaacagatgatgatataacaaagatgaaaacattaatcataaccattagctggttttaagnnttacacaagtgtcatccagtaagaacagtagtatggcacaatgatgccatgcattttgctaaaaaagatgacattagcccattacctttttctttaaccctgcaagcatagcaggcctttcgctccaccatgatgccagttgattcaaactgataccgtattttttcccatgcgaccatgttacagggagaacaaactgcaaatgttcataccaaactaattactactatgcaagcacaatctggaggccttcacacttcaccattatgattttactcaaaatgtttttcacgggccagcggtggaacgttgaccaatttgtattaagattaggggaaaataaaatcgttacttggcactcttggcacggtacatttattcatatgcactaaaaaacttacctgcaaagatgatatgcctccccatgcccttaagaagttaccttcctccatgagtttgagatcaggagctgatggtgaatggtctgagctcaacatgtctatgtgtccatcctaatgttagccatataatagttggccagttacgctataacagtttagtaaagttcaacaaaccaatcataataagaagaatggcgtcaagcagagcttcccagagattatctctgttggttgaatcgcgtataggaggagcacatttaaagcgagtatctccatcaggaacttcttcagctgaaaacgccaggtaatgaggacaggtttctacactaacccttgcaccattttgttttgcatcctacaaccatataaaaaattggagtaataaatggaccaagaaaaccataagtcatttgaataaatcgtactccactgtgcataagctttttcatcaacaataaataatcagtttagataagcaatgtaaaatgttctcggcgattgtgaatataatattcttttgtttggttgagacagaactttctttcatgacttcacaaaaacagatgaatcattaatacgttctggtctgtccatttgataatgacatcataccttaagaagcccaagagaagtttttgcatctgagagatgaactatgtgaatatgagctccttctgaccgaccccctatctccgtgtctttcatcgcacgttgcagatctttgatcgctgcttcctccctagatataaatggcaatagaattagtgaagtttgaagttgtgatcagctcaaaaggaaaaaaaaaaggtgttaagttgtgagtacttcggttcttttcagtgatggctattggttaagctttttttacacgattgcatactatgtactaaaacagcataatgccatggtattctcattgatttgttgtacatatgctttccagacagccatatagtttaaaatcagaattgtgcattctgattaacacacagactagactatgattcactcaggcaatttttttttcgcgaacgcgcaaaaggattgcacgtcaatatattagaagaatagagtttttgttacacgacgcactcagccagaccggcctatgccaaggactgagtgcaataactcaggcaataactgactcaaattaccatgctggtggtctagatttaagatatgtcgtataggctttaggatctagttcaccatcgatcccatcttcattctgaacatcgggtatgcgttctgcatggataagtaacggccttttgtactttgccaatgtaaccaggccctcctacagtacaaaaacaggaatatgaactcttcagggagttgataagctgaattatggaactcttgtggtcgcaaggtaataaataacagaattgtcaaagcagcgcacctcaatatgagttgaatttgtcatggggaagtcatttatacctgaggggcacataaatgactaaatcaagaaaaaaaagatcaatcagtgtatcattctatcatttgcttatttaaagtaaaatagaataaacagagtgacatgatggcatgataaggacgttacaatgacatgaaaaggacgtgaataaacctgtgggatcctagtactaaccaaacttactttggagctttgcatgcctgaaactaaggcttctttaacaagttgagaagatgaataaacatgtagaacaacagaagttgagtgattactcttgtaagtatgaacaaaccttgagccctaagacgcctgcatttaataggctctctagtgcacttggattgagggcattctctggaacgaggcctccccagaaccctgtttgagaacagcagacaagtcaaaaaaggtcggaccatgaaacaagtttagatgcagaattactgttattatggtggatgagctgtttttacctcccttggttctctacttgctaatgtgcaatgatactgaaacgtgtaactattgcattgcaacttacctacatcaacatgtagtttatccttagctgcatccaactgataatcaagcacgtaatgtcagtgttgactaaagagaaagcaggtagtagcaatttgatgctttatatactgatattggtacgataaagaaacactgaccttcagcttgagagtttcttcagaaacagttgacgggtagctattaagaggcatgtccactaatgttgtaatgccacctgaaatgaacaaaccgtgaaactttgagcaaaaagtctgatctctttctgttattgaaaagaaaaagaaaattgattactccctactaactcggt

SEQ ID NO: 19544 - DNA, 2739 bp, Oryza sativa
cccccttcattcagtggaatatagttaaaatttttaattggtaacttgcagtgctgtttgtgtcaatgctagctgcaatgagtcatgtactcgtgtttacagtggatcgttggtgcattccttgctcagaagtttgtgttgtttctgttggtgccctaggagcattttattcttctgttgataccaatctgtgtgatttagggctaagattcattccgattttgattgcacatgaaaaaattttggcttaaaattgctgatcactttgttttctagcatagcttagcttacttgccataaaaattctcaggcataagtaaatgtacggaaatatgctacaaagatcctgttttggaagatcaccagtggagtgcatatatcgatcggtctccaggacaggatagctactccttggtgagtttgtgatctgtttgtacaattcttataatttccatattccttttactgaaagtactttggtaagtgataacccattcgatggcatatgtttgtactgtatactgctgtcacagcgaaagattaggttgcattttgctgaccgaaattataatcaccctcacatgattacttgatcataaacaggaagttatagttgtcatatcttctataagaaagtgcatatatttaccatctgttgcatgatggaatagaattaactgcactagttgattttgagtaagagttgtttgttcaagattttgtatacctttcacatgattatcacagtaaagatcagtacatcagactgctgttgtatggtccgtagtcatcatactacaagtttattgggttgcagtaacataatactgcattttgctaatgctttggtctgatgtagataactagatactgttccatacactaaccagaatgcatgggtggtttttgttatagatagtttgctgttagtatgaacttgttggttagctgtaggaaattgggaacggtcattgacagtcagtttattgaatagtctactgctaatatgcagagtaatttatggtaagttcgtcggaacattctcattgcaatcctttttactgaaaacacggagtattcagtagtctattaagctccctaggcaaatcatctggcaaaacaaggaattgctcatgatgttttttgtaacatattgacgtttcttgtcttcaggagtgcttcaatgcttgtgtttctggatgtggatatagggtatgtaataaaactctcaagaatggcatataatttgctggtcataattcaatccttgtttccatattcaccactatttctcttttgctgtatgatagtttgacataccagcggagaaagtggagcaaatcaaaccaaacaggccatccaagccaccaccaccaccacctcctgcagtagagcgggccacgaattcagaacctgctgtgaagggtgaagacgtgccttgcacatcagcataatagtaatctatgcagccccaaattttgtgtaacttttggtgcttctttccctcatactgcctccttttttttctcttttctgggctgtttctttgcaccatgtgcttgaaattcgcagtccaccttaggctgggctagatgctaacaagatcttaacgataaatcccaaaatcttatttatattttcatatgcttgttcatccacattgtatgttagtatgctccctccgttcctttgtggatggcgccgttgttaataatacttatagatggtttatcatatcataaacgaaagctttgtgattatatttaggatgcaacacacttggataatatagaatcatttgaagtgtaaatgatctttttattaaaaaaaagacaagctctaaagttttactatgaatagtgcccggtgccatgtgactaataacttactccctctgtcccaaattagatgtcgttttgattttttttttgcaatgtttgacaattcgccttatttaaaaaatagtgcaaatataaaaaaagataagccatacttaaaatacttttgataataaaacaagtcatatacaaaataaataataacttcataatcttttaaataagaaaatggtcaaacgttaaaaaaatgataagtattttggaacggatgtagtattaatttgctgtcatcagaagataattacacaagctaaaatcgccacgaacaggaggtatacagggtagataaaaccagtagtgcagcatttgccatagatgctactatcccctgacgatttgctctccagcagcagcatggcatgtcttctcctgcgacgccgagacctccacttttcgagggcgtcggggaggggcatgaccaagagaggggacatgaggcggaacacgagcaacttccgcagggggcggaggtggaagaggccgagctcgacgcggcgctcgcggtaggctcggaggacggcggcgatggcggcggtggcggcggcgatgtccgggaggtggcgcgcgtaggcgtcccaggtgcggatgccgtcgacggcgtagatggtttggtcgaagatgagcaggtgccaccggagccacacctcccggcccagcggcgtcgtcttcaacctctcgccatcctgcatggacatcgtgccccccggggttcgcaccagcagcctgaatcgcttcctcggaatcttgaaccttaacgccgccattgttcttgctcttgctctgctagctaattcgtcgacgcgcgctctgtatgattttcttttcttttttttttttttta

SEQ ID NO: 19545 - DNA, 2510 bp, Oryza sativa
cagcatgcaagggtaaattatctgggcagcaggaagtattcctggcccatatggttccacatacttacaataactgcagaaaataatagcgcggcaacttttgtgtaagaaaacactgatagatatttagacaaaggtgaacaagtcttgcaagtgaaagaatgcctcgaatatatatgtaaacagtagagataccttgccattcttttcatggtgtattttctggaaacatccatagcaaatggccagtagtcgacagcgtgatgattcaattcatcagaaaaccatatgatctctactttgtcaaggtgcatgccaactgccttccacatcatgatattgtagcggataatagcctgtattttgtttaggttacaggtgaatctagggttccgctgcggaaaccaatctgctatcaatattttaactgtacagccagctctaaccattttgttgacatagattgtcttcataataccctgaaaatgataacagaccatgacctagttatctgtgagcagtgtttgaaatgcaaccagagaattggatttgcataggagcacataaaaattagagatccacgtctgaaccatggcatagaaatcaagcttcttgtactactacaaatatactactggtattatattagtaccaccattatgtttttatgatatttcttggttcatacccctcttgatgagtttcatcctagcctgcccaacttgtccttaatatcaggggctaatggcagaaccaccaccaccactattatcttttatactgtactctctccgtttcataatgtaaaactttttagcattgtccacattcatataaatgttaattaatctatacacacatatatgtctagattcattaacatctatatgaatgtgggtaatgctagaaagttttacattatgaaacggaggaagtagtatagatatatattttctaagaccgacataaccttttttcttattgttgttgctatacctgctctatgcccatcatggaggttggctcaaaccaaacacagcagatgggattaggcttcttcttcagtaatacgcgtagctcatcctcgcatatgcactcctccgcaatgctcctcagaagtgcaaatttctcatcaaatcccatctccatggtatccctataaaacaaagaccaaattcacatgtgatgtcattactacaacttgaggggaaacattacgatttgtaaattttccctgatcggtcgtcaatcaatatcgtggcctgggacagttgaactctagaatataataagtggggaatttgagtatttgcccgcccctaaattcgtcgcatgtttaggtttaaaccccaaaaaggatgaaactgatgatttgccatattttgaagaaaaaaaaaatctttttaccaaaacccttttccaatgcgaaaagaccatgttcctgctgaaaggagaggatagagggcgtaccgacggagagggagacagcgtcgtgaaggggataggaaagcggctccaccgttgtgtagggagaagacggcggcagcagcagcgtacggacagatggcgttggcggcgtaggaagaaattacgaggaagaaatttggttaggtcgacggctggttggaccggcttgctttagacttggagtttttcttttagtgggctccatgccattataatttattagttttttaaaaaatatcattactactcgctccatcctaaaatataagcattttaaaaagttgagactgaatgatgtctgttttatggtttaagatggtaatttacaccgctgctatagtttaggggtgtaattcggattatttcctattttcaacttgtaaagcaaacattcctcggttgtgtgggacatcgataccagtgcatggtgtagttttttttttctttttaactttttactactatattcaatgaaacttcacgctatctaactggcggttcgttaaaaaaataaagctaacataatggcattaaatattgacagattttataaggtcaaaaattgttgcccgtgcaatagcaggctgctatatacgtgccaactttgatggattgatcgaccatcaatcaaccaaactaataatatatattctcaacccaccatatatatttattcatagacatgtataactatacatatgaggccatatgttgatgctgcgtatagtgtatcttgatacgttattcatacaatgtatgagtcggtttttaaatccgtttgattttaaaaatacaaatctatatttgagccaggttttaggttcgcttttggaaatacggaaggagtcgtataagatatatttttaaaaaactcgcatgctaacttgagatgatcaggctcttaattgcagcttatgattttctaaaaagtatatacccaagtgaatttccacattgaatttcatcttaactaaattatataacaataataagattataataacattcacccgttacaatgcataaatatttttttatagtat

SEQ ID NO: 19546 - DNA, 3638 bp, Oryza sativa
taataatagggaggcagcaacatgaaagcgtaagaagaatacgtcaagtccacacgaaagcggtattcgatggggacaaaccaggataaggcgaactttccggcgggaagccaagccgagctctcccgcctctcccacggccacagccatggcggccgccgccgccgccgccgccgcgaaacccaaccttcttcttccagtctccgtggctatcccctcttctagggtttctcttcccaccggcctcgtatgcagcgcacggtccccgccgccacgcctcagggccgccgccgccgccgccgccgcctcccaggccctaacgtcgcctgtcgcggcggagactccggaggcgaagcagatgcgggtagagacggaggccgccctggaatggggcggcgtgtgcgcgcggctggccgggttcgcctccaccgccgcggggcgcgccgcctgcggagaggggcgggtgcccgtcgggcggagccgggaggagagcgagcggctgctcgaacagacggcggcggccgcgctgctgcctgctccgctggatttcggcggcgtggaggacgtgtccgccgccatcgccgcggcggctggggcccggctgcttgcggtgagggagatatgtggagtcgggcgcagcatccgtgccgcacgcagggtgttcgaccaattgaagacgctctcagaggagacaccagatggaaggaggtgaggaagttgcttcctcgaactgaatttcgtagcactgagctaaactgaatgcataatttcgagttaatgattgtaactgtaagtgtaactttgattagcactcctgtcctgcagctacactcctcttctggatataatgcaagactgtgacttcttgacagaacttgtgcaacggatagagttttgccttgattatactctttctgtggtccttgatcgggccagcgataaactagcaacaatccgcaaggagaggaggaagaacattgatatgttagaatctctgttgagagatacatccacaaagatcttccagggtggtgggattgatagccctgttgtcactaagcgccgttctaggatgtgtgtcggtgttaaagcttcacacaagcatctggttcctggtggaattgttttgagttccagtggctctggcgcaacatattttatggagccaagggacgccatcaggctgaacaacatggaagtaaagctctcaggtgatgaaagagctgaagaattagcaatattgggtctacttacttcaagcatagctgactccgaaatgaagatcaggcatttgatggggaaaatattggaacttgacctggcttgtgccagaggttcatacgctttatggataaatgctgtgaggccagcctttactgacagggatagtgatactcaactgaatccaaatagtgaatgctcagtttttatcgagggcattcagcatcctttacttcttgaacagtctcttagtatggtaaaagaatcaaccagagtagggaaaggacagctttctgatgaacatcttgtctctccaatgcctattcctctggacatgcaggtgagaaacgatactaggataattgtgatctctggacccaacactggaggcaaaactgccaccatgaagacgttggggttggcctctctgatgtcaaaggctggaatgttcttcccagccaaaggaacccctaggcttccatggttcgatcaagttcttgcagatatcggagatcaccaggtagtctctgtcttttgaagagaatttctctaatcaattggggatgcttattgatgcaaactcttttctggattgaagtcgctggagcatagcctctctaccttcagtgggcacatatcacgtcttcgcaagattgtacaagttgtgtcaaaagattctctggttcttattgatgagatcggcagtggtacggatccgtcagacggtgtagccctttcaacaagcatcttgaagtatcttgctagtaggcttaatctggccattgtgacaactcattatgctgatctaagtcgtctgaaagctgttgacgatcgatttgagaatgctgcaatggaattttgtttggaaactctgcaaccaacatatcagatcttatggggcagtactggtaattcaaatgcattgagtattgccaagtccattggttttgatcagaaagtgcttgctcgtgcacaagaatgggttgagaaacttttgcctgacaaacagaaggaacgccaaggtttactctatggttctttgctagatgaaagaaaactactggagtctcaggcaaatgaagcagcatctgttctttcagacgttgagagactgtacaatgaggttcatctcttttactctattgatctgcttttgacttgtccacagtatttatgtagaaggatcctctttgatgattttacttgaaatcttacttaataatattttgatatgaagattcgctctgaagctgatgacctggatagtcgagtagcagctttaagggcaacagagtctgaaacggtgcaacaagagttaaagtttgtgaagtctcagatggaccaaataatcaagaactttgaatctcaactcaagaattcagaacttgaacagtacaattcactaatgagaaaagcagaagctgccactgcttcattggctgctactcaccagccaactgattttaccttcggtgatgaagaaaatgagagctcatatgttcctgaaatcggagataaagtgtacgttgaggggctgggaggaggaagtatggctagtgttgtcgagacacttggggaggatggtagctgtatggttcagtatggaaaaataaaggtccgtgtcaaaggaaacaagataaagctggtccaaagaggcacgaaggacacgtcagcctcctctcctgtaaaaggaaaggtgtgctttgcatcatccctgtattagtgataattatatatattagcattcaccataatctgttttgaatgttagaggtcaattagaggtgatattgttcgcaaattgaaatttatttcatgagataaatgtgataaaaagaactaaattgcaacaaatggtgtctcataacagttgtcatgattatcatagaatacattaggtcctcagaacttatcaagtaaatgtatgtattaaattatgtctcataacagttgtcatgattatcatagaatacaatggtcctcaaaacttatcaagtaaatgtatgtctaaaattgaacaatggatgcttgtttagcactcaccagttacacagcgtgcacgtgcagcatagacaaagattttgttcttaactcggtaaatctggtctacagattgctggcaagtgtagtgtatccagtttgtatgacatagtaggtagactctgggctggcatatgagtcttaactcttaattgagttgggcttcgtgtcacaatagattgatgtgttatttttctgaaatacttttgcgtgtattcgttctgtcggtcacgttgcatattaatatgtcaattcaaggaaaccaagttagcttgcggcctacagtgtgcattgaatctgacttgctagtattgatggtctccactttagtctgggcagatgcaacagatcgatagtaagctagctggacagtcaat

SEQ ID NO: 19547 - DNA, 4188 bp, Oryza sativa
cgaataagcacattatacggcttcatcgaaaacttatggcaaagatcgtcttatgcacacttgcacgatactagctggattatacaggattgtatgccacgtgagatgaaattttgaagccgtatggttgccatgtgacaactgatttggacaaggtggcccaggaactaatggagcttggagctgatctgtgcgctgatacaatgcacaatggtggcattcaagattagcctgtgagtacgaattcttgcatgtgttacctttgacttcttaatccatggcagatatatgcatagttttgtacaggtgaaagtcacacggtacttgagacagatctccgtacatataaactacacatgcgtgcagttcgttctgcagttgaaaaagattgtccggtttgttcagatcacgcatatcatattacaacttccatcctaaaatataataatttttagcatttaaaatttatactaacatatgacaatttcttcacctacaatttgttatcaaccagttaaaatcttccatcttttaatttctatatctaccttctcttcctaatcaattataacactctttatttaattttatctagtttttttaatactcatgtctagtcttaaaacttcttttatattttaagatggatattgtatcatggaatggatcagctagctatttggtgaggctctcttaaatgatgctgctgggtggcagctgattgctgggttggtgcgttgggatcggataaatggccttggcaaatgtgatcaacactgtgtcctacaaaatcgcaaaggaagagcctggatgcatgcatatgcatatgcacatgcgctagctctcttttcagcaatgggcaccgggattttgtacggtgagttcttcctcctaccaattgctcacaagccatagccatagttgtgcaatgctttctgtttggcaacctaattgactaaggagtagtacacataacctttgggtgtttcaaaatggatcctgtttcccaacccaagttgtgtgcacggaaaacggaacggtctattagcgcatgattaattaagtttttactactttttttaaaaaatagatcaatatgatttttaagcaactttcatatagaaacttttttgcaaaaaacacaccgtttagtagtttgaaaagcgtgctcgcggaaaataaaatgggaaagttgggaacaaagagttccgaacacaagccgcttacaggtcagatgctatgccattgaaactgattgagacccataacaatgcttaagatcagtactagtacatgcaaagctgaacatgaaatgtactagatctggtgccactaggaaaaaataaaaatgattagtgttcaagaataacttagccgcatcaaatcccggccggattccagggcacatccggtgccgaggcacgcaagcgaaacacacgaattggaatttcaggaaaaaaaacacacgaattctacccaaatcaagttcatttttctaaacaatacatacaaacttcaaacagagctttaattgcgcgcaacgcatcactcttgccaactgccacgccggacagttgaagcacacatgcacatatcgccgcacatgcatcgacgccgacctgctggtcccgcctccgctgggccccgctgggccccacctgccagccaaaggggggccgtgacgtcagcgtctacctagctcatggcccctcgtgctggtgtcagagaccccccctgtacttgccaagcagataggaggagcgaggagaggagcccccctcgaatcttcttcttgccttgtgctgttatcatagtacagtgctgtagtatttgtttagtttagcgggcgccatcagcaacagcgaatcatgggatggaaaataacaaaatgacagttctaagcagcagcagcagtagcagttatactagtctattcaagatccccttttggctggcaatttggacagttctttccagtggcattttccttcttcttctcgctctctgctcgcagctggagctggtgaagcactagctcagctgatcgttgctgctgcttctgcagcaaaacgtccttttcttgcctcctcttgagtcttgatctcctatgccacaagctcccaaagaggaacccacaagtttgggagcttcttctcctttcagttttttgctcttcctctcaaggagttttgttcttgcattttgtctcttcactcttcatctcctagctagctagctagctagctctgctcatcttgccagttgcaaggcttaatagtaagttctttgatgtaacgaggaaggagtgttgttgttgttggcgacaaggtgttgccttcaccattccctcctctccccacaaggtccaaaagcctaaacttagcaaaggcgccataaagtaatcaaagctgaagaaaaatattggtgctcctttctcctcctcctcctccaagatccctagtttttctttcccatggtccaggttttgctctgcctgatgctaatggcaatgtaatgtagcggacagctgcatcccatgccaagaaactggggaaagaacgggtctttttaatccaacccctgcacattgctgcggtttcttggtctgttcttgatccttgagctcctctcgtggcggcaattgcaatgtggtgcctgcattagaggcagaggcggttagtggagaagaataggaggagttgctcatcaggaggaagaagaagaaaaggagcaaaaggtgtctccttggtgtgcgtcttgaggggaaaaaaaacaagatggccggaggcgagggcggcggggctgccgccgtccctgaggaggggcggtcattggcgctgacgccgacgtggtcggtgcatcgtgctcactctcctcgtcgccggctcgctgctcatcgagcgctccattcatcgcctcagctatgtgagtaccctgaatattacactgataaatgtagtatctctttctgttaatccgttcgtcacttgcttagtgaggctcaatattatctgtgtgtgttcttttttctgtttggagaaaataaaaagtgtgttgatggtttaatagtagcttggccctgtctgggactctcctttatttttttcttttgttcatctttcagagttttggaacaataagcaatgaaggataagcttttcttttctgtggaagttattctacattatatgaaagcctctcttccttttcttttaatcgattattcagtcacgcgttatgttgaaatagaactcatagtaatcttgtacatgttcagtggttgaagaaaacccaccgaaatccactccacaaagcaatggagaagatgaaagaaggtaggccatccgttatttatttctctttgctagcttgttttcttggactgctgtgcaacgtggactaatgatttgctctgactttgctgtagaaatgatgttgcttggtttcatatctctgcttctggcagctacatcaagaatcatctcaggtatatgcattgattcaaagtactacaacagcaatttctccccatgcaccagagaagaggttgaagaatctataaagattaagcatgccgtatctagtgcacgcaagcacctaattgaagtcattctgcaccatgcggccaggaggaaccttaaagctcgttaccatcataatcaaagttgcgctgaggtgtgtttgttaactttctgactgctggacttattgggttggatgacaaatgttgtagtaaatgtcatgtgcagggatatgagtcatttgtttcacatgaaggtctggagcagctgcaccgctttatatttgtcatggcagtaacccatgtgacatacagttgcttgacgatgctgcttgctatactcaaggttttttctagttgttataaatttccatttcagttacaagttacacctcttataaacttttctaaacatttgcaactttcaatgttattaagatgtactgttgattttcattggtatattttttaacttgggatctttggatgtcatcaaaacacttataaaaaatacagtaactatatgtaggttacgcaacatatcgatgtatgaattcaatggatggctaaaaagctaatggcattgcctgctaggcttccatgaagcttttgttgctggttaacatttttcaagcttactaatttgtgcatgtctttactactaaagc

SEQ ID NO: 19548 - DNA, 572 bp, Oryza sativa
ccccggcccggcggagtctggcctcctcccgagcggccacctcagcctgggaacccggacggcctctgggcagcctcctcggcttctcggagacggtccgcggcttctcgccggtcagcttcccgcctccgggcctccgcggtcgccgtctcctcggcctcagaccggccggacttggaagggcggggggtgggggggggaggggcgacgggatctcgctgaggcggaagaaaaaccagaagacaaaaagaaacgggtgagtgaaaacttgccttgggagacgggagaatgaatatggccgcgatgggcgcggggacgaacctgcggggaggtcggctaaacgaccacctcgggggcgagatgaggttcccccggcatggcacaatcccccccatcttgcggagccgtttcttcttcgctccccctcgggctgcggcgtcggcacggcaccctccgggcgcctgctgctggcacgcaccgccccgtcccctcggggagatgggggaggggtgccctcctgcttcctcttcccccgggcgtcggcagggcggctgccccccgggcccccgtcg

SEQ ID NO: 19549 - DNA, 3583 bp, Oryza sativa
tcccaaacacccccttaatcatctctaactaaatttgcttacttgcattatatattgagatggtgatgctaacaataaatattattaaagaataacagattgatgattttatctatgagaataataatgtcataatcatagaacatgattgtgatacttagcctgagatggccgatatctgaaacaacaatatagggtcagccgatatctggaatacctcacacaagtagggaattcagtgacgtgattctcagttaaaggtatcactggttgggaaaatagactaaaggaataagattataacaattattttaatacctctgaagagtgtatttgaaccactatatttagtatcttttattaatggatggctattaatatctacagtaataatgtttcatctaagaaaaagagtaaatatactaatcttgcttagtatgtgtaacatactcatattatttcttgctatttgatgtgcatagaaactagtcatgatgacatgtcaaagggggatggcgacagacaggcctaatggggagtgttgtcttctttagtcttcagtttaaattaagaggatatatagctgcttgccaggtgtagggaatagacctgatgacaacatggtggtcagtggaccagtggatgtatttaagccatgtagctggtgcaaaataaatgaagccattgctctagttttgcaaactctagttgggatagttagacattacatcttacctttgtatccttatggaacatatgtatatatataatccctttgtattcttatggaacatatgtatatatataatcagtatatatgcttataaggatacgacagactccaaaaaaaaatgagaaattttgggtcatgacaagctgcttatacaaaaggtgattggtttttattaaaaattacaaatggtgcaactctatgtcactatttaccatctcacagaagttgaacatgaaacaataattttatgtaggaaatgccaataagaagtaaaatgatcaattcgagaaaatcttataaaaatctcagttccttttcaccaaatttggaacacccgttatcgtagcattacataatttttaattgcttagatcctaatagccttctcacagtcctatacggtgttattagttcctccatatcttacatatataagggcactaaggtagcaatacataattgactatgttttttttccttaagatatactccctccgtttcacaatgtaatcattttaatattttccatatttatattggtgctaattaatctagacatattcattcaatatgaacgtgagaaatactagaatgacttacattgtaaaacggaggaagtactatggatctcacacatccgaaggaagcatggtctagatatgtctcttctctatctttatttgtatgatccaattagagggatgtcacgccccgaactagtcccgagcggaactagcccgtgacgctccaaattaacctgttaaccgataccagtcccaggaaacagtgctggtatcacaggaagacggaatatcacagcaacagatgtctctttattatagagtaggagtacagtcatgttgggctgcggacagatcccgagctcacaactgcattacaaaagggaagtggaagccaagacttggaccaaacatcacaggcgcgacttgggaactaggccgaaaccctaaaactcatcgtagccggcttgctcctggaagaactcctcgtcagcgggatccgcttcatcttcttcagcaactgggggggaattatttatatagagcaagggtgagtacaggagtactcagcaagccatgggaaataagtgtttaatgtaggcttcaaagaaaggctgttgtttttgcgattgattttatttaaactcttttctgaaacaactaagggagtgcttctcaaatgacacggatgaacagtgcgtctcgtccggtcggagtatgtgcaatgattcagtcttttgaattgatcaagattggcacccggccaaaagctttcaaacggccacccgggcctggctgatcccatcagccgcagattttccaaacatcaacccattccacacagcaaatttcacaaggcagtagtcaaacaaaaactacgctaggaatcacctcacatccgcccatgaccgtgggcacggctattcgaacagttttaataacctctgcagagggggtacactttacccacacgacattactaacccggatcatccagcccatgcagaacggccacgactagagaccttaaggctttcataacaaggcatttcgaaagccgacacagtttcaccatatgccaacgagaggggtcccagaccaacaccagattaggtcccagaccatactatgccaggaagcccaggggtcctccccgacaccaccccggcgaattcacatgtctcttggcatcatggctcccccgataagctagttactcagccaggggtgtcccattccacccatgtggtcgtacttgtcttatgttcggatgaaattccaaggaaacggtccttaagtgcaagagcgggaaaccgtacacccggtacgttcctcggtccgcgattttggaaattcatttagttcgcaagcaccgacccagctgtcgggttttccaagtcttttgtaaaacccaagttttacccaagaagtttctcagattttaagtttgaaggcgaccgtcgatacctgtgcagagtgcacgattaccgaggcgcaactaggtgtatacaagggaacatggtataacaattacaatggaagggtcaaatgcaacaaattaggtaggtccgccaatctgccttgcagacgggacaagcagattaagtgcgatcctatcaatgcataatatttttcaagcaatataattaagttcaaatataggctcaagatgttcaaaggtggcttgcctcgctcgagatcttgagcttgatcctcgaaatcctcgcactacgggtcttcgggctccgaaactacacgcgaaacgggacaactcagcaaacggcgaaaataaagccttattattgacctctaagcgtgccattagatagatctcgagatttgaggaattttggaagttgaacggagtcaaacggacttactgttgggaagatattgaatttctaagattattggatttttagtctaaaggaaaaggatttatttaaatcctttttgaaaaataaaagaaaagaaaagaaggagggacggaaattagacttccctcgggcggctagggcgcgacccgagagaatggggcggctcggccgaccttaatgggccggctggcccaagaaggcggcccaaggcgcgcgcgcgggcggggaggggagagagagagccggtgggccgggtccatcccgcgtggtcccgggtgggacccgcttgtcggcgactcggctcaccgtgagcgaggtgcacgcggggcgtgctagggtttggggagggaggcgcggcgcatgcgcgcggttcgcggaggacgcggtgcggcgggcccacgcgcagcctcacggctcgcgcgtggaccgcacgcgcgagggggcggagggaa

SEQ ID NO: 19550 - DNA, 4507 bp, Oryza sativa
gaatcgcatcgagggaggccggcgacgagaggcgcttccgagctcgggcggcgacggcggcgagcacacggcgagcgacggcagcagtcggggcggcgccggctagctagggggggctacacatgctactaccgaaaactaaggggaagagatggattgaggagggagaacggggagatgcactaccgagatgaggcggggcgctgtgacaagaggccgacggcacgggagtgatctctccggcctcgggccggggaagaggaagaaggcgagcgcccggagtccccttccgcgtccacgaacgcaccggctctcccggtgcttggcgatgaacggcggaggcgagacagaggggcgacaatgcgcggtggcggcgagcgaaacgggaggaggaatcgatgggagggcgccttggtttataggacgacgatgtcggtttggaaaccgaccttgggcggtcaaggcgcgagctggcgctcggcgctcgcggccaaaacggcgacagaggcggatgacgtcggcggggaggggaaaaggaaaaaggaagggagaaagggggcttgcccattgccactttgggaaaaggaggaggggatgggggcgaccggcagagggaggaggagctctgccttcgtcccttggaggctagcgcggggagaggcggggccgagtcgatgacgacggcgatgacggcggggcggtttggagcggagcgacaacacgggcggctggcgtgggcaggcgctgacggcggtggcgaccaggcggtcggccaccatggcgcgcgcgcgcgcgggaagcaacgggcggcgcggcgagaagcggcagcgagggcggagagcgctcggctcggcgcggctcacgcgcacgcgtgcgcagcgcacgggtagagcgggggagagggagagggagagagagagagagagccggggagggagggggagatgggccgagaggagttcggcccatcgaacccgagggaggcaaaatagacttttgcggagagatttgatttgggaaggatttggattcgggattgaactcgacgatagattggggatttgagatctgagatggcatggacactagacaacaagcaaagaaacggatttcgtaaatagggtttttaagagatagttttcccgctaggcgccacgatggaacgggcgctacaagggaggactaatttgattgtacaattaaacataattattagcaacaatagtgcttttatatttgtgaaaaaaaaagagagagcccctaaactttccataaagaaaaggaatttacacctacttgtttttaaaacaaactaagtctaatttcttttagatgatgaaatggatcataagtattttcttattgaatgcattgtatattataaattggccctcttcttttctccaacaaaaactggataaacttttggataaaaatggcacgcttttcaaactgctaaacggtacatttcgtgcgaaaactttctatataaaagttgctataaagataagattaatctatttttcaagtttgtaataattaaaactcaattaatcacatgttattaccgcctcgtttcgtgtgaaacacctaatctttatcttcattttcatcttcggctccagtggtagcggcggcggaggcaagggcggcgggacgtggagtgaggcggcgacggcgacctccttccctaccgtcgcggcggcgcagagctcggacacaccggcactgcggcggccgcccccttcctcctgcgccgccgtccgccgctctcgcctccgcccgtccttgccctctgcctacccccgcccgtcctcgcccactgcctgcccccgcccgccgcacttcctcgcgcgccgccgtctgttgcccaagcgagccaccgccctccgcccccgcccgccactatcttccaatcccgtctctggtgcagggcggcggggcctcgaagacggcgagggggaagtgccatcgtgcgccgcagcctctgccgtcgttgccgccgacgtcgatgtcgtgcgccgcctctaccgacgttgccaccgtcgccgcagcctcttcccgccctgacgagcgcgtgcccgactcggccatccctgccgcgctcgcctcgcctcgcctctaccgccgttgccgttgccaccgccgcaacagcctcgtccctccccgacgagtgcgacagggccgccatccaccgcccgccttcacgcccagaaatttagcccaaatttccagactattttgtgtattaaatctctgtccagaaccagccagggtacacaaaacgacaagtaatataccgttccaaacgtaaataaagcgtaaaatacttacagaagaggcacttagtcctcacaccgaaacaaaagcagcagcagcggaaaaaggcgatcctagcggggcttcagctccactccacaggcaaaactcaactggggtctgagccttggtcttctaacttcgtcttcagctcagaagcacaatacttctgaaaatggggaataatagcaaggctgagtacaaccaccgtactcagcaagccacatcaatgatgcagacgtgcaaggggaacacaaggacggtttgtggctatttgcataaaggcggttgtaaaacattttattgagcaaaacagtaaaactgttgagtaattaaagtaacattaaatctccactcatcaacgctacaccacgttgaacaggcccaaccaacccacctgaactacagtgcattgagtcgatttattaaggtgggactaatcacggtgaatctggtcgaccgcccgtaactgcgggcacggctattcgaatagttttactctggccagaggtgtacaactgtacccacaagactcagccccacgacacgtttccgtgcgccgacatgccaccacgacatactggaaagaggccgtgacaggacccttcgcataaccccctctaaccgatcgcaccacaccttagggttcgcccccgcccccagcagacaatgggcagccctcctctcgtgccgcgatgaatccagaagccgatcaaccggacaccccggccgacccaactccatcatgcccaccctcgcctgggtacgtcggctagaggaaagctacactacaagcccagccgttaccacgctggcttgtggtaagtacgataagttcttctagggcatcccacgaaccggtctttaattgccatgggtgcgactagcataaccatgcacccacagcccaccattcagtcgcattctagttggataattacgacaatgaagcatggccagatgtctcgagcacgcagctcattctgatactaaaaaggtctaatattgtaattatcccatcaactgagctagtggtaattaagcatggctaagcatatagttctagctaggtcacataagtaacatgagctagccaatttattacccaatgttgacaaaggacggatatcaagtaaacatggcacaagcgagcagataggtaaaactctgatcccatgtaattagcaaaacatgcatatttatttgcaaatggtaaaacatttgtaaattgggatcaacatgctcaaggggaatgtgtgacttgccttgcttctttactttgatcttccgaactcttttcctcgcgaccgcgaacttccgaaacgacggatcctacatgctagcacgcaaaacgaggaaaaactctaataaacaccaagaaaacagtacatgaaaagtaaacaaacatgtagagcttaattttagatgaattttgcaagttgaatggctcaattcggagttcgaatgaattagatatgaattttagaagttttgagccatttaaatgaatttctagaattaatatcgatttattgcacaattattaattgttttctcaagggaaaaggcacggctgacgtcatcaaagaggaagggcgcgccgacaggcgggccccatacgtcagcgggactaggggagggcccagagcacgggcatggcttagagccggcccaaccgagacacgatgcgcggcggtgaacggccaccgacggcgagcggtggcgcgagagggcgcgcgaagggtggcggaaaggagaggaggaaggggatgctcaccaagcggcacgacaccggacggaggcgagatagcggcggcactccaacggcggccaacgggcgacgaggctgcggacggcgaccgggacgacatggggagcacgatggaagggttaggaaaagggaggaggcgcgaggcggcgggaaaactcggccgaaagccggcgacatggggagtagctcacctcgacgggaaggagaggactccggcggtggaaggcgagggcgatggggcggccgaggtgcggcaccagcggagaagccgacgaggcgacagcacaccgtgaggaggtcggaaacgacggcaagaggtggccggaggcgacagtcacggcggcgacctcgggttcacggtggggtggtagatgcggtggcgatttgggaaaaccaagcaaaggccagtgtgcggca

SEQ ID NO: 19551 - DNA, 1808 bp, Oryza sativa
ggttaaaatatggtttattatttccatcggttaaatagtttttccctctatttgattgtgtatatgtgttctacatttccaaataatgttatctgagccgtttgtattcaataaacaatatacatattttattgtagtttgcctaacagttttttctttttatgttttttccctgttcactcaatttaatataattattagttatgttttctaagaggttaaacgtccttaatatcatactgctacataaattacatggatattgaaaatccaactgaattacttatgtgtttgtttcatatttttattcatcacaacaatcagttttcctttttagtccgtgtgagcgtatttgaatatcttttgttatgtgcttaaaacatgagcatgaatgtgtaaagaccttactcgattcttattagatctgttgacatccctaccccataccgtatttcatgttgccacaattgatgtagcaaatcttcaaagatatctagttgggagatagtgattttcataattttctatgtagcttgaatttagctaggccccattcttgcacttttattttcttttcttttttaaaagtataatatttgcatgtggtggattccttgacgcaccaaagaccacaagcagtgatggccacagcacaagtattgtttcatcgtttttactgcaagaaatcatttgttcggttagcgttaaggtaagcaatcttttgtctcagttactctgatcaaaccagtctttgattttatgagttgaaccaatgaatatctctgtttatgcttgcagagagttgctgcaagctgtgtttggctggcagggaagttggaggagagtccaaggagatcaaagcatataatcattgtcttccatagaatggaatgtaggagagagaacgtaccaatagaacacttagatgtgttttcaaaggtttatctgtttctttactctctgtttattttaaatattttttgaacctttgtgcacttcaaatcttgatgtctctagttcttgctctcttgctgctagagctgtaatacctatgcttttttttagaaaatatgtaacttttataaagaattatgctaattgaaagctgtaactatttgttgcagaaatactcagacttgaagcatgatctggtaaggacagaacgccatctgctgaaagagatggggtttatttgccatgtagagcatcctcataagttcatatctaactaccttgcaacacttgaagcccccgaactgacgcaagaggcatggaaccttgccaacgataggtacttcatttgaactaaacttaccttattgtagttagatattcttattgaattttatgcagttcaattatatcttactcttaagtcttaactagttttttatagtccttgggaggtatttctagttgtagactattaaggctgtgttcggcagcttgtgttcccaacccctctccctcgttttctgcgcacacgcttttcaaactactaaatggtgtgtttttttgcaaaaaaaattctataggaaagttgcttaaaaaaatccatttattaagttaattttagctaatacttttttaattatgcgataataagctgttacgttttccatgccggagggatagactcccaactggcacaaacgaacacagcctaattgtacctgttatcttataatacctcccaaggaccaaaaataataatatattctaccttattggtgaaattttgttttagtttagaattattggttctcttaaaagatttttccagcattgctcttgactttctcttatag

SEQ ID NO: 19552 - DNA, 2886 bp, Oryza sativa
agctgtggacactataaatcagcggttttgtttatgttagccacgtggaaatgacttgagttgtaatcaatgccatggaaaccattcgttttcatttactaagatatactgatcattaccatcgcttattaatgctcattggatcaactttttttttgaataaccatgtttctgtaggcgaatggcgaagcgacggttgtgagtaattagcccaaatattcctctgggttaagttaataaaagttttggatgccagcccaattttgtgctaggtggagattagttgttgtaatgttcgattccgccgacttaacctgtcagagatgtaaacagaaagtgttcaatctcatcatacttgcaataaagaatttgcatgcataactgcgcagttgcttgatgatcatgatgagttttaaggaaacaatacacatcaagctatgatcaggtggtttcatgttcatcattcgtaatggaaccaatatctgtgattggcaatgatacatcattgtaatattcagctgcttatgctctactcctttccattgtacttcatgtcagtctggagaagaaaggtgtacgtgattgctggacgtttgacctatgaatgttcaagtccattcagagaattattatataaagctctggtttatgcctaagtttgcagcttaaaatggaactttatcaggcaaggatgctctgttcaggatctgtactctatgagtatgatcttttgataacgtggcagtttgaatcactcgatgtttttctcttttgggttgggcaaggatgtaacctaagatttcttagttgactacggttgttatcggatcactaagcttctctaatacttccttcattccaaaataaattattttttcacctatctcacacatcaacacaaaacttaaaagataagaatacttttactttatcaaatctcaatatagatattcttcactttatttatttttaatataattatttcttattttcacaaactctgatacatttacttaaaaaatgagtttattttaagataaatgaggagtcaaaaataaatttattataagatggggggagtaggttctagctggttgaaaactgtatcgatcagttgattccaaaggattagactgcctctattaaccctctggacggtctatgaaaactgtaatgaccagttgatgcaacaaatcatgtggtatttgagcttttatatgctggactagcagcagaaactgacaaaagtagttaaatgctaaaagtaaccggtggtgttcgaaactggtgagatgaagattaagtagatgcaaataaaataagaaagttattagtacatgattaattaaattaaattatcataaatttgataaatggatatatttgatattttaaagcaacttctgtataaaaaattttcgcacggaaaacaccatttagtagtttgaaaaacgtgctaattgaaattggggtaaaatccgaatcttaataagaaaagaatattgtttaaatatagataaaataattgaaaccatcaatgatgaccagtattgcatactgacgtaatcacatgcatttatattttacatgaaccgtcgaggtaccggttgtattcacgtcgtgttcatcgtcagaactcgccgttgtagtttctctctctatcgggaccacgtcattatcggtcacgttcttgctgttatgattttcttcgttgccaatatccatcatctatggacgagtcacatcgtgggacacatcctaccatcttacttactattattggttcaccgaagcaccagcatccatcttccctcctttttgtttctcgcttttggctaggaaagacgatcacaatgcctgttgggtgctattgcttctttgtccaacctaaccatgctcctgaatcactcacataatattgaaaccatagtaatatgaatataataggaaaattctaatttatgttaatgaaacgggcacccgttcggaattaatggatcaaattttcatctatgagttaaagtaagctttttcaatttctagctaatttcatttgttttttcatttacaattttagttttagcactatttgatccactaaaaattatttttaacttataatttttctctgtattgaattatttatagctaaatgaaaaaaggggatttagttatataattgttttaatattaaattatcattccgaccaaacttatttgtggtttcatgtcgttatttttttattatatttctttcatcatttatgccgaattatgatatatgattttaatttatgtcaatgaaagttatctagaatctattacaatacacaaacgttatgctagtacatataaatattatatgtacgtatatgcaattttgctgtatatttatcaacaaattttctcctaaaaatttgacggatgtaattacagtacaatcgtaatgtaactagtatgtaactacaatgcaacttgtatgtaacttttacataattttgaaccgttagatttgtttcaagatttgtgcaactaaagaaggaaaaatgtcattgcgcgcatatatgcaagaggattcgttcccacgacctcttcaccgaaatagcatgttacgaagaaatttttgaaagtgatatacaagttacatataagatacggtgtaattagatcatgattatactataattatatttgtcaaatttttagaaaatttgacgaacaatgccccacgacacgcggtgtccgcgtcatcttccggaacggcaaaaatatagtcctatcacttttccggcggcaaccccaatttggcaactcccgagtctccgacacatgccaaattgcttaatttcccttgcccggccggctgctcccacactcccacactcc

SEQ ID NO: 19553 - DNA, 1207 bp, Oryza sativa
cgatgaggctggatccattggaaagaggactccgtaggctttccatcaagtactcacgggccaaaaacggaggtcgtatgcagattcggcggccgtttgaaatcaacagtgcagcaggtggccgaatcggattccagcacttggagaccttgatcttgatgtcttcttgttcacgcattatgtgagcaatggttgtatccgtagtagccatggtcacatcagtacccgaggaagatccaagctttttctaactatttctttaggcggtgcagagaggatacgacaagaaaaataaaaggcaacttgactaaagagtgaacaattttattccttaatgctggccatatacatattataagagtcacgagctccctcaggaatcaaacactttgtagtttgtactctagtatttcctatactcactccgtcactcgtcaatacaatataggttaattcttcatgagacttgatatagtttttagtactgcgatttgtttcaacaagatgagtttgcgccaaggtacgatgccgtcgatgcgtactagatacatataaagatttcgcctgcttttctaccacatccagaagttgaatttagaagagtttgattttgaagtcattttatgaaaacaattttttaatataggctttcaaaccgctaataaaaatattaaaccatatttttgtttgcttcttttcacgtacatgtcagctgtggttttgaacaatcaaagtcgtatgtacccctgcattcttaaaaaatcaattctaattataaacctagatatatgcgtgtcaggttgtatatagggttttatcttcttttagaacagactagtaggcacaaataatctaagcgaacaactagcatgtattttatttacagtacgtgacacttctgctctatccgctattagtagtacttttttttttagaactggtattagtactatttctactttttttttttcgcattgcatgtttcacatgtgcacaggcagttgtggcagtcagagtgtgttgggacttgggagagttgtactgggagggaggcagtgtcaagtgaggctatgcgatctgcgatactataagcttgtatatgttcggttgttcactttatcatcattttaactttgctaaattttgataggggtaataatctaaaacaaaatcttagcaatatcattctaccaaaaattagtatact

SEQ ID NO: 19554 - DNA, 3546 bp, Oryza sativa
agtatagaagagaccgaagcttggcatagtacacttgctcgaagacgattcatcccatgaagacgtgtcgcagatgggcgcttgattgggtgatcaggccaaccacgcacagtacgacactggagtgagagatgccgcgtagaccgtagtcgatcacggcattgtcgaggaaatcgttgtagccgagctcttgaacggtgattaagtcaaagttgcgcggggctagacgacgaagacggagcagaattaatgctgatgtcggggacacgaagagtcgacgacgcaaacccgttcattgaagggaaaaaaaaaacaaaaaggtacagcaagcgcagcacagtaaccagcccatagtgctccatggtctatagaccaagtccatgtcctgtcgaaacccagtcagccgaccccatatggccatatcagccttagggcatctccaatgtttatgatcatgagtagcattaaggtgtgtctcactatttttatggttattaccacaatgtttgaagcaagagtaaactttaagatgggtcccacaatgtactattctagtacttcttttatcagccatgcaaatttttcatcatcacattcattttaccctattattttattgcttggggtcaagccataagcttaaagctttcttttgcatttaatgccttatggctttgtttcacaatgtttatggtcactataaaatcttatggcctcttcttatggccacatggtggctgcccttatcctcccacgacttactccatgtctccatccatgtgtgaacactgaacaccgtggctgctggcggcttggcgcagcacgtcagcaacggcgggaggcggtggaggccatgggcgctcgtcgtcgtggagccgttcttcagatccggacaggggcggctgaggcgtgtggagaggcagttgttccccagcggcgacgtgggagagacggccggcggggaggtcgtgaggcgggatctggctggaggagggagccacggtggcggaggcggcgctccctcccctccctcccagatctggccggaggggggagggcggcggcagcggtggtcccagcgatggcggcgcgcgttgtctactgttgctcgggcgcacgcgctgcgtcaagctcgtgccgccaccacatcgcgtctgtcagtccaaggtgcatctcgcctcatgttcatgccggtaccggagttctcatgtttcatgttgcaatgcaattttattggggtggattggagttctctcatggatccctctgctgattttatttgggtggattagagtccaatttgacaattcaaagttctctttatcatattcgcgtacgaattggaaatttggaaacgggctagctgccgaacgacttggttttttttttttggaacagacggtatatgcgattttttttttaatttaggcctatgggcttaatctcaaactggagtaggaatcggtgtgggtttcttttttgcgtgacaattgggcgcgctttttttatgcgatctaaccaaatctgatccgaaacaaatttttttgctatatatttgttgacaaattttatcccaaaaaattgacagatgtaattacagtacaatcgtagtttaattacactgtaacttgcatgtaattacactgcagttatcgtagtgttattacactgtaacttgcatgtaattacgctgcagttatcgtagtgttattacactgtaacttgcatgtaattacactgtaactacagtgtaacttgtatgtaactttcaaaaatctttctgtaatattttatttcggtaaaatggaggctgtgggaacaaatccttacacatatgtgtgtgctgtgattttttatttaacgattcaaaattacgtgaaacttatatacaagttatacggtagttacatgcaagttacagcgtaattacatataagttacactgtaattacatataagttacagtataattacactacgattgtactataattacacctatcaaatttttagaagaaaatttgtcgacaaatgtataggtggtcccgatccgaaatcggatgcggtggaaaaaatagcgccagattagaaatcggaaaaacgcggtgatggacgaaaaaatgcggatcagaggatgagacgattggaaaaatagcaatatttatattagttaagatatgactagaaaatgggcgtgcttgtgatttttagcccgtaggtattgctaagtgctagtatttcaagatttatagtgtcatattattttaggaattagtttagttatatattgggttaaacctatccaagtgttgagcatggccaaaaacttctaaggtccttgatgtaaaatctatcattaaattgtagttctactattaggcgcgctcctaatattacaagcgccaaacatgcatcagctcaggcccaccccaccccatgtcccagcccaggcccaccccaccccatgtcccgttatcccactcccaccattgtcggagtaaacgattgtcggtgacatggggccgggggtatcgtgactagaggcttgggtagccgcgatcactcacgtggcccgaccccctcggggggggggggggggtcgggcccgacggtgacgtggccacctctccctctgtctccccgaggggtcgggccgctcccgtttcggccccgagggctggggcaccccgaccccctgtggtgattggcgccacgtgtgtgggttaggtgagcacagcggcgctcacctaaccgcatttatagcgggttagacgagcgcgtcacgccgcattcaatgcggcgcagcgcatgcttatccggtctgtgaccagtcgcggtatgtgaccggtcacagaccggtcagatcgcgggttatgtggcaacaggcggcctgtcgcacgcctcaccccgtcccgtcggaatgatgagagcttcctggttctcgtctctagccggagctggcgtgctgactcctggagttggtatgtcagtcccggtcagatccattccaggcttcagtgcaagcatggcaagaaaatcgctggccattgaatgaaggatgaaacgggcgtccaccgggagagctgacgagcggagcaggaggcgtgtgtactgcttgtcagaggtcatttccggctgtagattagccctcattgtaaaaagcatgtttcttttcttaggcagagagaggcccatgtggtgatccctaaccagataaaaaaaggaggctcaggcctaaggagagaaaaaagggggggaggtgagaggctggcgacttgatcggagagcctgaactctctctcgctctcgagctctctggctctggagctctcggttttccttcacacacagatccaccagaacacaggagtagggtattacgcttctcagcggcccgaacctgtctacgtggcccgtgtcttgtgcgctttttctcgctgacattcctcatatcgagggcgaagaacctcacttagcgcccccggccgaaccggcaaaggggggcctgcgcggtctcccggtgaggagccccacgctccgtcaatc

SEQ ID NO: 19555 - DNA, 1495 bp, Oryza sativa
cgcctcgtctacggcgatggcggtacgccccagggcgcgctccaggctgcgggcgcgctcttgcgtcacccgcccgtcgtccccgatccagagactccagcccgacgttggctggatgacgtggccgacttggtcatgacggcgcagcagcgactaggcgccggcgggcggtcctccgccaccgaggcctctggcgcagccgccgccggctccaagtcgtcgaggcggagggcgcggcgagcggcggccgttacccgccattcgtccgccattccctcgtcaatgcctccaacccaagaagatgtgcgtggggggccggatgcccgcctcgatatcgagcgccagcgcgacgctcgtcacgccgcccgcgcaacggagggcgcttcctcgtccggagcgccgcttcggtctgggcactggtccggccccccgtgtccccggttggcggtgccggctgtcgagcctttgtggcgagccttcggaacgtccgttggcccccaaggttccggcccaccatcaccgaaaaatacgacggaagcgtcaaccccgccaagtttctccagatctacacgaccgggatcgaggccgccgggggtgacgacagggtcatggctaatttcttccccgcgtcggtccactcttgggagaatttgtgccaagcagttcaccacgaacttccagggcacatatccgcgcccaggcgaagaagcggacttgcacgcggtacagcgaagggacgatgagtctcttcgctcgtacattcagcggttctgtcaagtccgcacaccataccgtgcatccccgcacacgcggtgatctacgcgttcagggggggcgtgcggcacaaccgcatgctcgagaagatcgcctccaaggagccccagaccaccgcgcagctttttgagctcgcggaccgtgtggctcgcaaggaggaggcctggacctggaactcctccggttctggtgtggcagcttcggccgcccccgggtccgccgctcggtcagggcggcgggacaggaggaggaagaaggggtcggcccgtttcgacgacgagggtcatgtcctcgccgtcgagggcgcttcgcgggccccccgaaaggggaggcctgcgagcgacaaaaagaaggaggccggcgctcccagcagggagcgcccgaccggcaagtggtgtaccgtgcacaacacctccctccacgacctcgcggactgccgcgcggtcaaaagtttggctgagcggacgaggaagtgggaggaggagaagaggcaggagcgccgtgagggcaagaccctggcggctcccgccggcaaccggcgaggtgaggccaagcagaaggccatcgccgaggacatcgacgatggcgacgatgacctggggttccaggagcctgaggccaccgtcgccaccgtcgatgggggagcgtgcgctcacgcttctcgccggagcctcaaggccatgaagtgagagcttctggccgcgggccctaccatgaggcg

SEQ ID NO: 19556 - DNA, 1469 bp, Oryza sativa
tgacttggttgtgaagacgcgcaaccaagagaccttactctcggatctagcggaaactttcaaaagtctccgctccgcccgcataaagctgaaccccgataagtgcctgttcggcgtgcctgcgagcaagcttctcgggttcttggtctctgcccgaggcatcgaggccaaccccgagaagatacgagctatagagcggatgcgcccccccagcaagcttagggatgtgcagtgcgtcaccggctgcatggccgccctaagtcggttcatatcgaggctgggagagaaggcactacccctatttaagctcctcaaacgctccgggccgtttacctggacggaggaggctgagcggaccttcactcagttgaaagcgtacctcagttctcccccagtcctggtcgccccggagccagatgagccgttgctattctacctggcggcaaccccgcaggtggttagcgcggcgttggttgtggagcgcgacgaggacaaccctcaccccgtgcatccccaccctgtgtcgactcgacccgggagagagcagggaggagaggcccccgagccgaacggcggcccgaggcccccgacggccggagctggccctccgcctgcttgtccgacggtgccaggcgcccccgacccccaggatggccccggggccactgcgggaaggccgcgcctatcgccctctgaccccgaggtcgtcagcacagaagccgagtgcggggccgcgaggcctctcggacgaagagcgccctggagatgcggcccctggcgaagaggatcggccccgccgaaaggtgcagcggcccatctacttcgttagcgaggccctccgggacgccaagacccgataccctcaggcccagaagatgctttacgctattctgatggcttcgaggaagctgcgccattacttccaggcgcatcgggtcacggtggttacgtcttaccccctcggccaaatcttgcataaccgagagggtactggacgggtggtgagatgggcaatcgaactctctgaattcgatttgcgctttgaaccacgccacacgatcaagagccaggccctcgccgactttgtggcggagtggaccccagctcccgagcccgtctccgcccccgaggccagctcgggccccccgcagctgcctcacaccgcctactgggtgatgcagttcgacggctccttgtctctttagggcgccggtgcgggggtcacgttgacctcgccgagcggagatgtcctcagatatctggtccgcctcgactttcgggcgaccaacaatatggtggagtacgagggactccttgcgggacttagagtggcagctggactggggatccaccgcctcctggtgttaggcgactcccagttagtcgttaaccaggtctgtaaggagtaccggtgctttgacccgtagatggacgcttacgtgtgccaggtgcggtgtatggagcgccat

SEQ ID NO: 19557 - DNA, 2246 bp, Oryza sativa
ggcttgcccagccgtcggcgcgacccgaccccctaggggagacggacgcgcctgaacggcccctgaggcccgtcggagtccaggcctcgggacccgagggaagcgctcccagctcccctagattgattgcttggatcactgagatccaggcatacctcgtagataagactctacccgaggaccgcgaagggagtgaacgcgtccggtgcatctccaagcgctacgtgctggtggaagggaccctctaccggcgcgcggctaacggagtcctcctgaagtgcattcctcgggaacaaggcgtcgagcttctcgccgatatccatgaaggcgagtgcggagcccactccgcctcacgcccttggttggcaaggcctttcgtcagggtttctattggccgacggctctcaacgatgcggtcgacctggtccggcggtgcagggcgtgccagttccacgccaggcaaacccatcagccggcccaggccctgcagaccatactctttcgtggccatttgctgtctgggggctcgatatcctgggtccgttcaggcgggccccgggcgggttcgagtatctgtatgtcgctgtcgacaagttcactaagtggcccgaggcttatccggtcatcaagatcgataagcactccgcgcttaaattcatcaggggcatcactgctcgatttggggtgcctaacggtatcattacggataatggcacccaattcactagtgagctcttcggtgactactgcgaagacatgggcatcaagctctgcttcgcctcccccgcccaccctagaagcaatggccaagtggagcgcgccaacgcggaaatcctcaagggcctcaaaaccaagaccttcaacatcctcaagaagcacggcgactcgtggatcgaggagctgccagcggtgctctgggcgaaccgaaccacgccaagccgagcaaccggggaaacgcctttcttcctcgtctacggcgcggaggcggtcctcccatctgagctcaccctgaggtccccttgggtcaccatgtattgcgaggctgatcaagatcagcttcgccgagacgacctcgactacttggaagaacgaaggcggcgcgcggccctacgagccgcgcgataccagcagtgcctgcggcgctaccatcagcgccacgtccgggcccgatcactctgcgtcgacgacctcgtcctacgccgcgtccaaacgcgtgctggactgagcaagctctcaccaatgtgggagggtccgtatcgagtgatcggtgtcccccggccgggctccgttcggctggccacgggcgacggcgcagagctgcctaacccgtggaacatcgaacaccttcgtcgcttctacccctagtgggggtcgggcgtcatgtctcgggctcgggccaaccccgcaccccccgggcgtgcagggttggccgggggctaccacatgcatatccttatcttttttctcttccgtatttcaataaaagcattttcgatttcctgaggactgtgcctgtgccatcgtttccttttgaagaatcttggcttgagttagcacgctcgtgctcgaccctgccctcggtggcccgggccggctaaaatcgccaaacgaggcccagaaccgagccgtgccccggggcgtggtgaactccggggggggaatcggcaaaggcccacaatcgggtcatccataaccctcggtcaccacgctcccggcctggccagtctcgacatgcggatctccccaggcactagcccccacccgcgccgcttgaggttgggacctgggcacgagccctcgttcaagccaagacacagaaggaccgcggcacagaccatcctcgtctcatacacacaacaaacataactgacgcagaaatttcctctttacttgattacagattaaatcagtctatacaagaagggggcccgaaggcctcggaagaagaaggaaaagctattaagattggcgggggcctgggggctcactccggcgcccccgggccgtcggcctcgtcgccactgtcgtccgcaccgtcgtcaccgccctcctcgtcggagtcgagcgcgaacgcgagccgaggggccgtaccctcgaagctgtggacgatgtagtcggcggcgtcccggacccgcgcgcgcgcgccatcctcggttccgggagggaactcttccagcgctgcccacggggagaagtcagggtccctggcctggtagcttgccagtacgagctccaccgcccccggg

SEQ ID NO: 19558 - DNA, 670 bp, Oryza sativa
tctggagatcataaaactccagaatatccatgaaaaaaatagagaatggcgggaccagccccgccattgcgaaagagaggaagaagacggaccgccccgggtagtgtggcgccgggcgtccctcgcccagcgcgaccacctcccggccggtggcagattccggcttgaatcggcgcggcagcccggcctgcctctcgctcacgatgcgggaaagcggcagcacgctaccctcgagcggtgcggagccccgtgccatgacgccggcggaggaggagcttgagagcgagcgagtatggcaaggttagggcgcaggaaacggagagtcagagcacaagtggcgaaggcaagggggagagtggcgagaggaaggaaacaaatcccttccttggcgtctttgtacccttgccaacgctatgcccggctcctcgcttcccgcacccactacctcgccccctcgtttctcgcgcccgcgcctccactaaccccactcgcccgtttgcggcgcacgcgatagatgtgcggccgtggcgtttgagatggggcagatcgtgcgcgcattaaccgcgctcgccaaccgcgaaaaacgccatcatcatgtccccaggcgaaacaaaccggctcgtcccgattcgcgcgctgctcgagtaatgtagcggtcttgaagaggccg

SEQ ID NO: 19559 - DNA, 3230 bp, Oryza sativa
acgtggcggactccgcggtgcgcgccgtcatcgggagcaggttcaagaaccgcgccgcgttcctgcggatgctggagcggaggatgaagctcctgccggcgcagtgcttgccggacctcttcccgtcgtcgcgcgcggcgatgctcgtcagccggatgccccgccggatgaagcgggagcgacaggagatgatggatttcatcgacgacatcttccaggagcatcacgagagcagagccgccgccggcgccgaggaggacctgctcgatgtcctcctgcggatccagagccaagacaagacgaatcccgccctcaccaacgacaacatcaagaccgtgatcatcgtaagccgagctcagctcgatcagctacctccccacttaaaaagttcaatttcctcttctttttgtgcaggacatgttcgtggcgagcagcgagacggcggcgacgtcgctgcagtggaccatgtcggagctgatgaggaaccctagggtgatgcgcaaggcgcaggacgaggtccgacgagccctcgccattgccgggcaggacggcgtcaccgaggagagcctgcgcgatctcccctacctgcacctcgtcatcaaggagtcgctccggctgcacccgccggtgacgatgctgctgccgagggagtgccgggagacgtgccgggtgatgggcttcgacgtgccggagggtgtgatggtgctcgtcaacgcgtgggcgatcggcagggacccggcgcactgggactcgccggaggagttcgcgccggagaggttcgagggcgtcggcgccgccgacttcaaggggacggacttcgagtacataccgttcggcgccgggcggcgtatgtgccccgggatggcgttcgggctggccaacatggagctcgcgctcgccgccctcctgtaccacttcgactgggagctgcccggcgggatgcttcccggcgagctggacatgacggaggcgttggggctcaccacgcggcggtgctccgacctcctgcttgtccctgccttgcgtgtgccgctccgagaccatgagcgatagattgctacagtatcatttggaaatggataagacatacagaaaaaaaaagaaggatcaactggatgtcatcatgtcatcagtatatatacagactcatactctcatttggtgatgtttcaagtgttatctgtaacttttaaattactgggttttgtcatcatgtaacatatttaacctagcattgaatttgtggaggggaatgagtaactcaccagcggtggcgacaacgactttcagattgtagcatcagcgtgttaaaactccgacagagaacttggaattccactacaagaaacttgttaatccatgacgaattcttggtgacggattcataaaccgtcactgacagaggcaatccgtgacgataatttgttttccgtcgtggacgtgcactagtggatattcttggcccgttaactcgtgacggttttatccagatcgtcacagtgtgtgattttaaaatcgtcacagtgtgacgataatcaaaaggcatttcaaaacttgttttgcttgaaaaggatttgaatttgaggttcaaatgaatttaaaaaaatgaaaagctacactctctcttggaccatttctggctcactctctcctcttgggctcgggccagcctccctctcgcgctctgccccttcagctgggccagcggcccattttccacatgggcagccaagacaggctagccgcaggccaccctgcgccttgtaaaaaaacaagaaacaaaaaaatgtagccctctaggggactcgaacctacgacaacacgcacagtattcatgaggaaaccccactgagccactgaagcgttttgccaaacgacgtgcactgtattatatatattaaactgtagcaggtaatggacctgccacctactcgtggtgttcatcataaaattcacgagaatagctgcagatttttacttttaatgcgtgtataaaaatttaaattagtttatctccctcatactaacttcaactttaattattcttttttataaaattttctaaactcatgatctatccatttattgtgctattacaactattatttttgtcatactttcatgtgactttgttttatcaattgaagatttaaatttcaaaaagtggcaacttcaaacaacattttgaagcagtaaatgattgcaaaacaaatcaaacccaaaagacaaattttttttgaactaaattattttgttactaatttgttacttgtatatgttgcatatggtaaaactgaaaatatttgcatatatatagtgtgcgaacaaaaaatatttggagcttgtaggaatttaacctaacacctatagttatccagcaacattcatagctacttcttttagttgattatgtatgcactcacttatacttttcactacaagaaatatattaaaagttaaagcaatttaatcaagtgaattaatcaggaaactaaatttttcctttaaaaatcatggccggaaatatttttgtaaaattctaagcggtctaaattattctctaaaattttccgtgaattttcggagctcaataactagttttaataccacaaaattcatttaacctattaaaataaatggaaaataaattaaaatatctctctgtccttgggccttttttggcccaagtgttactctctccctccctcagcccgcagcctttctctccctcctgggccggcttcccattcccctcttcttcttcgggctgccagcctagcccatttgctcccccctcgccgagaagtccattttagctccctcttctcaattaatttcaaaatataaaaaatccgagtcaaattttatcatactaaataaacttatgtgaaaaagttatcaaaaacaaagttgtataacttaattagatctatcaattttattttggttatttctccatctgactttgattgacctatataaaatttgaattttaaatataagaaaaatcaaataatttttctggtagtaaataatttgaaatgaaaaaaaaatgtcaacaacaaagttgtatgacttatcaagatctacaacttttgttttggtcattttgctatatgacttcatttcaataatttgaatttgaatttcaaattatgacaacttcaaacagcagtttcaaatactaaatcatttcaactgaaaaagtcatcaataacaaagttatataa

SEQ ID NO: 19560 - DNA, 2177 bp, Oryza sativa
ctgccttttgcctctcaaggcacttctctttgcgctctgttttccctctatttcttggttcgatgatgaagtatatgctcctgattcagaaatcttgttcctcttattatggctactctcttcaaggactctacaccatttaggttgttctttaagatctttccacatataatccaaggtgaaagtattttggttgttctaacttttgtgccattcagggctttctctattatcatatgatcagaatacccattagtgaaagtacttctagctttacaataaaatccacagaacttagtgacatctctcttgacattatcccaatgtgttctgcattgcttggggttccttttgtgcccattgctaggcaatactggtgttgaactctcaagctatagccttccaatactaatattattttttgtcattgcctttgatgggatcaactgagttgttcaaccaagagctcattagttgtatattgtcatcttcagtccaattgatgcgtgtccctcttcttccttcttcactgctttcacttgcctcttcaatctcaactacttgtttctccttatatcttgtatggtatggaaaagctcatccatgtgaagaagtgttggctgcagccccaattgaagtactatagtgcataccaaattgtgatctattggctgcaaatccaaatgcttggatagatgactacactagattttcttgaagttgaaaacctttaaagcttcctagagtagtttgcgcataataatcttgttggtgagcaccttaaaagattgaagggtgtccatatagttggtagttgcttagaggaccaaaaggatggaaattttggagaaaactaggtctcaagttttagggataacttgtgggaaattgggtagaatggggagttttggacatcactatttgttgcttacttgtttggcttaacaaaaggctccacttagtatctagggaactgaatggatcaatatgttgttcatctcacttgtgcctcctttcgtaggtagcacaagaatgttgtaagaagcaatggctaggaaagcaaatgagcaactcaaatgaaagagcaccaacggctagtagaagtagttactatctgtagtaactgacatgtatattttattggtgtgaacagaaaaacattacaagtattatattttgtagctttgtggccacaccttaagcttaaagtctagttttattgcatgacttgtggtctgactccacaatgttaaatgtgttgtactatagcagcatttattgcttatggttactttttagtgtacattgtgctattgtggatgtcctaagacagtatgtaattcaaaggaataaaattattaacgagataaaaaaaatgatgtagcttgatttataaaaaatacagatttaaatttcattcataataaataaagataaaaagttatatacatatttaacaaaatttacctgtatagctagagaaattatattgcaactatgtaattacaatgtaattagtctaattcagtaacatattttaagagcacacgttacgcttacaaaaaatcctcgaaaatagtaaaagtgaagtgatttcttgcatacactgtttaatgcaatttcaaatttaaatttaagtttagattgtttgtgtgtttttttttaaaaaaatcgaactgtttggatcagtaaaaaaaaacaaattgttcggttaagtgccaaaattatggaatcgtttgaggtactgaaccgaacaagcacctccgccgaatcattcgcggcatatcgcatcggcatcggattgcaattcgcaccaaaccgaccgccaccgccgcaccaccaccgaaattctcaattttctctcgcgacgaaaagggaataaaagcgcttcgcctcgcccactgccacgccccccatctcttctcccgactcctgagagaagaagaaccgctgcttctccacccgtcgcggagccccgtgtccatcctccggcgcggcggccgccccccagcgatccgcctcaggtgagagcaccgcccgcaccccctactgctctcccctcccctggagatcggcgtcccactcactcccatcccccacctcatcggtggattggattggataccagtaggggggcgatcgctcatcgctgcttgtgtgcatttcttctggtagga

SEQ ID NO: 19561 - DNA, 1717 bp, Oryza sativa
ggacaggaatgtagttgtggaggagacagctaagttttctgagctgaagcttcaggcacgttcaatatttcacatctgattctgttaatctacaattatttcgaaaatctgatggctaaaataactagtaacattgttctattgccgtacatttgcatggatacagccagagacagaacagcgtccacataaggtcagcttttttgttgataaaaagagtgctcaggaagtgataaagtctctctccggtaatatggagaaatgcggggtgaggcaacattcgacttgatgttagcttgtttcaattttggataacttaagaactatttatggtttcttttcgtattatgttaactgctatatttcttgtaaacagcttgatgttaaaataatctacagtggtggccaagaccttgacatattacctcagggcgctgggaagggtcaagcacttgcatatttgcttaagaagttaagctcctgtggaaaaccaccaaacaatactcttgtttgtggggactctggtaatgatgcagaattatttagcatccctggtgtacatggtgtcatggtcagtatacaataaatttcatgaagtgtctaacaaagttcatgccagattgaatataagtttactgtaactgcaatctttttttaaatttttcaggttagcaatgcccaagaggaattgcttcagtggtatgcagaaaatgcgaagggtaaccctaaaattattcatgcaactgagaggtgcgccgctggtattatcgaagctattggacacttcaaactaggacctagtgtttctccaagagatgtggggtttccttatgttaagcaggaccatatcaaacctacagatgctgttgtaaagttttacgttctctatgagaagtggcgcagggctgaggttccaaaatcagattcagttgtacagtacttcaaaaatatcactgtaagtacatcactgcccagtgtgatgtttcttcaaaataatttgtaacctttgtcaaaatcagttttatcttttacctcaaaagaaattatcagaaccttctaattttggaaaagaagttatatttccaattaataaagtgaactgggtctgacgtattatattgttgagttaactgattttttatttgtttttggtttgtcttagcatgcaaatggtgttatcattcaaccttctgggcttgaatgttctctccatgcctctgttgatgcattgagttcatgttatggtgagaaacaagggaaaaaataccgaacatgggtggacagactatttgtctcacagtctggttcagacagttggctggtcagatttgacttgtgggaggcagaaggttagtccttagaattgtgtagaatgagtgaattagctcttatatgatattttttacacttcattcaaatttctttaatgttttacttacacaatttagcttgttcaatcatattttttcacttgtaggtttctctagacatgtcacttcaatctattaattttgttgtgtgttgtagtatatcctcgtacacaccagaaattatatgaaggttttaggcaatagtttatgaaaagattgacaacatattcaactctgcatctgtacgtacaaatgtcataatacattacacatatgcagtctagtgcaattcatttgtaaataaaagtaagaaaacatactcctcaataaaaaataatttattttat

SEQ ID NO: 19562 - DNA, 1879 bp, Oryza sativa
  unsure (1)..(1879): unsure at all n locations
ttacgtagatcatcgtaccaacgtacctcaataccctctatatccggtctacgggtacccaccgtcgacagtggcgcgccaggtagggggccttggtgctcaaggttctactattatgacatcaagcttcgtcaacaatagcgtcaacaatggagtcaagcaaaaatctactgtatgatcggcaacgatctatacaagaaggcgccaaacgggttacttcacaaatgtgtctcgtccaacgacggcaaacacctcctcctcgacatacacgaaggggtctgtgggtcacatgccgccggtcgtacattggtcagaaaagcctttcgacaaggatttttctagccaactgccctcaaagacgcttgcgacatggtacaacggtgtgaagcttgtcaatttcatagcaaacacacaaagcttccagcgcaagcactgcaaaccatccctctcacttggccgttctcgtgctggggctcaacatacttggtccattcccacgaggacaggccggctacaaattcctgttcgtggcgatcgacaaattcaccaaatggattgaggcaatacccacgggggaaatcaaggccgacaatgccatcaaattcattaaaaggatattttgtagatatggattgcctcaccgcatcataacggataacggctcccagttcattagcgccgatttccaagattactgcatcggactggaagtcaagatctgcttcgcctcggtttctcaccctcagagcaacggacagttcgagaggacaaacggcatagtactacaagggatcaagacccgtgtctacgacaggctcatgtcacatgacaagaagtgggtcgaagaactcccctcggtactctgggccgtgcgcaccacaccgacaacgtccaacaaggagacacccttctttctcgtgtacagctgagaagccatggtcccgaccgagttacgacatcagagtacacgagtacagaagtactccgacgaggatcaggaggaacagcgaaacgacgatgtgaacctactcgaggaacatcgagaacgggttgtcgttagggcagctagctaccaacaggccctccgccggtatcacgagaagcgcatccgagcacgcatactntcgatcggcgactacgtcctctggcgagttcaaagccaagcagggtgaaacaaactctcacccaaatgggaaggaccgtacacgatcacacaagtcttgcggccaggcgcattcaagattgcagacggcgatggtcgcgagttagcaaattcttggaacattgaccaattgcgtaaattctatgtataagtcaatagtatccatacttgtaagacatcttacaacttcaataaagcctgtttcaaggtacagatttcaatcaaagtgtcccttcccgatgattccttacccagatgacacctagcgttgaaacctatcctcatgttcctttacgccgtcctgacaaggcctccgaggaacctaagggaacttcggctgaggacgcccagagctgataatgcctgtcgaatcctttagagacgaaagaccatgtaagatctggtcatgtaagagttctcgccgtgcgtattaaccaagccgtgtaattggaaatggattttccaactttacggctgggggctaggattagtgcttatgcaactaaggcaagtcggtccaagagccttatcttccgagaaaaattctccgacgataaggctgggggctagggagagtgtatgactcaagtgactgatcgaagtcacgaagtgagaagacactcgtacacaccgcatccagagtaagaaaagcttagttagatagatttcctttctacttcacaagtatttcttacagtctgcaaaaaattccgaaat

SEQ ID NO: 19563 - DNA, 1157 bp, Oryza sativa
ctcgatcgacggcactcctgcttcagggcctcgtcgatacgcttgccgatgccttcgagctgagcacaggctccgtttagccacgagatatatccggccgctgactcctcgggatccccgcgaggtactcggagttccctgcagacgacggccatgactgtgcaacaactcctgaggtacgagttgaaccacaccttgcgacctctgagtgcctccacagcccggtcctttttcacttccaacatagtcctctcaagttcggcgacctcgaacttcgtcctccagtattggatgtgacggtcgcgatcagcaagcgcactctcgaggtctgctcgacaagcaaacaactaagttaagctgttctcctcttttgagagcacggcaagttaagctaatccagatagaagagcaaaggagatggaaacaaaaagaaccaacctaaaggagtcgtcgtcatgcatgtctccacgggcagattctggtctatgtcgtcttgcggcacatacggctcaagcgcaagtgccggaatgattacaggcaactcaggctgcccgcgttgctggacatcctcgacatcgacatctctacaaacaacaacaaagtactcggaatcaaaatgccaaagaaaactaaggtgataactgcacacaccaaggcagttggaaccaacaaattgttttacaatgcatgattgattaaggagtacaggcgaaccgaagtcctactcttcaaaaagtgggagaatagactctcctagatcactgacttcttccatcacgtccttacgcgcgtcgttagccgtcccctgatccaaaatcctttggagatcgagctcaaggtgcgccaaccttatgcacgcgaggacatggcacgtcccgatgtagatcccgttggacgtctcctctctgatcttggtcgcatgcttggaggggatcgcctccatcaccgtcgccagttccgcgagcgaagtcgtcagcgagaactcgtcgggattcaccggatggtggtcgtgacccgcactccccggcgagctggtgcagaccggtgtaggtaacccacagcgagccacggatctccgacaggttgttctcgagctccgacatacggtgctcaagcccctgccgttaccgttcgttgccggccaccagctccctcat

SEQ ID NO: 19564 - DNA, 657 bp, Oryza sativa
tcctgcagccccttgtatggagcaacgcgcggaccaccttgccgcggcgtccaagcccgcgggcggcgacgagaggctcagcacctccgtcccggccgccccaaggcggcggatggtcacgtgcgacgaggtcccggtcaaggaggttgtcctaggcgacggcccgtccaagaccacacgaatcggtggtcttctggacgataaataggaagacgcgctcgtctccttcctgcgggcaaacgccgacgtcttcgcctggagaccggcggacatgcccggggtccccagggaggtgattgagcaccgtcttgccgtgcagccgggcgcaaggccggccggcagaaagtgcggcggcaggccccggaacgtcaagccttcatccgcgaggaggtggcgcgacttctggaggccggattcatccgtgaggtcatccatccggagtgactggcgaaccggtcgtcgttcccaaggcgaacggcaagcttcggatgtgcatcgactacaccgaccttaacaaggcatgtcctaaggacccttaccccctgccacgcatagatcagattgtcgactccaccgcggggtgcgaccttttgtgttttctagatgcatactctggttatcatcagattcgcatggctagggaggatgaagaaaaaa

SEQ ID NO: 19565 - DNA, 970 bp, Oryza sativa
ggaagcttcgaataataattgggtaaataaaaccaacaaagcaacacagtttatccatcgcacaagtccgtcttgtacttgctttaactccttcgatactccgactcaactccttcaacgttggaacccttcatacctgtggagcaaaactacgcataaaccactatatcgaactaatgacagatataagggatatttactaaaatcgataacctgaacatataaaataacctatagcagttcccttactattttatacgtaactcacaaaccgtctaacggaatctagcaaataatataacttcggacatctagacaaaattgtctacaaccttcatgttgagtgaaaaatcagattatgcctctgaaaatcccagattaaggaaaacgaatttgctgtcctgatttcaggacccggtcagcagtactatttctgttgtttgtcctaaaccgtttatcggaatcgagcgaaaccagcggcgttagaaagatatcgtcgatgactacaaactttatttaggacaactaacctgaatcgtgaaggtttaatgtcagttttgaaaataccgtttccagcccataaccaataatctcagaaattgcacaaactgccaacgaattaattcctattgaaatcttttacatctagagactaaaagaaagtccaattgcagagaaacactactttgcaacaaatttccctaatctgcgaaatcgctgaaattccccaaagttgttctaccttttccttcccttgttactcctgttcaactgcttcctgtgctgtctggagccttctcgtctctgatcgatgcagcagcgtcaagcagcaagccacgctatagcatgagcagcagcaggaacgttagcatgcacaggcagcggcaccaacaccagaacagatccaattggcggcagcattagggaaaacaggaacagcagggaagaacacagcagcagctcaccaagg

SEQ ID NO: 19566 - DNA, 1365 bp, Oryza sativa
ttaccctagaataaacaaaaccccaactagtggacactctactcaaggtaccactagtatgattttaggtagatgcttcgccgcttaattaggtaacattaggtggttttacaactctagactttgggatattcatatcacctggacactatggaattgttggatcattgtggaattggattcacacctcccctctattcaaaaccctcaaaatggttttaggctgggctcggggtgcatggttttgatagtagcacctcggccatataaggacaggtcttcgggcctctgttgcaaagcactaccgtacttccacatgtctagtggtaaggcttagtttgtggctcagtctggttataaacaaaagtacacggatggagatggacgaagtcgggggtcgatggacatctctaggacaaatgaaggctacacgagctgtggcccggtagtcgagatgtcatggcacagggccagtgtcctgctgctaggggctcagtcttgcctacctgtcccaggggttccggccgtaggtggggttgggtcggtactcttgtctatggctaggatatgttggaaactatgtcacgtcttccgtccgtataccgtggtggtatgtggcacgtggttacacgtgaggaagatgtgtcttgtgggtaaagatgtacacctctgatcagagtataacctattcgaatagccgcgccctcggttatgggcaagccgagcaatgtacccaagttagtgttttaattcttaaaacctgcttaacaactaaaatgtggaatggttggcctgggttggcttgggacgagctgggacccagggtcgggttgccagtttggtctgaatcatcgtaggccttgggttaaggcaggctcgtgtgggttcacggcattgattaataatattatatagctctagaatcgtgtttacaaaatagctttgagcaactaagtgtctattaatgctatttactgcaaaccctaaccctatatattataacccccttgtactcccttgcatttattctgcacttgtgggtgacttgttgagtacggtggttgtactcagtcttgctcaatttttcccaaactcagaagaggagttcctggaagatgaaggctttggtgtctagctcgtgcctgccgtcaaccgcctgtggtcgtcgccctagttttccgctgtttttcgtttgtcttcttgtgtgctgggtcttcgccgcccatgtaataaattaattaattacgcttccacttgttaaactctgaattgtatcaacttttggtgtaccttgcctcctgggacaaggaataatgcacgcacgtaaggaacgcccgttgggttatttccggtcgtgacatcaat

SEQ ID NO: 19567 - DNA, 707 bp, Oryza sativa
cagtacataattcatcaaagcctacacagcatacaccataaaagttcacaacccataaagtttttacaagcaacagtacataattcatcaaagcctacacggcatacaacataaaagttcacaacctattaagaaatagtaaaaatagtatattgtcaacggtgggtacccgtagaccagatatagagggtattggcgtacgctggtacgatgatctacgtaatacaacatcaaggaaacaagagacaaagattatactggttcaggccccttaataggtaatagccctaatccagttgatatgggattatatggagagatccaaaaattacaaagggaataatagaactcgatgataccgatgagatcgtagtcgagttgattcaactagatcacccgacgacttggctcctgtaggctccggctttgtaggctgtggtcgttgtattggctatgagattcgatgtgttaggtcctcccggggggtctcttttatatcgcaggtcaggtggtctccaagtaggactcggagacatcggaccctgcacgatacagtgatgacccagtcctatacgggtaggaacctttccattggtggacttcgtgatgaattttcttagcgtatacagagaacgtccgtacacgcgcagatgtaccatattgtcgtatagtgtacatccaagggtagagggtataccttatccgta

SEQ ID NO: 19568 - DNA, 2328 bp, Oryza sativa
aaatgtcaaggcgatcacgatgaggggaggtaagtctactcgtgatccgccgtatcctaaccctgcaggaactagtgggatatcaaaagaagcgccatctaatgactcggctgacaaggaagttcaaccagaaaagtcagtgccgcaggagtattgtgacacacggttgctgcgttccctcacggagtaggaaaccgtcggtggacgagcaattcgctcgttttgttaaagtaatctagaagatccacatcaacgtgccgttgttggacgctatgcaagtgccaacatacgcccgttatctcaaggatatactcaacaacagagaccgctcctaacaacggaggtggtcaagctgatagaacaatgcagcaacttgatactccacaagctcctagaaaagaagaaagatccggggtgtcctacgatcatatgctcgatcggggcacaacaattcgaccaggccttgtgcgaccttggagctagtgtcagcgtcatgccgaaagacgtcttcgacaagctcaacttcacggtgttggcaccaacaccgatgcgccttcaactggctgactcgtcagtccgttacccagtagggatagcggaggatgtgccagtcaagatacgggatttcttcatcacggttgacttcgtggtactggacatggacacgggaaaagaaacgccggtcatcctggggcgtccgttccttagtaccgcagtagccaacattgacgtgggaacagggagtatccgttttcatattaacgggaaggaggaaaagtttgagtttcaaccgaggacagaacaatgctccgtggtcagaatcaagtacgggccaaacccgtagaatattcaagtggtcgaagtggagccacccaaaatggacagcctggtgaaattcatgcagaatttcctagagaaggaaataacgatgcccaagcaccgttattggaagacgccggtaaaaccacccataccggccaagaagttagagcagccggctcagaagaagccgtcttccgcaccaaagccgaagaaggtgtggaaggaaaagccaaagacgcccgctccatcacccccgaagatgggtggaactaaatcagaaggaggtatggtcttgcacgtcggactttaaatgacgcgagcttcgccaacaggtaaattggtatgtatccgcaaattttctttcaacaatttgaatttttgcatcaacatatgtttgaacttcaaaattgcatttatgaattttgaggaaattcttcaaatgaatctttcaaagcaaaccaaaataaaattttcaatgtaaatttgctgtgccacgaccacactgaccgttggaatccaacggccaaaagtggggccggttgggcccaccaggggttcggccgaaccagtgactggccaggccaacggtcggctgcctctctttttgaggcaatggttagtgggccccacaggtcagttttgatcgttgtgggtgcacttcttaagccaaccggccgggagagggaactccaccctgtttaaacacattttcattccctctccaaagtttgctctcaagttcaatcaagctttgatggtttccctcaaattcaaatacttagttgcatatatacaagttgcttgggtgaaactaaccggcgggtgaaattcttgtcattcctaattaacccccgccgagttagtccgttcttgttccattgtgcagaatgaggaggcgactgtctcgtctgttcaaggggtccggctcttcatcaagtcatcatgacgagtctagtactcgttcatcagcagatgtctcgatggaagatgccgaagctctgaggcgactcctaaacgacaccgacctcgaacttgtcagtgatcgggagagacaaacctactacatgctgagcgaccaggagtatgctcacacgcgagagtactcaccggagctgctaaaaaagataggtatggatgttgagtttcactctatttggaaagctgttgattggtagagatttgctgtggtagatgagcctggttctcgtctgcttactttgcaatttctgtacactttgaaagaaatagaagatggtatttcctctcgctttttccgtgaggagttcacacttacatggaaaggcttaagtacacttcttggttttcacgattcctgtaaaatcgatatccagaaaggaatttctgggttcgagaaaaataggttttaggaagatatttctggtggtccaatttgcaagaaacctaggacgaatgatatccataatcctacacttaggctcatgcacaaatggattgctatgactttgtttccttgaggtgatctta

SEQ ID NO: 19569 - DNA, 1440 bp, Oryza sativa
ggtccagtctttgagcatagaaaatagactcatgactatgaatccatgtggaatgtatccggaacaagtccaaattggagatataatcctcacgcttgagttgatgagcccctgagcatatagcttgtccttctgtcatagtcaaaattgtctattggcaatagctgacgcagtcggcatggagatgaaatgaccaacatgaagacgaaattgctcatcagaagtaacggaagatgtcagtggtagtaaaaacagtgacaccaatcaaaggtaatgaagttgcataaccatggaggcggagaaaccagtcggcaacagtcaggtcagctagcagtgaagatgtaggcgcccaacaacaacaacaaaagaacagtcggtggtgacaaaagcaaaccgacgatgaagacgtagacgcgcatcaacggtgatggcgaaatccaccaatcatgaagatgaagaaaataatcggcggcgacaaacgcatccgacggtaatgatgattagcggcaacagagatagccgactatgatgacgaagtttcccatcaacggcagcagagtaggctatgttgaagaggcttaacaagatgttgatgaagatgacgatgtcggtgatccagtcaatagcgatgtagcagccgatgataacgatgagatcctctatcggcagttgcgtagtaggccaaccgtgaagacaaataattggaggagagttgatgttgttgcccaactcgtctaaaccgaaatatttgaagttgttgaagtagaatgtctgttccgaagcaaagatgaagataatgactcctggagttgactcattggctgattaattgatttcttcagcttgacataaaatttgtcaaattttgagccttatatttgtgtagcccccgactctttggttagttgagaaacaactgaacatagagtcgagaattatagcttcttgtcgtcgagtagtcattgcttgattgaagatatgtgttgaaggtgtccaagtagaaatcttgaatattggagagtcacttgttgtagtaaaatatcatggcattgcatgccgagatgtcgaggttcacaaagacgtcgtggttggtgaagtagtaaaacttgcgaagtagcagcaatagagtttgccggtgccgaagataataaagatgaagtcgctccaccatgatgacaaagttgtattgccgtaatgaagtgaacacaagtcggcggcaacagaagcaaaccggtagtgaagacgcgtagttgtgaagataaaagcaccaatcggcggcagcataatcagtcggcgacggaagatgatgatgtccatcagtagtggtagctgtataaaccagacgtagaggtaagggcactagtcagcaccagacgagacgaccggcgatgaagatgtagatgcccaacaacagctgcataataggccaatcaacactgg

SEQ ID NO: 19570 - DNA, 693 bp, Oryza sativa
caccagtcggcggcggcgaaggcaagccggtcggtgaagacgtagtcgcccaacaacggcggcataaaggccagccgtgcaggcggaaacaccagtcggcggcggcgaaggcaagccggtcggtgaagacgtagacgcccaacaatggcggcataaaggccagccgtgcaggcggaaacaccagtcggcagcggcgaaggcaagccggtcggtgaagacgtagacgcccaacaacggcggcataaaggccagccgtgcaggcggaaacaccagtcggcggcggcgaaggcaagccggtcggtgatgttctgactgatccattcctggagcgtaagagataagcttaaagccatgaatcccttttatgcatatctggatctggatcctgcagaacaaacatataggatgagtagtatctgatataaatataatactcgagaaaaaatcaagtattttaaaatatttataaatatgtatttctcctcttgtcaattttgatttccccgagcagatgactctgtacgtttaaacactctgtccgactagtcataaccatcaagcaccgggagtcggcctaggcacttcccaaacatgcatatgagtgacatgagttcgtcattaatggaacaaagtttcacggatcagaatttactactcgggtacttttgcaattattaagagcagaaaataaat

SEQ ID NO: 19571 - DNA, 1240 bp, Oryza sativa
gactacacattattattgcacactattggaatttagttttagattatgtttctgcttagcataagttttgcgtagaacttgtaacggtcatttaaagttccggtccttattttcacgtggaatttgaggagctaggatggtttggattgtgtggattatatcgttattgagttatcttataactgactgtcgtggatgtccgtaattttaggaggagactgccgaaatttctaataattttcggagttaagtggtttttgagtgtattttggtatggcactctaggtacgtggttacctgggatgttacatagacaccaaccgaagaaaaagatcccctaactacttaattctattagagaacctcgacccgaagttggcaaatagatgcataattgtcgtgtcaagtttacgacattcatcatttattagcttgatatcttcatcatgtctttgtaattgaacccatcctcgaaactaatatgttgccctgaaaaacacctgcaaataagattttgatggtgtttttatcaaaaaccatatcatttctactaagcctaagagcccaacatacagcggaagctccaacaagaataattttttttatttttttactaacacccaaaagccaattcccaaacgtatgagatgtactatgtagaggataaagtccaaaaaataattgtatagctctccaaagaaatttagaaacatggcactcaaagaatagatggtatattgattcatttttcatataaaagcaacatcttaaactaccattccaattccttctagtcaaattatctttagttaaaacgatccctttaaggagataccacataaaaatcttaatcttaataggcattttaagtttccaaataatcttatttctctctatgtattattaattaaagctaagtaaatagatcgaacagaaaattggccattttgatgaaaattccatctaaaaatgtcatcctcgtctgttaagttaatatgtacaatggaagcacacaaattatgccacctaattagattttgaccaactaatgctcttctaaaagtaacattaagcggaatagaacccataacattagcaattgaggcatttttccttctaactatagaaaataacgaagggtacttttccttcaaagaataattccctagccacttatcctcccagaatcttactcccagaatcttacttgttcaccattattaataatccaggaagtcat

SEQ ID NO: 19572 - DNA, 1044 bp, Oryza sativa
cggagaaggcaacccggtccgtgaaaagttagacgcccaccacgggcagcataataggccagcggtgcagccgaaaacaccagtcgccggcgttcaaggtggccggtcggtgaagacgtagacgcccaacaacggcggcataaaggccagccgtgcaggcggaaacaccagtcggcggcggcgaaggcaagccggtcggtgaagacgtagacgcccaacaacggcggcataataggccagccgtgcaggcggaagcaccagtcagcggcggacgaggcggccggtcggtgaagacgtagacgcccaacaacggcggcataaaggccagccgtgcaggcggaaacaccagtcggcggcggcgaaggcaagccggtcggtgaagacgtagacgcccaacaacggcggcataaaggccagccgtgcaggcggaaacaccagtcggcggcggcgaaggcaagccggtcggtgaagacgtagacgcccaacaacggcagcataataggccagccgtgcaggcggaaacaccagtcggcggcggtcgaggtggccggtcggtgacgacgtagacgcccaacaacggcggcataataggccagacgtgcaggcggaagcaccagtcggcggcggacgaggcggccggtcggtgaagacgtagacgcccaacaacggcggcataaaggccagccgtgcaggcggaaacaccagtcggcggcggcgaaggcaagccggtcggtgaagacgtagacgcccaacaattgcggcataaaggccagccgtgcaggcggaaacaccagtcggcagcggcgaaggcaagccggtcggtgaagacgtatacgcccaacaacggcggcataaaggccagccgtgcaggcggaaacaccattcggcggcggcgaaggcaagccggtcggtgaagacgtagacgcccaacaacggcggcataataggccatccgtgcaggcggaagcaccagtttgcggcggacgaggcggccggtcggtgaaaacttagaagcccaacaacggcggcattaaggccaaccgt

SEQ ID NO: 19573 - DNA, 866 bp, Oryza sativa
gaagtcgtggacgcccaacagcggcggcataataggccagccgtgtaggcggaggcaccactcagcggcgacggaggcaagccggcggtgaagtcgtagacgcccaacagcggcggcataataggccagccatgcagacgggaacaccagtcggcggcgacggaggcaggccggtggtgaagtcgttgttgcaatcagcaatggcggtggcgaggacaagccggcggagtggactcgcggccgatcgaccggaaagctgagacgcctcgagtccatgaccagcatcaatcgcctcaatagtgccgcgtagttatatgcgaacaacaacaaaaaatagtaagaaattaatctgagattagaaatcaatctaatatatattgataacaaattgaaacgaaaaactcaagtcgagcagtgaggctggatcatgagtgatagccggcgacgtgccatgcaacatgtataagccccggcaactaacagctaactcgatgttctttcggcatgatgccatcatcggaggtagccggcggagcccatcaaccatcatacatgcaaacaggaatcgaatcctggcggcctgtgccactcctgcaacacgtccatctgcaaggaaaggaagagaggagcactcggacacggcaagggcacccaagtaggcgacgatgatggccgtgtttcgatctcatccagtatatgaaattcgtcaaatatcaggaaatcaaacaatgattaaaaattaatctaatagagattaaattgcaacggtagacccgattgaagatttgagccatcgaaattgatgagattgatctcggggtttcttctgaagttgattccatcgcacttttcgacaggtaattcga

SEQ ID NO: 19574 - DNA, 2212 bp, Oryza sativa
caccacatatatttgtatatacattagcagcagatcaagctgcctccaccactgtacgtatgtatatgtatacacactggtggagacagctcgaccattaccatttacgaactgccattaacatatgtaaaatttgatcgattcgttgcttctttctttattacaaactgtcatcaatatataaaaaaattgatcgatcatcgtgaaacgctattggtggtttgggcttaagaaaacagtatgctgcacacggcacggatgaatgatgctgggaataccttcctatacgtccggacacgaatgtctagctatagctagtagctgcatatatattcctctcgagaagtagaagatataaggatgtgtttggataatggaaaatagggggtgggattgggattggaaaatgaataaagggttaggattaaatggaagagggagaatgaatggttagtatttaaagatgggtgggaaatcatttccctttcccatttgccaaacactcactaagagcaagtataatagtgagctataagcctactataagcttagatggaggagagaggtagcgaaaaattaagaatgttggctctcatgcaagagctagcttatcactagctctaagacaaatgcattaaatatataagtgagagatagagagatgagaagaaaattatagtcaatcttatagctaatctattatatatgttggctttaagatgagctaataatagaaagtgtgctctattattatcttgctctaaagggaaaaaaaaaggaaggaaagatggtagtaataaaaagctgggacgagtggatcgatccatgcatgtgttgttgcgtacctgcgatgcaggtagaagatgctcctactgccccccttttgaaggtgttagatcttcaatccatcaatcaatcccgtttcttctccatctctcatcgccacgcaccatcgatcgatcaccaaatggttagtactcagtacagtactcctcatacctttccttttccttttcttttttttttctttctttcttgttagtagtagttgctgctctagctaggttgttgttttgcagtcctcggaggcagcagcagcagaggccaggggacgcagaatctgctatagctagctgctgctgctgctgctacttccaaaagagtacccccatggagggacgccggttgcagcagtcaaaaggcttgcaggtgtcgacctcccattggctcaccgtggctgctgcaaaatgctcgccgaatattgcactgctgccgcaccagccactacgtacgcagtataacgatcaagccaatcaaggagcacttgcctgtttgatagagctcccgctccaactctatccaaccaaacagtttcagctcaaacaggctaaaataatctgaaaaaaattagaatgaggcgaggtttcggctgttccacagcttcactttagctccgagttagatctagttgttggagatctgccaaacaggcttgcaacaggtagcttagctatacacttgtctccttttttctgctggtctctgatctatgctagctccagcatctcccgtgaccgggaggaattcatcgtgacgacagagagaagagacgcgtgcagttctgaagaaacgaaatggattgatgcatgcatagtagttgcagtacacatttgagcgctatagctggccagagaattaatggtggtgtacgtcgtgctccctatagctcgcttctcgctcgtcgtcgtctcatcttctctggaagttgaggtacttgatggccagggcgaagacgacggcgaagagcacgcagaagccggcgaccatgcaggggacgacgccgaggaagtcgtggtggaagcggaagtggtcccggaggaagtcgacggcggtggtggtggtgatgccgtcggcgagcagcagcggctgatccaggtcgccgaactgggaggttagcaggccgtacagggtccatgacaccgggttggcccagtaataccacctccaccacgcaggaatcctctgcattatgtttaagcccattaatcattagccactttaatcacgtcctaatttaaacaaaccattattgcttcccaattgctaaagtggttctagtacatgacaagtggtcactgtaggaaaaaaaagttactggtgggtttggtgaaattattaggggcactggtatatcagggcgggctgcaggaat

SEQ ID NO: 19575 - DNA, 1598 bp, Oryza sativa
atggataatgtgcactggaatatggattatggggaaaacagatcatgggtccagtacaattagaggacgttaggtgcaaattatgcatggggttcctgttccttccgtacctttcttgggatcatgaacccacagaagagattccacagcgtgtagaatggagcagcaataataggcgcaacagtgtggttgggagtgatcgccgttgtcatcatgccatagaaagtgaagtacagcaaggtgaagtacatgaagaacaggtaccacaagaacttcactgctgtccactcgaacgagcccaagctgtagaaaatcgtgccgtagataagtgactgcacaagaatgtaagggaactccactgtaacctgcatgccgaagaacagttcgattgttagccttattatggtactactacgagcatcaaaacatgatgagatgacaggagtttttgacagggaaaattaccagggagaatgcaaaaggcagtgccgagtacatcccagctgccctctctctgtacgagacaaatctttcgatggaaatcacaggttgaacagaggtggcgttagtgattcctatgaagagtactgctgcgtacatggcacccatggcattgaatatgtcatgttgggtctccctgtcaaacaaagccacatgttcgctataaggccagccaagtacaggaagaaaagtggagacagaatcatcagtggacataccttcgagacccaaatttccagcagattgtcccgaacatcaaggaaatgatgacggtgtagaagaatcggaccgcagtgtattgaggatttctccagtacgacaggttctgcttccataagcaagcagcatattgagcaaagaatggttgggaatacttggtggcaaaagtaagttcttttgattctcttcttggtctgctcaggatatcaaccatttcttgggtctgcctggaatgccataacataaacatgtttaaggaaaaagagaccaagatttatagaggtgaaaagggtcgttgtgtttactgaaataattttgactgccggtagtattcagcaaaatccactccaagaatttgctccatttgagtacttgtgacttccaacatccatgcagcaggattatagccatccctgattttaggaactcctggaattgcctgtttacaaacttgaaagtgtaaggacagttttttcgcgaacgcaaagtgtaaggacagagaaacttgtataagctatcatcactgaggaaacacattgtgcagattgtacctcaaaaaactcgaccagattgcgtgatttcgagcccaagggaccagcatatataagttgccccccacgcttcatgaacaaaagctgaccagcatatgaatgagttaggaaagggtgctggttaaatgttagtacatacttgtataagaaaatttcgcggtttccctaagtagcacaatgaaagttcaacagatcaagtgtaaaagggactagtttctgttcacatccatcattgataagaaaactgattaacatcaaattatgaacgattattaaaatctgtactgttgcttcgaaaaaatatcaaaatctgtgctcaacttgtta

SEQ ID NO: 19576 - DNA, 1167 bp, Oryza sativa
tcctgcagcccgaccactacagcacccaggatgaattccctccagcagctaccaagcgcgagcaaagaacaagaaagtgctgattcaccaaaaaaaaaaagatcctagaaagaatcactttgtttgtgattgcaagtgtttaaaaaagtaattgtacccgaattacggtttcttcacatacaaccatacaggataaatggccaaaaaactgctttatgtattatccttacatttagcattagaagaaggtaacactgcatctcacaccaactacctcagaatagtgactaatccaataccaatacacgcaaaaacacagatcagctggtgtacacttacatttgcatgttcaagtccaatgttggatcagctggggcaattgcaaatgcagctttcaagctctgcttctcaaagtagctgaaatgatgcaagaaataaatgcaagagcatgtgctactaaaaaggaaaaaatgcaactctagacaagaagtgctgaagtatcaattgagaaagtagaaccaaccgtgatataaaaggatgagttgaaaacataacttgcattactgaggccatatagcaactgcaaagaaggaaacgcatgcattacataagagaaattattacaaaagaaaattcatgacgtcaaccaatgaaccaaagctacctatttccaagatttacaaggccagtataaccagggccgtataaaagttcggcatctttgccactttcttgtattctattccagtcataatttgtgttgtgatcaagctctctttcagcagtagtcatctcggtctgcacaacaaaagggtcacatcaaatagcctctaaactagacagatagacaagcatataaaggggaaaacacagtatgaacatgagatgctacagaatatattattcccatgaaaaagtactaatctgttactatcacaataaaaaaagcaagtcatattgagcagagctaaattatcgctcataaatgtcatcgaaaatgatactactcaccttttggagtgaagaaaaatcaataccaaaatgtgacaaatgctgcgctaatagtggatcttcaacgctatcatcttctgggtatgagaaaacgtctgagctgtcacagaaaagcttgtatgaataggtatatttaaatataaaacaacagtaact

SEQ ID NO: 19577 - DNA, 2083 bp, Oryza sativa
tgattattccccccacttccatcccaaagccgcctcccacataggatcatgccatcagttaaatttaaccagagattctcagttttatcacacttgctgcacttccatcctgtaggtggcacaatgacaccattgtctagctgcttcagatccatagcatgtgcactgacttttttcttgtcagcaacccaagaagccaattgttgttttcgatcagcactttcggcaagtataactttgtcaactgcaatcctaacctgtggagttgtagagtagtaagtaactactatgtagtaagtaagtacaatctcttatgtcaagcacagttaccttctctggcaagtcaattgatggaaaagggagagaagtaaattcaggcaagataacaatttcaaaagcctcatcgtattcgggttcttgatcagtgaaacctccctccactcctataaattgtagaaaacccggattagtaaagatggtcaacgcattcatctatttgccatcatgggaatacagaacagagaaaatacaactatatagatctaaatccaggacataggcaactattctaattacaaataactagcatacagatatcacataacaaacaattcaccaacatggccaccatatgttggtctctgtttccagattagcaaacaaagcaatgcactagcatattttttctctacagcacagtagctcaacagatcaaacagaacacaagatatatgataactaccatagtttggtaagtctctaccacaaaggggaacagataatggggatacagattttcaacagtatgaaatacgatgttgatcatagggtaaaaacaagtcgcaataggaaaacgatcacatcatccaaacacaatcacataccctaacgcgattcatgcgttcacaattttaacagtatgaaatacacgatggtgatcagtgggaaagcgctgtcactcataccgatggcgagtagcgtgggcttcttcagcgggcgatccgcctcgtcgtcgggctccggcttccggcgctgcacgatgtggaggtacacggggttcccactcttctcgtagttccacgccacgtgctccctcccgaaccccaggaacgaggtcatgtcgacgtacagcccaccctccgacctctgcacggcgaaatcggcgtcaaaaccctaaccctaggaaaccagagcgaagggggggacaaggcgtgggtgggtgggtgggtggttggttggtttaccggggtgtcgaaggagacgcagcactcgtccttgtggatgcggctgccgggctccgggatgcggaccttgtggaggtgcgagcggaggagatccatggccgcgggcggcgccgggcggcggcggaggaggaggagcgcggcggcggctagggttttgggggtggagacggcgaggcgacgaggtggggggagggtggaagaggggaggagtgattagattagagatggaagaagaggggttaagttggtattggtaggggcaggagacttgtacgggaggcgatttaaacacgggggttagtttggcttttgccggcgcatttattgtcttgtttttagattttctttcagaaaaggcacaaatactacccctctgtcccataatataaaggattttaagattttacttgcactgtttaaccactcatcttattcaaaaaattttagaactattatttatttttttgatttacattattatccaaagtactttaagcacaacttttcgttttttatatttacataaatttttttaataaaacgagtggtcaaacactacgagcaaaaactcaaaattccttatattataggacggagggagtacttctttgtttgatattatattttgtttttttctaatcaagtttcattaagtttgattaagtttataaagaaaaccaaattagtttcactaaaactaatatttaatatattatgataatatatttgttttgttttgaaaatgttgctatatttttttataaacttgatcaaactcaaaaaggattggctataaaatatcaacacggcttataatagtaaccagggataaatatgtg

SEQ ID NO: 19578 - DNA, 886 bp, Oryza sativa
taaaatttgacacttggttcttgctgcagaatgacactgctattgggccctccaagttcaggaaagacaaccttgcttttagcccttgccggacggcttggccctggactaaaggtgtgccttatcacatcaatccgtcttcttttcttcgattctcgccgctcaaagatgatgagcaaatctcttctatatgtatacaatcaaccaactctgcatctatcacctgctgacaagagtactagtgtctcaaatagcatgaaaatggttttctggtcaaacgctcatccttctcatttcagaaatactatcgaaaaataaatactacttcagtgctataggcctgtgcttattctgatcagtgcaagaagccttttaaccatgcggcattattcaggactatacatttttactgactaccaacacccaatggattgcaggtgtctggaaatatcacttacaacggccatcatctgaatgaatttgtgccccagagaacatctgcttatgtcagtcagcaagactggcatgcctcagagatgacggtcagagaaaccttagagtttgctgggcgctgtcagggtgttggaataaagtatggtaggtcatttcaccacaatgtccttggtgttgttccttacctccttggtagtttgcgctttgacgttaatcaatatgtagatatgctcgttgaactcttgaggagagaaaagaatgaaggtataaaacccgatgaggaccttgatgtgttcatgaaggtagatcacatccagctttatttggacacacactacctgttttgttggtgattgtctcatgacactgtttgtacttaatttttcaggcattggctcttgaggggaagcagacaagccttgtcgcagaatat

SEQ ID NO: 19579 - DNA, 670 bp, Oryza sativa
ccttgcccattcccctgtctccagagcacctagctgggcacaggcagtgaccacactgaccatggtgaactcatctgctctcaccttgcaaatctgcatgtaacggaatgtctccaatgcgtccctgaacctgccaacctgtacatagccatcgatcatcgcggtccatgcgatggtgtctctttcaggcatatgatcaaacaggtccctggcacgatcaacctggcctgacctcacaaggccagaaattaccgacgtccaggacgccatgctcctcatctgcatgccctcgaacaacacccaggccgcgtccatgtcgccgcactcggcgtacatatcaaccagagcgttctccaccctctgatcaggcaacaccccgctctcgaggacgcgcttgtgcacctgcatccccagcagcaggtccttccctttcccgcaagccgagagcaccgagacgtaggtgaccgcggtggccatggcgctggctctgaccatgtccacgaaggagcagcaggacagctcgaaccgcccgctcctgttatggccagagatgagcgcgttccacatgaccggcgctccccctcccgtggcgaggcacgccgcctccagcaccgcgcgcgccgcggcgccgtctcccctggccgcgtacatgacgatcagggagctcgcc

SEQ ID NO: 19580 - DNA, 678 bp, Oryza sativa
agcaatccaagaggtcgaatgtgctgatgcagccttgaatgacgccgatgtagatgagacaattgcctgggccgacggaacattggacttatcccttcgtcggagatcgaagacgatgcagccccgcgtcgggtgccaagttccgccggaacataaaaaacaaaagtagaagtaaaaagggtagcgatgcaccaaattgtattgatcgtagagatagattacatagaccccgggtgtacatatttatacccatgggttgatacaagtccttgtcggataagaaagaaactaacctaaagataaaaggaaaatataaagtccttatcggacactaaacacactttcctaaagataaaaggaaactaacaaactattcttaattaatagataaactgccatgccgcatcctttttaaactcgttcaattagggataagcttcctttagtagattgatttccttaaccgaatatagcaggaatccgactattggcgacttgataactcccatcggctgattccgagatgctgcagccgataatgattctaagccgatgacgtctttgccgattaccaaatttcactgttaacaccctttgaatcacagggtagaaaaaacagaggaataggaaaaacacaggattctgacaggaattaaaatgtaaaacaaaggattgcaa

SEQ ID NO: 19581 - DNA, 572 bp, Oryza sativa
tgcttctatactaactgtagctttgaaaaatggcagcaatttgcaaaccagaacatcacattaggggaggcaatactcactggatatggattattcaaggagaaatactggttctggattggggttggagcattgtttggttatgcaattgttttgaacttcttattcacattgttcttgactcttctcaaccgtaagtttgtgctaacttcatggacccagacaacttagaactgcaatcaaaatagtttctcattctcacaactggtgctccttcacagctattgggaatatacaagctgttgtgtccaaagatgatattcagcatagggctcctaggaggaagaatggcaaattagccctagagctaagatcttacctgcactcagcttcattgaatggtaatgctagataatgaatccctgtacttacatcacaattcatttttacccttttactaagtcttcatattaactgtgttccagggcataatctcaaggaccagaagggcatggtgttaccatttcaacccctttctatgtgctttaagaacatcaactactacgttgatg

SEQ ID NO: 19582 - DNA, 1052 bp, Oryza sativa
acatgtaggtagaatgcttaatttgtttaaacaccaacgcaacaactaggtgcattatattcagttattcacttggcagaagttaagcacaaatcagtgtagtaattaactaactagcaagcaagcttgcttgacagaattgtcaaacaagaagactgctaattatcatcttagcatcgttgacaatctataataatcaaataatatcattgtctagttacctattggaaacttggaatgtgttcaccaagagcacgcaatatcggaaagtaatttgtcagcacgaacactttgtgtcacataagctgaacacacacacaagaagtgcagaaatgtgaacaaagagctataagaaactaaaactttattgaacttgtagtagagtacatttggatatcataagaagaatctgaagatctaattaagaagaaataaagaagaagaagaagaagaagaagaagaagaagaagaagaagaagaacatcataaaaacctaagaaagcaacaagagaagactactgagtaattaagagaggcgattgatcgatgaggtgtagcagtgtagctagctagctcaagctggcgtcgcggcggaggccatggccgacgccctcgttgacgccggcgacgagctcggcctcgaagttggccgacgacatggacggcagtcgctcgtacacccgcgacccgaggtgctgcagcttcttctgctgcgtcttcaccgtcttgctgatgatcttgtagttccaccgctgctgcacgtacaccgccgcggcgagcgcgacggcggcgagcgggatggcgacgtcgccggacctggagtagaagtcgaggctggtgttcacgaactcgtactcctccgcgaagtaggggttgatcgccggcgccctcacgtagtcgtacacgtgcggcagcagcctcaccgccgtcaagccggcgtagtaccccgtcttcagcggccggcagttgatccgccacaccacgttcccgatcacctgggggagcaggaacatgtcctgggcgagcccgatgtactcctccagcgtcaccgc

SEQ ID NO: 19583 - DNA, 1715 bp, Oryza sativa
cggcgcgcgtcgtcagcgtcagcgtcttggggtagcggagcacgaggaggatgttgccgtccttggtgatcggcggctggaacctgtcgcggtcggagtgcttggcccagccccacgggttggcggcgtcgccgccgcgcgccggcaggacggcgtcgccgaccatgcacagcacgctctcgccgtcgtcgttctcggtgtacaccccctcgagcagcaccttcagctcggtgttcccgggccacaccttgaactccggcgacacgtacggccccatctccggcccggtgccgttgcgggagatggcgacgccgagcacgccgctcacgttcagcgccgtcctcccgcgccgcgccgcgtcgacgtgcgtgagcgagaacgacgcgagcggcagcgggtcgcgcgccgccccggcggcggcgtcctccgccacgtcggtgccgtcgaatggcagcagcggcgcgccgccgccgccgtcgccgtcgccgtcgtgcttccagtcacccttgacgaaggacagctccggcatgaggccgttggcgcggttggcgtcgaacgtgagctccgccgcggaggagagcacggacttgcactgccgcttcacgtcggcgaagcggacgtactcgtgggggatgaaggggccctgcccggcgccgccgcccatggggttcgcatcacggtggaacggatcaaacgacgacacgacggcgagcagcggcagcagcaacgcgccgacaagctgcagacttcttgacaccattgctgcgcaaaaccaaacccaatgtcacaaactcgcaatctgaactcagatgaatttagcaacgctgctttggatcaaatttgaccaagtgagtgattgacatcaaaatcttcacacttcttggcaacttggatgaacacaacaatgcagtaaaactaatccttttcagcttgcatgatcagatcagtatcaacttggatgaacacaactatgcagtaacacttgcagaagaatgcaaaaaatctaataaaatttctgcagcatatctaactaatcctgttcagcttgcatgatcagatgatcagatcactgacctcaacatagaaatttcttcagtgctcctcaagctgggagacctcgatgagagtgaggtgagtgtcgaagaactgttcaccaaggacggctctagtacagactagagcagcatggatctctgaatttgaccagaatgtggtgtcagatctagaaaaaattcccggaccagattggatcagctggaatctaatctaccaccactgaacaacactgatggatggatgcttcccccgcattatctttttccacaccttaattccccttctgcatcatcgaatcaatcaagggttctagtatagtattgggggttgactttgcgacgaagtgacccagaaacagagggttacacccttgatcaccgagaatgcccctgatcagagtgacttatcacaggattgccactgtgagaggatcgtctcggtacaaacgagcagtggcatttcggagattatctcgcaactgtgagggttacagcgaggtgaggatgggggagttgacgaagcgacgcaggtggcgcgcgcggccgccgcggcgggcatcgcggccggccggccgctcgccgcacggggaagcccgtgccatgtcagggcggctgaggccacgagagggacgtcgcgccgtcacatggccgcacgtggcc

SEQ ID NO: 19584 - DNA, 2924 bp, Oryza sativa
caagtcggactgacgagccgaggaaggtggtaccctctctcgtcatagacggtagcagagacgagacatgttggaggatgcaattggaacccttgcgtcgccaccctcttctcatctcctacctcgtcaccatcactgcacctttctaggtttggctcgccaccatagtcgcttggatgattccttcgatgtgggaggagagcctcttgttgatcaactacaccgccttggggctattatggccgtcgtacacgccgacaaggccaccacctgcgcctggtcctcgagtgcctcgttgacctgggccatggcgacaaagtagtctcccaatgcaggaagagaagagggtggggacaaagcagtctcccactgtagggagagaaggaggggaataaaggagagccctgacacgtgggctctacctgttgatgctgccaacataccacgtcagtagaaaccgtttctaaaaccaacaaagaagtcaatttgaaccggttttcgaagatggtagatgtattatacctggttttacggttgagggaagcaattcaatcaggagcgagagtgaggaagtcatgataaacttattccttttctgagacggctgttaaatacggcctggcccataatggtccatcactagtatagctaaaactgtattcatgggcctgcagttgattgcaggctaaaaccgctgtaatactgcgtaatcatcaaagttcatttttaaaagtgtaataatcaaagttcttgcaaataaaagagtcaaccgagttgatatgtttgtctccaaaaatattctcctatagtcaaaatatggtgaaaagggtgttatttatgcgaagaattaataaagaactaaattgactttgaccagtagacttttataaaacatcaagaatctgaatagccatcgcaaaaattcctgaaaatcgatgcggctgttgcttttcaaagtgtcaggattgcttctacagcggtaaagctgcaatatattccctggacgataatactatatgacgtttcggacaaacaaaataacttgcgcttaatggattttagctgtcggaaatatcaagtaatctttgccggatggagtacttaggctgcgttcagaaccctatgttcccagcacaagctgtgcacacgaaaaacggaacggtccattagcgcatgattaattaagtatttactattttttttaaaaaaatgattaatatgattttttaagcaatttcgtatagaaattttttgaaaaaatacacctattaacagtttagaaaaacgtgggcgcgaaaaacgagaagagaagttggaacaaaggttctgaacacagccttggtaccaccaagcatatcattatcccattggaaaatttaatgtcatatgctatatttgtgcataccaaaacataacaactactattaattagaaccattcacatataatcacattaattgcagaagcaaaccctgcattatgcattattggtggctcttcacaattctcaacttaacaacaacaacaaacataatctcccaaacaattacatctagctcatatttaatctctccaccatcacataattttgatatttactactagtactaccggattattaaatcaggaacagctgagagtcccaaaaaaggaagaaaaacaagagggagaaaaaaaaaccagcaaaagcaaaagcaaagtaaagccctcacattatccatcgatccatagttccatacatatgcatcacatcaacgagtgagacaagctcaagctcctgctccttctctggtcggctcggctcggctcggctcccgttctccgcgcgcgcgcgccaacaaaaaatcacttttccctttttccaggtgacgctaattaatctcccggattagcgcgattaattaagctactagctagtattattactaatgagtaattaattacgacgcgtggtgatttgattggttggtttggttgattaattagtagttaatcgctcccgcgctcgtggtggtggtggtgttgatctcgtcgttgtcgtcgtcgccgtcgacggcgtgggcgttgttggtcgccgccatctcgtcgtcgtcgtcgtcgtcctcccgctcctcgccctcgccttcctcctcgatgctctcggacatgtcccttccggctccggaggcggcggcgccgccgccgccgccgctgccacggcggtcggagtccggggacccgagcctcgccgacgccgacgacttggcgctgtagggaggggccagctgctgctgaggcggcagcggcgggggcgggggctacggcgcggtggtgcaccagggcggcggcggcggggtggtgctgcaggtggtggtggtggtggtggtagtactcctgcgccgccaccgccgccgtgtagtgcggctgcgtcgccgggtgcgcgccgtagatggccggccccgccgcctgcgtcgcgtactccggcggcacccagatgcctcccagcaccaccagctgcggcgtcgctgccgtcggcggcgccggcgacggcatcggccgtcttgtgtgcaacctgtacttctgcccaaacaaaaaaaaattcagatcaaaatgctcattatggcattcatgtctagcaatcagttaatcatactgtcttgtagtcaatgatcaatttaaacagtatttaattaagaacgtacgtgagatggatgaattgcatgatgagatgataattaccctacctggagatggcttttcacctcatcattggtcaatccatcaaccttcatcagctcgcgaatctgcttcggggtcgccactttaatttgcaaagaacaaaacaaaaacgcaagctcaagattaatttgtttgttgtcttttcatctttggtacggcatgtaatcatggtgttcgatcttgatcgagttacatgtgtaggtgta

SEQ ID NO: 19585 - DNA, 846 bp, Oryza sativa
tttagcttaggttacatacaattactcaccatgattgagaagctgcatgcagagagggagctcacgcttgaaggcgtcgatcttgagcctctcttcctcgagacgtgacaagaactcctgaagcttctgcgtcgcctgccccgacgccgcagccaccgccgtcagatggtggtggtcgtctagggttaggtcagaagacgaagaagccatggctatcgatctcctccctccaagtatacaagctctacaaaccaagctagctcacgctagctagctacagcaaatagccgaccgatctagctagtatattactactactacttgagatgaagtagctgtgcaaactgcgagtgtaagtgtgagtgatcgagatcgaatgtgagaagggttttgatgagggatcagatggggaatcagcttctttttaagggagagttttgggagaaggaagaggagaataaagttggatttagaggaaaaggaaaagctagctttgtatgatcttgcacatatacacttagctaaacagctatagctagctagcaacagtagtgagagatcagagagagagagagagagagatagggggataaagcaaaggcatggtaacttcttgcaaagatcaaaggcaaacaaaaacaaaaagaaaaaggttaattctgctcctcctctgcatgcaggaggtttcatgtactacgtaccaacaggggaatcaacatatctcctaacattacgaccagatgggtccatattgcatatattgcaccatgcattgcattctctctctagatctctctctctctctctctctctctctatatatatatatatatatatatatatata

SEQ ID NO: 19586 - DNA, 534 bp, Oryza sativa
caccagcatcggcggcggtgccgcccacttcccgccgctgacgttccagcggacggtgcacccgatggagctgtggagccggttcggcgtcaccggcggcgagccgctgagcttggcgtacagctacaccaagaccaagcaggccggcgagttcctccggcgaagcgagccgttcgacttcggcaccgtcatcgccaagtcgctgctgagctacccgaggaaatccggcgacgccgccgacgagacgacgagcctctccaacctcgccgaggagctcacgctccacgtcgccgccgtgccggatccgttcccacgcggacgattcgagcggccattccttcagcttgaggtgctctcgctcggatcgctcgtcggccgggcctcgccggcgacgtttccggggacgccagctgcggtagggcaaagcatggcatcatcatcgtcgtcgacgacgacgaagctggatgcgacggctatcctcaacgtgtcggcggagctgacgatctccggcgacgcgtacgtgaacgtgtcgac

SEQ ID NO: 19587 - DNA, 1176 bp, Oryza sativa
catatcattcttctgaagatcacaacactgctgatgaaatcgcttcagacgagcaccaaatgcaaagcagaattgatgatgagagctgcaggaatgagatcaccgaatgctccgatgagatcgtcgaggtcggtggcgatggtgctactgagcagcaggacaggtgcaggaacagctttgagatcaaggagaggggagaggagaagaagatctggttcccaaggtctgacagctccaggggtttcaggtctctgccttcctcaccttccaagatccttggaatgagaaggggtgtggagtgcatgagcaggaagcccaaggtggtcggcgacgacaatggcagatacggctatgaagattcagtgtccacaagcagcagcaagttcctcaccaggtgcaagcaagccatcaagaaagcagtgaacaaataaacaattctttgcaccatgatgcagcacatttcaacctgtttattcttcaaatctgtgtgtttaaattcgtgtcaaattgctagttttgttttctgtagctgaataagttagtactcaagtgaggcatacatagctttgcagagttccttctgcaactagtgagacagacatttactgttcatggtcactattatgtgatcatactggcgttgtacaactatttgttgatttatttatgaagagaaactaaattcttaagtccatttcgtcctcgaccaaaccagaaatcttatatgcttccctctctttttagaacatcacagatttatttatgcactcaagtgagcagatttatctgaatggtttcaccacaaacaatagttcagacagaaaggtaactgactgtaattaaaggtagtaaaacagattaacgacccacttagccatcagctttggcttcagaatttcagatcctctcatgacatcgacttgcgccatttcggcgtcggcgtcgcggcggcggcgccggcggcgccgcccctgcccttcttcccgctcgccggcgtccgccgctcgatgccgctctcggagtcctccacccgcgcgacgtcggcgctcatgccgccgaaccataacgtgctccacttgaagaacccgccgccgccaccgctgccgcctccgccgtgccgcctcctgtccgtgctcagcctgtccacctgagcctgcagcgcgctgcactggacct

SEQ ID NO: 19588 - DNA, 1076 bp, Oryza sativa
ggggtttttttttcactttctagaagtccggcaaccatcttacacgtttgcttcatggcctgcctatcatccctccttttaatcattattaagattctatttggtgttttactaatagtttttatatgtcgtatcaaccgccaccactctactcttttataggcttgttacttaatttatctcatcgtatgttttatatggtcttttttttcaatagtctttatttttatcaccaattttagttatttataaattgtattcctaattgaaatattttttatttttcttattttagaatttattttttaaaaaaattatttaataccatatagcattcttttaatatttttattttttatttttgaattttagttgtttcaaaattgtattcttacttgaactctcttttagtttttctaattttggatattattttatttctttattctgaattttaattaatctcgtattgggttattatatggatccttcttttaatattgcttatttttaattccgaatttcagttaattttaaattgtattcctacttgaactcttattttctttttgctaatttcggattttatttttatttttattccgaatattaactaatctcgtattgggttcttatatgtactcttctctcaatgttccttatttttaattccgaatttcagttaattttaaattgtattcctacttgaacttttattttattttctaatttcggattttattttatttttatttcgaattttgattaattttgtattgggttcttatatggacacatctttcaatatcgcttatttttaattccgaatttcagctatttttgaattgtatttctacttggactctccttttctttttctccgattaatgtgagaatttctagcttccacagcgaacgtggtgcctcctttcaagactgttttaataatataatagatagattatttttcttttttcactaatgcgcaaaatgattacatatcaatataatagaagaagaagaaaagtaaaatagaagaagaagaaaagtaaagtttaattacacaacacaagcag

SEQ ID NO: 19589 - DNA, 2644 bp, Oryza sativa
acaacatcctgatgcaaaatgctagaatctggtctggctttattgaaaggaagaaactgtataccccttggtatacgaacaggtaccttttgagcatttcctgatatgccagcaaggtttttaaggatggaatgatgtttgataggaacagaggttgcaggttcaccactgtatactgttgaagttttctgacgacttgtttgctcttggcaatttgctttttcaggtactgatgacgcattagatttctttgcatctggtgtggacggaccttctgcagttggtatctgacaacgagtgcaaagcttgcttaattcacagcatttgctaatattaaaatttaaccaggctataacaccaataattaaataagagtgaatgatttgttaaattacgtaccacatgagaaaatttgcatttatcacctctgatgcacattccattttccataaaattgtggcaagggtactttgacaactcatgatcataagggcaatcatctcctttcaaacaagaaccacgtgcataatgcgtgcagggctgtcaaggcaaaaaaaaaatcaggataaaattcgcaaaacctcaaaaggacagatacaacaggaagtttagtaccaatacttggatcaagatttgggtacacttcagtttatgatttagcactatactgatacgtattcataacatgtgcagtgcgaacctgttctgtgcatgctttaaagttcaaattcaatattgatgtcacattttcatctaaaaaataggtggtatgcataggtgcgtacaaaatgagctcatgcttgcgtgtgggcagaccacatagaatatatccacacatattaaacagcatacatgcatcttattataatacattatgattactgcaagcatgtgataaacttctatgaaatggataccttagattttgtcaaaggtgtcgtatcatgggagaacttgcacaaattgccctgcaataaaaaaataagaaatattaggtactacatccgtttaaggttataagactttctagcattgcccacattcatataaatgttaatgaatctaggcacacatatatgtctagattcattaacatatatataaatgcgggcaatgctagaaagtcttataatatgaaacagaggaagtattttattaaagtaaatcctgtgaaaagcatttttacagtctttgtaacatatttatatagaaaacataacacatatacaaagaataaagtggacatgttacatgatgaaaacaatatgattatataaacagtgttcatcatggtctaagctctcaggcagcacaccagcgcctaatcagcaaatagacagacctaggcagggctaatcgttaccaggtgctatctagtggacactgaatcaaaatatgcatcctatgctactgatatggctaatcactaaattacacaaatataatcagtgtgtccagaaaatcgctacaatatgtttcaaggccagggcatgtgctgtgcagtttacaacagcaaagaatataattttttgtcgatccaaaagtgaagcagatgatgactaccatctgtctgatctgagagacagactcacctgctggcacttcccatgcaagtagaagtggcaaaccttcaccactttaggctttataactggttgaagtttcagtcttttcaccccttcggcttcccgttgcaatgctctcttaattcgattagttctctgcatattaatagcattgaaagcaaatcttaatactttctataggtaacaaactatactgaatgcacacgttcaaaacaagtgtatactatagcaaccaaatggtcactgagatcagaacataccgtcttcttagctattctctcctctgtcaaggtgacgcttcttgtgtttccatgtttgagagcctgcaatattaatatagaacagactgaaaatccatacttacgtagctaagaagaaaatcttaacacagacgaatcaattgtattgtatattgttcttaaaaatcttgcattgtaaattgactgtgattaacttgaagttacaaagaaagtcatgaagtgtgaacactcgaactgcattcattgtactcaagcaaggtatgtatgcgatgattaaaaaaagctactgaattcagttaatatgaaacatcaaacaagaattaatcaaaattgtgcataaacaatgaagcaacaaaacagcgtatgggtaccaaaaaaagagagaatatggcaagcttgtacgcatttgtggttgacaaagaagctataccttatcatcaggcaaaggtgtctcattccaatcgagaacttcatcataactgactgcttgcgccctggcaacatgcatttgagaatcacccttgctattacatagcatgttccgtgcagtgtcgccatttcctttttgaggtatcaaatgcaaattgctctttaagtcatggccacatgacccatcctcctctatccttctgctatcaaaatcctcttccaattccacatcatcttgaagctctgaattgccagaatcatctgcatctaaattctgcgtgtcgccctcaatctctccttcctcaaaaccaccaccaccatccagtgacccatgatctaaactgcacacagatctgtcattgccaatcc

SEQ ID NO: 19590 - DNA, 1586 bp, Oryza sativa
  unsure (1)..(1586): unsure at all n locations
acaagttgttcatcatcgcatcgagttgcaattgctcattgtcattaccaaccatttcaatcaccaattcactatcctccccgtctaagcaagcctgcatcgacctcaaagcctcgtcatcccccatcagtccagccccagcccccaactcatcgccatcggcatcagcctccccggaagtgcctccggcgaaaacaacctcttctacaccctccacccgctcgaccccagcgactctaccctcctccgtcccctgcggcaccacgccgggatcggtggtagggttcacggcggcgtccggggacgccgaagtcgaaggcgtctcgtgcggagcatggtttcccagagccacctccacctctaagttcttcccccgatcgcctcccacgtctgcaggaggcggcgaatccccatggggaagcccgccggagccgccgggagggatggcggcggcggcggcaggctcgacctccgcgtcggggcgtgccgcgtgccgcggagggtgcaggtggaggcagtgcgagaagagccgggagagcgcgcggtaggaggcgctgtcgagatgggctctccggcgagagaggacatcggtggtgggcggcgcggcggcgagggaggcaggagccgccgcgggcgggacgggcgagggttcctccatggcggaagggactggatgagtgggtcggagctagggtttagggttcgcagctgtgagctgtgcgtcgcctcgccgcggctgctcgtcggcggcggcggcggcgacgtggcggcgagacgagaggaggaaaacccatcgcagggaaaggcagaggcggcggcaaacgagggcgcggccagaagcccagaatataggcctagtaattgggcctaatgggccttgctacagctggttgagtaaaggaaaaagaccacttagactctcttaatagttcaccgaatctaattcgtgacccttaactagaaaaccgggtaggacgactccccgaattattgaaaccagtgcaatttgactcctctagcggttttggagggcggtttcgctaacgtggcactgacgtagctttacaattaaaaaaatatctgtgggaccaatctatcattcacacacaaaatatattgtgggacccactgacatctggagcccacgtgtcatcctttccctttcttcttcctcctccctctctctctctcccttctctctctcttctctcccccttcggacgcacgcgaggagcgggagccagatcggcgacggcggcggccacgggctggtacggggacggatcgcgcgcgcggcggtgacgagngacgtaagggacatcggcagtcaggacgcacgngttgggcgctggccagggctgaacggcgcggcgtccatccgaccttgctccgcgatcatccaaggcgcggacccagccgactggctacccactctaccttaaagtcccagagctgcagcctctgctctcccccattggtcgtcgccgccggagcagtagcagcagcgccgcacgacggctgcaaggaagaacgagaggccggcgaccgcagccggagcggcggcgaacctctgcagcaggcagggg

SEQ ID NO: 19591 - DNA, 7168 bp, Oryza sativa
ttaggcagctccacaactctactccagactcaactcctgaagttatatttaggagttggagctgtaacaaacagggcccttccttatcgctctctctcaccctttcttttctaaataaaaatagataggcagccccctgtcgtcatgtagtcgatcttgggcaaattgctttcgaattccgatatataaacgtggaaatatttgcaaggcatgggggccctggtcaaccaggagctcggcggctcgcgcacggtgcaagttcaacagcagcagcagcagccggcgttggacttccaggagaacatcctcctcctcgtcggcgacctcaacgcgcgcgaatgccggccaaagaggaaaccatcgtgtacgaggcggatccggacgcactcaccgtggaccttgtcgacgatccgttggttaaagagttccgtgacaagttagtggatgaggtcctcaccatcgatgccggagatatggaggcactattcgaggaacaccaggagaatccggagctggagaggacgctgatgctgatctctcagtccgaccaagacgctgatgccgccgatggcgacaccccatgagactcttattacctttctttgacgtgatttgtctcggactttcattttttcggcccagcatgtgttgggctgtgattgtttcttttctttgacctttgtcaagttttctttcagccttagtaactcttctatttttttttctagatcacagccgaattccttccttggataccctacacgtactactactactacttctgcggccgtggataaggcggcggagacggaccaccacctggccacacgtgcctgcaggcgctgcgtcttgataattctgccaacggagaaaacccatgaggaggagtttatatttataggacgtgactaatactcgtagagactatactctatactgtattaactatagaccagggtttcccaaaccgccggggccggggttaccgcgcaccggcagtaagcacggttaccgcgcggtaaccgcggtaaccgtgtaaaaccgtacaaaaccgtgcaaaatttataaaaaaaattaaattattttttaaatttatttgaatttaaggatgttatcgcggtatttatattactatacccccgcggtaagcctggtaaccgcggtaaccgtgtggttaccggcggtaggggaaaccttgctagagactcatttcaaaccttgttgcctaactagtacaccaaatgtatacatgtgtacaaatttaatatttcagaaaagattatatgtacaaaatatatctattataaagtttctatgcgtaaacttttctacgtataaatatttatttttctagaccggagtaacacgctgataaattcattctaaatttaaacgtacaggtttcataggtacaaaaattacatttaaattactcgtacagggtatctgaaatttgtataagtatagatcggtgtaaaaatatgtatataatctctatattcttttaaaaaagtagtggtggtgataatgaatttgccaccccacctacctacttctattatgaattctgcaaattatctcttcaacttgctaatatttaaaacaatcaaaatctggatataaagccacatataaatcaaatggatagccacatgccacacattttctatagcaaaacgatgggtaacatgtttcatgggaattttttttgtttattttattttatagcaaatatgcccatgtgtttcaacgggagatggctcttttggttgaccatatcgtccatgtagaatgtagcatcgttagtttttactcttggttaaaaagacaataggcaattatgttcttaactctgttttcgttctatgattttgtccttgcttattaactaaaggtcaagtttgcctccatttcattaagatgacttagcggtgttgtaaatttagccctattattttctgaagaatttatgattttggtcttgatttgacaaaagtgtgttttgacacgattttttcccaacctgaattttcatattctgatcagctaattattaaattttcatattctgatacatgactactcattcatatttaaaatatatatatgaaaatagtactctgataagctagagtactataatttgatagtactccgaatatgagtgagtgtcggatcgccattgcagtgatcaaccttctcaccgttggccatgcacaacatgcagctgaattttcccttcagcgtgtgctagcatgtgtggtggactcgctccgcgctgacgaaccttgtcttgaggcacacccacacttgtttcgccgtcttcttctttgccacccgcatgaagagatcctttggaagcgcatggagcaagtgcgacctcaccttcttgtcaaatgccctaatcttccatcatcgcctgcagccctgcacccggatcacctagctggtataggtggttgcagtgaccagtgagctgcgggtagaggaaagcgctccccgtgctacgccgtgccgcgtctgccgtcgtgacgatagacatagctctgttatctttttttgaaacctaaggcggaacttagttccacttttatatttagaagaagagaattggcccagtctataaggaaaatcgggcccaaaaaccatacaactgcacggttaattacaaacccaccgctacacaactaacaatgacggcggagcccaatcgcaggacgtcgccacaaagctaaacacaaaagcgacacaacagcttccacatcgcagaagaggtgttatcgttgccgagctagccgccccagcgacccagcagcgccaaagcgaaagtcgccaaagccactgaagacgaaagtcgccaaagcgaaaagcggctccggcatccaacaatagacatcagccaagccaccgaggagccacttccttcacacggccagcaccagaactccttggaagagactgcaacatgtcatcgttgctaagcgtcgctgcaccccatcagcgagcagcttcgacttcatcagcagaaacaaccgaagagcatgtcgcccaccacaaaaaagaagcagacccaagaaggcgaagcctcaccgaacacaagatatgaaagcttttgaaccgaaaaggaccatcaacagtcatcgatgcattggaacttctccgaagcgacgcccctaaggaggatacgacgtgtgacgccgccgccgctcgtccaaaaatcggaacaaggttttcacctggagagatttgtgaggatatgaaagagtgccatgacaacgcctccaaggagggaaacgacacccacgggcgcgccattgtcgaaccggccaaaagcacggtaaggctttcgccagcatcttcacaacacccacacaagcacccccacatcgatggccgcagaatagttcatgacgtctcagaagcaatcataccttgattgtaaccaacggcaaagacgggcccttggccatcctcgaaatgccatccatccgccgcaaacttctacagcaagccggagcctccgccctccccatagcattccccatgaccagaaaagggtccggccaaggggggaaaccaaagagagggagaacactcggccgacaatgaggaagtcaccgtcacggacatcaagcaccattcctgcttcacgccagcacaagccgtcgtcccgccatttccacatccgcacatcgctgcccatcaacaacaacgagacccaccaccggcagaagccccctgccgagtaggaggctggctgccagcgagccgccgccgcgcttgccgtccacacgcagccgtcccaccgaccagctgccatctggcgtggaggcgacgaatctagccgcggacggccagatccagccaggtacaggggatgaccagctagggcgcgccgccgcagcattaccgaagccaacaccgacgcttgacagacgccgacgacaacgccgcgaccatgacgggagcgagccgccactgccgtcgcccgtccaccgcgacgccgcccctgcctgccggtttccgcgcctccccggcgccgaccactctcccccagcccggattggagaggcgacgcgagggagcgccgttgccgctgctccacctttcccgccgcctgcatctcccttccccgcctccttgggtgccgccgtcgtcccgggaggaggccggaccgccggatttggcgagggacgccaaatctggcgtcgtcgccgccgcccccgttccgcacccagccgccttcgcccagctgttccgcacccggtcgcctctgcgcgcctagcccgacgccccgacgccgacgccgatgccaccgcaccgtcgccgcccccaactggtcggggtcgtgggcaccgacccgcgccctcgagggagaaggaaggccccaccgccgacttcctcgcagccgcgcggtttccggcagtctgctcgggcggcggcgaggtggaggagggagcaaggcggcggtggggagaaagacggcggtggtcgccacccgtgtcgcccctgcccctggaacgacacgggggcagttctcatagctctgttatcgatcactggttgcctagaacctcaatcgaacaccttgcgggcagggactctagttgctcggcaatgccaaagaacaaagaacttaatttgtgacctatctttgtgactttgtgtgtcttctattgaatggaacaagttgggatacaatttgtgaggaatgtttcctttctttttgtagcaaagtctaaaaacagaatccggccagcacacatgcgtacactagcgcgattaacccaaacaattttgctatatatttgtcgataaattttctcctaaaaatttgacaaatataattacagtataatcgtagtgtaattacattgtaactacaatgtaacttatatgtaactttcaaaaatctctccgtaacatgttatttgggtaaaatggaggtcgtgggaacaaatcctttcacatatgtgtgtgctgtgattttttttctttctcaccagaacaaatctggtaatagatctaacgattcaaaattacatgaaatttacatacaagttacactattgttacatgcaagttgcagtgtaattacatataagttacaatataattacactataattatactataattacatctatcaaatttttagaaaaaaatttgtcgacaaatagaaatagatataggtgttctcaatccgaaaattcggaacgccacgcgcacacacgccctgatcgcgctcccggcatctagctggctccaatccgttgcacggccgttggcacccaccgagccctgacaccgccgccggcgaaacagcaagacgacacgcatgatcaggtccggtcagctaacgaaatgctgccagacgacacgcatgaggccttcgcgccgtacgaagcatgcatggtttctgttttctgtaaaaaaataaataaataaaagtcttctgcattttcctggtatatattccgatccgttccctggtttcttaacagtgtatccgactcggacttgttgatcgatcgtcttttttctcgacgtgcgcacgcacgtacacagaccgaatcggattatttgtgggcgagcagtgtctatatatttgctccggtggccgaagcgagcgagccgacaagccacagatcgatctctagctcgatttttcaacgagaacccctcgctgatcgaccgcacgccgcgcgcagtcgtcgtcgtacgtcgtcgtactcgatcgtcttcgacgacggcaatggccgacccgacgccgccgccaccgtgcgccgcgtgcgcgcaccaggggcggcccagctgcccggcgggctgcccgctggcgccctacttcccggccgaccggccggagcgcttcgagtacgctaacctcctctacggcgtggacggcatcctccgccgcctggaggcggccgggccggacccggggacccggcgcgccaccatggcgtccatcgtcttcgtgtcggacgcgagggccgccgaccccgtgcacggcgcctacggcgtgatacggaacctccagcaggagctcgccagcgtcaaggccgagatcgccgccatccggcagaagcagcagcaagcccagccgccgccgccgccggaggacggccactaactaagcctacgcaccgccatccgcatttatatatgcatgctgtggagacggttcaattagattatgtttttcttagtaactcattagattgctgcaatattaattatctgaattcagagtttagctccatgtttcggaaataactaggattagcacccccacacgttgccgtgcagtgggtgcgacggtatttccaaaggatgtcaaattactcctctatttactgtatgtcatatatgattatatttgtatttaaaagtgtcttataataatattattatgttgaagggcgtgtagaaaactttgcacacttctctgtctttatctctatatctaactctacgtgtggcgtttcggttcagaccagaagttccagattcagaccggaagtttcagattatttacttccctgcaaagtatgaatttcaaggaacgcctattcacctcctagatctatatctatatctatatctataataactaatataaatattcggatttttccggtcgtcgcatctcttttcgtccgtattttcgtccgtccgtcgtatttcaatctcaatcccaatccgactatgttagcgatggaaaaattgcaaaaaaaaaaaaaacaattcatcacagattcacaccaacggattctcaatcccacccacggattcgcagccaattcatcacagattaaaatccacaagaaaggagaaaaacgaaaagacgaaaaaccgcaaaaaagggcgccgccgctgggaaaccaggccaccaccacctcccctggatccaggacgccggatctgggataccgagccgccgccgcctgccaccgtcgagccctcccgcggccccatggcaagggagaggaggcgaggggcggagaggcgctgccgcccgttgccacccgcggaaggagagctccgggctcaagacgtcgactggagaggaggaggtgcggggtcgcaggtagagggagaaggagagaggaggcggagagaaagagtcgccggaggcggagaggcggagagaacgagagagaggag

SEQ ID NO: 19592 - DNA, 1287 bp, Oryza sativa
  unsure (1)..(1287): unsure at all n locations
atctggtggcagaaggaggtgtctgctaggttttcttttgttactgcctgctagtaaaaaatgacagaaaatgattacatatgaatagaaacatagatagaaagatttaaatcacttgtccagcatgtgcaattttgcaggaggcaatatagcacagtgttttttagccaatgtaagttggaggagtatctggctgatttaattgtatatcttctattacccggcgaaaacagaatagacatgttaatgggtagtgtaagttgaaaaaatgtgatgaggcaaactttgtacctgttccattcctcagaaatggaacgcttttgctaggagatgcatggtcaaatgtgcttgctctggttaattgacctgatggatcaaggggccttttgttcgctgatgagctgttggatggggtcttcactggacatctaataaggccttgtctgttcagtatcataacacacgctttagactgtgatggcatccagaaaagaatcgtttctccagtttctaatccagttgcctctacaaattatttccatcatgtcgtcatgtacagtgtgctagctacttccttgattttgatctttatcttcaagccatgggaagtttttaacttcagattatctccacgctgcatcttatatgctgtcgcaagtgtgattggcacaggatgtagaaagaaaatatcatatccgcactggtgctaacagcatattgtacatagaaagttttgtttgactttgagcttaccaagtagctttgatttgttgcattcagcctcattgatgcgaaaactgcggaagacatgattgtggctacaatatatatacacatgtagttagatgtatttgataaataaaaaaagttatgagaggctcagctagttattagagtttttattataatttttttattttcaaacagggtgagtattttgggatatgtagaaatgcaatgaagtatgtgatctataacttgatgtatgtaagtatttatgtgatgtaaatcttagttgtagctggaaagatatatatggtaagaacataatgtgctgggttaagtggctatactacggtaagatataagataattatgatgcaagaataggactaaatagctgtgaaaaagcttaataatttacagttgatgtaagtatttttttcnagtatagtagctaaaggatttatgtgaaagagtattaattatttattgtaatttcgtgtaatggtattgttctacatgtattgaaaaagggaaatttttatattagaaatattaggaact

SEQ ID NO: 19593 - DNA, 3859 bp, Oryza sativa
caaaagcgatagcaggtccgactttcatattgaaagcatgtcatcgttgttaagcttgcaaaagcaaagcacctccgacttcaccacaaacttgtatcgttgttgtcgagctcatcatagaaacgaccaagcagctccgacttcccacggcggacatcagccaaaaccatcatattaccacttcctgcttattgctagcaccagcacacctagaaagagactgcaccgtgttaccgttgctgaggttcatcgcgcctcaacaataaagcaacttcgacaccaccttgcaaactgaaacaaaggcattggctgccagccgcaagcaagaagcggatccaggaaagcgaaggcctcgccgaacatttcgggcctatttagcgttggtgtggaagtagaaatccctagagctaacgccaactccacgaccagagatgcgcatgaaaaggttctccaaacggtacccacagcagggacgcgacgtgaatcgtcgctgccgttcacctggaaactggggcaaggctttcacctggagcacaatggtgaaagaataagagggaacacaccataacgatgtctccaaggagagggacggtgccaaagggtgtccccatcgtcaagccggccaaaaggcacggcaagactttcgcctacagttccctgtccgctcctacacacctaaccaatccgcacacacgactgttgcaagaatgccgcactagccctgactaaccgaccctccggcgagcaagaacctcggagctccccgcgggcacggcctcaccgaaggcgcaactatcaaaccacctccaccacacaccaacacgcacggtccccgagagccgccgacctcaccaacgccgttcccagccgtgagggcgatctgggtaccggcgccacatgaccaccacggctccttgcccgacaaccgccagcctcaccgtcggccgcaccggccagccgcgccatcgcccgcgtcttctgccgccattagctcgctgaccagatccggcggcgacgggtcggttccagccgcaagggaggggccgagtggggggggggttggatccggtggcggcgaggcgggggagaggaggggagggttcgcccgcacctggctacgacgataggtgcattgtgatggttcaatttgaagattgccgacgccctagtaatttactattaatgcaatctggagataacctacaataaactaaactctgaattcaggggctacttgctactaatgctgaaacaagagactactttaacgacgcactagtaatctatttccaaaacataggagccaaactgtatttccaaaacctaggagccacactgttaatgcaatctggacataaacctacaataaactaaactctgatgaattcagaggctaataattgtagcagcacgtctgaatttaagattttcttcgttggcacaaggccggcgaagcatcaagcatctgatctgatcaaagcgcggccctcctcaggccgctccgtcgacgtcgccgcagcatccatggcagaagtagttaagggctcgagctcgatcgagtgcgtcgggtggcggcggcggcggctgggcgtattggcggtgccgcgcgagcgcgctctgcgcggttgcgagttcggccttcaggcagtcgagctcccgctcgaggtccatcaccacgccgtgggcgccgcgcacggggtcgtcggcccgcgcgtcggcctcgtaggcgacggacaccgcggcgtcgcgccgtttccccgggtccccgccggccgccagcaggaagccgacgacgttgccgacgccgaagaggcggaacgcgttccggaatagccggccgtccgctggctggtccccggccgccgggaagcagcgcgccagcgggcatcccgtcgggcacgcgcgccccaggtgggcgcacgcggcgcacgccgccggtgggtcgtcgtcgtcggccactgcgaccggcgagatgtcggcgacgaacgggcgccaaggttgggccatggagatcggcggcgagacgagagctgggtctccgtcggattggtaagttggggcaccggaacggagagttcgcggcgaaatatgcggccgcgtgcacctgcatgcgtcgggatatatatacagataacacaggacgtgcttgaggtgaatttgggccaaattaaatggagaaatttaatgggatcgatttttttttttacacatacaaggccgcacccgttatttgtataacttagctatatagaatttttttaaaaaaatggtaaattgattgggacaggattaataagtccattctggtgaaattaagatacatatgttatcttgatttggatatttttcaaactactaaatgatatattttgtgtgaaaattatatatatgtattaaagttgatttaaaatataaaataaatctaatttttaagtttatagtaattaaaactaaattaatgttaatggttttcttgttttttgtgccctagcttaatctttgtctaatcaacttcaaacggggtaaacatgaaggataaattcagtctacaatgaaaggaacaaaaataataaaaccaagcaacaaaaataataatagtactgtgcatgcacacaaatagaatttattttttaatgtcgattaaatttttatttgttgtttttatgtagattaaatttatattaatttgcatgtttgtataatagtgattttggatctgtcataatttatatcagcattgcgtaatgttgatgtggatcggagtagagttagcgcaaaactctcacaaccctaataccctaaaataaaacaaaaatccgtacaacatcaaaattctgcctctatattttacgctacataagacttgccattaacctgagtcaagttattcactgtttcagtgtttcatccccaatcggccggtacttttacatattttcccattataaagggtaattataagctgtgtttccttgatggcgtcaacaacggtcagcactcctccactgctccacaaggagtcaagcaacgcaaggaccgcaacctgcattcggtgaatactgatcagcaatatatgtcggccttattcattattattatttgttcaactttttttttaaaaaaatatttttttcaaaaaactttgttctactgtattttaaccacttattttaagctatttattaattatattatatatcaatatttagtttatgatatacttaataatctaaaccaaacatgttgtcaataacaaagtataaagaataaagaaaaatgtggaactatgcgggaattaacacacaactttggtgcgacaagccaacaaataaaaaaatgaaggtacaaaactaaacattagagatatgaaaccattttttttcttgaataatttggacaccactgcataacaattatcattacaaattttcctaaaagaaagggatcagaggcggctgtggcaattcggctggctaaaccgatcgagtagactggtgtttgctaattacgcgtgggtctacaaaagtaacttaaaatttcaccacaattattgtttagaacatagattttgagcatatatatgaaaataataaatttgatttgttaaaataaaaaaattttacttattttggatttatgtaaaaggattttaggtggtcaagcttgttgacttaaaaaaaagtctaaagacgaccgcttttatgactagcaagagagcaagtgtgttactaataaaggatattctcgtttgaaaatatagactttgacataagagatgacccgtgaactatccggtgactacttttttttctccaaaacatagattcggtccggcgactactctttttttgtcagaaca

SEQ ID NO: 19594 - DNA, 4180 bp, Oryza sativa
aactatcataatatgtaactctttttatttaaaacatcttacttttataaatattgttggttaaagtagcatctcgaagaccgtatcagaataaaaacatcttacttttatagatattttggaacggagggagtagtaggtgtgatgtttgaccggtggtctagcaagtacgcaacgtccacgatgaatttataacgcgtactccctccgtccaaaaaaagacaaaccctggattttcgtgtccaatgtttgactctccgtcttatataaaatttttttataattagtatttttattgttgttagataataaaatataattaatacttgacttgtctttttaatttttttttataattttttaaaataagaaacccaggggttgtcttttttttattattttttttacggagggagcacgtgtaagctctgtggcgtgaaagtacgtgcctgccctgcctacggacacgagctacatgtacgtacgtacgttaattcgtaccacactcgtgcactgttggatgcgtcgcgcggccggcatatatatcgctaattaataaagcgtgataaatatgttttgtcatatcgtacaacaggtcacacatgtaggagagggagagagctagccatttcagagaagttattcacaagccgcgcaagaaaaatcgaattaatttatactgtatatgtttttgaagagacaaatatgaatttggatttatgtgggaagtaacgtacatggcacatgcatgttaattatcagataacgatttgaaataaatcctccttaaatataattgattagagaaatgaaattaaatgacgtccaaaagtccgcctctaatattttacttatcagatatacgtttcaaaaagatatgtgccttagcatgcatggatgatttggttttaaaaggaaatggctaaacgtaccaaatttacagaactctattacataccttggtattccaattgcgattgatagattgacagttgctgattttagtatacctcccaataagatagagaaaagattggccacttggaaatgtggacacctatcctatggtgggaaagcaatattgattaattcctgtgtgagtagtatccctttgtatatgatgggagtctatcttatgcctgagagtgtgcaccagaaaatggactcaattagagctaggttcttttgggaaggtttagagaggaagaaaaaaataccacatgatgaaatgggaggccctttgcaggcccaaagactttgggggcttggctttatcaatacaagaataatgaatgttgtactgctttgcaaatggatcttcaaacttgaatctggggtggaggatccctgctgtgatttactccggaaaaaatatatgtctaatggtggggggttttatcaatcaaggactgaggggggttcacaattctggagagggctgcatgaggtgaagaattggatgaaattgggaaggtcttataagattggaaatggtaaagctgttagtttctaggatgatacttggctgggagatgtgcctttaaaaactcaattccctatcatctatagcatttgtgccgatacgaaaaagactgtttaccagatgtgtcctaattgagagtggacaattaacataaggaggaatttagggggaagagagatgacagaatggaatgatttacatactttattggatgagattcagctgaactcagataatgatactatgtgttggaagttgaccaaatatggtatctataaaacaaaatctctatacagagagctagcctttgggggtgttagagatgtcattatgcaagatttgtggagaactcccatacccttgaaaataaaaatcttcttttggctcatgttgagagggagaattcaagcggcttcccaactaaaaaagatgaaatggaagggcagtccttattgtaaactatgtggagagttggaggatgtcaatcactttatgtttaattgcccaatttcgaagttcatgtggtgttgctttagagatgcgtttgggtgggctggtatacccagaacaagaggggagctccttgataagcttaagatgcaaagttgcgatgaaaataggattctactttctctttttgcagcaggggcctgggccatttggctcattagaaatgattgggtgtttaataataaactgatctctaatgcaacccatttgccttacaaagctgtctcttttcatctccagcggagaaaactagcactagtgaagactcgaagctctttggatacctcgcgggacttactacttgccagcatcagaaggatagcaagctcaaatgcctgaaaagtgtagtagcgccgtgacttcgtgatttgctttgctgggtttggtagtcttggtagggagctttccagatgtttggtaattttccctggcttgtttttgggctgagccagcagccatgatgcttatgttcgcctagctggttgtttcccagccgattatcttatgttacttttgtattctgaactcttatagctttgaatgaaagatgggctttgcctttttctaaaaaaaaaatagctacgtacatcaaatggaagctatagctactagcggtacccatttaaaagaaggaaaagtttctacacgtactaatttcttatactaattaatcttttaacaactcatccctaacaatactctcaagaaacacccaggggttttccggctagctccacaaggtgatgggctaattggtctgggttcaaagccacacctcttctatttatttgatattaatttcttccctaatattcacttttttttatctaacaatactcttattctgaactgtttttagagggtaccaaaatggagacgggattatgggaataagaatggcaaccattgtaacaccctaggtaaccacgtacccagagtgccacaccaaaatacactcaaaactactaactcctaaaattattagaaatttcggcagagtctctcctatagatacggacatccatgataggcagttataagataaactaataataatattattcccacagtgctatctattcatataatccatagaaagaaactaatagatatccaaatgaatattacaagacaaaaccaggatatagtttaagtgtcattatggacctaagcaatataatttgatagtgtgtagatagatgtgtatataagggtgctactttccgcccatacatactgatctcaatgtgtacttaaaaccaaataaacacaagagtgagtacataaatacttagcaagtacaatatggaactagaaaacacatatacacatcattggcaataaagcctgaacataaaactttctttctttgaaaagaaacacggtttcaaacaccatgttaaagaaaattaatagttcccatcccgaacagacatgaattgaaatagtagttcccatcctggacaactgtgaatacatcctagcatttgccggcaaagccgagtaagcttgatcaacaattacctataggaacatgaatataaaaccagatagcatatccatgactcacatggaacatgaataattgaaactagaaacaaaaaagcaaattgaaactaaattgcacatccatggcaagcatggaaattgagttatttaaccagaaccagaatccagaatattgaaacaagaataacgtcattgtgaacataagataaacctgaaatataaatatcatgaacaataatctgaacatatgcaatcacatataacatagaaatatattgaaaataaataggtggagcaaacaatccaagaaacacataatttgttcgtcatacacttgcctttaacctcgacggcaacccgacgaaaccccctccacaccagatctctccacacctgtggagtaaagctacaagtaaaacctctattgaggaatccttgagactatctatacatgtacaaaacatcatgaaagatcaaaaccaaaatttatctgtcaaccgggacggtacctacataaaactacctatactacctatacaatgttatatacatatttcacaaagcgcctaacaaaaagtagcaaccgatatcactttagacatctaaacaaaattctctacaactttcatgtgggtgaaaaatcagattaagcctatgtaagtcccatataaaggaaaa

SEQ ID NO: 19595 - DNA, 2408 bp, Oryza sativa
atagctggctttctgggccttttcttgaccttaaagcaatgctttcggaacgtctctccacttggatcgagtgttattattattaacaataatattaaaggccttgatgccagcattcacttgttcaatgaaccaaattaaccacttcattttgaagtgttatatcatctacataaacatgatcatgttaaattttagttccttcagttttttattccctccttttcatattataagacgttttgagtttgtcctaagtcaatttcttcaagtttgaccaagtttatagaaaagcataacatctacaacaccaaactagtttcattaaatccaccatcgaatatacttttaagtatatttgttttgtgctgaaaatgttgctgcatttttctataagcttgattaaacttgaagaagttttacttagaacaaacccaaaatgactaataatatggaacagagtgagcattatgtttacgggtggtaatgggcttggcccatgggtcctttcacagcccaattttctaggctaaaatgttgggccctttaccacccttaattctgttaggtgtcatacatcaggaattcaggattacttgcaaagtggcaagttctaccttgtattaaaatgcagctgtcatgtgtgtgagcactgagcagcaaccatgaaactatagcagcagctttgttggttgtcatctaatctcctatttgcaaatcttatttagcaacctggagggatatgatattatctggttgagaatgtctatctccaattgttaatttgttaagacaagctctaaatacacggacctttcttatgtaataaaagatggagcaaatctaagtcccaaccccctttgtccgtcccattatctagtctctactctattcccttctttagcgaaaccagctccacctgctttgtatgtatcctggtgtttacttcatcatgatctaaggatccttacagtggaacagtaaggagtcaagggtatactaacaaagtggaaagttctacctgtcaatagtagcttccaagttttaaatgtgaacagctctggaactgttcttagaatcagagagcaattatagtgttttgaacactaaggaagtaaggatttctgatcagatactcagacctcaaacaaaagggcttcaaattgaggttatgtacgttactgagtttctggaatgttatccaagcaaacagtactacgaaaagaaacggtcatcgggttgaagaattaagcaccttatttcttgtttgcagagcaaattgataatttggggattctctgaatcgctgggattaaggaagctgaagttggagcacaaccattcaaacattagcattaatggcacactaaataatcaaaataaaaaaaatgatcttcaaatagaattcaaatgaatgcatactcattaaactcggttttattaaggaaaccatggccatctgcatccgaagcattgaaatgctcctctttccaccatgggaaccccagcgaattaacctctcctgcaaatcattaattaaaacacttactccaaattgtctcatggattcgcttccagccttattgaactcgttttgaactcctggacagataaaaaaaccaaaacaaaaattgccacattaccactcgattcgttgtgctgagcccggaagtccccgtaggagacaaccccgtcgccattcttgtcgtagagctccatctcccgagcggagcggtggagctggtcggctctggactgctcgaggttccacctggtgagctcgtcgagggaggcgaagccgtcgcgcggggcgaggtcgatcttggggaagagcgcgcggatgcggtcgccgaggttgaaccgctcgtcgtcgttgatgaagtcctcgtcctccctgaggaactcctcccattccctcatgtgctcgtccgcctcccctccgccgccgtcgccgtgcaggatgcggtagtgctcgcgctcccactccttgtcctccagccgccgctccagctccgcgatctccgggtcgaagggcgccgcgtggtggtggttctgctgcttctgcggagccccgtttcctccggtgggtgcccccgcgccggccccggagagggaggggttcctggggtggagcttgaggcggcggtggaggctgcggccccggtgcgggatgctgggtgagtaggaggtgaggaggagcaggatgacgagcgcgaaggtgacgtagaggaggagggcggagaatggggacctccgccccgccgtggccgacggcggcggcggcatcgccggcgagatgggggtggagatcggaagtggggtcgggggctgagagatgtggggttgcgggttgtgtgggtcggcgattttggactagtgcgactgtgcgagggcaaggagtgacgtgg

SEQ ID NO: 19596 - DNA, 3303 bp, Oryza sativa
  unsure (1)..(3303): unsure at all n locations
aggtggtgttcgccggcgtcggtacgccggtgagaggtggcggcgaggtctcccggctaggcggcggcagatctggcgtcgccgtcgccggatctggcaagccctccgattttcggcggtggaggaggctgctgcgacgtgtgggcggcgacggctcgcgcagcggcgcgtgggcggagtcggtgctggcggcggccgctggctccggtggtcgaaggccagcgctgacggtggccgccgtctccggtggtcggcaaggtcggggctggccggggtctccatcccgccactactctcttcctcctccctctccacaaccaccctcttcttcccccccctcccctcattcccttattctctcttgtgatgtccctctcctctctgtgccgtcggcacaagcgaagcagaagtggaggtttccttcctcccttcctctcgccatcgctgctaccagttgatctctgctgccagttgtccaattgctctgctgctcgccccagcgctcctctctctctgcgctggtggtatcttggaggtggttgccgtagtcgtgaggttttgtcccgcgaaaccaggagttcctcgccggagacatggttgacaccgaggtcctgggttcccctgactccaactctcagctcctcttcaggccggccaggtctcctcccctccgtgatgcttctcccttctgttggccgtcttccagacctggccgtggagtctttcggtggttgaggagaagtgttcgtccttgaaggtggtccagtccgtctgaagtcagggctcttatgcctcgccagtgcttcatgtgccctgtgactatgtggacctatcttagtgccgagtttggagcggtgtgtttttcctcttcggtgctgagcttttgtgttaaggcggagtcgaagctgctgcatcgggtcagccgatgagctaggcaacgacaactcttaacacttttgctttggcttcttggaggtcctacaccttttgagggagtcctaggcgaaagccctgtctggtcttccaggatcggcgacatcgacgcctgcgggtgccgtttcctccttggaggtgttgtcttgtggactctttctccctttgggtgaaaacccagtccagttatgggcgggcgtgggcagcggcttctgtcgttgttcacctccttggaggcttcgtcttgaaggtcttgctcctctctcggttacttctgtggttcatagttttgtcacgggttttttttgtgtcttctgtgtaaggttttgccggttttcccttagcaaaccgtgcagttgtatggttttctggcccggtttcccttataaacagggtcaactctcttcttctaatatatccggtagatctcctaccgtctactgtttcaaaaagatagtttgattgacttgaggaagggtgtgacgctcgatgatctaaaaacatatattcggtatagagaaaatggggaatgaaaagaatagaaagagagcgaaatagtgtggtgatagtaaaggcatgtggtttggagatgagatctctaaaccctgcgaagtgagagtagcaagcgggggaagaaggatcgatggagcagcggtcaccgtcgatggcgttcctcgttggcgtcgcttttgtggctaaattcgtacacttgccctttacttggggctgcaaaccaagattgtctgcttgcagaagaattagtgaataaatccatatacacaaactatgtagaatacaccttcagatttcaagtgcattttgagaagaatcacacaattaatccatgtatatatgtgtaatcttattaaaagaggcaagaagcaggctgcttggactgccaatgattgtagtctgagcataggcagtaagaaaacatcaatttaatgggactgtaggtagcaagtaatacaccacaaattacatattaactgaaacctcggttatgttatggccaaactgaaaacataatacagcggctagaagtaagagtagaattgagtggaaaatttacccatatcatgaaatccaagggatgtacgcaaattgtctctctctgaattgatactaacaaaaaggtgtcaaaacagggaagaagcccatgagtaccagagcacttagtaagcccaattacaccaacatcgcaatgatctccaactgtccaaggctgaaaaagaaaagatatcacattatatgttaaaaaccaccaccatcaccaccacaaacaagtgagaactgtgtgccttgaaaaggaaaattacaacattacttgattaccaatagtcaggaaaaaaatatgtatttcaagggagagaaacactaacaacgtccatgaccaacaaaagcctcncanttaccatnnntctgtgggtaaccttggatnnaagcctcaagcaatggagcaaagtcaccatccatgctgaacatactgcattttatcaacaagaagatcatctgagttggttacgctagccattgataccaaaataagtgatttttgaatgaagaaatttacttggaaatataacttgtctatgtgcgaaaaaaagaatattttccattgattaatgggacctgctagtgtaatcacaaacatagtttataactaaatcaattagtgcttaacattatgacatgtatgttacgactgggaagtgaaaaaaatacccatggatttttttttaagtcttacacttactggaggatgcgaagcaagcagagtttaatctcaatgacctccgattgtccaaggctgaaaaagataagagattacattatatggtataaaaacccctaagagcacaattcacattttcaggttaatcaagctaagccattaaatgaagcaaaaccaagcatcagcgcgcacctataacataaacacagatatacctcaaggatgcccgttgggataaaaatttggacgggtaaaacatcacaaaggagatcaaatggcagctacaattaggattgccaataaattaatactcacatgggaaatgagcaatgaaactacacccgcagtgatccagttgagcaccgtgaaattatttaggttacatgcagatgaaactgcagagcatgaaaacaaaaaatgaaaattaaatagcatatacaacatctgtaggaagttcaaaatatcatataacagcaaagaatcagctatagtacatgcagccaaagaagcaagctatagaaggggcatgatttaaaataatggtgttagtattagtacctaatggcacaacggttatcatgtaagtaaatcaatattcctgtcatgcttctgcttgcctctcacctgcaaccttt

SEQ ID NO: 19597 - DNA, 694 bp, Oryza sativa
gtcgcagaatgaggaaggtgaggccggcgtgggcgcggtggagagcgacccagccgcagaggcgcacgcagcggccggcatcaccggcgccgagctcgtcacacagctcgtccctcgtaggccactgcagcggctgcagcctctcgagcttcgcctcggccgcggggtcacggtgttggtggccgctagggttcggagcggagacggtgagcacgaggcctacgtggtggaggtggtggtggagagcagaaggaggcggaggaggtgcgaggcgggcagcctagggttgagcggctttaggcgggagaggaaggagagcggcgaggcgcagagaagagaggaagccattagattggacttggagacggtgggaaagcgagtagacgaagagaagggggcctgggttttcgaggaggaagacgagatggcatcggatccggcggccttgaggtcatggccatcagatccggccactccgatggcagcgagcgggtagaccagcaagttgaagacggcggttgtcagactcgtaagaagaatggaggaaatttcagaaagttcagagtttcagttaactgaagatgcaaaggagggagaaaacgtttcatcctgggtaatgaagatctaagagatgagacaaagccacgtgttcgagagagggatccgacggtgttaacgtcatgagaagccgctg

SEQ ID NO: 19598 - DNA, 950 bp, Oryza sativa
acaacagcaacaagaggaagcgcagcctcccgggcaacccaggtgcgttcttgtatagctagctcctcgatcgatccgggctccgttaattttctcggcaattaagcgaaagcaattgatcgaacctatatatagacccggaagcggaggtggtggcgctgtcgccggcgacgctgatggcgacgaacaggttcgtgtgcgagatctgcgggaaggggttccagagggaccagaacctgcagctgcaccggcgggggcacaacctgccgtggaagctgaagcagcgggggagcaaggaggcggtgaggaagaaggtgtacatctgcccggaggccagctgcgtccaccacgacccctcccgcgccctcggcgacctcaccggcatcaagaagcacttcttccgcaagcacggcgagaagaagtggaagtgcgacaagtgctccaagaagtacgccgtccactccgactggaaggcccactccaagatctgcggcacccgcgagtacaagtgcgattgcggcaccatcttctccaggtccttcttcttcctccctcctcctccatcttgcttgcttccatccatccatggcgatcgattgcagcacttgcactcctactgccttctgctcagatatacctgccttggctggcttgccgtgctcctttctcattgccactttgccagtaatccagtgttctcgctgccgcctgcgctttcagttggcacagtgacgagtaggaatcgaagcagcctataagatgagcgtttgttagtgttaacacacctgtaatcatccaataattagggcagcgatagatataccggttgttgattaaccagcaacaaccatgtgcccatccctgccgcgagcatctagccgaaaagatttgtgaacagtggcaactagtacgtagcttagctagctgctcgctgcagcagcgaaacaaaa

SEQ ID NO: 19599 - DNA, 3860 bp, Oryza sativa
tgcccagcctgacgcagaccacgacgacatgactgtcatcgacacgctgtccacgcactccgctgctccgccgccggattccccatcgacggccgcacctccttccttgccgtcggctgcgtgttggtgtagtccggctgtccagaccaccgcgcctccttcctgcctccgccacaactcccatcgcgagcggaacctcgccacgccggcagacgacgcagacgtcgcggcgcacggccaagccgttggcgccagcctcaccgaggaagtcctcccgatgctggaggaggtgtgatttatggcgggggtgctccgccagctgctccggccgccgccactctacctgccgcccgcccgctccgccactccatcctatttcaggcgtgcacgggagggagagaatagagaaaagaggggaaaaagtcgagggttcactgacatgtgggacccacgtgggtcccacgctaactcagctgctacatcggacaaaaccagtgtcaaaaccaccgagagacctaaagtgaacggttctataaattgagggatgtcatatatctggtttttcggttgagggatgattttgtaactcgattacaagttgagggaccttcggtgtactttttccttctcaaaaacaaaatttaaaatgtgaatatcatttaggaataagttcacttcgtgaccctcaaaagtgatcgaaatctaatccgtgaccctaaattacaaaaccggatatctcgaccccctaactctcgaaaccggtgcaatttgactcccttgttttggaggacggtttcgctgacgtggcgcctacgtggcggtattgactcggtcttctttccacgtggcgcttaggtgatgttagaaataaaaaatatatgtgggactcatttgtcattcaccaaaagtatgggtgggacccactgacatgtggggcccacgtaaatcattctctcctcatcctccccctctctctttctcttccgttggcgagcggcggccgtgggatgggggccagcggcggagatgttccggcgaaacagaaacgacgaggaggagcggtgtggcgacgaggagcagccgcggagcatgattccggcggcggcaggcgggtgcctttctctgagccgtggcatagagactggagaaattctatatcagttcttgattcatctcaccggtgattgtcatgcaggcatcaccgctgtatatctcggagatagccaagatccgctgtacatctggctgattatcaaatataatcaagcttagttactaactaatggcagatttagtttaattgtatagtaagagctgtacctggatgctggattggagttatggcaggctgtggtggcgcgagtcagaaaagcagtagccgatatcggcgtggacgaacacccaaagcagctcgtcgtgataattgatgccggtcgcttcctcctcgcccccacatgcgttccacctcttcctccacccggtccaccgcgtcctccacgcctgcctcaccccgtgggccgccacgacgcgctacctcgaggccgatcggcctccactgcgccatcgccatctccgccgcaggaatcatgctccgcggctgctcctcgtcgccacaccgcttgaagaaggaaggagagcaagagagaaggggtcgtcgtcgccgctgctccagcgcccgccctcccgcctgccgccgggtgcgctggcaacgtctccgcggggaggggtgggggaggccgacgacaacccgcgggagaggggtgttggtgatgccgtctgtggcggcggccaaggcggtggccggcggcaagtcggcgcagactccatcgtccgtggagaggagagaagggaggaggaagatggggaggagaggattatgtgggctccacatgacaggggctcccacatttttttccgtgtgtatgacaaatgggtcctacacatatttttttatttctaataccacgtaagcgccacgtcaacgtcacgtggaaagaagaccgagttaaaaccgtcacgtaggcgccacgtcagcgaaaccgccatccaaaaccacccagggagtcaaattgcaccggtttcgagagttaggggttgagatatccggttctgtggtttggggtcacggattaaatttcgatcattttgagggtcacaaagtgaacttattcctatcatttacagccagaccggcccaacctagctaggagagcaggctttgcatggcccagttctggcccatgtttagattcttgaaataatctattggcagcggttggctggagaatttgcatagacagatcttcctcctttcgtgcaagacatcgattgttaattagcccgatggaattgacaaagatttgggcaagaaaagttgcgatccttgcaaggtgttggattcgacttgtataacttgaactgcacttctttcatattccttcgttaacagttggttactagtcctaattaattcagtagcaattgcccaaactaaactttacgacaaatctccagctagacacaaaatgttcttttgaatgaagcggtccataattactgctagatagcattgctcaaagctagacggcagtgatttcttttgaatgaagttttgcaaaatgaaagagtggacaattgggcatccttgggaatgttggtaggactaggaatgcagctggtaaatcttgatagaaaacaagcacatgttttgtcaaagaaagaaagaaagaaagcatgctctgacgaaaaacaatcaagcagagaaaaccatatataacaagatatagagctagcctcatcgccgaaatgcagcggcactagcctaaattacatctctgctcaactacaacgatcaccttctcccgaattaactcagcaatatggcagtattgctccatccctctccaagaagtgtctgcttggcctttgcaattgcagtgtgtcttttgctcccatgctgctttggtagtgagtgcctcaataattctagttcttcttggttttctgcatgataatcttcatgctgctagctagctagttggtgccattgcataactacattaggatacagcatgcatgtcagcaacaaactctgaagttagccacagctttctctaacattaacacgatcgttattaatttcatcgtcgcatatgcaggcaaagctgccgtggaaatgttcgagaaggcttgccattgcttcgacgatcacaacgtaagcacatatatatagctataaacagaatcaagttaattaattaactgttaactgtttataatcaagtgtgtttcttcatgcatgcatgtcgcaattgatcattgaaccgaattaataattttgaatttgcaggtgtacagcgagtgcaaggaggagcttcggctgggggtggagggggcgttccatgtggggaaggagagcgtggacgagtactgcggtgggccgtgcctgatggagacgaagatggcgctgcagtgcgtggaggaggtcgcccacgacggcttcaggttctacagcggcgcctcgctgcccgcggtcaaggccgcgctcgacaccggctgcagctacactcctgacagaggtaaattatagtatattaatttagtccaacaaattatatattctcctttcctgaaaatatttttttttaaaaaaaactctcaagatcacgtgcaaaaaaaaaaagtttggacaacaaaaactataataggatatctctctgtgtaaacatgagtgtttaaattgtttaaattctattgacgcgcacaaattaagaaaatatatagaccgcagcatgaaatttctcaaatgtatatggaaaaaaacgattttataaattattctagtataaaattacacattt

SEQ ID NO: 19600 - DNA, 2330 bp, Oryza sativa
tgttgacgatcgttaatactgattttgatactcagtatcataataaataaatgtgaaaactttcgatggcctgtaacaaaattcaaagatcaactttcgatgatatgaaaccaattttgcttataaactatatcagtgatgggatcctatggcccctaggtatccctcaccggatccgcttgtacgccgatggtgtggtcgcattccttaggccggttgctggggaactagctgcagcacaagggatcctggctctctttggagaggcatatggtcttcataccaacttcaccaaatgttccgcaatcctgatcaactactcgaaggaagaggtcgcagccctcgatgactccctcacttgcccggttgaggagttcccatgcaagtatttgggtttgcctctctccatcaaaaagctgcgccgtgaggacctccagcctccaattaacaagattgcgcagtggctgccactgtggagatcaaattggctccagccagccgggcgcctagcacttgtcaaagcaatgctgagtgcgatccggtttacttgctcatcgccattccccccccccccgcgaaatgggtgctgaaagccatcgacaagatacgacacggctttctctggtgcggtatctttgcatgcggttggcaaccgcatgggggagaaggtctgcaaaaatcacccttttcgcatgcggccggcccaaccacatgcgaaaatgggattttcgcatgcggttgcttatacctaaattcagcaaacaaaaaaaaaataaaaataaaaaaacctaaaccctagcccgccaccgcacggtgccggattcgtcgcccccgccgcctgccggagttgccggcaccggatccgtcgcccccgccgcccgccatcgtcgccagcataggatccatctcccccgccggccgccgtcgtcacgggctccggatcggccgccctcgccgcccgccgtcgtcacaggctccagatcggccgcccttggcgccggatccgcgcggggcggcgccgcccgaggcggcagagccgcccccgccgccgtccgaggtcgtcgtctggtgaggaggggggaggggcggtgaggaggggatggcggtagtgccgccacccgaggtcgtcgccgccgcgggggagggcgccgccgccggatccgcgttgaaggagtacgggggagtcgccggcgacgacagagggaggtagaggcggcagatccaggcgagcggccgctcccgcccgccgccgcctcgcgccgcgccgccctcggccgccgctgttagtgatatgccctagaggcaatcatagagatgattgtatcacatactatgtttacatatttatccgacattgttccttgaaatagataactccttattggttaatgaatatgtgattctttcatgagactctttatgttgttttgttactatttctaaaggatccctgatcaaatatcatatgtggaacaaatatgtttatatgatcagcacatgtattaattgatgatcatgtctcatggatcatggtatagagataccaaattaataatgtggacacatgttggtgaacatgttgttcgatagacccaacatgagacactgcaagagccatatgtgttgtgtcatcagtgatctcatttagtgttggtgttgaatctttagacctgagattatcatggttctcaacatgtgtagtagcttacttagggactgctaaacgctactccgtaaatgggtagctataaaagtagttttcgggtatgctatgaaacatatagtgggatatgaataatcaagatgggatttgcccctcctatggagagatatctctgggcccctcgatgttgtagattatgaaagtgcatggccatgccaaaggtgattgaggagtcaatcacaagttatataatctatcaacaggttcgagtgaatgattgagctattagaggatgacacatatctagccttgagcttaatcgatatcgtgaggcaaaggggttcatacaagtatacactagaggttcagccgatatgatctttatgtatgccaggtgggtcaatacgttctgctaggggccgctgttgacgcgtggaccgaaaaggagttttcgggttacagctgagtatatatgaacctatagggtcgcacgcttaatgggccggaataaggggattggatagagatccaatatgagcttaattcggatagggatccgaataggagtcctacgggccttggaggcccgagtgatggatcctatatattcgtgaggggcatgaccggcggaggcataacatcacgtgagaaaccctagccgtcactt

SEQ ID NO: 19601 - DNA, 2196 bp, Oryza sativa
tattatgttgtatatgaggtgatcggaacatgagatgaaccgatggtcacccatcccaaattgctccaggctagtatcagagccgccttgtatagtttatgatctagatcagtgcatatagttgatgtgcgggtgtagtagatgagatttattatgttgtatatgaggtgatcggaacatgagatgaaccgatagccgcatagctttcataggtcatagactgccctcacagaccaacacatatcttttctgcacactttgtcctcactcgtgtgcacccgggaagaatttcccgatcggtcacccatcccaaattgctccaggccaagcacgcttaaccctggagttctttggagattggcttccggaaaagaagttgcaacttgttgatataagtattctattaatcctattaagccctaggccgggatgttacaccctcccccttaagagagatcgacgcccccgtcgatcaaccctaggccaggaacgtcctctcttggccacgtccatgtgtccagtgccagcgcatgtgccatgctgtgtaaccactcccggtctacaccagccatgcgcaccatgcctgcgcaactgcgacacacgcgcccgtgaaaccgcgagattcggctctgataccattttgtaacgtcccgccttcccccaggccgggcccgcttacatctgatagctttcataggtcatagactgccctcacagactaacacatatcttttctgcacactttgtcctcactcgtgtgcacccgggaagaatttcccggtcggtcacccatcctaaattgctccaggccaagcatgcttaaccctggagttctttggagattggcttccggaaaagaagttgcaacttgttgatataagtattctattaatcctattaagccctaggccgggatgttataaatgtctagtactcaccaaggccaagcgcgattgtgttcatcggatagtccgatgtccactggaactgcacgccaatgagaaaaaacgagccaatgagattgactcggcttcggcataatttgattacgccgttaaggttttcacatagcgaatcgtagatgagatctatgtaccccgggactgccgtgtgcgttgccccttagatttcgcttggggtttttatatctatcttacctttattgctgttatatatttgatatgacatggtaggatagattccctcagaaaaattaagtgaaatttatgctctttcaataattgcacctatttcggttgtgatcataagtgatgggtttgacatagcaaagtgtcactttttatcatgataaaataggatagatgtcggacatctatatgcggagattattggtttacttgacaagggtatcaaaacaattttggaccttggggcataggttgggttggacatggagatgtcaccccaacaggacatggagatgccctcggccggcaccacctcgcgccgccctcgactgctgcgcgccacactgcgctggctcttggtctgagagtgagatagatagagagagagagagagtgaaagagagaagactctaagaggagaggaagggaaggactagaagataaaaggataggtgtgaaaaattttaaactggtggagagagaaggaagagggaccatttttacatgcggaccacttaagcgtccgcatgcaaaaatcatgtgttttttaaactttaaattgatttttatgacattaaattaactcatatcaaaaagttgtcaaaaacaaatttgtagaatacattgagatctaccaattttattttggttatttctccatccgagtttgattggactatacaaaatttgagttttaaaatataacaaattaaaataatttttcgggtagtaaatgattttaaatggaaaagtcatcaatagcaaagttgtatagctcatcaagatctacaacttttgttttggtcatttttatatttgactttgtttacacagtttgaatttgaatttcaaaatatgacaacttcaaacaatatttttaaatactaaacgacttcaactgaaaaagtcataaataacaaggttgtataactcatcaagacctataacttctattttggtcattttttcatccgacaaagtgatttgcaagattgtttacaaaatgtacctctcttatatagttttataagaatatataagagatgta

SEQ ID NO: 19602 - DNA, 1743 bp, Oryza sativa
ccgcggaacttgatcgccgctagatcgtacgtcctgcgattgggaaaggagcagaaaaacaaaggtaaaaggagcagaagcgagaaatgcccaaaacaagacgaatccaataccaaacccgtccatgctgctcttcttttgctccccttgcctctctctcctccttcctccttcgttgagctctcgaaaatggaaagaacgagcaggagacgaggaggcttaccatatgtgcgattcccatcgcccggtgcggcggtagaacttgacgccgcagtactgcgagctgcgcgaccgcggcccgcgtcggattgggcgtcgcgtcgcccgcctgcgcccagcccgccgccaccacgtcgccacaccatcccgccgccttttcctgcctcgccccaccggcacgaagggggcggggaggacggcgagctcgcgcctaaccacacctcctcctcctccgcctcaacactcccagctccctccctcccacctcaccaccatgccccaccgcggcggcgcggcgtgggcgagcgctgcgcagtacggccggcgtcgggaaagggcgccgacgacaaccatgcccgctgctagggggccaccacctccgccagccgccgcgcgcgtgcccgcctgccgccaccgccgctccgcgtctctgcttcgccggccggcctgcgagagaagagtgagagagagagatgggagaaaggaagaaaagagggggagaggggggttgacgtggcacgctgacatgtggggcccacgcgccacgtaggtcaaaactgggtcaaaaccaactaaggatctcgggtaaccggttttgtataggtaagggaccatgtatatctggttttggggtttaaggacgtttttgtatcgcgctgacaagttgagggaccttcggtatactttttcccatgcaaaaatgagctcatttttgcatgtggccctcttaagaggcccgtatgggaaaaatcgatttttccatacgggccacttaagcggccgtatgggaaaatgaccctcgatttttgcagacgccactagttatgatccgtttgcaaaaatcatggggcctcgtgaagaaaaataacttttatagtagtgtatctatgtttttttttttttttgctttatctgcctcatgatgcactcgtatggacgaagaattagcgcgaaatcgaacggaaacatgatgaggatcggaaagttaccgattttttaagtagttaagatattgtccgtagtaggtaccaaagtttctataatttctgtaccctaattcagtttttttttttttttttgctattccgatacattttgcgagaaaacaacgtatgcagcagtactttattttctaatttttgcgacgaacattgaattgacattgacgtagtaggggttttaatctctatagagaatcaagggggcagcataccccaaataaatggaaaattaatcagctcgtatctgatacgggtgtaaacgatggtaataaggtcgtgatatccggcctgctatctggtgccatgcatatttctcagcatttacagctgacgatcgagcacaaaatcacagggatgcaacgatataatatcttaccatgtgtaggcaaataatcagtacgccttcccacagccacgcccgcctataaataacgggccggcattccaccgtagcaaatcatccattctcacaagcatatagccactatcataacaaaagcttcaagaattcgtagctcatggc

SEQ ID NO: 19603 - DNA, 2007 bp, Oryza sativa
atggttgagggtaaaatagggagaaatttgaatgagatatgattgattgggcaattagtactctagaattacaattatgtatgtatatatatatatatatatatatatatatatatatatatatatatatatatatatatatccctattctttagaaagtggcatatatatgtctatttttactaccttttctctgtgtgtcgggcctagctgccggcccatcgtgccgggccgacccaacatgccggtggggggggggggggggcaggcatggcccggcggtcaggccgggtcgtgcttgggccaggccaaaatgccgtgccatgggccgggccatcgggcctcgggccttttggccatctgtaatgtatatctaatcatcagccctcacatcattttcacaatattttaacaaatatgtctatcatttgtttgttttatgataagtattgataaaccctcatgtttcattattttcttttccttttactcctagctcgatcatcgaaaaaaatatattaaaaattgcttagtagttgccgtagcaaagcgcgtgaaatcacctagttagataaaatgttaagacaacttaaaagcaccattaaacttgagtcgtgttgtttcaacaaatttaattatatagagtagaacatcctattatcgatgggttgtaccataatggtatttgtatagtatgcgagacattgataccaagttatacgtagtcgtaaaaagatgggagttgtggatttttatactggttcaggctctaagatgggtaatagtcctaatccagtttgataccagcgatcaaccgaaaccaatgaaagagaaaactgtaaatttaccactgatttgaatcgttattttaagactgtcgctagtaaaagattaaaaaataacactagaagtctagaaccatcgttcaagtgatatcatcgcaaatttgagaaaactagcggtaaaattacaaatgcccaatggaagacaatggaatagatcaccgccccgcttgattcacccgtccgatccaaatccaacggtcatccttccatctcccccatccccacgcctcctctccttccacgagtcgccgacgaggcgaccacgccatctccatctcctccacgtctcgtcgccatctcctcatgcctacccactgctagggtttgcccctaagccccccaccctctccgccatggctctccctctccacgacgccaccacctccccctccgaccccgacgacctcggcggcggcggcgaggaggaggaggagaggctcgcctcgaagccgctgctctcgtccccgtccacctatccttccgcggggacggaggagggcgtcgaggagctggagctcgaccggaggtacgcgccgtacgcgaggcgggacgcgtacggggcgatgggccggggccccctgggcgcggcgggggcggggcggctggcggtgggcgccgccgtgctcttcccgctccggctcgccgcgggcgtgctcgtgctcgtcgcctactacctcgtgtgccgcgtgtgcacgctgcgtgtggaggaggaggagcgcgagggtggcggtggcggcgcggctggagaagtggagggggacgggtacgcgcggctcgaggggtggaggcgtgagggcgtcgtgcggtgcggccgcgcgctcgcgcgcgccatgctgttcgtcttcggcttctactggatccgcgagtacgactgccgcttccctgatgctgaggtatgtagtccttgatgattctacttctccacgggacgcctcctccgagttttgtgtttaccgttgcttgcttcatatctcagtagattgatattgtgaccaattttgtttacaaaaaatgataatatgtcacttcttaggtagcagcgcctaatggctggttggattatgaatgtcgattttgtactctggctgttgaaattggaaatacatattagagccgttctgcaatttactttatatctactgggtgagggttgggtaatgct

SEQ ID NO: 19604 - DNA, 977 bp, Oryza sativa
acatatccaacacaatttaacatttttactgaaaggcaaacaagaatgtagaactatggtatatgatctgaaagtatatttaatacatcactctctaaattgcttcactttttatgtaattattttcttatgtatcatatgtaaatactgggctgttgcattcttctattacagaaggcacaactacaaatggtgattatctcctccctttcaagacaggagcatttcttgcaaaagcaccagtgaagccagtcattttaagatatccttacaagagatttagtccagcatgggattcgatgtctggggtgagtatcaatgacttttatatctttttattcatatacccttaaagctggcaagtgtttggcttgaaggccatgcaaggcagtgtctgccttgccaaattttacttctttggcttgtatttggccccacttggtttatcgtcaaattcttctaaggtttcttactttctttagcattggctctacttcattctcttttaaatacttggtaatgattatccagtgctatgcgccaagccatctatgtgctttttagaactttgtgagtttgatgtcatttttactaatcatatgctgaacaatttcaacttgtcgctccttcatctgtttaacttatctatatctcatgggaaacttgtatctgttcaaccttactgaatctcatgaaaaattttcaggctcggcatgtatttctgctcctttgtcaatttgtaaataaccttgaggtgatccatttgcctgtgtattacccatctgagcaagagaaggaagatcctaagctgtacgcaaataatgtacggaaattgatggcagtggaggtatatacatttatctttcaaaatcttaaaaatggttttcaccatccacattttctttataatccatttgtatcacctgaaatcttattccattctaactaatattacatttttatttttgttctcaggg

SEQ ID NO: 19605 - DNA, 2067 bp, Oryza sativa
gcttgatgaagcatggtgagcacataggagtttgagcacttaaagtcagtgcatatagtggtcagaatatacagtggatgcatcatgcatgcaggggaatgatggtaaaccggtgcagattttgtgcctttctctttgtgtagctttactcggacacttccaggattcagggagttgagaaaatacttgtcggcaacgaaagatctgctctctgcttttagatgtcgtaacggtttcggattgcttgtttggacggttctgttatctgaggcttttgattggtctctcgttgttgttttgcgcaccttgaatctatcagtacctccaatcaaagtggggctgggagcttcacatgtgttgagcggaattgttgggaacttatgagatcgtgcacattgagaatggaaggaaagcatgcagcgtgctatttgctgttgcatgaattcgttgatgtatgataaaagcattagcatacatgaacatgtgaaaaaagccaacagactttgtgatgtccatgggtgtagtatagtgtgggtaatacttccaagcctggatttctgatgttattggtacacatttgctgaacctaaattgcctggaacatcagctgacgtacatgctttgaattcaaaaaatgttttagctgcattcatggatgctggcatatgtgtggcccgttatgctctgaagaatgccagcaggtcatcctatgtacgtggccaacagcattggtgcattgataatgcacttacttcgtactttttactgttgaatttgcatctttgtcaatagaagtttgatgagtagcatattttctgaaatgcttatgtctggactaaattgttttctactataccaagattcttcagaagctaaggtttattacatcagttctttgttctatcattactaggtagtgtaataattggaagcttacaacagattgctcagagggaaggttttcggggaatgtatcgtggtttatctccaactattctggcactcttgcctaactgggcggttagtctttacccttacattatagctccacttactccattgatgagatgtttttaaattctatgtaaaaagcaacgatgctaatgataatgctataagttgatctgcatgcaaacccatgtatggcaccgagtagagtagtacactacactatagatgaatcaagtgtctatgatctattgtggagctaatagtatccttgtggatttccaggtctattttactgtgtatgagcagcttaaaagcttgctttcttccaatggttagtgttttaccctgcatatgacttacttgacagcatatcatttgtcagttcttatgtggtatcgtacattcattttgcagatagaagtcatcacctgtccttaggggcaaatgttattgctgcatcatgtgctggaggtgcaactactattgcaacaaatccactttgggttgtgaagacaagatttcaggtatccttggaccacaacttgtctggaccagtagtcgatccaagacgcctgatagcataattgcaatttcaaaatgctgcataccaaatattttgtctggcctatattaggcaagtgtttaaaacctgtaagcaattcccatttctttcctaatgttgactgatggtctttacacaggctgaatgcccatttggaatggagctatcattaattataatcacttataaatatgctgaatttcttttagatcttttacctgtccatactaagcagtcaacatctacatgctatactcagacaaattgattcaaagattttattttgagtcatatcatcatctgtatccttttcccttttgtagacccaagggatacgagctggggtgatcccgtacaaaggtacacttgctgctttgaagagaatagcacatgaagaaggcattcgtggactgtacaggtagctttccatggaagtccacagatgcaagattttacaccgtttgatgataatatgttttgtgcgctggctgatatttttctttttcttttttataaagtggacttgtccctgccttggctggtatcagtcatgt

SEQ ID NO: 19606 - DNA, 662 bp, Oryza sativa
tcactagccccatttcctcccacattcttgctagtagcctgtccaagtttagctgcaaagaaatagtttatgttaaattcaagataaagaaccacaaaatggaaaagagaaccaattggggacagaaaactcaatacttctgcgtgcactgcggttttcaagatgctcacatcacacaaggcccaagggaagtaccagaaataacttgagaaggatataaaggtccccatcgtttggcatatgcttatgcttatcagccaaaatttgaattttcaatgttaaatttggagctgattttggggttttttcatcgaagtttatttttcagcctttgcttttggatcgataagaacacatatataaaagttttattcacaaactgctactcgtttgcaaatatgccatttggcatattctgaaaatatgccaaacgatggcagccaaaatttaactgagagagtaaacagaagatatataacatgcctgcaaattgcagctgatcacaagcgaatttggttgccgagcaagcttatccacatcatcaataccaacaacatcaatcttgttatatacataaacacattttatgtacttccgatttccttcaataacatcgatgaagtcatccacggtagcatcctcgcggaataacacctaaagaa

SEQ ID NO: 19607 - DNA, 1185 bp, Oryza sativa
tataatactcccttcgttccaaaatataaaagattttgggtggatgtgacatatcctagtactacgactttgaacatgctacattcattcaaaatcccttatattttgtgacggagggagtataataggttatacttgcattggttgcttactttttaattgacagcctacttgatatagctagttagtaccaatctatactgcatccctgtagcctgtacatgttgatttatgcagagatgaaagctcacagaggtacagattgagcaggatcactgatgattgatgaaacaaccaacctacctgatctgatacacccatctaaactaaaagagcattactaatatttgtaataatatttcttcctacatatccacaatgactctcatttggatgttaattaaccaaacaatagatctctcagcctgccattaggcactgaaaatgttgcagattcatctcctcctgacacatgtagtgtgtggccaatactgacaatgactgtcaggtaacaaatcagctcaaacatctgtaatcacaattctgacagtgactaagcaacatttaaagagctcacacattattagcactaattaattttatttatcctaaaaaaaagtgcagtaattagctagcaaatccagcctatataatccccagccaaaactgatcatatcctccaagcttgaacgccaagatcgagatcgccggagatgaaggcgccgccgccgccgtcgccggtggccaagagggcgcgcgtctcgccgttcgtcttcctgctcgtgctcttcctcctcctcttctccttcctctacggcgaagacctcaaggagctcctcggcagccaagctcaagcgcggccgagcctccacttcaatgccgccgccgccggtgatgggatcgagctgccggccgccacggcggcgacgaccggtaatgtcaccacgcatgcatggtgcatctcgtcgcagttgatagctagctcgaatttgttttgacgtgttgtgcgatgggagcagaggggaggacgacgacgaggaggtggcgggggcggctgccgttcgcggcgaacggcgacggcgaggaggaggaggaggagtgtgacgtgttctcggggaggtgggtgcgcgacgaggcggcgcggccgctgtaccgggaggcggactgcccctacatcccggcgca

SEQ ID NO: 19608 - DNA, 2926 bp, Oryza sativa
taagtaatgcatccgcacttcatcgtcatcaaatgataaatacaacagagcaaaaatgacccattttagttttgttctgtcccgggccaccaaaacctcaggacggccctatgcatatagatgcacgaatgcgagtgagttcttattccttcagtaacctaagctagctactagttcacttgatgatattgaaatcatggtacctagctagtaactcgttattactagctcctataataatgtataagtatgtatattaattatttctctatgccatttcattaattaattttgttgtccgtctatatctccggatcatcgtcgccggcggccttgtgcctctcctgcttcactcctgccgccttcagctgcagctcctgtccttttccccacaggaacgcgtagagccccacaatgatcagcagtgccccgatcacgctacacaaaaatagttaagaaaaaaaaagtctcagattaaacacgggtattcatatattttccgtatttcctaccctacacttagtaacaagtaatatacatgacatatatatagctagcagcgagagtaatatatatgctacgtagtatagggaatcgaggtacactcagtgtttaggtgttacttttgtaataattggctgtaactccgatgagcaaaggccgggatgttttattccattatctaaaaaaatagggaattgagctatatatatatatatatatatatatatatatatatatatatatatatatatataaaattgcccaaactcacttttgaggggaaaacactccataaacatgataatttggcagtagacaccgcgccgattaaaataataattttcgattaaagaggagggagaaatcgcgtgaaatttctaaaatacccttgggcccacaagccatatcttccatctctcttctctctatccctatccgacacggctgaggggatgatggtggccggccgacgactcctcttcacgtgtgcggctagccgggaactcctctccctgcgtggcgctagccggcgaggtccttcccccgcgtgtggccagccgacgactcctctccccgggcgcgaccggctatcgaacaactatccccccccccggcgcacggctggccagcgagctcctctcccgcgcgcaccgaccagaacgaggaccaggatctccccgcgcacacggccggtcgacgagctcccccccacctcgccgaaacccacaggacgccccaccgctccgcgccaccagatcggcaagcgtgacggctcgtcgtcttcttccctccattaaatcggcagatcaactcatcgtctgcatttctcagttctccaaccaatttcccgattcatcgatctcatcgttcgttcgctctagctatcgagagtgatggtgtggtctgttcccgatgatggtgctgctgccgaccatgctgctgctgcggctgaggctcccgggcgacggatcgtggtggccgtggacgagagcgaggagagcacgcacgcgctcacctggtgcctcgccaaacgtcgtctcctcctccagcggtgacacgctcgtgctgctccacgctcgccgcccccgccccgtctacgccaccatggacagctcaggtacctcaatcgaaatcactggacacgcttttgtggtctctgctcctaattcatcaagccaacacctgggttgttgttgcagggtacatgatgacctcggacgtgatggcgagcatggacaagtacgccgccgtctccttccaggtgcgacagacatggggcggcgccggcgattgcaacggcatcggccatggaagtgtgggaggaggggatagggagatggaagatatgacatgtgggcccaaggacattttagaactttcacgcgctttctctctcctctttagccagaaattattattttaattatcgcggtgtccaccagcaaattaccacgtttatgaagtgttttcctccaaaagtgagtttgggtagtgtcctagggctaaaaccacatataaacagtgtcctgtagcaaaatttgccacatatatatgaccatcaagataatgagtaatattggcggctttgctttagtcgccaagaaaattaactggctgccaaaaaaattatgttttcttgtagttatatactcccttcgtctctaaatatttgacatcgttgattttttagcatatgtttgaccgttcgtcttattcaattttttttgaaataggtaaaactatatgtatatataaaagtatatttaacaatgaatcaaatgatagggaaaatattaataattacttaaattgttttgaataagatgaacggtcaaacacgtttaaaaaagtcaacggcgttaaatatttagggacggagggagtactagcttatgatagttataccttcctagatagatgtttgcgccgagcaacagtgagtccatgacggtggtgatgatgagcgagagcgagttgaacatggaagggtagatcggcccgcgacgcgtgattgcccacgagatgagcacgaaggtgataccggtgttgaacaccccctgccacaccacgaattacatgatacatcgataaatttctttagataacggaaaattcattccgacctttactttaagaaagctatgaccaattattattatgattcattatctaaaaattattattattacgatttaagtcaacaaaatgactatgaattatcgatataatgcaactaaggcatatactccctccgaaaaaaaaaatctaattgtaggatgaatatggacacatatatatcctataattagatttttatttttttggagtgagggagcatatacataccgagtaggcgacggcgagaaggcgcaggtcccagctgagcttccactccgaccagtcgccggtggtcaagacgccg

SEQ ID NO: 19609 - DNA, 3293 bp, Oryza sativa
ttattaatccaagtgataatatttcagcaatgtgtactaatttatatgtacacgtatgatactggattattggtggtaattaacaaagaagaaagagagagagagagagagagagagagagagagagagagagagagagataatgtggcatttactggacctttcgaagaggacggcgagcggcgcgacggcggcagcgccgacgaggttgcggtagacgaggaggacgagcggccgcgcggcgccggcgccgagcgcgagctccgacaggagcagcgtcaccgcggtgaacacctgcaccatcaccatccccaccggcagcagcaccgccgccgcgcccaccgccgccgcctgctcctcctcctcccgctgctgctctactaccgccgcctcctgctcggccacgccgaccaccacgacggcggcctctcccgtcctcgccggcgacgccatgtatattttgctttgctagctatagctagagctaggggcacgatcgatcgatcgatcgacgcgatacgaaatggaaattaagaagaaaagtgagacgcgacgagtcgatcgaggatgggagtgtgcgagaggcgagcgattgattgagcttgcggtggtataaatagcggggggagagatcgagagagagagagatgatatatggggcgcagaaacggacgaaggtagggatagatgggttggtggctggaattgacgtggcggtatatcagtatcagtgtgtgcatgcggcatgcattctcccatcggccggtcaacttcaactccacctgtccatcagtggaactggaagtgcgtgtggaatgcaaccggctaccacttacataccattgtcagcattgttaccatgtgtctagtgtgtaacgtaaacttcattcgcagattgcagaagtcaacatttgtcccgaaagcaaccatcaggcccttgttcggttacacagggattcattccgggccggttatgataaatataacaagaaatttataatagatacaacaagagaccaggaatatttattccgggtcaggaactaatttacttatattaggtataacaaaacatccggattagttccacacctcttgactagtggattgattccggtctattattgtccctatcatgagtaaattggttcccggcccggaataaatctcggtaaatcgttgtatatatcctaaatttcttactatacttgtcattctcggcccggattgaatccttgtgtaaccgaacaaggcctaagagtaaattttatagaatccaaactattatatggtccaagtttcttaaagccgtataaactttggccgatgacacataacctcaagtattatggttataacgttttacaaaaccacattactaataattttgagtttggtataccatgtacacttttcagttctacaatcacatctcaaatttatgagcattttattcattatataaatgttacattcatttttttatttcaatacaatagtatgtcaaaatagttaacggtgtggtttgtgaaactttaggagtatataatacctatagtttgtgccacatgtcaagatacctgtggttttgtgcaacttggactataataggtgtgtttaatgaaatttattgtatctttaatttatacatagtattcttctaccatgcttggtccataaatcaagaagtttaattttatccttcaatactttacctacttaaccaccaatactatatattttcctattaataagagactctttggttattttccttcctcgccgaagttctcttaggattctaatattcaacttacttacttcattcaaaacataagcactttgaggttttgcgcatggattatgaaagtaggaagatttgaatgaggaatagtatgattggttggtatgaaaaaatagacaaataaattaaatagatgatggttgtgattggtttccagttaaaaattcgcattgacaaatatttgattatacagtagccaaattgatacgaaattaaaataagagtataatgcattggcagcccttaattaaacttatcacgtcatgttatctaggttcttaaactttgaaaatgcacatctaaatcccaagactatatcatataggttcaaaactatcacatacccccttcgagtgctcgtgtggctaacacttcactcatttaatgacactcaatatgtgaacgtcgacgtcatgcggatactcaaaggggcatatcccagccactaatactggagaggactatggatcggacgtccaatgttttgcataacgtcggacagtgttgcatgacatttgtttcaaagtgtttcacatgtttcatcttttgatgggaaaatatttcaacacaatatggagaaaaaatgattcatcatatgaaaaaaatgtttcaactgttgaaaaaacatgtttcaacataaaaaaagatatatgtttcaacaattttaaattatgatacacaatccaatcaatactgaaacattttcttacaacaaatgaaacaccaattttgacctactgaaacatgcagatgattaaaaaaacaaccactgcaacattttagtctaaactaatgaaacatccaatatgttaagctgaaacatataaaaagaaaaaagcagcctagatatatttattcttcttctccagtggtaggtaggccaccatgttgatgccgggatcgatgccaccccccactttgcttacctatactccatgaagactctctattgccttctcctattgttgacgaagatgaggccgagctcaccacgccattgtcaagcaagctaacgctgagctgctcccttcatggccggtgtccactcccctggatccggtgccccttagatcaacgtaatagctaattcgacggggagacgacgctagtgagatgccagtgggtggtggatgtcaatacgccgccctaccgtgtcccggctatgcggcggacaacaagatgagttgtcgcccttgctggccatcggcgtaggtctctctatagctagttgctccggtgaatatggggacagaagagaggaaaatgaatggttggaaatgaggataaggttgactgccagggaaaaaagatggagagagtggttaggtgggaccaactaggcacgcgtcatcgaactcaaagggcgcatccttggctagtagattggtcagaggtctgacgattgtagaatagtcctcgatgaaccttctataaaagctggcatgtcccaagaagctgcggattcctttgatgttcacgggaggaggaa

SEQ ID NO: 19610 - DNA, 8280 bp, Oryza sativa
  unsure (1)..(8280): unsure at all n locations
tgtatggtacgggatagataatcccggcatgcaggagtttcaagacttctttctttacaacttctcgcattgcattattgagccgtcgttgaggttccctagagggagtactctcggggtcaataggaatacgatggatgcagagcacgggattaatccccttaagatcttgaagcgagtagccaagaacagaacaatgcttttccaacacggcgagaagacgttgagtctcgtcttcaaagagcttgtcactgattatgacaggggcctctctgtcatggtgtaagaaagcataatgtaggcttgggggtagaggtttaagctcaagcggaggccaaggtggtggttccatgatcggcaggtcgagagtctcaccgggatccgcttcctctttgatgaaatcagggacctcatcttccagaagggcctcgggagactcgtgagggggaactgcaataacctcttccgttgactcaatttctggcagagggtctgtcaagacgatccttgcccgtgagaatggaattgaaaattcagtctctcccagtgttattttgaggctatctaatcggggtgtgttgatgagaagttgctcaattggcagcccgattaggatgtcaaaatcttggatttcaaagacgtggaaatccaagatcgcctccttgtcttcaaagcagacaggcacatcttgcataatcccaaatcttttgatgatatttccgcttggatgtttgaagaatttgtttgtcggggtcactgccttatcgcttaaataagcaaatgcaaaagacccggaaacgaggttggccccgacagttggactgtagagaatactngacgtcgttcccnnttccagatggcaagnngaatgattcgggngagnncggtatttaattcccgnaanattntancctntncgngnnatgnananagnncntccntngncnncntncnccntntnannacncantntncantncgncntnncatntantnnggttgnnnttaacntnncccggnnnatagtttnnnctcgtaggnannacctgagttccataggatcgggaggtggcaaaggaacgagtggtttcctcttgctaaaatagttcaaggtattgccatagtcttcatcaaaaccgtccttgaacaggattgtggcacaatccggagtctgaatttcttcattctcgacggacggctgctcaggaaccttctcatcaatcgagctagcgaaagtggatggttcagcaaggggctcgatcgttagaggttcctctatcttggacacggatgcctccggctggggttcattgggttgcgtcatgaaggaagtattttctagaatgcggtccaaaattttctttccttctgacggtgttttgtgcatgaacgattgacggagcgtggggctcctcaccgggagaccgcgcaggcccccctttgccggttcggccgggggcgctaagtgaggttcttcgccctcgatcaatctggagaatgttcgcgagagagcaagtgcacgagacacgggcgatgtagacaggttcgggccgctgagaagcgtaataccctactcttgtgttctggtggatctgtgtgtgaaggagttatagagagccggagagctagagagttcaggctccagaacccctctagcctcctttttttctttctcccccctttttggtgggcaaggtcctccttttatatggtgggccggaaccttgggggccaacggacgttccgaaggctcgccacaaaggctcgacagccggcaccgccaaccggggacacggggggctggcccccgtgcccggaccgaagtggcgctccggacgaggaagcgccctccgatgcgtgggcagcacggcgatcattgcgccggccctcgatattgaagcgggcatctggccccctacgcacatcttcttgggttggaggcgttgacgagggaatggcggacgaacggcgggtaacggccgccgctcgccgcgccctccgcctcgacgacacggagccagcagtagcaacgccagtggccttggtggcggaggaccgccagccggcgcctaggcgctgctgcgccgtcatgaccaaattggccacgtcatctagccaacgttgggttggagtctctggatcagggatgacgggcgggtgacgcaggagcgcgcccgcagcctggagcgcgccctggggcgtgctgccatcaccgtagatgaggagacgacgctccccgtctcgccgtccttctccatcgcccgcgtgcggcgaagtcgcggatctttcgacctcctcgagcgcctcctcccgcccaagacttcggcgagagggggacagtggagtacgagctcgacggcgcgggttctgctccccgtcgtcaccgctagcgctcggagagagattgtgcgccattgcctgttcggccatggggctgagcgggagaagcttggcgcacacgaaagagaacgagggcttagaaagacacacgcgccccctacctggcgcgccagatgacggagcgtggggctcctcaccgggagaccgcgcaggcccccctttgccggttcggccgggggcgctaagtgaggttcttcgccctcgatcgatctggagaatgttcgcgagagagcaagtgcacgagacacgggcgatgtagacaggttcgggccgctgagaagcgtaataccctactcctgtgttctggtggatctgtgtgtgaaggagttacagagagccggagagccagagagttcaggctccagaacccctctagcctcctttttttctttctcccccctttttggtgggcaaggtcctccttttatatctcaaggggataccacatgcaccacttctacctacttttcttctgggtggggacctaccctatcttgaccaaaacttggcttgcaccttcgcctggaagctaaatcacaacttgtccttgagtgaggctcagcgccgtcactcgcctgacaccggggatctccttgttactccctcattaatgggcgaagatttgccatggctgctttccaaatgaccatccgatgagatgggtcatacctacctccactccaccggaggcagatgcatcgtgggagcacggttgtctgccgatgacgcgaccggcgtcagaccagtcacagaccggtcattcttgtccaccacgtgtcagtttagcatgctacacgtctgcccttcttcatacaatgacttccttgcaatggttgcgatgaagcctggaatgtatctggccggggctgacgtgccaactccaggagttcccacgccggctccggctagggacgagtgcctggaggctctcatcattccgacgggacggggcgaggcgtgtgtcaggccgcctgttgccacctaacccgtgatctgaccggtctgtgaccggtcacacactgtgacctgtcacggaccgaacgagtgtgctgcgctgcattaaatgcggcgtggggcgctcgtccaacccgcaataaacgcggttaggtgagcgccgctgtgctcacctaacccactcacgtggcgccaaacccacagggggtcggggcgccccagccctcggggccgaaacgggagcggcccgacccctcggggagacagagggaggggcggccacatcactctcgggcccgaccccccccgagggggtcaggccacatgggtgactgcagctgccccaaacctctagtcaagatacccccggtcccatgtcaccgacagtagcccccggcgttacgccagggcgatcgcccccctcgagggaagcgctcgggcgtgacgccactccttagacctggtgacagatggggccggtctctacaggcggcagaaacccagcggtcgcaaatcgcgcacatcggcaaggaaaaaccgaccgacaataatgagcggctttcttcaagaccgctacattacttaagtagcgcgcgaaccgggacgagccggttcgtttcgcctggagatgtgatgacggtgcatcggtcggcgagcgtagttaacgcgcgcacgatatgtcccatctcgactgccacggccgcacatccgcctcgtgcgccgcaaacgggcgagcgggattagtggaggcgtgggcgcgagagacgagggggcgaggtagtgggcgcggggatcgaggagccgggcatagcgttggcaagggtactaagacatcaaggaagggatttgtttccttcctctcgtcactcttccctttgcctttgccacttgtgctctgactctccgtttccggcgccctacccttgccatactcgctcgctctcaagctcctcctccgccggcgtcatggcacggggctccgcaccgctcgagggtagcgtgctgccgccttcccgcatcgtgagcgagaggcaggccgggctgccgcgccgattcatgccggaatctgccaccggccgggaggtggtcgcgctgggcgagggacgcccggcgccgcattacccggggcggtccgtcttcttcctctctttcgcaatggcagggctggtcccgccattctcttctttcttcatggatgttctggagctttatgatctccagatggcgcacctcacccccaacgcggtaatgacgttggccatcttcgcgcacctatgcgagatgttcatcagggtgcgcccatctctccggctgttccggtggttcttcaccgtacagccggtgtcgccaccgtcggtagtcggtggctgctacttccagccgcgggggccggtgctgaaccgctacattccctgcgtccttcgcaagaagtgggacgactggaagagcgactggttctacacccctctcccctctgaaccgctacgacgccgttcttgaccgcctggcgggtctgcgatcccaggggctcacgggggccatggtgttcggcgactaccttcgtcgccggatcgcgccactccagcggcgcgcccggggcgcctgggagtacaccaggtccgaggactacatgaggacccaccaggggggcagatgggactgggcccctgaggacttcaagatggtggtccaacgggtgctgaatctcagctccgtggaggcatccctcatcccccaaggtgtcctccccctctgcagcgatccagagcgcgccaacatcctgaccatcatgcaggcggtcggggcgtcaggggagcgggctcctcgaggccacgatggcgcgggcgggagccgcaggggggaacaatctaccccgggagggggtcgtgcttctgggccccgtgacgggggcccggggggcagccgccctgccgacgcccgggggaagaggaaacaggaggataccccctccccatctcctccccgagggggcggggcggtgcgtgccagcagcaggcgcccggagggtgctgtgccgacgtcgcagcccgagggggagcgaaaaaagaagcggctccgcaagatggggggaccaaaccatgccggggaaacctcatctcccccccaaggtggtcgtttagccgacctcctcgcaggttcgtccccgcgcccactgtggccgtattcattctcccaaggcgagttttcacttacccgtttctttttgtcttctggtttttcttccgctttcagcgagattccgtcgcgcctccctcaccattccaagtccggccggtctgaggccgaggagacagcaaccgtggaggcccggaggcgggaagctgtccggcgagaagccgcggaccgcctccgggaagctgaggaggctgcccaggaagccgtccgggttcgccaggctgaggaggccgctcgggaggaggccagactccgccgggccgggaagtcagcccgggaggcagaggcgacgcgcgcacgccaggcggcctgccaagcccccgacccgactccgcccgaggcgacgacgacttccgaggccacccacgatgaggccgcgggcgcgccgctcggacccgacccttcgggcgacgttcgggacgagccagcctcgggggacgcccctgagtccggcacgtcgattggcgggccgagccgcacagcgcccacaccgaggcggctctctcctctgccttccgccgccccactgaacacagagcccctcctgcaggccctggccgccgcgaacacgacggtgctggacgggttaggtgcccagatggaggtcttgcaagcagagcgggcggagctcgacgcggcgtgggcgtgcgtcgatgaggggcggcgctcggtggaggccatggtggaggcgggccgcaaggcataccaccggcacgcctcagagctcgaggtccgtcggagggagctggcggagatcgccagggaggtggaggaggagcgggagactgccctcatcgccaccgccgtgctcaacgaggcgcgggacgatctccgccttcaatacgggagccgggtggcggagctagagaagaaactcgacaccgcccggggagtccttgacgccgccactgcacgggaacggcgggcgacggagaacgaggcggcgtcccggcggcgcgaagtggcccttaaggctcgcgccacggcgctggaagagcgcgcccgcgcgagggagagggacctggcggaccgcgagaccgccgtcactatccgggaggcaacggtggcggcgcacgaggccgcctgcgccgaagaggagtccgcactccgcctccgcgaggacgcgctcaccgagcgggagcgagctctcgaggaggccgaggccgcggcgcagcggctggcggacagcctgtccctccgcgaggcagcacgggaggagcaggcgcgccgtaatctggaaggcgccagcgccgagagggccgcactggatcagcgggccgctgagctcgaggcgcgggcgaaggagctggacgggagggcgcgcagcggcggggcggccgcgggcgacggcgatctagccgcccgcctcgcagctgccgaacacaccatcgccgatctgcagggcgcgctggactcgtccgccggggaggtcgaggccctccgcttggcgggcgaggtagggcccggcatgcttcgggacgccgtctcccatctagaccgcgccgggcggcaagcggccctctggggcgagcggaccgcgaagtacgccgccaaccaggggggcctcgcccagcgcctctcagagatggccgggactctccagcgcctccccgaggagctcgaggagacctcgcccggggggcagtggagcttgcactggcaagctaccaggccagggacccggacttctccccgtgggcagcgctggacgagttccctcccggaaccgaggacgatgcgcgcgcgcaggtccgggacgccgccgaccacatcgtccacagcttcgagggtacggcccctcggctcgcgttcgccctcgactccgacgaggagggcggcgacggtggtgtggacgacagcgaccacgaggccggcgacccgggagcctcgaagtgagcccccaggcccccgccaatcttaaatagtttttcctttcttcttccgaggccttcgggcccccttcttgtataaactaatttaatctgcaatcaaataaagaagaaatttctgtgtcaattttatttgttgtgtgtatgagacgaggatggtctgtgccgcggtccttctgtgtcttggcttgaacaagggctcgtgcccaggtcccagcctcaaacggcgcgggtcggggctagtgcctggggagatccacgtgtcgagactagccaggccgggagcgcggtgaccgagggttatggggacccgattgtgggcctttgccgattcccccccggagttcaccacgtcccggggcacggctcggttctgggccccgtttggcgatttccgccggctcgggccaccgagggcagggtcgagcacgagcgtgctaattcaagccaagactcttcaaaaggaaacaatggcacagacacagtccttaggaaatcaaaaaagcttttattgaaatacggaagagaaaaaagataagtatatgcatatgtggtagcccccggccaaccctgcacgcccgaggggggtgcgaggttggccagagcccgagacctgacacccgacccccactaggggtagaagcgacgaaggtgttcgatgttccacgggttaggcagctctgtgccgtcgcccgtggccagccgaacggagcccggccgggggacgccgatcactcgatacggaccctcccacattggtgagagcttgctcagtccagcacgcgtttggacgcggcgtaggacgaggtcgtcgacgcagagtgatcgggcccggacgtga

SEQ ID NO: 19611 - DNA, 5121 bp, Oryza sativa
cctcgcagtacatagtggcccgaggggacctcagggtgacctcggatgggagaactgcctccgcgccgtagacgaggaagaaaggcgtttccccggttgctcggcttggcgtggttcggttcgcccagagcaccgctggcagctcctcgatccacgagtcgccgtgcttcttgaggatgttgaaggtcttggttttgaggcccttgaggatttctgcgttggcgcgttccacttggccattgcttctggggtgggcgggagaggcgaagcagagcttaatgcccatgtcttcgcagtagtcaccgaagagctcactagtgaactgggtgccgttatccgtaatgatacggttaggcaccccaaaccgagcagtgatacccctgatgaatttaagtgcggagtgcttatcgatcttgatgaccggataagcctcgggccacttagtgaacttgtcgatagcgacatacagatactcgaacccgcccggggcccgtataaacggacgcaggatatcgagcccccagtcagcaaacggccatgacagaggtatggtctgcagggcctgggccggctgatgggtttgcttggcgtggaactggcacgccctgcactgccggaccaggtcgaccgcatcgttgagagccgtcggccaatagaaaccctggcgaaaggccttgccaaccaaggtgcgtgaggcagagtgggctccgcactcgccttcatggatagcggcaagaagctcgacgccttgttcccgaggaatgcactccaggaggactccgttagccgcgtgccgatagagggtcccttccaccagcacgtagcgcttggagatgcgctggacgcgttcactcccttcgcggtcctcgggtagagtcttatctgcgaggtacgcctggatctcagcgatccaagcaatcaatctaagggagctgggagcgctcccctagggtcccgaggcctggactccgacgggcctcaggggccgttcaggcgcgtccgtctcccctagggggtcgggtcgcgccgacggctgggcaagcctttcttcaaaggcgcccggtggggtctgggctcgcgaggaagcgagccttgagagttcgtcggcgaccgcgttatcccgtctgggcacgtgccgaagctctatcccgtcaaaatggcgctccatacgccgcacctggcgcacgtaagcatccatctgcgggtcagagcactggtactccttggagacctggttaacgaccaactgagagtcgcctaacaccaggaggcggcggatccccagtccagccgccactctgagtcccgcaaggagtccctcgtactctgccatattgttggttgcccgaaagtcgaggcggaccaggtatttgaggacatctccgctcggcgaggtcaacgtgacccccgcaccggcgccctgaagagacagggagccgtcgaactgcatcacccaataggcggtgtgaggcagctgcgaagggcccgagctggcctcggggatggagacgggctcgggagccggtgtccactctgccacaaagtcggcgagggcctggctcttgatcgcgtggcgtggttcaaagtgcaaatcgaactcagagagttcgattgcccatttcaccacccgtccagtaccctctcggttatgcaagatttggccgagggggtaggacgtaaccaccgtgacccgatgcgtctggaaataatggcgcaacttcctcgaagccatcagaatagcgtaaagcatcttctgggcctgagggtatcgggtcttggcgtcccggagggcctcactaacaaagtagacgggccgctgcaccttttggcggggccgatcctcttcgccaggggccgcatctccagggcgcttttcgtccgagaggccgcgcggggcgcactcggcttctgtgtcgacgacctcggggtcggaaggcgacaggcgtggccttcccgcagtggccccggggccatcctgggggtcgggggctcctggcaccgtcggacaagcgggcagagggccagctccggtcgtcgggggcctcgggccaccgttcggctcgggggcctctcctccctgctctctcccgggtcgagtcgacatagggtggggatgcgcggagcgagggtcgtcctcgtcgcgctccacgaccaacgccgcgctgaccacctgcggagttgccgccaggtagagtagcaacggctcatctggctccggggcgaccaggactgggggagaactgaggtacgccttcaactgagtgagggcccgttcagcctcctccgtccagataaacggcccgtagcgtttgaggagcttaaataggggtagcgccttctctcccagcctcgatatgaaccgacttagggcggccatacagccagtgacgcattgcacatccctaagcttgctggggggcgcatccgctctatagctcgtatcttctcggggttggcctcaatgcctcgggcagagatcaagaacccgagaagcttgcccacaggcacgccgaacacgcacttgtcggggttcagctttatgcgggcggtgcggagactttcgaaagtttccgctagatccgagagtaaggtctcctggttgcgtgttttcacaaccaagtcatcaacataggcctcaacattacgtcctatttggctacccaaagaaattcgagtagtacgttgaaaagtaggacctgcattctttaacccgaaaggcattgtcgtataacaataagttcctatgggggtaatgaatgcagttttttcctcatcctccctagccatgcgaatctgatgataaccagagtatgcatctagaaaacacaaaaggtcgcaccccgcggtggagtcgacaatctgatctatgtgtggcagggggtaagggtccttaggacatgccttgttaaggtcggtgtagtcgatgcacatccgaagcttgccgttcgccttgggaacgacgaccgggttcgccagccactccggatggatgacctctcggatgaatccggcctccagaagtcgcgccacctcctcgcggatgaaggcttgacgttccggggcctgccgccgcactttctgccggaccggccttgcgcccggccgtacggcgagacggtgctcaatcacctccctggggaccccgggcatgtccgccagtctccaggcgaagacgtcggcgtttgcccgcaggaaggagacgagcgcgtcttcctatttgtcgtccagaagaccaccgattcgtgtggtcttggacgggccgtcgcccagggcaacctgcttgatcgggacctcgtcacacgtgatcatccgctgcctcggggcggctgggacggaggtgctgagcctctcgtcgccacccgcgggcttggatgccgcggcgaggtggtccgcgcgctgctccatgcaagcaagcgcgactttgaggtcaccatggacggtgatggggccaccggggcccgacatcttcatctggagataggcgtagtggaccgccaccatgtacttcaccaacgcaggcctccccaggaccgcgttgtagggcagactgaggtccgccacatcgaagttcacccgctccgtgcggaagttggcggaaccaccgaaggtgaccgggaggtcgatatggcctagcggccaagtgtgccccggcgtcacaccgatgatcggctgggacggccggagcaccatccccggggccttgatggcgtcaaaggcagcggaggaaaggatgttgagggctgcacccccgtcaatgaggacacgccccaacttcacattgcaaacggtgggggaaaccaccatcgcgatctgtcctccccgggcaacgcacggtgggtggtcggtctggtcgaaggtgagggcaacctccgaccaccgcgcccgccgcgtcgcctcatgggtaggggccacggccagaagctctcgcttcatggccttgaggctccggcgagaagcgtgagcacacgctcccccatcaacggtggcgacggtggcctcaggctcctggaaccctaggtcatcgtcgccatcgttgatgtcctcggcgggggccttctgcttggcctcacctcgccggttgccggcgggagccgccggggtattgccctcacggcgctcctgcctcctctcctcctcccacttcctcgtccgctcagccaaacttttgaccgcgcggcagtccacgaggtcgtggagggaggtgttgtgcacggtgcaccacttgccggtcgggcgctccctactgggagcgccggcctccttttttttgtcgctcgcaggcctcccctttcgggtggcccgcgaagcgccctcgacggcgaggacgtgaccctcgtcgtcggaatgggccgacctcttcttcctcctcctgtcccgccgccctgaccgagcagtgggcccgggggcggccggagctgccacaccggaaccggaggagttccaggtccaggcctcctccttgcgagccacacggtccgcgagctgaaaaagctccgcggtggtctggggctccttggaggcgatcttctcgagcatgcggttgtgccgcacgcccccctgaacgcgtagatcaccgcgtgtgcagggatgcacggtatggtgttgcggacttgacaaaaccgctgaatgtacgagcgaagagactcatcgtcccctcgctgtaccgcgtgcaagtccgcttcttcacctgggcgcggatatgtgccctggaagttcatggtgaactgctggcacaaatcctcccaagagtggaccgacgcgggtggcaagttcattagccaaccccgcgcctatcctttcagggccatggggaagaaattcgccgtagacgaggagacgacgctccctgtctcgccgtccttctccatcgcccgcgtgcggcgaagtcgcggatctttcgacctcctcgagcgcctcctcccgcccaagacttcggcgagagggggacagtggagtacgagctcgacggcgcgggttctgctccccatcgtcaccgctagcgctcggagagagattgtgcgccattgcctgttcggccatggggctgagcgggagaagcttggcgcacacgaaagaggacgagggctagaaagacacacgcgccccctacctggcgcgcca

SEQ ID NO: 19612 - DNA, 1883 bp, Oryza sativa
ccgacaacgatcctccagcgattatgtccagatagaatgcagactccttatccaaacccgtatggaaatgttgaagaagcacatacccgggtaaggacagggttggtccagactgcactaaattagtgaatctggaccaggctgcaccaattgattcattttcgatctgcttaaaactgagaatttctactcgtagggcagtaatacgagtaactgggaagaaggtaagacagaatttgtctcacaacttttcccaactaccgtttacacatccaacggtagaggtgtaccattgctttgctctctcttaaagagagaacgggaacaatttccaccgcacagtttcttgtctcatgccacgaatcttaaggcacgagcagacttgttcaaagtctcgcagatgatggtagggattttctagatcaaacccagaaaaaggatttttccctaaccatactgattagttcgggatgaatttcatagccagttgtataaatgggctctgatgaaggaggtggctcatagaattcaccccgaggagcagacagctcaaaaagcggttgctccatggtcgagaagagtttgacaggaatacttctttaggatagcaggggtagatgtagaattaaaaaaacaaaaaggatacgaggatgaataaggtacggaaatgatcagcaaccatttccccggaaacggcgccagaaatgcttgttggtatttcttatggtcacagataaaatttgcaagcgcacagatataccgatgtagcacttcccctacggagtattccaagggtatcgaatccaatggaacgtgtgtgatcagatcttcctccggttcatccaaggacaccaagcaaatgataggccaggatagagaggatttactagtgagaaacagtgtctagggaaagcttaactttaatcctaacgcaatacttcaggcactggcaacccgctgttcccagatgtcgctctactacgtacccggacagggaggacttaagtgatctcgagggctgtcaccacctctacacccacctcaaacgtactgtgggatacgcagtaattactggataacaattacttaaacatcacgtctaagcaattactgtctactttagtgtttataactcaccaaagcaatcactatatttagttgattatagtgaacaataattccgtatgctatttaggaactaaccaagagataattctcacaaaataaatctaaattactcaagaagaatattatattgaattcagagtaaaaaatagaataaaagaaataggagaagattaccgacaactccggaattcttccgactcctactctactctcttccgattgtaatatacaatatagtacaatagagcctcttataatttagctcaagcttggaagtgtgtgtgtgaagtgagagagtgaagcctttatatagaggtaggtatgacggttgtgagaagctgaaatgtccgaactgccccgcaaccgccattaggagatgatcaagaccgtccacgccaaaccccagcctggatggctgagattaggagatgatcaagaccgtccacgccaaaccccagcctggatggctgagattgtggtccggccgaacctgggctgggcccatctggcttggctcttggcccatgttctcccctgatcctcctctattcattcttcggtattttggctgattcactgatgttttgatgaagttcacaacccatccttgcagggatacacatttctcctcactttagtctgattttcctcccaacatcggggtttatcgtctgcatacaaatatataccaacacttgtggaatatgtgagattaagcacatatcactatgttggatgttttattatccgaactt

SEQ ID NO: 19613 - DNA, 1153 bp, Oryza sativa
ggtgtatatgtggcaagtttgttactttgtaaatgcatataatttatagttaaaaatatcactaattgaataatcaaaatttcaatctttgatcgatgaggtatagcaaaatacaagtgtgccaatttatggaataaccacccgatcaatttataaggctatgaaaagatgtatataagggattattcatgtgatgatgtatgaaacaaatgcaacaatcgtgttcaatgctatatacgatttccgactttgttttaccattgttttttttgtcttgttttagtttgtcgtttaatttagcaaggatttgatcaaacgtgaaaattgtattgtaatacacatgcattttttttgctagttagaaaaaagaaaatcaagacaactgagcgagtatctaacaattgacaaaagtatcaaaattgctttttacaaagaaaatttccaactgtcaataatgcatcgatgagtgatacttttcttcatggctgcatcacaacactctcctttctctccttcctttccccttttgtcgccctccaccctctcaaatcaaagcaaaaaaaacacaagagcatttcccatctctcccactccttccgccatggccgactaccaccgcccctaccggagcgacctcgacctccgcccaccgccgccgccgccgtcctccgcctccttcccgcactccaacggctactacctcccctcctcctcctcctcctcccccaccgccaacggctacttctcctccaagggcaccggcggctttgcggccaacggcgaccggcggatcgagatctacaccacggcgccgcccccgccgctgccccctccgccgcgcctcgcgctcccgccgccgcccgggaggcgggacggctacctgggaggtggcggagcggggggtggcggtggaggaggcggaagcggtggcatgtggtgcttcagcgacccggagatgaagcggcggcggcgggtggcgagctacaaggcgtactcggtggagggcaagatgaaggcgtcgctgcggagggggctccgctggttcaagggcaagtgctccgagatcttccacggatggtaaaaaccctctgtgatccgctctcctcacgccatggctaatgatggctcctcctccacttctcggaatgaaagg

SEQ ID NO: 19614 - DNA, 2917 bp, Oryza sativa
aatatcatctcatgtgtgtggctggatcaataacgattaagacggacggaaaaattgatggaagtgctaaaaatgggaacaaggtgaactttggatgctattaaagtgaaccggtaactttcggtgctataaaaccaaaaacgtgaactttcgatgctatataaccaacttagcctttttttaaatgttgcacgatgttccaccaggtatatcgaaattgtctcactaagtacatcgaaaatgtttcactcgtttaaatcgggtgttgtttcaccttatataaaaacaatgtttcagcaaatagcgaaagaatgttttagtttactgcaacatttgatccatacatagtgaaacattataagtacactaggtgaaacatttttcgatggaacaaaaaataaaacgaattcccttaatagggggtttccaaaatatgtgggtttttttgttgcaatggaatatctcagtttactgcaacattagatctatacatagtgaaacattgtgagtgcactaggttaaatatttttggtggaaaaaaataaaccaaattttcttaatagagagtttccaaaatatatggttaatttgttgcaggggcaggcactgtggtgggccagacacatggtgggccagcggcatgcaggcgcatggccgcgcgcggggagcggggccggggggagcacccgattttgctcccccgtccagtcacccagatagcagcatttccccggtatttttataaaggaaaaatataatactggaattgatcatgcgtaaataatatgtctcgtttttttcctcagactgatttgtctgtctacacggtatgatgtgttggatggattgaactttcaagtttaggccgtgttcagttagttggccaattttttttatgtatactgacacatatttgaagtattaaacgtagattaatgacaaaacaaattatagattccgcctgtaaactgcgatacaaatttattaagcttgattaatctgccattagtaaatgtttactatagcaccacattgtcaaatcaggacacaattaggctcaaaatatttgtctcgcaatttacatacaaactgtatagttggtttttttcgtccacatttaatgatccatgcatgtgtctaaatatttgatgcgatgttttttgccaaatttttttaaaatctaaacacagccttgttgttgttttggaattcaaattcgtatgattagcgagcctcatgttgatttgggagtagtagaacagctttcacctggcactccgtacaaccgctcatcctagccgaacgtgtatgacctcgaatgctttcgacaaggacaatcattaaccatgtttgtttcagggccctggcaaatggatcacaacgatttcacatcacttcgtaaaccgtttactccgtcctaaaaaatccaacctaatactctatccgtctcagaatatagtaacctaggagcggatgacgtatcctctctccgtctcagaatatactaacctaggagcggatgacgtatcctagtactggatacgatacaacctaattctataaatttctattcagatttgtttcgttgtgttagaatatgtcatatttcttcattattttttttacgaagagagtagtagatctcacatctcggtagtctattcaaatcaaccttggccgccgtcctatccacggcgagccccacggcccccaaacccgccggccgccggtgggccaccgctccccccacaacaattaattactaactcctcattactaaatgatctctttattaatcccttgtacacctgtaaccactccacagtccaccccaacccagcgtaacgtccactcatcgcgagccgctcaatccaaatccaacggcatcccgcaacccacgtgtccctcaccgcgcgcgagtttgaatttcccaacggctctctcgaccgttgctgccacgctcctgaaaaaaaccaaaaaaaaaaataaaaaaaacacgcatctgtttttattctctcccatctctcccgatctctcgcccatttgcctctgatcccgaaacaaacagttggcggcggcggcggcgcgaggcgatggcggcgacggcgttcacggaggaggagaaggcggtggatgactcgctcggctaccccaaggcctacgcgcgcctctgccgcggcggcggcggtggcggcggtggactcccgtacggccacggcccgccgcacggcttcctcccctacgtcctccacccgcacgaggtaatgggtgctcgtcgaggtgatggtcgcggctgctggtgcggtggtgagctgattggggtggttgtgttgggtggtggtgcaggcgatgcgggcgaaggatctgaacgagatgttcccggtggccgacgcggaggcggcgccgacggcgaacccgcgggggttcgcgaacctgctgtggaagcagctcgaccacctcggcaacgccgggttcgacccggcgctgttccgcgtcgacgcctacggcaacgtgctctacctccacgccgactccgcctcgcctctcgcgtgggacatcgaccactggttcccctgcgcccgtaagaaacgcagatcgaacgaactcatcccaacatccgcttccacatcattccttcgatctctaacgagattgttttttttgtatttgctcgcaggaggtgggaggacggtgccgagcaacctgaggatcgtgcaggcgcaggtgtgcaggaagaagcacaacaagctggagttcctcgtcccgtggtgggatctgcagctcggcatctccgtcaaccagttcctctccatcttcgcctccaagaacgccgacttcaggttcgcccatccgcatcgaacagcttaatgtgtctctgcgggtttttttttaccgatgcatcatggatcgaatcctt

SEQ ID NO: 19615 - DNA, 529 bp, Oryza sativa
agaacgtacgtgagatggatgaattgcatgatgagatgataattaccctacctggagatggcttttcacctcatcattggaaattccatcaaccttcatcagctcgcgaatctgcttcggggtcgccactttaatttgcaaagaacaaaacaaaaacgcagctcaagattaatttgtttgttgtcttttcatctttggtacggcatgtaatcatggtgttcgatcttgatcgagttacatgtgtaggtgtactgtaccttgggcgccgccgaggatctgaagagcattgacgaagcggcggtgcagctccggcgaccagcaacggcgcgccttccggtggggctgtggcggcggcgggacggcctgcccgtccgatggcgtcgacggcggcttcccgccgttctgggcttctctcgatctcgccacgacgccgttgtcgtgggcgtacggcttcttgtcgacctcgccggcggcgatggtgatcgcgtccgccgccttctccagcgggcgcgagcgcgagctccggcag

SEQ ID NO: 19616 - DNA, 694 bp, Oryza sativa
ccactttcttgtattctattccagtcataatttgtgttgtgatcaagctctctttcagcagtagtcatctcggtctgcacaacaaaagggtcacatcaaatagcctctaaactagacagatagacaagcatataaaggggaaaacacagtatgaacatgagatgctacagaatatattattcccatgaaaaagtactaatctgttactatcacaataaaaaaagcaagtcatattgagcagagctaaattatcgctcataaatgtcatcgaaaatgatactactcaccttttggagtgaagaaaaatcaataccaaaatgtgacaaatgctgcgctaatagtggatcttcaacgctatcatcttctgggtatgagaaaacgtctgagctgtcacagaaaagcttgtatgaataggtatatttaaatataaaacaacagtaacttcagcagcacatgcccttgataggaaggttgctttaggactttaagaatattctttgttaaaactaaaataagacgaaagcaaaatatttcaatggaaggttaaaatatcagtgtaaattacttttatagtagctaattgggctgtgtgttataaattatgaagtacgagcagtatgtatccagggaacaactctggaatttaagaacgagtcttactgattaaagtgaatattcaataataattgcaata

SEQ ID NO: 19617 - DNA, 2965 bp, Oryza sativa
atgataaataagcatcgatccgaaggttaaagcacacatcggctggaggtccgatgtcatgaaatctacaagattagattaaacagtgaaacctttgttgtcatcggcgaaatccaacttatatgtatgtgtaatccttatgagccgatgcaacgtccagataactcaccggctgaaaccccgatgaaacccttattggcaatcaagaagcaggctagagattatggttctaagcacgacttagtagatcaaacttaaccgatgcagcactaagtatgaaaagaaacataatatctagatttttaggatggtaaatgtctgagctaatctaatctagcaacgcgatttagctgatatcggcagaaaccctaaaacgagaagcagccgatagagctaaattgatatgctaggactagattaatagagacatatgataaataggtaggcaaatatatcatccaaactagagcaatccaagaggtcgaatgtgctgatgcagccttgaatgacgccgatgtagatgagacaattgcctgggccgacggaacattggacttatcccttcgtcggagatcgaagacgatgcagccccgcgtcgggtgccaagttccgccggaacataaaaaacaaaagtagaagtaaaaagggtagcgatgcaccaaattgtattgatcgtagagatagattacatagaccccgggtgtacatatttatacccatgggttgatacaagtccttgtcggataagaaagaaactaacctaaagataaaaggaaaatataaagtccttatcggacactaaacacactttcctaaagataaaaggaaactaacaaactattcttaattaatagataaactgccatgccgcatcctttttaaactcgttcaattagggataagcttcctttagtagattgatttccttaaccgaatatagcaggaatccgactattggcgacttgataactcccatcggctgattccgagatgctgcagccgataatgattctaagccgatgacgtctttgccgattaccaaatttcactgttaacaccctttgaatcacagggtagaaaaaacagaggaataggaaaaacacaggattctgacaggaattaaaatgtaaaacaaaggattgcaaaacacataaaaaaacaggaatggtcgtttgattggagcgcagtaaaaacgcaggaatcggatgagagagatagactcaaaagaatttttccaagaggttggagctcttgctaaatttcctccaaaatccacatgcaatgtgccattccataggaatttcataggatttggaaagcttcaatcctttgaatcaaataaccaaataggaaaattttctatataatttaaatcctataaaattcctatataaattctttgatttaaagcggtcctaagtaagggtggggaggttgctagctccatgtcgaacagaaagaagcaagagtctcgagtctcccactaggcgagggaaggagacacaggtggcacccctggtggccgcggaatgacggttgtgcccctggtggcgaggggtggcgtggggggcaggacggtaaatctgcagtggagggggaggcgactgggcggtgagctgatgagggaggggggcagactggtcgctgacacgtcgtcggcgagcgcattgaccgttcctcccctgccacccgccacgtggcccgtcgcctgtcacgatgtcacatgccccgccctactgtcctctcctgccctgccctaccggtacgtgctccgtctgtcccttaaaaaaattccatgatattttgagacaaatgaatactccctccgtatcaaatgtttgacattgttgactttttagcacatgtttaaccgttcatcttattcaaaagaatctgtgaaatatgtaaaactatgtgtgtacatgaaaatatatttaataatgaatcaaacgatgtgaaaagaataaataattacttaaattttttaaataagacgaatggtcaaacacgtactaaaaagtcaacggtgtcaaacattatgaaatggatggagtagtatttacgcttttaatcttaaaataaaccaagtcttgtatatgaaaataatactgatagatattatcttcgttccaaataggtactccctccgtactcatcaagatagtaacacagtctccaaaacacaactttgacttattgtttctataaaaatatttattgaaaaatgatatatgtatacttttatgaaagtatttttcaagacaaatctattcatatattttttacatttttaaactcaacaacttaagagttattcatgatttatatttctaaggtttgactcaaacattgtcctaaacgacttcctttacgagtacggagggaatatatgttagtgaccatgtcagagaaatcctttctatagaaaagaggggtaaaaaggtaagaatattatgctcgaattggatcaaacatctatatatatatatatatatatatatgcttggtttgtactcataatatactgtggacaaatattgtgaaatggggtagatttatttgacagggagaagtagttctttttcttggtttgtgctaacaaagtataaataagctgcggaaaatattgtgaaatggaggaagtaattaataagatagatattatgagttatatatgtgtgtgttttgtcataaaaaataatcaatatattggatataaacattaatttaaattttcattacaatactatttgatttttggcaactcattctccatctaattaatagtacaaaacttgtgtcgatatacattattgaacctaactaatatccctcgcatcctccatgctctaccccttcctttccccacttgcttcatcccttgcttcatctactccacttattacatcccctcgaaaatttggctccatcgagatattttattcttttatttatagtgaggttg

SEQ ID NO: 19618 - DNA, 4105 bp, Oryza sativa
ccttaatttatgctaaactaacaaaaaaaaacaattattttgggatgaagggagtataacctaacggagatcctctgcagggtagtgctactcactgggcacaagggtttatgccttatagatccacgtgtcagtgaacagtactgcagagaatcctctttcaatataaccttattctactaagataagcatattatactgctgatgttggtcatcggagatgatcagcaaacatttactaaagtttcaaagaaggaaaagaataataaagctttaatactactactacacatttggtcctggatgaatggggaaattagggcttatttgaattaaaggatttttatgatgaggaaaaaaatggaggaatccaattcaaaagaaattctcctactatatgagcagtttagtttggatcatacgattgtttcaaagggatttcaagggataggaaaagtctctccacatcttcgaggaattctagcatggggtctaacctcgttgtttcgaattcttttgtgatttttaaggcatgttctctcctcctctctctagcaaattaaacatgtaatctcaattttctctcacccgttcgatatatccaaacacttgtgtttgaatgattcctgtagtttgattgcttggaggatttttcatgtcgtgacatttcaatcctaagttttcctcttcctgtattttgagtcatgttccaaaggaacccttaaagtggacttataactttcatcaatacatatttggtaactcatggtaaggagattggaaatttagagtaataagctaatgaagggattgatcctgtaagtttcatttttaatctctgtcgtttgataggagatatgagaattatgatgaatttgagtgagaaatgaattttaagtgatgatatactaacttatttttttctctcagttacctgcctctacccaaatattgaaaagacgagagttcgctcttaaaactcctcacccctcaaacttccatcatcttcaaacattccccctccctcctaaccaaacactccctcagcgttctgaatgcaacgtgctattcaattaatcacagaatataactttgactgacttacaaacttagtaccagaaggggataagaagtgaaatccgagtagaaatagggagattcaaaatcacatataggaaagtaagaataaccaacaccttcactcttggataaacgttgtcacaaaatacgtaccgtcaaattttaaaaccttaaatggccaattaataaaaacatcaaagttttacacaatgatgaaatatgtctgttatacctattgatagtgagacatctacatgattttctttattaaagatatgttggtgcaatctctgaaggtgctctatgcacaagtgtacatataagtgcatgcatctgtcatgtgttaaaaaaaagctcagagatgatgagatatgttcattacattaccaaaacaaagcataacaatgaattaagtaccagataaatcttggcaattgggctcttgaaaacctggtgcacagtctcatcatctctactgttctacagaatcacctcccttatcttacctgcatgacaaatgcctcgagaaaaaaaatatagccacgatggcagtagcgaaatatcgtgcaaaaggaggggcagtttcgaccgaggagctacagtgagccgcaagtacgcttttttctgcaggctcatcaatccatgcacactcattattagccctagaactgtagcatcatttcacatttattttctttctctctctctcggccttaatcgcatataacgataattgatatggataattggattggattatatgcagctgtatcacaaattcacaatcccacaatctcattttcttttttactcggtgaaccactaaaacagtgtgaaatgggcagctgtttggcgttttcaagaaagaaaatattgttaaactgaccttttttgacagtcatcttcagttttttttttttgtttaagcccttcctctcctcactcacactgccctgttcatctctttcttttttattcgattcctctattccattccacacgcattgccgctggtagtagaagtatagtatctctccgcgaccgaagattttaaaaaggaagcaatttgcctcttttttttttttggcgcacctcgattagtagtagattttagaggcgaatgtgagcggtcaaatccttcttttttagcttgtgcgcgttgtgttttgtgctctccttttgtcagttcctgaggcgctctctcctgtgcctttgtgtttagcgtgcgtgaccgcgagcgaggtcgaggagtgagagggagtgaggcggcggcggcggcggccatggcgcagcagcagcagcagcagagtgcgtgggaagcggagaagatgtgagctttctcctatctctcttctgttcttcgttgcttcatcattccttagtttgttattgcgatcagattggtttgatgttcttcgcacattcttttttcccttttttttatgttggtgaaatgttctccgttttgtcttgagatttttttgtcattccatttggttctcttggtgtccgcatggttatctttccccaagattagtttcttgttttcctctgggaggggtttcggattcgtttcttggcggtttagatcgtctttttttctggtgatttttgcaagaatcttgtccttcatcttcccttgttgttgtatttcagagggctgcagacgcttgagattctgtttgagttccctgaaatttctgcattttccgttctgcattttggtttctccttttgcaaaagccatgcctcttttttttttcttgttcctcttgttccttttatttttctcggatacagtactagtttggtttattgcttgctagcttttcaactgccttttccttttaccttgcattgcaactgccttttcatttctcgaaatttatttgctctttcacactttaatctgcattttacctttttattttctcatgaaaactttcgatcccctccttcctgttgctgctgtgcttgcatgcaaacccccatgtttccttttttacttattatatatccccgcactgaacttatccatgtctgttcttggaagcaggttggacgtgtacatccatgattatcttttgaagaggaacctgcagagcactgccaaggcattccaagcagaaggcagcgtgtcttccgatcctgttggtcagtgcatcaatttctgaattttgtcatactactgtagtttgcaatctttgctctttctgcattaggaccagatagtttgttcctcagactgccattgttcttgggccaataggatggttacaaattgatcatttgattagcttgattagtactacacttacatttgtgcatgtgcgagacacgagtattattagctactcgtaccgggcagatacaaaggaacaatactacagccacattgttttgtctgatttatgcatgccagtctctgatgtttctgcattgtaatgaatgcgattttaatcttcttgtactgaaagatgtcagcttttgttttgcaaaaaaagcaattgatgccccagggggtttcctcttggagtggtggtctgtcttctgggacatcttcattgcaaggacgaacgagaagcactctgatgttgctgcttcgtacattgaggttcttgtagcacatgcatcttggttattacttgtccttgttgtttgcttgcactcacttggtacagtggtttactgcttatcttacaataaacatgtgtaaatgcttgaattgtgtcagtcatagagatcatgttcactgtaaaaggatttagttttttgcctaaagcaaatggatttaaattccacacaaacattgaaaaccaaattcaagaactttccatgtcactcttgaaaaaaaagaagaaaatgcctaattcatctatgtaggaaaaacttgttatggtggatatttttttttaaaaaaaaaatcaaatgtttccccatatttccaaacaaaacatgctgcatcatatcacacaattatagaagaacatgtgtcttaatcattttagaaggtacagaatgcaaa

SEQ ID NO: 19619 - DNA, 1934 bp, Oryza sativa
tgcaataacagctcaggcttcagggtaccaactgctcaataatgcttgctaatcatttacttctcttttttttttttttgggggggggggggagtgtggggtggggatgggaggtttggagcgcaaaataaataccatatcagtcttaaatacagcctataatgtgtgatctaataggatttcctaccatgcttgaattgtgtttaccgcctttgtttttacctaactattttgcggtcttcaaattgcaactttgaccattaattcttattgtacactaaaatgtgctaataaaaactattatattactttcatattattcacaataaatctatccagcatgtagtagctgtttgactaaatttccgtaatcaatgctatcttgatggttcatactgtaatggctgtttaacggcaattatctctagcttctgttttcctgttagcgtgtgtgtattgatttgctttgatcaattgtttttaggcaaattttccatggatcaactggtggcgtgtcaggtactttgcaacaggttcaggcccggaaccaacaactccaggcatcaacacaggtagtcttatttcagatgtataatctcatgcattattgtctataactagacgagtcaaatttgtttcaggaaataaaggtagacacaaatgctgctgtacacatgagagctgcaggggcagatggatcattaattggagtaccaggtttttttgctttgaactctactaatttttgttgtttctggctgctaactggaaattcttagacctgctgtactgtttattcatgtacttagtgccattgtttgataccctgttgtctggcaggcgctaacccagcagggaacaatttgacgttgaaagggtggcctcttactgtgagttcttcacatcattccttaactggcattctaagctataaattaggagcaagtttgaatacagcaccttctttttttttttgtttttatgatgttttaccatttgattataacttttcagggcttagaccagcttagatctgggtttctccaacagaaatcttttatgcagtctccccaaccattgcaccatctacaatttctcactccacaacaacagcagcttctgcttcaagcacaacaaaatatgacatcttcacctggagagatggacagcagaaggcttcggatgcttttgagtagccgaaacattgttcctgggagggatggtcaatcaaatgcctacacggaagttattcctagtgttggcccttcattgcaaaatatgtgctcacctgtgcagcgcatggagacagatatgctgatgaaggtaagtttcacttgtatgttttactatattcatgcatttatttatttgcgaggatacattggatgtaagtaatagtaccttgtaaaccaccgggttatgcataattttgttctcaattgatatcttatatgtacatagattatattgtttaattcttgtcagtgatcagtaatagaatttcatttaaatttatcatgcttgttcttgttatgttatgttgccaagtttgcataacacagtaccatttactttctactatagcatagtgattaaatcatgaaaatatcggtcttggtccttgtgtaatataatcttttgaacagaggaactcatactatttggatttcataatgatctagctgctattaatacatgctcacatgttttctgaagctacctttttcaagataacttctacatctttggttttcgaccttaacacctcgtcattatatgtagtagaagatagcagctatacagcagcaccagcaaagcagcaatcagcaacagctccttcagcattctttacttagccagcaaccaccaatctctaatcaccttccaggccagcaggaaaaaatgggagctggaagtgttactattgatggaag

SEQ ID NO: 19620 - DNA, 2399 bp, Oryza sativa
ctggtctcaaaaggagatgccttgtaggatacactgtttcttgatttatttgtttccaatccctttgtagggaggatcaagccagctgagatttcaaccacgtcatgggggatatcttgcagtagcttcggagaatgctgtctctatacttgatgtggagactcaagcttgccttaggagatttgaggtttgtagagactttctaccttgcagttggcacgtgcattctgatcttctaaattcactgaggttccagtaacatatataccgaccaacaaatctatgtgcaaggatgtatttacttttcaaatctcgtttttagagtgagttttggatactgcaaatctatctatttattttgtaattagctttgtggtgttcatttcccttgatggttagttgtccttgcttggttgtttacatattttcaaagtcgcatcgtgctagctgtagccagtgttcacttccatgttaatctttagagtttccgagtgatggtaaccaatcactttaatctgtcctctttattgggaactgcagggccacacaaagcatgtcgattcagtatgctgggatcccagtggcgaatatgttgtatctgtcagtgaagacacggtgaaggtgtggtctgtgaatgctgggagcgatgatcgctgcgtgcaagagcttagctgtaccgggagcaagtttcactcgtgtgctttccacccttcatattcatctatgcttatcattggttgttaccaggcaagtactttatattcgtggatctcttttatgctcatgcgtcacgattcattcaaaactaatctgcactgatcatcctaattcctaagtagctggttaaaaatgactttttctagatcaactcatgactactcactcacactgaggatcattccacaacttgaatttcagtacatcattacacatatatcaagttcctcaaatattccttcatgatacacatgcaattattttgaagatttactgcaatgaaatacttttcctatttaagaacaagcattcggccatagagaccacttatgttttcaccgcggttcatgtttacaatgcctgtagtacgcttacctctggttttgtgtttgaatgccgcagtctcttgagctgtgggacatgtcggagaacagaacgatgacgctcgcagctcatgacagcctcatcacagccctggcgtcgtcaagctccggtttggtcgcttccacgagccacgacaagttcgtcaagctgtggaaatgatgtgctttcaagctagccgcgccctctaaccctcttctaaggatgggcctttttcttcctcattttttggtcacaccatcagctctgaagagctattgtgtgatgatggtataaacactctatatggtataatatcccccacaaagtagctggctactgaatgactgatgaaaatattgctatcctagtataccttttgctgaccctgggaaagtagcattttgtacagaacatgaactatgctttagtattaatcatagtctatctgaactactgaagtgtttatggtctgaattctaagaagttattctgctgcatctctgctatgaatatgaagaatgtgatgaatgtggcattctcgtaggaatttcaagggactttttttgtaagaagtatgctcaattccagcaagaaattggaaattttcttactgaattttacaaacgtggtttcgtcacggatgcttggtgtctggggaaagcaatgaatcggcatctctggcctgcaataaacgaatgtatttgccctgtttgcatgttcagtctttgcacggctcttagattccccagcctgtccaaaaatacccatgacacggtttgatcgatcgattgcaacacaaatctgtgaacagatcattggttcctgatcagagatgttcagttacttctctgaacattgatttttcttcttatcagatagggaatgtgcatctttctctctgatcttcagtttggaagaacactgcatcctgtagggctttcacaatgatagctacacctacatgggaatttttgagaagagtcatatgcatcttcatcagaatgatcagaggtaaatacaatgcttagttgttgcaaccatcatcacaggtttaacaggttctcagattctgttttgtttagtttaccacttgactttataggtttataacctggagaaaaatgtatttctcgttcataaagtgaggaggataaaatgccgtccgagtagatggaaaatactggtttagtaatccaaaataatctagaggttctaaccgtttctaaaacaggctgggtggaatgtcatctaatccaactttacagaactttttatcggttttgagtagcggaaatgcctatccgtataattatcaggag

SEQ ID NO: 19621 - DNA, 998 bp, Oryza sativa
ttggtgaattgtttgttatgtgatatctgtatgctagttatttgtaattagaatagttgcctatgtcctggatttagatctatatagttgtattttctctgttctgtattcccatgatggcaaatagatgaatgcgttgaccatctttactaatccgggttttctacaatttataggagtggagggaggtttcactgatcaagaacccgaatacgatgaggcttttgaaattgttatcttgcctgaatttacttctctcccttttccatcaattgacttgccagagaaggtaactgtgcttgacataagagattgtacttacttactacatagtagttacttactactctacaactccacaggttaggattgcagttgacaaagttatacttgccgaaagtgctgatcgaaaacaacaattggcttcttgggttgctgacaagaaaaaagtcagtgcacatgctatggatctgaagcagctagacaatggtgtcattgtgccacctacaggatggaagtgcagcaagtgtgataaaactgagaatctctggttaaatttaactgatggcatgatcctatgtgggaggcggctttgggatggaagtggggggaataatcatgctattgaacactacgaacagactaaatatcctcttgcggtaaagcttggaacaattactgctgatttagaagcagcaggtaatgctactcgtggaccttttacatatttaggcttcctcttctattatcgaatacaacttacggtgacattgggttgtcgcctgtgaaaaattgaactaaaccccttttaacctctcacaaactgtatcctttgtaatatctaaattaaaagtgtcatatatatgatgctcaacttggaatgcacttttagaatactatactccctctagttttaaatatacaaaacggtggaccttttaaattcgtttgactatttgtcttctctagaaatatttgtgcaaataaacaaacatata

SEQ ID NO: 19622 - DNA, 1541 bp, Oryza sativa
gctatcaaacatggtgtaaacatggaatcctacccacatgtttggaagtttaatactattgtggatttcaactcagccaatattcactgattggatgcacaaattctttaacttctattccttcaattctatgcaattttaaccactggtcactttcaatatgaatcgagaccctgtctggaataatggaattactcacgatatagttcaatcctatggaatctgaaaatgtttggcgttcctaacagggcccaaggtcgggagtaccatatacttactatacctgctaagttttctgatacataatgtgatcagcagatctcattttgatcctattctcattttttgatacttacagcctgaatagtacttttggacacacttttgaatactcctaatttttatgttccatattgatagggacaagaaggaatacaccctcgtatgtttaagacagttattgctgcaaagcatcccgaattttccagtatgaggcaacaggtactttggacctggaatcacacatttttggttgaggagctacttatttgaattttcctttgcatcattaactgcaattttgggtacaattttttccaaatagtcattttaactcatctctttgtccaggatgcgcttgatttcttccttcatcttattgaccaagttgatcaggcaaacaccggaaaccatgagctgaatccttttacagggttcaaattcttcattgaggagcgtcttcaatgcccttctggaaaagtctcctataacaaacgttctgactacattctttctttgaacataccgttacatgaagctactaacaaaggtgactttaaaacctttttccctgttgtattataaagttagtgcatatatccttgacacctgtgagatatgcagagcagctagaagcatttcatgagaagaaagctgcaatggatttggatggaaaggaagtgtaagttgttcatagctcatgcactgtctaatgagcacgacttatgtttcactttgcttccataaaacaggtctaatgaggaaattgtgaggcctagagtcccactggaggcatgcttagcaagtttttcaggcgcggaggaagtgcctgaattttacagcactgcattgaattcaaagacaacagcaattaagtatgcatatcttcattgccatttggttctattatatacatggaaatgtggtacagccttattgattgaataagaaatatttcaaaatgcaagcaaactcatatctgtggcatgttcagtttgtaaaagactgaatctctcaaacttgccttatatgtaacttggctagctgtaattcaactcaatatagcagatgaaatgtaatgcctgagcaattcaacattaacacattactgtgactgggtgtactgctataatttagtcgtactatcttaagaccattaccgagacacttaatagggaacttccagtccttgtttttttaatttctcagtgtgaggtgtcatgaccttggtttttatttttgaacatgattcctctgcttat

SEQ ID NO: 19623 - DNA, 1117 bp, Oryza sativa
tccatgatagttgatcttttacattttcttgtacagttcgcaatgttgaatacctctcagaaagttgatatttgcttattttcatataatgacctttcaaaactgtcttagggtgttcctttcccgttgtctgcaaccaacctttttgatcggaggcttatgttttgtacttctaatgtgatagggtggaaatatcgagagagcaacagactggatttttagccaccctgaggcttttagctcagtacctactgattcttcaacaagcaatatggaagatgatgatgcacacataccagatggaagtggcagtaagtttttctaccccttctgttttactgtttctagtgccaagcttccaatctcatgagctaatttcattaacattctgaactgttaatgttgaatttgtagtttgcaacatttgaaagatgactttgtacatgccctgagcatttctgaataacgatggcacattatcgtcaagaaatggatgtggatttacaattatatgacccatgtcccatctaagtttccaagaaaacttacttttttaatttttttttcttttaagatatatgtaaagaaatccatggtagtgaatgattagccaaaccatataaaagtaagctccaaacttgtctcagactgtaggtgtttccaaaccattgggttcaatacttctagatggttgattatctatcttcagtatgtgtgtgtgttttgcagttcttggtttattaacattgctctatgctctgcaggatacaaattgatggcgtttgtgagccatatgggcacctctacccattgtgggcactacgttgcccatgtcctcaaagacgggaggtgggtaatattcaatgatagtaaggttgctgcctctgtcgacttgcccaaggatatgggatacctgtatttctttcaaaggatataaagcattagcagctgaaagacttcacaggcaagaaatacattcgctcgctgacttgagtcttagttatgggcacctatgatcaaaagcacggcggatagtcggtgaacttgcatgcagatggacttagagcgagtgttggtcacatcctgtcgtgctgacttatagggggatccactagtt

SEQ ID NO: 19624 - DNA, 4591 bp, Oryza sativa
tagtcgtcgccggacttgggccagaggcggcggagctcggagcggagggaggaaggggagaaggtgtagccctcggaccacatgagcttggagaagaaggaggagatgggcggcgagccgtagccgcagggctcgccggggccgcggacggcgcgcatcttctccgacgccggcagggagaacacgcgggcgacgcgctcctcgacgcgcgacagcagcgccgccggcacgccgtgcccgaccagaaggaacgcgccccactgctccgccgcccgcgccacccgcgccgccgcgtcgcccgccccgacgtccaccaccggcaccgcgtcctcgccgccgccgccgccgccgtccaccaccgggtggtcgtccagccccggccacgcgtgcgtctccggcacccgcctcgccgcccggaagtcgaagcagagcgggttcttcaagtgcgacggcgtcggcatcgcgacgacgacgacgatgaccagagagcaacacactcgcgcgctcgctcgtctcgtctggcagaaagccagtaacaataacaacactaattttttctctctatataaattttttctatgactttacaatagtggaatgagtagtaaagtgagacgagtgtaagaactggacaagtacaagggagaggtatatatagggagagaagttttggagcgtagtggaagaaaaaaaaagagagaattaattggtgaataaatcagtgatgaagaattgaaatggatcattaattaatagatttggagaggaaaaaatgtggtgattgggacagagggtttggagtgatgtggagcacacaaggccaccagcttagctacacaacacaaatctagctagtatgctcatcaccaccccctggctggctagtggcactgccacccaattaataacacacatattcatacaaattaagttatgttatagtaaagtaaaatcacaatgtgaaataagcaccagagtaatttttaattatcacattacataaaacagattaggtaattaaacataggaatttcacaggaacagtagcgtcctccgttgccgtggtgtttttttttaattcgtctgtctgctttagaaccaaacattctcacatgcagccacttctaattaattatgattaccgtataattctcatacacgtcgaatttcattcgatattttactttcagtagcaagatcttcatgctagttcccatatacagtactacatccgtttcaggttataagacgtcttgactttagtcaaaatcaaactgctttaagtttgactaattttatagaaaaagtagtaatatttttaactcaagacaaatttattatgaaaatatatttaattaactaatttagtattataaatattattatatttgtctataaaattagtcaaacttgaaacaacatgactttgactaaagtcaaatcattttataatctgaaacgataggattacgtcctaatttgtcgagcacagtacaattaccaagattcaaaccgtgttatctacttcttcttttttcaatatatttactaagaagactaaccttatattacaactacaaaaataaacaaaacaaaacaaatataaacagtaaattgtttagaaaacagcacacagattctagaacagcaaacaagagaaaagacagcactagtctgcagccacgagtaaaaacagaggacagaggccatgatcatcatcatccatccatccatgaatggttgctaatacattacaaaattaacacagagacagagagagagagagagagagagagagagagagaggatgcattgggtctggaggtaggcggcgatggaatggccggccgtgcgtggaagggaagggacagggggatgatcgagagatggcggcgactaggggcggcggacgatcggcggcgaggtgtcgccggcgccttctggatgcgttgtcgggatcgatggagcagagggcgcgtcgccattgggtgggatccgtgcagccccgccgccgcccgccgcttcccacgcgctctccaccaatttctcccttttctctctttaggctacgtacggcgccgccctggaaccattcttatttcttatttaaatataaacaaataataatgcggtagtatataaaaatttgtatataaggattcgagtccactctagttcctgaatatatgtctaatcctcatcatgattttttctgcactatatttcttttattttagtaacaataataatgcaatggtctaggttttaccttttctttgcaaaataatgttgattattatgctaaatattaagaaatgattacaaccatattttttttagataattgattttcattagtccggcctctatatctacgagggatatacaaaatcaaaatgatacaagaacaattagactcacatctcaacaaagagaacacaaaaccaaaaaaaaagggaaaaaaaaacactacgacctctatacatccctgcttccccacatcctctcttgaagtggccaaattcaacgagtggaagtcatctaattgccatcacccctagtgcgttgtcgctacgaaattccgctggtgctatcttcatccgcttcaagtgagctgacgccacgtgacgccggttaaaccccactcatccatcgtcatacagtcagaactagccgaccagatgtgagccaaaaggatcagcttctgcttcattggattcctagacctccatcgacatcagaatcctcctccgcctctcagacccctagcccgttgccgccgctattggagtcctcaacagctgtcaccgaggatatcctctttcgtcctgactccgaggcctttgccgcccctagctagggccactgccaccgccgggatcggcctcctcctcactaagatccttgtaccggcacttaggccaccgccgcccctagggccgcagttaccgaagctgaggaggtcttctacccggactcgcaggccgctatcgcccctagggtcgctactgcctacgaaaccacctttaccggattcgccttcttcttgccgaggactattcgtcgacgcttaggacgccgccatcctccgccgcacccttcgctgtcgtgctccgcagcacctgccacccaaagagacatcgtcgccaacgtcttgctgctacctgccgcagcgccgccctcctgaccttctccgctgcaacgcgtggcccaccgccgcccatggccccgctgactacaaccatatgttattacatggggaaaattcagacatgctagtcatacgcacacagataccccgtatcttagaatgccacgagagatgtattttgtttcgaacgtaaagggggccatttgccggtacatttcccatatttcacaatcaatggagctccggcgaaaagtcccgttgggcctttctcctatggggaatggaaagttgtaaaccaaatatcttttacaagtcatatacagctcaaggcaggagtgtggaattggtgaggaaaaggccaaaagaatgggagtcttgcacctttttcttgttttggtaaatacattgcataactaacacgtattgtgctcttatatgctaaacgcgccaaatgatcaaacaattacgtcaagggcagtccaatatccctattttattgttagggttaaaatagatgtacatctccttatgcatgttgggaattctatgggaacatcttccaaaattaatgtgcaaaatgattaacccaatcggcttgacgaatagctttcggggccactctattttttcccctacaattttgctcatttcaacaatttatttatcataaaacctatactaaatgtttaaccctcctaagctccataactaatcacttctgcacggaaaacggagtggtctattaacgtgtgattaattaagtattagtagtttttttttcaaaaatagatcaatatgagtttttaaagcaactttcatataaaaatctttaaaaaatacaccgtttagcaatttgaaaagcatacgtatgaaaaagagaggtacgagttgggagctatgggtactgaactcagcctaattgtatttatacacacatgccttttccctccttttaattgagtattcccactaacaatttatccattattggttcatattcgctgaaaggagcccaacaaatcgtgtgatagctcagcggctaattacaacaatttccatagataccatggatgatcttatttttctttacctaaacatgtactctctccatcccataatataagggattttgaaattttgcttgcactgtttgaccactcatattatttaaaaaatttatgtaaatataaaaagtaaaaagttgtgcttaaaatactttagataataaagtaagtaaaaaagtaaataataattctaaaagttttttataagacgaatggtaaaacagtacaagtaaaatgtttaaatccttatattaggggacggagggagcataacaccctgaaattatctattaattgtgagtgagaggtgacaagctgctagttgctgctatccaactcacaaaactcttctgaaacaacgaggagaagaaagaca

SEQ ID NO: 19625 - DNA, 907 bp, Oryza sativa
tagccttatataggaatatttgcttctatactaactgtagctttgaaaaatggcagcaatttgcaaaccagaacatcacattaggggaggcaatactcactggatatggattattcaaggagaaatactggttctggattggggttggagcattgtttggttatgcaattgttttgaacttcttattcacattgttcttgactcttctcaaccgtaagtttgtgctaacttcatggacccagacaacttagaactgcaatcaaaatagtttctcattctcacaactggtgctccttcacagctattgggaatatacaagctgttgtgtccaaagatgatattcagcatagggctcctaggaggaagaatggcaaattagccctagagctaagatcttacctgcactcagcttcattgaatggtaatgctagataatgaatccctgtacttacatcacaattcatttttacccttttactaagtcttcatattaactgtgttccagggcataatctcaaggaccagaagggcatggtgttaccatttcaacccctttctatgtgctttaagaacatcaactactacgttgatgtaccagcggtatgtcagggggaggccggtttatatggctgaaatttcttttaaaaatctatgtatattgattcataatcaagttttgcctagcaggaattgaaaagtcaaggtatagtagaagaccgcctacagttgcttattgatgtcactggagcatttaggccagggatactaacagcacttgttggagtaagtggagctggcaaaaccaccctcatggatgttttagctggccggaaaactggaggactaatagaaggaagcatcactatatctgggtatcctaaaaaccaagagactttcactaggatct

SEQ ID NO: 19626 - DNA, 2158 bp, Oryza sativa
gccaaggacatgccgttttcttgtagcgtattgactctcagaatatatctaacaaaactgccgttcgtgcacatgtatttaattacgttgtaaattgacaatccattctctcttctctctaatcgtaaactaaaaacatgtgtgttaattagactatgattttaaaaaacaactcaatacttagaaaattattttcacagctccctttatttttacaaatgggctaaaagaagattcacttgtgaaaatatataggactctcacagtcaacaccgggccggcgctgtattttagacgaccaagacgcaccaacacatacgttatattaaaataaaggagcacgaacaccaacaacaccttgcttctcacattttccttaaactctccacacttccctctcctcttcgttttttctttccacagcacagaggacactgccttggctcctccttcccctcttgtagatggcggccggcctcaagagcaacgacgaaaatgacaacaaccttaggagcggcggcggccttgggagcgcgcgatggatccatcgccactggcctcggttggggcagatccccagcgtgcatgggagcgacgttgatgatgaccgcgctagccttgggagaggcatatccaacgacgggagtccagggatggcatcaacaaagtcggtggcggccattatggggatggttgcggcgatgatgacgaattgcaatggcggcgatttcgattggggattggggctatggtttctgtaactttttggattttttatatttttcgccaaaaaactttttgtagtcagggttgaaaatccgttccgtcatacggttatgatgcccgcaatagaaaatcttgacttttgcataaattgtcttaggtgggtgctccatctatctaggaaaggtggttttggtcggctgaaaaaggccggtctgtagtggggatttactgttagtttctatcagtatatttcagatacccctcaatattacaattaatactgggaaagcagaggcacttttcgcagcaaatatcaacatatacatgtgtcgacgtttgatgtcgcgattccggtatttgcatagtatgagaatcgttggtactagaatatatgcgagattgtaataaaagagatgtggacgaggatttttatacaggtttgggccccctgaattgtcaggtaataaccctactcctgttggccgaagccggtcgttactcttattcaccataatcacaccagcataatatttagggtaacctatctaactgttgtcgacttgacggtctgaagtgttgactcgtagtcgacaacagggtagccttcctcctcaaatccgtatccggcgagattaaagacagcgttatgtctctcctgagagtatccgtagacatcgtaggggactaaccatgcttatctctgaagttgatatccgacgtcttgtcttggcacatgttggcttgtatgttgatcttgtgtcttgatctattgttccgtgtcccctctcctcctaggggccttgtatttatacccataggtgtccccttgtccaagtagaactaggaaaaccattatggataaatccgagtagttcttgtcgtttccatgtagaactctattcatccttcattatgcataactcctcgtatatccgaaggttgtttccgtataagacatggtatgtggtgggtcctaccgagatttagtcaactactattaggtatgtgatattcataaccctaacaacatgtgtgcactgtgcaagtgcaccagacattgacacaaaacaattcgtcgatagacaagaaaattcacacgcagagacatgcacacaccacatgctctttcttcgaaggaaagaaatacacatgactcgatctgcaggtgctgccaaggcatcacacgcaagcagagacgcaccacatacgtacatctaaggtgcttacttccaagatgcgtgaaaaggcatctctctctcaatgtggtcttcaagaaaaaaacaaaccaaggtaatatttctctcggatttttacaggtatattatgcgtgtatattaccgaattgtcgttagttcactacacgagaaagtgactgaattgtcctaagtaatataaaatatgtagggaacgaggaaaaacagctgcaggaatt

SEQ ID NO: 19627 - DNA, 2321 bp, Oryza sativa
ttagtgtcggaaataatgcttagattttttgtaaatttaatcatactttaaaaagctgacttaggaaaaacttatttaaaaaccttattatatgaaactgatgtagtaatggtcaaagtcacctattcttagtcgaaaggatatttccgctcacttggtttatcaattaagcttttgcaaagtcaaggtaaatacacatacaacatatatgcatgacaccatgtacaaccatatatagatgaacaggagtatacatacctacgttgcttaggtagcaccttgatttaatcaaatgctagctagttgatgccaggtggcacactgcggacggatttgtttgtcagtttccctgcattacacattgtacaggagtgtactacatccacatacaatgaacagtagtagtagcagcagctatatactccagttgcctagtcgtacacaaagtataattaatcacaaaattttcattttatcatggaaaataagtaggcattcataatgcacgtacactccgcacccatacaatgaacagtagtagtagctactagatagttgcctagttgtacacgcagcataattaatcacaagattttcatttttcctaaaaaaaaacaagcagacgtataatgcgcgcacactcatcctacctttaatgagtatcttcagaagattgagcctgttgtcgtcgagaggtacagggtatgtcatctatcactcaaagaataactagtcgtaaatacgagtaccgggttgctgtcaaggggtataggttacgttggctatctcttaaagaataatttgccgtaaatgcgaataccatcaagcctaagacttgcatccatataggctagttacaccacaaaacctaacgtgttaagctacgctccctccacacaaaattttcatttttacccagcaaaaataaatgaatactgaagcatgcagcgctgtacacgagcttcttgtttatcattgcgtatttgtcatcatctaaaaaaaattgcgtatttgtacgcgtacatgcacgtttccatccacaatttcacatccatacgcgggtgacatatattatgcagctctcgtgggcatagctcgccagccaagaacgagctgaagctctcgtgcgcggcgcggccatgaaggcgtcgtcgtcgtcgcaggggcagagcccgaggacgccgtcgccgcgcgccacctccgccaccgccgagcacacgcggtcctcctcggagccgtggctcgtggcggcggcggtggcgagcacctgcgacgactcgtgcgtcaacgacgtcgagaacttcgcgcgcaccgtcgccgccgccaagtctaggcagctggtgggctcgtcggcggcgtcgcgccccgacatgctcgcgtccgtgctgtcccactacgccgccaagtggctccccgacgtggtggccgcgtcgtcgtcgtcctcgtcgccggcgacgtcggcgtcggggcggttcctgcccccggagagccccaccgccacgtggctcaagaagcggctcctcctggagtccctcgtcgccgcgctcccgcctgacccgccggctcccgccggcggcggaggagcggccgacgacggcatcacgtgcgacttcctgctcaagctgctccgggcggggagcatggtgggcgccgacgcggcgctgctgcaggagctggagtccagggcggcgcggcggctggaccaggcgacgctgggcgccgtgatgataccggcgttcgggcacgggtacgcgtgcgggacgctgctcgacgtgccgctggtgctgcgcctggtgcgcggcttcctcaaggacgccggcgccggcgggggcggcgccgccaaggcaggcggtggcggaggcgccgccgccgcgagggtggcgaggctggtcgacgcctacctcgccgaggcggcgctcgaggccgggctgcggccggccgagttcgaggagctcgcgcgcgccgtgcccgcgcacgcgcgccccgccgacgacgcgctctaccgcgccgtcgatacctacctcaaggtcacccacacgtactcctccttccatctccactaattttacgtttccgtttactactaaaaaaaaaagctaccaatgtagctttgcatattgtgtctcgatataccgataaggtcttttttacaccttatggacaaatttgatgtcgcaatcttttcggtttcaaaaaattgatatcaccatcttctacatatcgtcaaaacaattgtgaattattttgggaccagctagctacattttaatattcatggcgttacaatttaagaaaaaattgtcaaaattttattacactgt

SEQ ID NO: 19628 - DNA, 1584 bp, Oryza sativa
tgctgcatcatggtgcaaagaattgtttatttgttcactgctttcttgatggcttgcttgcacctggtgaggaacttgctgctgcttgtggacactgaatcttcatagccgtatctgccattgtcgtcgccgaccaccttgggcttcctgctcatgcactccacaccccttctcattccaaggatcttggaaggtgaggaaggcagagacctgaaacccctggagctgtcagaccttgggaaccagatcttcttctcctctcccctctccttgatctcaaagctgttcctgcacctgtcctgctgctcagtagcaccatcgccaccgacctcgacgatctcatcggagcattcggtgatctcattcctgcagctctcatcatcaattctgctttgcatttggtgctcgtctgaagcgatttcatcagcagtgttgtgatcttcagaagaatgatatgctgctgcaggatcttcttgctgctgctgatcctccatgagcatttgaagccacttatccacagttcctttgccggtgtggttcatgtttgcgtcgccttcggatcgaccgacgccttgccgatgaatcacattattctttttcaatagcaccgatttctctgcaggatatctaggtgttccatacatgccagttactctgtaaggaggacttggaggaactgaggatgtccttggcactgaaactgtctgagatctttcagtctcagactcacattgcaccatggctgctttgcccttgccattgccatctcttgacctcacaggagtgctagttgcccttgatccccttgatgacatggtcctttctctccttctgccgcgctgccgttctttgatcgccagatgctccagcttctccctcactgatgctcttcctctctcagtgtcaactgtgttgtcttccatggacctccttgggaagtttatcaccttgaaaggtgaattcctgaaatttcccattgttgaagtttcacctgcaatttcctcttcctctagggagatgtatgcatctgaagccctctggtcctcctccaggaaaaccctcagctcctgcttgagagggtttctgctcctcagtcttattcctggaaaatacttcaccctttcactgtgcctttcttctaagctgtgcctttcctctagcaatccatcatcgtcaacacgataccgcttccttgcttgatcggtgaaaggcttgatctgcttctccagttcatccttctgctggtacttcctccggagctcggtttcggatgagtcacacattgctctctgggcctcgagtctcgccatgagagtgctcgttgcagcttggttcatcctaagctgctccttgtacacaacagacctgcacattttgcaccacaatcaacaattagcacaaacaatcgacattgaaatcaactgcatgagagttcttggctcttgctgcatagattcatccttactggtgcatggcgtctctgatcatcttctccagcacagccttgtaattcgactgagcctccgccaagcggcggcacttctcgacgcgccgccgcctcttgatgaggagggcctccatgtc

SEQ ID NO: 19629 - DNA, 3864 bp, Oryza sativa
  unsure (1)..(3864): unsure at all n locations
gcatctgggagagaggaagccgggtggcgaagcggcggcggcaatggcgccggggacgaaggcggaggcggcggcggcggggaggagggggtgcatcaggtcgacgcgggggccgtggacggtgcggcggagggggcgtggcggcggggtgacgacgtcgctgcggcacccgacggcgcgggagcgggagaacaaccggcagcgggagcggcggcggcggcaggtggcgacgaggatctacgccggcctgcgcgccggcgccgggtacgcgctgcccaagcacgccgaccagaacgacgtcctccgggcgctctgcgccgaggccggctacctcgtcgacgacgacggcaacgtctcgcgccgccacgacgaggtcagagcgtgtgtgttaatttgagttcatcgatctcttgtcttctcttttgcattcattttggacacaagaacatatattttgtgtttagttcttgaatttggcacaccaatttggtttatttcctcatcattttcttttatctcttgacctaaggcccccatcgtttgacgttatatttgcaaataaaaaataatttgtgaataaaacttttatatacgtgttcttagtgaaaagtaaataataaaaaataaatttcgatgaaaaaaaaactccaaaatcataaagttgaaaatttaaattttggttgataagtgtaagtataagcaaaaagatgggcttttagtaactctgttgttaattgccaagaaaagaaaaactctgttttctgctatggtccttttcagtgctatgcatgacagtgtgctggtctgtactgcatgctatctgtatcgaactgaacaacagcaacagcaaaaggaataataataaaatgtcaagatcacattgttctagtactagttatgatagtaaaaagtgtttttgtcttttaaaaaagcaacataactggtcactgtaattttcttcatttgtttctcttcttgaaattgttttcagcgtttagccggcgccggcgccggcggaggcggcagctccgatcagctgcaggtgtcctcctacagtggagcaacagaggcagcagtggctatccagcatcaggagcaggagcaagagatatcactcgagctgacactctcattcacctacatgtaggtagaatgcttaatttgtttaaacaccaaccaacaactaggtgcattatattcagttattcacttggcagaagttaagcacaaatcagtgtagtaattaactaactagcaagcaagcttgcttgacagaattgtcaaacaagaagactgctaattaatcatcttagcatcgttgacaatctataataatcaaataatatcattgtctagttacctattggaaacttggaatgtgttcaccaagagcacgcaatatcggaaagtaatttgtcagcacgaacactttgtgtcacataagctgaacacacacacaagaagtgcagaaatgtgaacaaagagctataagaaactaaaactttattgaacttgtagtagagtacatttggatatcataagaagaatctgaagatctaattaagaagaaataaagaagaagaagaagaagaagaagaagaagaagaagaagaagaagaacatcataaaaacctaagaaagcaacaagagaagactactgagtaattaagagaggcgattgatcgatgaggtgtagcagtgtagctagctagctcaagctggcgtcgcggcggaggccatggccgacgccctcgttgacgccggcgacgagctcggcctcgaagttggccgacgacatggacggcagtcgctcgtacacccgcgacccgaggtgctgcagcttcttctgctgcgtcttcaccgtcttgctgatgatcttgtagttccaccgctgctgcacgtacaccgccgcggcgagcgcgacggcggcgagcgggatggcgacgtcgccggacctggagtagaagtcgaggctggtgttcacgaactcgtactcctccgcgaagtaggggttgatcgccggcgccctcacgtagtcgtacacgtgcggcagcagcctcaccgccgtcaagccggcgtagtaccccgtcttcagcggccggcagttgatccgccacaccacgttcccgatcacctgcggcagcaggaacatgtcctgggcgagcccgatgtactcctccagcgtcaccgcccactcccggagcgcgtgcgcctcgccgcgcgcgtccatgtacgacgcctccgacctcaccggccgcgccagcacgctcacgtagtgcgccgcgaggaccaccgcgaagccgacgaggtgcgcgccggaggtgtagacgaggaccttcttgtcgctgggcacgcgccctggctccagcggcgagcgggtgaggaggcggatgcgggagcgccacaccttctgcaccagccggagcgtgaggaggaacgcggcgaggatgaggatcttgacgacgcagtcgatggtccagtagagctggctcttgtccacctcgtacgacggcggcggcgtcgcgccgccgtcgccgctcgacgcggcgatgcgcgcgaacagcgcctccgcgccggtgatgagcggcacgctgtagccgactgcctggacgcccagcatcaccaccgacacgtacggcatcacgtcggtgtgggactgatgtacatgagctggctgaactcggcggcgatcgccgccgccagcgtcacgacgcggaggatcccctccacgctccgccgcgacaggatgtcctgccgctgttcccggtacaggatcggcagcgtctggagcgccgtcgcgttgaaccgcagcgggtcgtcgccgccgccgcgcgtgctcgcgatgtgcaccttcgccgtcgggttgatcagccaccgcgccgtcgtcggcgggtactccaccctcacctcgatcgagcagtccatgccttcctcgacgccgcccatcgccgagaaggctcgccacggcgcctggattctctcggcagccgtatganggtacatccgcgccatcccaccgggttgtactancgctcttnccaaggacntagcgtcnngnacactgttcacntgtacgctgtcntgcccggagtantcgtnncagctcctcgccgcacatcgttgaggaantacgccgtcgcccatctcagcnnttcgttcggtcagtcgacganncngantgantgantgcccantgcttatgccccctaccagncagcnntggcggtcccccgggataacgttcgcccggcgaggcnnccggcccgacgagcnngatctcgagcgagagcccaccctcaagctgaaggaanntggccgctcgaatcgtccgcgtgggaacggatccggcacggcggcgacgtggagcgtgagctcctcggcgaggttggagaggctcgtcgtctcgtcggcggcgtcgccggatttcctcgggtagctcagcagcgacttggcgatgacggtgccgaagtcgaacggctcgcttcgccggaggaactcgccggcctgcttggtcttggtgtagctgtacgccaagctcagcggctcgccgccggtgacgccgaaccggctccacagctccatcgggtgcaccgtccgctggaacgtcagcggcgggaagtgggcggcaccgccgccgatgctggtgatctggcccaccgtgatgctgcggcgagtggcggagaaggtggtctgcaggtagaggcacacgcgggagtggcacgccttggcgccgacgccgaggcacgccaccatgcagagctggccggaggacgcgcgccacacgccctcggcggacatcgtcgcgccgccgagcccgctgcgcttcgccgccgtgtacgcgtgctcccacggcgggacggcgcg

SEQ ID NO: 19630 - DNA, 4069 bp, Oryza sativa
gtcagcgtcttggggtagcggagcacgaggaggatgttgccgtccttggtgatcggcggctggaacctgtcgcggtcggagtgcttggcccagccccacgggttggcggcgtcgccgccgcgcgccggcaggacggcgtcgccgaccatgcacagcacgctctcgccgtcgtcgttctcggtgtacaccccctcgagcagcaccttcagctcggtgttcccgggccacaccttgaactccggcgacacgtacggccccatctccggcccggtgccgttgcgggagatggcgacgccgagcacgccgctcacgttcagcgccgtcctcccgcgccgcgccgcgtcgacgtgcgtgagcgagaacgacgcgagcggcagcgggtcgcgcgccgccccggcggcggcgtcctccgccacgtcggtgccgtcgaatggcagcagcggcgcgccgccgccgccgtcgccgtcgccgtcgtgcttccagtcacccttgacgaaggacagctccggcatgaggccgttggcgcggttggcgtcgaacgtgagctccgccgcggaggagagcacggacttgcactgccgcttcacgtcggcgaagcggacgtactcgtgggggatgaaggggccctgcccggcgccgccgcccatggggttcgcatcacggtggaacggatcaaacgacgacacgacggcgagcagcggcagcagcaacgcgccgacaagctgcagacttcttgacaccattgctgcgcaaaaccaaacccaatgtcacaaactcgcaatctgaactcagatgaatttagcaacgctgctttggatcaaatttgaccaagtgagtgattgacatcaaaatcttcacacttcttggcaacttggatgaacacaacaatgcagtaaaactaatccttttcagcttgcatgatcagatcagtatcaacttggatgaacacaactatgcagtaacacttgcagaagaatgcaaaaaatctaataaaatttctgcagcatatctaactaatcctgttcagcttgcatgatcagatgatcagatcactgacctcaacatagaaatttcttcagtgctcctcaagctgggagacctcgatgagagtgaggtgagtgtcgaagaactgttcaccaaggacggctctagtacagactagagcagcatggatctctgaatttgaccagaatgtggtgtcagatctagaaaaaattcccggaccagattggatcagctggaatctaatctaccaccactgaacaacactgatggatggatgcttcccccgcattatctttttccacaccttaattccccttctgcatcatcgaatcaatcaagggttctagtatagtattgggggttgactttgcgacgaagtgacccagaaacagagggttacacccttgatcaccgagaatgcccctgatcagagtgacttatcacaggattgccactgtgagaggatcgtctcggtacaaacgagcagtggcatttcggagattatctcgcaactgtgagggttacagcgaggtgaggatgggggagttgacgaagcgacgcaggtggcgcgcgcggccgccgcggcgggcatcgcggccggccggccgctcgccgcacggggaagcccgtgccatgtcagggcggctgaggccacgagagggacgtcgcgccgtcacatggccgcacgtggccgtggagagagatatttaattacttctagagttatgtgtgttgcagtgttgctatccacctcgatcttggccggcgccggaggagacggccgcgccgcgtctggagcgggacggcggctcgccggagtacggagaccgttgggttgcagcgacgaatctagtttgtttgagaggagaggatgtgagaagatcgtaaatgatgagtagttagcgtattcaaattttaaaagatatattaatatagttttttaattttttaataaaaacgtactgttaaatcatttgaaaaacgtacccgcgaaaaatgttagttttcctctcaatctttcggtgccgaatataaagcgttgttatttgatcggacaggtgggatgagggcatcatgctcaactcgtttcggcccagaaatagtagtatatgcatgtgtttttcttgggaaataaattatattctctctctcatttcttgattcttattgaatcgtctccctcaattgtaacaacgggtataatgtcttctccgacttaaaaaaaattagtgcaaatcgactcatttaatagtttgggaagcaatttcacctagcacggtaggttgaccacggatgactcgttgattgagcgcttgggacccacatgtcaataacttacctcatttgctaacccacctttctccccttttcttcctctccgacctttcaacagcaagaggacggtggtggtggcgaactggactccggagagggctttggtggtggcaagtcggactgacgagccgaggaaggtggtaccctctctcgtcatagacggtagcagagacgagacatgttggaggatgcaattggaacccttgcgtcgccaccctcttctcatctcctacctcgtcaccatcactgcacctttctaggtttggctcgccaccatagtcgcttggatgattccttcgatgtgggaggagagcctcttgttgatcaactacaccgccttggggctattatggccgtcgtacacgccgacaaggccaccacctgcgcctggtcctcgagtgcctcgttgacctgggccatggcgacaaagtagtctcccaatgcaggaagagaagagggtggggacaaagcagtctcccactgtagggagagaaggaggggaataaaggagagccctgacacgtgggctctacctgttgatgctgccaacataccacgtcagtagaaaccgtttctaaaaccaacaaagaagtcaatttgaaccggttttcgaagatggtagatgtattatacctggttttacggttgagggaagcaattcaatcaggagcgagagtgaggaagtcatgataaacttattccttttctgagacggctgttaaatacggcctggcccataatggtccatcactagtatagctaaaactgtattcatgggcctgcagttgattgcaggctaaaaccgctgtaatactgcgtaatcatcaaagttcatttttaaaagtgtaataatcaaagttcttgcaaataaaagagtcaaccgagttgatatgtttgtctccaaaaatattctcctatagtcaaaatatggtgaaaagggtgttatttatgcgaagaattaataaagaactaaattaactttgaccagtagacttttataaaacatcaagaatctgaatagccatcgcaaaaattcctgaaaatcgatgcggctgttgcttttcaaagtgtcaggattgcttctacagcggtaaagctgcaatatattccctggacgataatactatatgacgtttcggacaaacaaaataacttgcgcttaatggattttagctgtcggaaatatcaagtaatctttgccggatggagtacttaggctgcgttcagaaccctatgttcccagcacaagctgtgcacacgaaaaacggaacggtccattagcgcatgattaattaagtatttactattttttttaaaaaaatgattaatatgattttttaagcaatttcgtatagaaattttttgaaaaaatacacctattaacagtttagaaaaacgtgggcgcgaaaaacgagaagagaagttggaacaaaggttctgaacacagccttggtaccaccaagcatatcattatcccattggaaaatttaatgtcatatgctatatttgtgcataccaaaacataacaactactattaattagaaccattcacatataatcacattaattgcagaagcaaaccctgcattatgcattattggtggctcttcacaattctcaacttaacaacaacaacaaacataatctcccaaacaattacatctagctcatatttaatctctccaccatcacataaatttgatattactactaggactaccggattat

SEQ ID NO: 19631 - DNA, 3500 bp, Oryza sativa
agaatcaaaagaacttacttttgccaccaagtattcccaaccattctttgctcaatatgctgcttgcttatggaagcagaacctgtcgtactggagaaatcctcaatacactgcggtccgattcttctacaccgtcatcatttccttgatgttcgggacaatctgctggaaatttgggtctcgaaggtatgtccactgatgattctgtctccacttttcttcctgtacttggctggccttatagcgaacatgtggctttgtttgacagggagacccaacatgacatattcaatgccatgggtgccatgtacgcagcagtactcttcataggaatcactaacgccacctctgttcaacctgtgatttccatcgaaagatttgtctcgtacagagagagggcagctgggatgtactcggcactgccttttgcattctccctggtaattttccctgtcaaaaactcctgtcatctcatcatgttttgatgctcgtagtagtaccataataaggctaacaatcgaactgttcttcggcatgcaggttacagtggagttcccttacattcttgtgcagtcacttatctacggcacgattttctacagcttgggctcgttcgagtggacagcagtgaagttcttgtggtacctgttcttcatgtacttcaccttgctgtacttcactttctatggcatgatgacaacggcgatcactcccaaccacactgttgcgcctattattgctgctccattctacacgctgtggaatctcttctgtgggttcatgatcccaagaaaggtacggaaggaacaggaaccccatgcataatttgcacctaacgtcctctaattgtactggacccatgatctgttttccccataatccatattccagtgcacattatccatatctttattttttttgtcacattagcatatatagctatggaaatagtgtttccaatccataaggccacttccagtgcacattatccatatctttatttttttttgtcacattaacatatatagctatggaaatagtgtttccaatgcatattatttattactggggccaaaaatgaattatctcccttcgcaaatttcatcagaaattcttagaggagatatctattttcctggtttgaatatatatgcaatgtctcatccgagacactcttttttctttataattccttagcacatcatctaaaatgctgctatgttgcatagtagtttttagtttctattaacattgtactataatggagcatgagtgccctgatataccagtgcccctaataatttcaccaaacccaccagtaactttttttgtcctacagtgaccacttgtcatgtactagaaccactttagcaattgggaagcaataatggtttgtttaaattaggacgtgattaaagtggctaatgattaatgggcttaaacataatgcagaggattcctgcgtggtggaggtggtattactgggccaacccggtgtcatggaccctgtacggcctgctaacctcccagttcggcgacctggatcagccgctgctgctcgccgacggcatcaccaccaccaccgccgtcgacttcctccgggaccacttcggcttccgccacgacttcctcggcgtcgtcgccggcatggtcgccggcttctgcgtgctcttcgccgtcgtcttcgccctggccatcaagtacctcaacttccagagaagatgagacgacgacgagcgagaagcgagctatagggagcacgacgtacaccaccattaattctctggccagctatagcgctcaaatgtgtactgcaactactatgcatgcatcaatccatttcgtttcttcagaactgcacgcgtctcttctctctgtcgtcacgatgaattcctcccggtcacgggagatgctggagctagcagagatcagagaccagcagaaaaaaggagacaagtgtatagctaagctacctgttgcaagcctgtttggcagatctccaacaactagatctaactcggagctaaagtgaagctgtggaacagccgaaacctcgcctcattctaatttttttcagattattttagcctgtttgagctgaaactgtttggttggatagagttggagcgggagctctatcaaacaggcaagtgctccttgattggcttgatcgttatactgcgtacgtagtggctggtgcggcagcagtgcaatattcggcgagcattttgcagcagccacggtgagccaatgggaggtcgacacctgcaagccttttgactgctgcaaccggcgtccctccatgggggtactcttttggaagtagcagcagcagcagcagctagctatagcagattctgcgtcccctggcctctgctgctgctgcctccgaggactgcaaaacaacaacctagctagagcagcaactactactaacaagaaagaaagaaaaaaaaaagaaaaggaaaaggaaaggtatgaggagtactgtactgagtactaaccatttggtgatcgatcgatggtgcgtggcgatgagagatggagaagaaacgggattgattgatggattgaagatctaacaccttcaaaaggggggcagtaggagcatcttctacctgcatcgcaggtacgcaacaacacatgcatggatcgatccactcgtcccagctttttattactaccatctttccttcctttttttttccctttagagcaagataataatagagcacactttctattattagctcatcttaaagccaacatatataatagattagctataagattgactataattttcttctcatctctctatctctcacttatatatttaatgcatttgtcttagagctagtgataagctagctcttgcatgagagccaacattcttaatttttcgctacctctctcctccatctaagcttatagtaggcttatagctcactattatacttgctcttagtgagtgtttggcaaatgggaaagggaaatgatttcccacccatctttaaatactaaccattcattctccctcttccatttaatcctaaccctttattcattttccaatcccaatcccaccccctattttccattatccaaacacatccttatatcttctacttctcgagaggaatatatatgcagctactagctatagctagacattcgtgtccggacgtataggaaggtattcccagcatcattcatccgtgccgtgtgcagcatactgttttcttaagcccaaaccaccaatagcgtttcacgatgatcgatcaatttttttatatattgatgacagtttgtaataaagaaagaagcaacgaatcgatcaaattttacatatgttaatggcagttcgtaaatggtaatggtcgagctgtctccaccagtgtgtatacatatacatacgtacagtggtggaggcagcttgatctgctgctaatgtatatacaaatatatttggtttgttctctctatatacatacgtatat

SEQ ID NO: 19632 - DNA, 1929 bp, Oryza sativa
tgtaggataaatcaaatcctcagtaatattttagaacaaaaataataatagtaggatggtatatcatggtttggccccgttggttagattcctaaattaatttattttgaagcggaagaaatagtagctcaataattgcaatggtcgattcataccattcctagctacctatgtatacacgttgattctgatcgattgggcgacgatggattacacatgcagctagtgtgtgtcgtatatacttatagtatactatatgtactatcttcgttttcaatagatgatgttattgactttaatatattgtttgatcactcattttattgaaaaaaaatataaagatattattttttatgacttgttttcgttattaaagaagtacttttgcatgtatgcatcaattttaaaatctgacaagtggtacaccaaatttaaggatatcatctatttaaaaaaggagagggtatatacgtatatgcaacttggggtgggctgaggaagatcaacatcgagaccgaaaagaccgtagttttttctgtttatgtttatgtttagcgtttgaccgtccgctttatttgaaattcttttatgattagtatttttattattattagataataaaacataaataatactttatgtgtgactaattgttttctaaattttttcataaattttttaaataagacgtacggtcaaatgttagacacaaaaacctactacacatgagacggaggtagtgctacgtactttttctttttaaacaacatatacttatatatgaacgtacttgctcagttattggacgtatctggcaggcaggatgcaggtatacatatactatactactagtagtaacaaataattaacacatcgaagttgtctcatcacgtcaaatatatgaagaggggggtcgtcacgccaggcgatgctagagtccacgggagttgaatttgtctgtccgattcctggagctttccagattgaatcgggtgttgtttaacctgcagtctaggccgggtcaatctaggtctctggtgcaatcctttatacaagaacttagggtttggtcttgacctcggtgtagatcgattcgctttggtgtctgctgcgtcgtctgcagtcggggaagtccagcatatagatcaaattggttcttggcaatatggcatcccatgaagatccgcgcgatcgtcatcgtgatgaaggtggtgcaacaaccgatgaggaaccgattgaagatctgggcggggcttcggaggaggaagacgatgaagatgcaattgtggtagactttgatgaggctaaaaagcatattgatacacagtatgtggccattgggaagttcttctcaaggaggactttcagcgcaaagggactgtttgaagccatgcaaaaggcatggggcttgagacaaggcatggagtacaaacgcctgcatgataaccgatttctactggaattccaatctgcaggggatttcaggtttgcgactggaggcggtccttggatctatcaaggggatgctttcctgatcacggagtatgatggcaagtctagaccttcggatgtgaaactgaactcgctaccagtttgggtgagaatttacgatctacccctgtctatgatgactgaaacaatgggtaaattgattggtgcaaggctgggtgaggttcgtaaggtggcggtggatgatcagggaagagcatgggatgattttatgagagttcgggcggagcaccctgtggataaaccactgacgtgttggctgaaactgaaagacaaggagtcatcttcggtggttcagaggtatgatgtcaagtatgagaggatccctcggttttgcttttactgtggccacattggtcacatggagagggaatgtgatttaccctcggataagcaaacggtgaggtttggccttaatct

SEQ ID NO: 19633 - DNA, 2941 bp, Oryza sativa
aacgatccatgaagatatctctcttataaaccagcttagagatgaggaacttggtgagggacataaggaaaatatcgatgatggggtaaaacctgtgctaggaaagaggagtatggataaatctctccttggcccaggatatgatggaccttcgtttgatgttctagttggaggtgatagtaagaggagtaagagtttgtctctatagacagcaaagtcgatccacctgacgggcattccaaaggaagcccgtcaggagcaatgaatattttaagctagaactgccgaggatcagggaggcctcggacagttcaagatcttgtttgcctagtgcaaacacacaagcccaagctggtttttttgtctgaaacacatcaaaatatagaaagagtgtgtggcttaaaatagagattggggctgcggaattgtgtagcagtgcctggagaaggaacggggaggggggggatggactagccctcttttgggatgacacagtacaagtggatcttctatcctacaacttcagatatattgatgtgctcattaaggacgaaagctgccctgtgcaatggcgatgcacctttgtgtatggtgagcccaaagctagcgaaaggcataacatgtggactcttcttcgtcgcatcaaatcaaattctactgctccatggtgcttagtgggcgactttaatgaagctatgtggcagtttgagcatttttctgaccacaagagaagggagaagcagattatggatttccgggaagtcttgtcgcactgcgatgtgtttgatttaggtttcacgggtgccccctggacttttgataacaagcaaaaaggaaggaataatgtgcgagttcgactggatcgtgcagtagcaagccagagttggtcttctctctttcctgctgcagaagtgattcaccttactgtgtccagttctgatcacagtcctattcttctccaagcctcccgagtggatcgcatcaagaaaggggatcggtgtctgcggtatgaaattatgtgggagagggatgagcatctgacagatgagattaaatctgcttggcaactacagggacatatatcagacttaggctcagtggcaagccgcttaaagtctgtgatgggagcactgcagacttggagccgtgataaatttggttaagttagcaaagatattaaagaaacaaggaatcgattggcagagcttcagatggcaggcaggtgtgctagtgatcaagactatctcgatatatccaggaagctggatactcttgtatagggaggaaatgcaatggctgcagagatcaagaatctcttggttgaaggaaggtgaccgaaacacatccttttttcataggaaagcggcttggcgccacaagaaaaacaagattaataggctgcagagaagtgatggaacctggtgtgataagagggaggagatggaagatatgacatcaaatttcttcaaagagctttacactaatgacccttctgtcgagccagaaccattacttgatttggtacagcccagagtcacgtcggagatgaataagctgctttgtaaagaattctctgatgacgaaatttcaaatgctttgttccagatgggtccgttaaaagcgccggggccagatggttttccggcaaggttctttcagaagaattgggatgtattgaaacgggacattattgcggctgttaagctgttctttgaacagagaagaatgccacaaggtgtaaatgacactgccattgtgttaattccgaaaaagaaagagccaaaggatttgaaagattacagaccaataagcctttgtaatgtgatttacaaggtgattgctaagtgtttggtgaataggatgcggccgttacttcaggatgttatcgtgccagcgcaaagcgccttcattcccggccagatgttcactgacaatgctctcatagcttttgagtgcttccatgccatcaatcggtgtaaatcggttgagtctcaattctgtgcttacaagttggaccttacaaaggcgtatgatagggtggattggagatacctagagggagctcttcttaaggttggtttttgttctcaatgggttcagctattgatgacatgtgttacctctgttagctatgctgttcgcttcaacggatctatgcttgaatccttcaaaccgaccagaggcctccgacagggtgatcccctgtcgccctatttgttcctctttgtggcagacggtttatcaacggcgctgagtgaagctgaaagatcaggacggttacaacctctaaaagtctgcaggagagcccctggaatttcccatctcttgtttgcagatgatagcctgttgttctttaaatcaaatatggaacagactaatgtggttaagagtgctcttactttgtatgagcaaagcacaggccaactcctgagcccggccaaatgttctttgatgtttggaaagcattgtggggatgctctgcagtctgacatcagatcccttttgcaagttcaacacacttcctttgaagataaatatcttggtctgcctacaccgatgggtagactgaaggcaggaagacaccaatctttgaaggagagatttgagaaaagattaacggattggaatgagaaatacctctctatgggagggaaggaagttttaattaaatcagtcctacaggccattccgacctatgtgatgagtgtgtttaagcttccagcagggctctgtgaggaatatatgcagctgatccggaaattttggtggggagaagaccgttagaaaaggaaagtccattggatctcgtggcagcaactgattaaacccaaaggacaagggggaattggtttcagggacttaaagctttttaaccaggctctgctagcttggcaagcatggcggctgatccagtttcccaacagtttgtgtgctcaaattt

SEQ ID NO: 19634 - DNA, 1207 bp, Oryza sativa
cggccgctgaggaaattttgtgtatccaatgccacatagccctgaagaggacttcattgcttggcactatgataaggtgggtatgttcactgttttttctgcttacaaattagccctacaggcccagatcagagctgacgaagaggttgcacaatgctcaaatggcgatggtgataggaagttgtggaagaacatttggaatgtgcaagtgccgcagaaaataaggatttttgcctggagagtatcaagagattgtctagccacacaacataataaacatcgacgacagattgtacaaaagccaaactgtgagatatgtggggcagaagtggaagatgcgtttcatgctacggttgcatgcacgaaagcagctgcgctgagggcagagatgcggcagaatcggtggctaccgggggaacaggagttctctcagttaggacctgactggctgctacatcttataaaccgtgccgacgatcagacgagggcgttaatattcctgctgttatggtgagcctggtttttacgaaacaatatagtgcataatgacggccatgcttcagtcactagttctgtggtgtttcttcggagttatgctgaatcattgtttctcaaccggcaaccaagagctgacagaaaagggaaggctttgtgtcgccctgaacaggggaaggagtcaggtccaactcgggcctttccatagcaacgtgtttgttggcttatgtctgtgaatggctgggctaaaatcaatgtcgatggagctttcaatcctgaaaatggtaatggggcacttggacttgtaatcaggaattcgaggggcgaagttctgttgtcttcttggaagtttctcaggcgatgtgtgtcagcggaggaagcagagctgcttgcgtgctatgaagggctgaagctagctgctgaatggattcccatgccagttatgcttgaatatgactgtgccacagcgattgcgaggttgttgtccactactgaagagagatcaagatggtcttttctgctgcgagcagcaagatcagttatagggttaattaaggaagtgcgtttgatgcactgtaatagagagtgtaatagggtcgcacatgaacttgctcagattgctatccgttcggggcaaagcgcggtttggcgtaataatgcaccgaattgtgttatgcaatgtctgcagcatgactgtaatcctgttacgtaa

SEQ ID NO: 19635 - DNA, 7502 bp, Oryza sativa
  unsure (1)..(7502): unsure at all n locations
tggcacgcttttcaaactgctaaacggtgtgtttcgtacgaaaactttctatataaaagttgttctaaaatatcagattaatccattttttaagtttgtaaaaaataaaactcaattaatcacacgttattaccatattgttttgcgtgaaacacttaatcttcatcttcaggagattcaaacaccaccttagtatactttaaattcaaaataaagaatctataaggcaggggaaagtgttttctaattgtagattagattttttccaagcccaatcgtaaaacaatactaaaaatatctaaaaaagtatcaaattctaagacttggaaacaaacttcaaattataatctgtagctgaaccacgtgggctcaagatcttaattactaaaagaaaaacaaacttcctaaaggacgaaggaccattgactccgtgaggtacgcaagctccgtcaggacgtggagcgctcctcctcgtggtcgagctagcgtcgtctttgcctcaccaacaggggggctgctagctggcgcgtgcgcgccagaagcgagcatctctctaactaatctatagtagtattagttaacacccacttaactactaatgacgagtaattagaaaaagattgtcaagattttttatttttttgggagatttttttcaagtcagatttgaaaacttttgatttaagatttaaattttaaagtcaaaatttgaaaactttctactcggatttgaaaactttcaacccgagattttgaaaactttcagctcagattcgaaaactttcaacttgagattcgaaaactttcaagtccagatttaaaaaatttgaaaactttcaacttgagattcgaaaactttcaactcagattcgaaaactttcaagtccagatttgaaaattttgaaaattttcaacttgagatttgaaaattttcaactcgagattcgaaaacttttaagtccatatttgaaatatatgaaaactttcaactgagatttgaaaattttcaactcgagatttaaaaactttcaagcccaaaatttaaaaatttaaagttaagatttaaaaataactagtaaactaaaactaatcactagtaaaaaactaatctaaactaattacgtggaacagcgaaaaagaaaaaaaaagaaagaagcagcgaaaaagccgtaccagcgaaaaagaaaaaatagagagaaaggaccagcgaagaaaaggagagcgcgtgcgcgtgggctgcgtgggccggaaacgcgcgttggcggcgcgcgctaactagcttttccgcaccaacagatgtcactcagccatggcaagtcggcagctcaacggcgatgtagaagacagaggtatatggggtattggtgccacgggacagctatggcggccgccacagcatgccacaagggagggtccacccctgagtgaatatggtaacatatatttatcggaatatgaaaaaactctaattgagcttgtcaaatcaataaagagatgtagctcgttatttttttaaaataataaattgatatttctattttttatcaattaataataatacaaacagttgcacatttcacttttaaagagaactacaataagtaagaactatattcatctatgacagtaagtagtatggcatggtttaataaaaaaaaaagtacttcctccgtttcacattaacattaatatgaatgtggaaaatgctaaaatgacttacattgtgaaacggagggagtaattgggtaaacgaaaaacatatctaaagcatcatactagaaaaaaaatacatgcattcaaataacaacgtcaatactcagtacaaacgtgaacatctagagtagagaaggttgaagctaattagctgtatatgaagagtaattcatttatgatcccgaggaaaaaattttttggaaagtttccgatcgttccagattccgacggatagtagtcttaacgtattcgtttctgtttacgagataaaaaaatcagaatttgtttccgtttctgaaattttaggaaaaatttcaaccaacactttctgtttccagaaacatgtccggaaaccagaaacattctgaatcattttcatccgtacctaaaaggaatgcaaactaatcattactcaacattaattaggaacccccaaccaggattagggccaatctctttggaatggttaatggtggatataccaattaagaggtatggtctctaatatttacatatccaaacgagatcttaaattgttatcaatatttatgccaagttgatactttaaagtgtgtgtgagtgtttggctatgtgcatgttagttatgcagagcctangattgttctcagtacgatacgatagtatcaccttgatgtacttgacaagcttcctttatatcaaaaaaaaataccaagttgataatgtaagctgtgaactagctagcactaacaaacaattacaaagaattaaaagtttataccttgaattgtgaaatatgatcattgtatatggaacatgtttgatgcagcaagctaaaaaaaatacagaattatgacaggttctgaacactaagcaggcaggaaatcaaactggtgaattatgaaatgtgagcaaaataagataaaggaacgcatgatatgaggttcttaacgattcactggtttatccatataatggccaaccacacacaacacaagtaactaggactccacaatcaaaaataacatccacactctggacggacacatatagtcacaacaaaatttgatccactccaattaaaacacaagaaaacttatttgggtctcaaacgtttccaaacagcaggcacagcttgcaacacttggtagtagtttcattcagcattgcatactatttgcagaagcccctcagccttcagttctaatagaagtcaatattgatggaacctccatggctaatttagaccaatgccatcaactgattggtcgtgagtttgaacgaccaattcacctaaagttgaaaggttcagaatattattaggaattcaggtttctagaaatgatagcacaaggatatacaagactacacacatatgtgtcatggttaaaagtggtatatacattttttgaaaaggcaaagttgtatatacattttttgagaaggcaaagtggtatatatacaatttttgagaaggcaacgtggtatatacattttttgagaaggcaaagtggtatacacatacaatctaaaatgaatgttttatgcttccttgctatgaaaaaaatcactatattaatttctagataagatggcaaattcattcgcataagtatggtcacacaaaaatgtgtgatggtaagagaagtaaaataaatgtcgcaaagaaagaacaagtaaccctattctattagaagctgccaactaaaggcctggcacattggagccccaaatgagagtgtttgttcgaatgttaggaaacattggaaaatgaagaataaccgtttggttaaccctaatgcaccaataggcccaactcggaagaaagaaggcatccatcttgaagaaagaaccacccatcagttcaagatttaatagtgacttgaagaatattggtggcacctccattaccactcttttactaccagattttctaaagttgggcatgcgttgttgagaggatcaaatatcgtttcatttagagcagcattagtcagctctcgagttttaagataccaagaactgaactccacaagttttggatccaagtagaaaggttcccatctttcatactcggcaaatttaaccactttagcgttgtgcttgatagcatgattgacccaagaactagcacggtcaatcgcaaaagaatctctcttgaatgtatccatgggagcatcaagattgtcacggctaagcaatagtttgttaatagaactaccaaaaatttccctatctaggcaaaaccaatttatatcaagctgatcaactgcaagcaagtcctcttgctgacccaccagtgggacgggacactagttcgcaccgcctccttcatcgataagaaggacattatgtggtggattagattgttagggagttcgctgatcctaccttttccatagggattggagggttccttgtggcctgcagtgtataagtggatactctgttacttagtgtaagtacatgatctttgagaaccacacaaacaactcgcaacaattttacaatttttatgtgtgctgaagtctagcttcacagagatattgctatcttaaatgcactttacacaaatgataaagaatttcccttgggtagctttgagtgttttcttagaacagtaaggaggttgaggctcacacatcaatcaagcgttgcatgagaataacaaatattcatggtttttgcaccaaaattaccaatgtgtaaaggacacaaatatgaaaattgctttaactcaaacaggggaatcgggttgtggatttgcaaattttattggcatatatttttcatgcgtaaagcattccagaagattagaatcatgtgtagactatggagaaaatacatcatgtaggcaccataaaaaagaacataccactagatgatgtcccctgaacatttccttgtgcatggataatttcgccatgcttattcttctcatggagcaagacaactgaaggggttgaagcttgctttcgaacatgaagaaaattgttcaacagcacaggatatgaatcatccaaatcgccttttataagaccagtcctccatagataatcactctaagtagtgcgagaaagaaaaaaatatgagaacttttattaaaacataacatcctatattgaaccataactttatgaataccagagaaagcatacaaagatagcaaattaagagggcatgtccacaatctggcaagccaagaataagtgcataatcaatatatgaaagaatttatctagcgatacacgtataagcgaataaatcagaaagtgatgattctatccacaatattaaaaagaagttaatcgaaaggggaacataaatatttggaattgtgtataaacgaacactttaattaaatacaacctcagtcctagtgtcttccgcgctacaatactggaatagtaattaattttttttaattagattgacaaaatttgcatagaacatattgcaaccatatgttctcaagtaagatggtcatcctaactgtatcacacaattgttatagctctaagtagttatagacttcttggcaataagttgtactcattcaggagctttgagactttgcaataatcaacagatgaacaaaattgctactattaaggttaacaatattacgtgcattaagatacataaaaaataaaattaatatctaaggaaattatattgcttaaaaaactattaagaacaaaccgtcatacaaagtcaatagctattttgtagattctctcctgtattctggaagccacattttgaagatcaatcaatgttgttgaagtagttgttttcaatttcatctgcaggcttaccaatctgcaaagagaatgccgaatattaatatgagatacgtaaatatttcactatggtacttccaaccgaaataatccaaaatatggttctaatataacaaacaataagcagccaggcaattgatggattggggtagcatgcctttatgcaagaaatacatgcctgctatgtattcactatttgagaaatgcatctttgctaaagtaacatgtttggaatcgcagatacattctcataaatactgaaatatcatttgtccaaccagaagtgtcatcttttagcaaagttgtgtcatcatgcgtgctaatagtttggaggagatcattgataaccaataacacggaggaattataaatactacaaacaaaacaagaagaatgtgtgaacatgggaccatcttcttcatgagttttaccacctacatccaacaaaaaaaaacaacctaaacctacaagtattatctactaacagatcttccctattttttggagtagctgcatcatctcatatatttttggttgtgtaaggtggactcagttacacaactgcacaatcaacaccatgacttctccagttcttcccctgttcttcctcttccctaagagttttaacacctaatttaataagctagcccaaaaaatttgaaagacataatatatagactatgtgcagcactaaaacactagtccattaagcttagacccatgcaaggagctggccacaaaatttagtattgaattatcgacatgcaaccttagttcattttattttggcgacgaatcattaacttgggtcattttctaaatatgaaacaatttaccttttatatttgagtacaatcaaaatataaaaggtttgaatccaaccaacaaaattttgccaagaacaatgctttttgggcgatctgggcctgtggtagggctagatccttgtccattatagccagagccgaaccaaacactaatagatcctcggttttttaaaagtgaagtgcgtggatctgctccaaaaaaagaggtagaaaaggtggagctaccttttttcagatccacaactccagctccatgtaaaatttggagctctaccaaacagatctatctgttacttggagctagaaaatgtcaattggatctgacttccggtatgatgaattaattagatcattaacaagtatagcatggatgatggtttccaatcttgataaatcatcatcaattgaagactctataatcaatttctcatgggaaaaaaagtaagaacatgagagagagagagagagatgagggggagtgcttacatatcatgtgttaccctatcgcgaatatcctggccaaggcgggtcctccagtcgactccttcgtcgataatccctaactcgtccatggtgtgcttctttggttttgttaggcagaagaagtgcccagagaggggaagaacaataagaggtcgatgatataggtagaattgaatcttataggctttagttgttggtgggatccacaaaagaagtaacgcttccatgggagaaggttctggctcacatgacatgacaacattgcctagcttataacacgggagaggggtatggcccacatgatgtgacaacatcacctagcatataacacgtgatgtagcttctagaaccttgacaaaatcctatgcaaaaaagttttgtggcaattgatgtccaatatctatgagtcagaaaccgagaccaaaaatcaaaccaaaaataaccaagatcaaacccaaaataaccaagacaaatgaaaccgaacttctttgcatgggatattcagactaccgattctattcaagccttattctaatccactcctcattcctcagccagtcccttgtgctccatcaactgccacagccagcaccccttcctccattatggtgcttctctccctcttcttcccgcctcaaaatttcttgagcgtgcctcctcggcttcaatcccatcttgggcacaccttcttggctgg

SEQ ID NO: 19636 - DNA, 11795 bp, Oryza sativa
atcggctagtactccgatactactctatattaagatatgaaagtggatgaaatatactgaacaggaaccgatctaacatcaggatggcctaatagattgatagcaagcttaatatatttcaaacaaacgagatcttagtatagaggacagatttagcatatcaagcaaacgcaagagcgacaagataactaaaccagataagatcggatgaaaacctgatgctatctctattagcaactatagacgggctagatattgcaattccaaacattactcgatatagatcaaactcaactgatgcagcattaagtcatgaagagaagtgcaagatctaaacaagtcgatagaagctcttctgagatggtagatacgctatataacctaattcaacgtcgataactaacttgccgactgttttcaatgatagaggctagccgatggggttggataacgatattaatctaggttatatagcatatatgataactcggcgattcacataggcaagattagagtgtcatgatgatgtaagcactaatcccgagaacgcaaaccgccataacaagccttacctcttcgtcggagatcgagaccgatgtagcccaactcgaaagcaagaattcgtcaaaaacaataagagtagaaaaagggtggcgatgcgctgaaagtattattgaactggtgttgtttgtttacaaggcatctggctatatttatacccgaaatagttaatatatccttgctggacacgactttatctctattacaatttaaaacacgaacaattcccttagacggactcttatcaaaaaatatatctaagggaattaattaaaaacatcctaattaatagatacaattgccttctttggacccaatccttgtatggcaatatcggcgtagtgtcttaccaccttgaaaattcagtcaacggcttgattgtctagatatcgtgtttcttttcatacttagtgctgcatcagtacattggacctactaagtcatgtttagaaccatgatctctagccttcttcttgattgctaatatggtagtatcggggtttcagctgatcttacctaatatatatgtttccttatctgttccatgtatattttccatctatatagacatatcacctaatagtaatatatcaagtctaggtcatatcggctgggctatcaatattggctattgacctatatttggtatattactatagattgacttgcccatatagatctgtactagagtattagctagtatattatctttcttgctctaatgtcacatcggctattttaataatattgtcttaagcttctttatcaatcttgatagacagtgttacaatcgatgatgtatatttagggtttaatattctttgatatatctattctatagccgattttgtctaactccatcggctgagaccaccaatgatacgttattggcctatcgactgactaactctgcttttgtctttcttgctgattgtaggatcaaattagctggcacgtccttgacacactcgagactagccttggacttacactggagttaagcagatctcctaggccaccgtattttcacgcaagcaccatggtagatggttgttctggtctagttggtcagaccgagaaacaagaccgaactatcagaatggccgattcacacatttgtgctgacaagtgatcagtcttccattttcaatgaccaaaaagactggactgaattatcagtaatgatggaacaacacccctggaaatacctatcaacaggaagttgtattccagcgtggttcttataggatagtacgttgcggtgattaatgaaaaggaaatgactgagattaattatccctagaggtattgtttgaatatgtttttaaccctgagctacaaagcaggatgtttccaccccaagaatagttggtgtcgccatagttggcgtcatgtgttcatctatatgtgcgtcatgagttggcgttgcattcttggcaagctgtcacaaaatcattatccaggctgacatgcacaatgttgtcataatgaatatagatctactacagctactagtgtcattctcttgcacgtctctccaaaaaccagtcggaatggaactggagaggccaacatgcgacacgatgtgcatgcggacaaacacgcacgagccgcttccctggcacatactgtggggggagaggggtgggggggggggtttagaccacacatggttgccacatcacaagggatacctccaactggtttggatagacccagtttttgaaaggagttcaaagtgaaatttggacaatgtatataatcatgtcaaagaaaaagcatgttgaaaatcaaatcatttagaagccccgaagcaaacatagtcatatatagaaaaaaaaacgaaacacagatgtggttatgcttcttgtggtagaacttatcttatccactagagttaagttctgtactttgacattgttacgacgtaacaacgttggtttgtgtgagtatgagtcttttgtcttttttgcaatcgccaaccttgcacgaaacatatttctttacacaacacatgtaaaggggattggtctcacttcataatagtccccttcaacaaattttgccaactattcgaatgaaccaattgcctcagttttaaagtacaagcgtttcaggtagaatccaattgacaggaaaaagctaaaatcatgcggttttgtgttggaaaaaaatcacaaagataagattaacatctcgaggaatgggatttattcgtggaatgagcatacgctagggttcctctaccaattttcagatttcaccgacgatcaaaaagaatattgtttttcagaaatttaatcacttctatattaaaagcactccatttgctgtacattcgggtcaacattatccgtacaatttatacagaaaaaaatgcaaaaaaaagaatgaaaaaaatattatgcaaaattcatcacatgtttttctaccaagaggaatttctaatccctatgactgtcctagttagttgttaacagtgaaatttggtaagctccgaagtcatcatcggcctaaagtcagtatcggcttcagagtcctagaatcgaccgatgggaattattaagtcaccaatagtcggattcttagtagattcggttaaggaaattaatctactaaaggaagtttatccagaagtgaccgagttcaaggaggatgcggcataacagtttatctattaattaggaatattctgttagtttccttttatctttaggaaagtgtgtttagtgtccgataaggagtttatgttttcctttaatctttaggaaaatttttttcttttccaacaaggactagtatctacccataggtataaatatgtatacccggggtcattgtaaactatctccacgaatacaaattcagcgcatcaccatcctttttacttttctactttttcgacgagtttatacttatcatggctgtttgcgttggcggggctagggcttcaacactctgatcttgtcaatgtaagcacctatctatcatatgtagtttggtggtttattttacttgtatcggctaagattcgtattagggtttatgctggtatcgactaaattgctttaccaaattagtttagctaaggtatctaccaccctgaaaatcagtcaagggcttgattgtctagatattatgtttttttttcatcagccctagtcgtgtacataattcaaatgtatttccattcttcaaacaagctatttcttttaatattttagtattgcacatatatcaaggagcatgtcaatgataatgatagtacggccgctcaccactctatgaggaaagtccactcttattaattatacatatgttgcatggatagttgtatgaggacgtgatggatgcatcatatcgtatttatgtttgatgccaatcattggaaaataaagagtagagatacgcaatgttaattttcaccccctttttatatgcctaattgtttaaacacacctctaaatgtgattaattgattaaaacaacacaataccaagtgatagatttcagtaaaaaaagaaaacccttttcttagacccttaaaatttaaaagaggcccccagaggttttttgggtttgttttttcttaatcccagataattgtcatttgtttccatttcgtaacaaacatacatttctttctcatatagcaaataaagtaaataagtagctaggtaatcttaacacgaaactttattccatcttgatcattgtttcttcatcttgccaatcatatgtagttcagaatacgaggcagatcaacaatcttgactggcttcagaatataatcctttgctcctccatccaagcacctccaacaaggaaaaaaaaagaaggaaaatggagcacatattaggatccacttgctcagattgagaatttatcaactaaggaaatcaaggtatatgtgtttgtacttactttctaatcctttctgggatgttatcagaggaagcaattaccactgggagatgtgctagtttaggtgatttctataagtaaaaacaagtccaatttgaacatgtaaaatatttggtagaaacattataaaatatatatgatgaagattaacactatactccgatccgtgatactattgtacgcaccttcacttccatgagtaagtcatagccggtcatgtctggcatacagtaatcgctaacaatcatgttcacatcatgttcctgtgtccatcagagataaatacatgtttgttatacagttgtaaataacattacctaataaacaagaagagaacttttaatttaccgaatccaaaaacatcaatgcttgcatgacactttctactgcagtcactgcatatatcaaacatggaaacacttagttaataatagtcaaaaagaatgtcagaagatatcaaacatggaaatacttagttaacaatagtcaaaactcggaaacttgcataacaaagaacctcggacgttatggcgcattaaggccatggaaacaacatggcgatcaacaagggtatcatccacaacaagcacatggggggatgacatcgcaaactgttggtgtagagttactttgaattgttgttgaggaaaatggacctagaatgcacatatttatagtgcaaaagtcttaaaatcttggagatatttcaaagatataatatcaattcactggcatgaaaattagctgtcatatcttacagtatcactagtgactgtatatttgataattttgatataccatacaatgcaaaatgattgatggctttgtcctctttcgtacccatagtgttgttcatttttcacaaattaattatagtgaccttgcaacaattatagctacctaggagcaaagatacagtctaatgaatgagcatatattttatatatctgtattgataaatgaatttgccctatttaatttgtacttcctccgtttcaggttataagacgttttgactttgctcaaagtcaaactgtttcaagtttaactaagtttatagacaaatatagtaatatttataacactaaattagtttcatcaaatcaataatttaatatattttcataataaatttgtcttgggttgaaaatgttactacttttttctacaatcttcggtcaaacttaaagcaatttgactttgaccaaagtcaaaatgtcttataacctgaaacgtagggaaatatgtcaatacaacaaagaggctaatagaaactaattaattggtcacactctggtttgatagacggcatggtactaaatgaaagaaaagaaagcaagtgagcagtggcgtactttggcatggcgtggtccttttgtccgaaaggcccacctcgtggagctcttatcttctcctctatggtttttacatgaatttattctaggaataagttcatctgaggtcccttaacttgtcaacgaatccgattttcgtccttcaatccaaaaaccagatacaatgggtccctctactatcaaaaccaatgcagacaaggtccctcggcgatttagatggcggttatggctgacgtggtgcctacgtggctaatttgactcggtcttcatctgacgtggcaatgacgtggcgctgataaaacatgtgggacccacatgccagtttcacaccaaaataataaaaaatggatggacccacgtgggccccacatgtaatcctcaatccccagcggttgctggtgctcctcttcctcctccggcattgctcctagccagcggcagtggcggaggtgagcggtgcctctccctcccccgggaatccgccgctgccttaggttccaggctcctccctcgccggcccaccgcctccatcctcctccccctgcaccgcctctgccgactactcggcgacgccggtcccgtcctccccaacaagctcatctgggtgattttggcctgtctcccggtgaaggggctcctccgttgctacgccatgtgccgtccctgggcgcgtgtcttggtgcgggtgctgctcagcgtaggctgcgtcaagggtgggcgctaggggcaacggctggcagcggcgccgtaggccagggccaggcaggcagcaggcagcaaggtttgcctcatctctcatgcttcgtgatggatcagatatctgctactgctatctctatctgtatgctaaagttgttcatatggttggttttttatccatatttctgccctgctttagtgctgattatattgctggttctgttttagttacctttgagatgtgcctaactgcctaattcatttgctattgttttatccagtgagaccatggaacaagaacggaaaggagaagtttccagtgcatgtatacttacaatcataattctgacagtgggtttgatgtccataaaatctttgttaagaggagcagattccgggttctgttgttaagaggagcagattccaggttctgttgttaagaggagcagattccgggtttgatggatgaaaatgaacgtgtttttcttattgggtctccctgtttgatcatgtgcagagtcagtggtgataatgccaacttttgggttcataatgagttcatgacgatgaactagttgtgtctatgaattatacctctgatggaccgacgagccagtggaaaaagggaatggtgagggcggcgttgaactcgcaggcccaactgcccaacgtgtcggcaggaagagcttcttgacgagctcttcttcttctccttcccgccggagctggagatgacggcgtacttcttgattttgcgtgcgaacagccccatgaaggcgttctccaccagcctgtcccggtattcggtcttctcccccatcggtgctggtgccgccaccgtgaaccgaaagccgctgccctgatctagttcggccgctgctccctcgtcgcccgccgcttccacgacctcgtccccctcgacgactctgtgctggtccgcgtgactgcgtcatccgagatgaccccgcgccaccgtcgtcgtcatcatcctcggcggcagcggggactggggagaaggacgacaacggctgcggcgtgaggagaagcaccgacggcgcggcgtgacctctcactgccggattcccgggggagggagaggtgccgctcgcctccgccgccaccgctggataggagcaatgctggaggaggaagaggagtagcaccaagccagcaaccttaggggattgaggattacatatggggcccacgtgggtcccaccattttttattaatttagtgtgaaactgacatgtgggtctcacatgttttattatttttttggatcgaattgccacgtaagcgccacatcaatgctacgtcagatgaagaccgagtcaaattagccatgtagacgccacgtcagccaaaaccgccatctaaactgccgagggatcttgtctgcaccgattttgatagttgagggacccgttgtatctagtttttcgattgaaggacgaaaatcggattcgttgacaagttaaaggacctcagatgaacttattcctttattctataaggcccaccttgtggtcttatttttgtggcgactcgaagctgcgtttcatccttcattgttttccaaggctctcctcgcgtgttccttctttattcaggtgtttaggaatggaatcagatggggatggatgaatcagccattggccatctaaatcgtggtgtttatagataagaaaacattgggaacatggcttcattcgggaacaatggtgatcaatggcgtctcctcaactcttgagcatatcgacacgttttcagatgagatagctgcaataggatacagtcactggacaaagtgtgaacactggaattccaggcaaatgcacacagttcagtgaacactagataaattatctcctcctttatgttttgtgatagttacatgtgggagttcgtcacaactatagctggagttctatgaccaaaatacttcaccgccatgtgctggccctactcttgttttgaataatgccttgtttacaacgattttgtcatagaatctcatacctacggatggaactagctaccatggacccatgaggtccatggctaccaagttctatgacaaagtactttgtcaccatatgccaacccaaatttctaaattgcgcaacatttcagatggccatgtttgccatcgtgacactttttgtgaccacaaactcaagtttccactagaatcaaccgagcctgaactttatgattatttattgaaaattcatcagagattaacgatggattccctttttatcacagtgaatccattatagaaggccaaatctattgtagtcatatatgtcatgggctgaaaaataaagagagaataagggggtcttgcaatggcggagatagccataaaagctgcgactcgtgaagatgtaaagtttgtgatatatcttaagaaatttataatatgagcataatatctttcatcctcatattttgtacaacaaaaagcccaatagagacatactgcaactcccacgtaacatgtaacaggatgtttagtgtcacatgactgcacgacatcataggatagtctctttggaacattggatatatgaatttcaatggaatatgttgtaatccttacaacatattcaaataagacattaaaatgttaccaataatatgagctgtcaactggccaaccctaacaaatagttgctagaagtaacgactgtgaaataggatcattgtgcatttgtgcatggaaaatgtttgatgcagcaagctaaaaaccaaccataattatgacaggtctaaacaaactaagcaggcaggaattcaaacttgcgaattacaaaatgagaaaaacaagataaaggaacacatgatatgaagttcttaacgattcactcgttcatccatataatggccaatcacgcatagtacaagtaaccaggactccacaatcaaaaataacatccacactctagactgacacatatagtcacaaacaagtttgatccactccaattaaaacacaataaaacttatttgggtctcaagcatttcaaactagtagacattgcacactattgcatcaatccctcaacctttagttctagtcgaagtcagtactgatggatcctccatgggtgatttcgaccaacgccatcaactgatcggccgtgagttcaagtcaccaatccatctgaagttgaaagattcacaatattattaggattttagttttccagagatgatagcatagggatgatgcaatcgatggtactgatcagactaagcttcagaaacaccttccttagaataggtgagtgcttgacgtattggcgtagaggctagaaattattgtcaatgcaccattcacccaagcgcaatgttctaaaattcctgaacattggcccgctcctagattgttccgtgaatataaacttcatatgtgcaaagcaaaaaaaaagtcttctatgaataccgaaaatttgttgcagaaaggtgatactaaagatattaattctcctcctcagctcaagttattatatacgacattacacaaatatgtgtcgaggttaaaagtggcatatacatttttcgaaaaggcaaagtggtatatacatttttttaaaaggcaaagtggtacgcacatttttttgaaaaggcaaagtgctatatgcatatcatccaaaattaatctttcatgctttccttgctatgagatatatactcactatactaatttctaaataaggtggcaaattcattcatgtaacaatggtcacataaaaatgtatgatccaagaagtggcacggtcaatcgcaaaagaatctggctggtatgtatccataggagcatcaagacactttcatggccggcttagcaatagtttgtcaatagaactaccaaaattttccccatccaggtgaaaccaatttatatcaagcttgatcgactacaagcaagtccacttgttgacctgtcagtgggacaggaccatgcacaccgccaatttttccctgtctaagcgaaactaatttatatcaagcttgatcgactgcaagaaactccacttgttgacccactagtgggacagcacactagtgcgcaccgcctccttcatcgacaacaagaatgacattatggggtggattagatcattagggagttcgctgatcctatcttttccatagggatgggagggttccttgtggcctgcagtgtagaagtggatactgatttacttagtgtagctacatgatcttggagaaccacacaaacaacttgcaacaaatttacaattttaatgcatgcttaagtctagcttcacagagatattgctatcttaaatgcactttacataaatgataaagaatttacctagggtaactttgaggtttttttttaaaaaaaaacagtatggatgtgaggctcacacatcaatcaggcgttgcataagaataacaaatattcatggtcttgcaccaaaattaccaatgtgtaaaggacgaaaacatgaaaaatgctttaactcaaacaggggaatcaggttgtggatttgcaaattttattcgcatatatttttcttgtataagtccaagagattataataacaaagagaaaatttatcatgtaggtaccataagaaaaaggaacaaattggtatttaaattttcatgaactaactgctagatgatgtcccctaaacatttccctctgcctagataatttggccttgcttattcttctgatggagcaagacaaatgaaggggttgaagcttgttgacgaatatgcataaaattgttcaacaacaccggatatgaatcatcaaatcaccttttataaggctactccttaggtaatcaccctaaatagtgccagagaaagcatataaatatagcaatgcgagcatgtcctcaatctggcatgacaagaataagttatatattattgaatggtgaatgagccaaaacaaagtacttgccacacgaggataaaatctatatattatagaagttatctacaaatacacatatataagccaataagttggaaaggggtgatttctatctgctatatgaaaaaactgaatctaaaagggaacataaatatttggaattgcgtatgaacgaacacttcaattaaatacaacctcagtcctagtatcttatacgtcactataaaggaagcgtaattaaacatttttaattagattgtcaaaatttgcgtacaacttcttacaaccatatgttctcaagtaagatggtcatcctaatggct

SEQ ID NO: 19637 - DNA, 1811 bp, Oryza sativa
cagatgtcctattttcatcctgcagcgttccagaatggattggatgtcacaatgtcccaaaaaaaaagaaaaaagaagcagatttcttttgccattatttgcacataataattaatttactgtattaacccatgcaattctggtaactttccaaagcagttcaacgtacataacagagcatgttccaaagtaaatcactgcagcatggtaactatggcagttatgcctggacatttttaacagtgaattgttattttgtacagtaaactgcaaatgtcagtatgtcatgaacatggaatgaaggatgtaaaaaatttactactcataaagtacaaacaatgtgatgccttttaattaatacagtaagaagataaataaactgaccttgaggaacatctccagcggtacatcaaaaatgtcatctacctcatcgacattaagaacaggcttaaatgcttctatatctgagaggatgccaacaataggaacaaccaccagaagatgctgcaagaatgtttaaagatttgtatttgtaacaccagaaaaaaaataaaaaaagatttccctattttttattgatgcattgcaacacagttttctctgatctaagaaaaaatttcagtttcgatgtaaaagaagaccgaaaggcattgcacctttgacaagaaatgctctaaagaggcaacaacagtgaccaaagaaggatcaagcccaatctcctcctttgcctctctcagtgctgttgctgcatcatcagcatcaccttcctcagccttccctcctggcaatgcaacctcgcctgacaatctcaaatttaggcaagaaacttagttaagaaaaagcatagaagcagcattgggcatctatgagcatccatcaacactttggggtgtagttgaagcaagtttagataaaatgagccagggcagactacatttggatcagctcacctgaatatgctgactcaaaccaagtcagctctctagtagagccagaagctcaatttataactcttgtgtaagccaaacctatcttgagaccatttgtgagctcaagtccccaaactcaaaatctataacaagaaaatatatgagcaggcttggtttcaaaagtatttcagaaagtcagcttgtttcatttcacttcagaaccaaatctcaagttgctcaaacaattcctgaggtgaggccaagtcgcttaaaatttgtaaattctgatgcaccctacttgtttttctcaagtagacaccgaagtaagaaatgctatgatgttcctagtataagtccaatcatctgtacaaattgtttgttcaaaacattccacaaaagccagttggctaataatgttgaagtggacaagacaagagagaaacaactatatcatttgtaaactaacttcatgaatgaatcacccacatggtagaaactagaaagtgactccctatcatatttgtgaactatatattaacaccccccccccctcacccccaaaaagaaaaaatgtttcaatctgacataatactatgataaaattatcacaaaactacagatttaactcggtgtatcacaaaactacacatttatgatgaagtgtcacaaaactacatgtttattaactaaattaccacaagactacaagtttagaaccaatttagtcagaaagcaataatgtttatagctccaatataacaatggtgctagggatctaaactccaagttgtagttttgtgattacttcaatattaaatatgcatttttgtgatacttaaccttaaaactgtagttttgtgataaatttgatgctaaatctgt

SEQ ID NO: 19638 - DNA, 17596 bp, Oryza sativa
agtttatatagaaaacatattagtactttcaacacaaagtaaacatattattaaaatatatttggtgctagatttaacgagactaatttggagttatattgctaattatttttataaaattgattaaacataaaaaagtttgataacttatgataggatgaaacagagaaatattatctaaaacaaaagggtttagagcttcgaaatgtactccttccattccaaaatattttggaactacggaagtatatttttgaaatcgtattaacagaaaaaaaaaaacatatgaacaaattgttcaatccaattgatcacatgaatttgtgacaaatgttgttggtggcactaaaagaaaatcatagttacttttcgagtaaggagagaaagcacgaggctagagttctccttctcgtttccaaaataaaaaccgctcctcaccgatttataaaaaatctacaaaaaccagtaaaaaccaacgatttttagtcaatgttgtacgaaaaccaactaaaacgcttgttaccacaaactaatgatcagtggttttacgagaaccgatcgtttttggaaccctaggtcaaccggttccaagttagtttctcacaaaaattctatgaaataggtattttcatagtaggaatttgttagttttccaccaaaattcttgtagaaatgggccattcccctggaatatcatagaattttgtggaagccaatctagagcagagttggattatttttcataggattgcaatctttcatttcatcacatttcctttggtaccaaagaagccctaattccagtaactagatatgtccgcactttgctgcgggatatatgttagataacggagaaatgatgaaatcattcgaattgaaatattatgaaaatgatttaagaataatgatgtagtatgtgtatgtttagttttggaatgaaataaattatagatataattattatatgcttgtatcttgaggatttgtacttaacatgttgatgtcccatgcttgcatgtaggttttaggagtactaataaatactatgtttggatgttgagctttaggtcaaagttgaccgttgaaccccccccccccccccccgccaagatttgtagttctgtatttatttttatttattacttcctccattttatattataaacagctttgtttttttaagtcacacttgtttaagtttgataagtttaaataaaaaacatagtagtatttacaacacagagtaaacatattattaaaatatattcgatgctatatttaacgaaactaatttagagttaagttgctaattatttttataaacttgattaagcataaaaaattgactattacttatgatatgaaacgaagaaaatattatataaaacaaaagggtttttaagctccgaaatgtactccttccatcccaaaatattttagaacgacggaagtatatttttggaatcataagagaagaaaaaacatacgaacaaattgttcaatccaattgatcacgtgaatttgtaacaaatgttgttggtggcactaaaacaaaatcatagttacttttggaccaaggaagagaaaacacgaggctagagttcttcttgttttcaaaataaaaaccgctcctcaccgatttatcaaaaatcaatgaaaactagcaaaaaccaacgattttcagtcaatattgtacgaaaaccaactaaaacgctcattaccacaaataatgatcagcggttttacgagaacccatcgtttttaaccctaggctaaccgatcccatgttagtttctcaccgaaattctcatgaaataggtattccataggaacttgttagttttccaccaaagttcttgtgaaatgggccattcctctagaatatcatagaattttgtggaagccaatctgcaacagagtcggattattttttataggattgcactcctatatttcatcaccttttcctttgttacaaaggagcccttacctattacaataattaaatactgcatttgcaaaactttttcagatacaataatggctggattaacagggaaaaattgctccatgttgattgtcagactaaaaaaaatcatttttatgggtaaaactaaaaaatatcatagtaattgtgtggagaggagcaacggaacaccgggtattgctagtgggtgggtgatcaccttcctctcctcctagcgatcacccgtccctccccctgtacgctcttcctctccctctttcctcctccccttcttctcttcctactacagtacaccataatattttttttaagaaaaaacaaagttggaaaatttatgcacagaaatactatatataaaaaatttgaattcaaattcaaatttgaaacgggtatgtaaacttttgacttataaactttgggtctataaactttaaactttagatgtataaactttagatgcatagaaatactatatataaaatatatttgaattcaaattcaaatttgaatcaaatataattcaaattcaaatttaaatcgggtatgtaaacttttaacttataaaatttgggtctataaactttaggtatatatactttagatgtatagaaatactatatataaaaaatatttgaattcaaattcaaatatgaatcggatataatttaaattcaaatttgaatcgggtatgtaaacttttagatgtgtaaacttgaggtgtataaactttaggtgcataaatttactaaaataggaaagtaatgcggtgccaaaaaaggaaaccacgtggaggagaggggggcgcgctaggggcgatcgatcgcccgttagccatttcgcagaacaccgctgccgccgtccgtcaaggactcaagagagccaagactgggctttctcccggcaaccgcccttaaggtgtgagacagcacgacaacgccctcaggagggaaaatgacactcgagcgtcatcgttgttggtccggccaagaccgagctgggttttcacccaccatccaccacctgccaatctaccatacatgcaccactgctccaccgccaactaaacttccgccggcgtgtggggacatggcaccggcgccccccgccagccagtcttcgcgtgcagctaccttgccgggctccgtctccatcggcttcgcctcctgctgcacagccatcacgtgccagcagtcctcgacatcgctggccacgctgcatggctaccggctgcacggctgtcagccacaacatgccggcatcggccagccatagccccccccggccctcgccgtcacccacgcacctcctgcccctccgccgccgtcgcggcctccgcctccgtctccagcgcctccgcgctgttgcgcctgccgccgccagccacaccctccgtcactggcgcccgcaaccaccgcatccacaagatgctaccaccgccaccagtcgtcatcccgctccaccaccgccagatccggccgccgtggcgtcggcgccgccgtcgccatcccacaacaagtgcggtgggaagtgtgctagcacttgtcctcgccagatccagcgcgaatctggcggccttgtcctccgcagccagcgcctccaaactccgccgccacccccgccaaacgcagccgcctgaacgcccttccccgccaggtctggccggtcggcgcggatttgggcggtttccgcctcccaacgccgggcaatccccctgcccttgtgcggtgagacggagcgaagccccgccaccgctgtccttgtggccgtacggctttgccggcagctgctcgggcggcgacgaggtggaggagggagggcggtgggcgacggcgaacggggcgcctcccgtgtcacctgagaggaggtgacgcgagagtagatgctctagtttgtgtgataacagcttgctagttccataaataagaacaaatgaatcggccatcgttgttcccttcgatcaagaggctgccatacagaaataaattacggatctcgctggatcagtcaccacacaccagtggcatgaatatggttaacttagtatatatttccttttaccaccgcaaaacaatacatcgaataataggtacattctgagcataacaatgtaaattagtgcaagtttaatagtacagtcaattcatagttctaaatcatctatagccaatttataccatagttatctataaatatacactacacaattaatatctggttctatctctcatacacgcatagcttcctgaaatccgtatccgtgttgcagttggctataaatttataactcacttcttttctctctgctctctcctctctcctctcttatctatgtacatcactctcacttatagatggcttatactgctattgcacctgctcttatgactggaattggaaaaaggattctcttttgggggtgatgccagcataacaggactttgctgcatacagtgagagtgatgtacatatgaaagtaaaattatgacctcaagaccgatgaacagaagcaaaaccataatacttatggaatgtaaatatacaatcaagtttatgaaatactgacctgtattgagaaagtcagcagatgcataaccgtagattgccctactgttcttattggaaatgaacatggttatctagctctcccaatagctggtgtcaatcatcgtaggtaaccatgataatttgtggttactatcccagacaaggatccacaaacagcaagagtccaatccattgtttcaaaggatgaactgaaagcaactagaaaacttataagctcagagaaaaaggaaacttatgaatgattactagatgcaatgtagagtggtccatgttactaggaccagagttctgctagcagccaccatccagattgaggaagcagattaatgaagaatcaactgggtaagaagtacaaagtgaatttacaagcttccagcactaactaaataatggactcaacctgattttgacatattacaaactgttttagtacaagtctttgtttacatcaatacttattgggacaactgggggtagggatgacagtagtttaatccataggtgcccattgcccaactctatttcacctacaaataaagaaataaagaaaaagtgtgtttttagtaaaactagcggactaatgggtacccatatttataatggattactcccatctaatcagggatttggggtgtactcgaatagcattaacattttcataaatgttaatgttctcatagtattatgtacaaaaaatgtgcaaagaatataaactataaaacaaccttttgattcagtaccaatcttttgagatgaaatctgctctgctgtacaccccaatggtctacaactgaaattgtattgtaaacattagtgtttcacaggtgctgctcatggcattgaagaacactcctttgagtacttcggcaagttgaattgcactgttcgtgcaggaaagtctggtggccgctggaatacaactgaagcagcatgtatcaggatgccagcagtcagaccccatattacgtacttctcactccctttctcgtaattgaagtaatgaattgtgaattcttgtcccatccattcacgctcctcagatgtccttttctcatcctgcagtatttgatcagcaggttgaagatagaaatgacaccaagtcactgagatattccatgatttcagtaaaataagtggtttctttatcccctagtttgttccatatgttgaaaaaaaaaactataatagtatgctattctggttaagtctaaactctaacctatattaccactgtacagaaaactacagtatggaaaactatgtggttggtatcttttacacaataaactggtctcctttgtttttttgttataagttggaaatatcacaaacatgcaacccaggttcacataaaagcctggaaatgtgtgtggtcctttaattagcatggtggaaaagacagtgataataccaaccttgagaaacatctccaagggtacatcgaaaatgctatccacctcatcaacattaagaacaggtttaaatgcttgtatatcagagagtatgccaacaacagggacaactaccagaagatgctgccaaaaatatggagaatattaatcctgatgatgacattgtaagagtaatcttattactgattgctagtagaaacaaactaaaagtaattaaaacagtggggcacaacagcataagaattgtagtggagttggatattaagtattgaagcgaagcaaaggaactacattttagaattgcaacagtgcaacaaagttagtaatttacatgaaaaaacatagaattagcctctcccagctaattcaatttgaagagactacctatatatgtgtaaaatgaattgaaaattttggataattttctatatgagtttcacttgacctcatgacatgacaaggcacaagtaccaagttagtcttaataaaacatgtggcgagcacaattcaaacttcaaaggacaaattagctaaatgacatgtgaaatgatccatcaacagacggatcatactagtaagactagccttcagatgtaatcaaaacctaaacaagacaaccaagacagcaaaagtgaccatgttcacagttccttcaatgaaaaaataatgtgcaccatgcaaagacctatagtcccacagtaacattggtaacaaaatttggttcgtttcaacttacaattttaatattcggtctttgagaattaagtttcatttgcgatgcatgatatcaattcaaagcactaaagtacaatatggttttctgtggcatgcaaacatgattgctaccaaacaagaaaggattttggaaagaacagttagcagcttatgcatcaaaacatctataagcagatcctgagtcaagttggtttagttgcccgtgtttggttctaaaatattattaaggaaaatggtgtatagttccatcttccttgctgtttcatgtggtgtaagggagagccaaatggtattctacctttgacaagaagtgctcaagagaggcaacaacagtaacagaagctggatcaagtccaatctcctcctttgcctcccttaatgctgttgctgcatcatcagcatcaccctcctcagcctttcctcctggcaaagaaacctcccctgcaaaccccagatggaagaaataaaaatcaagcaggtttcagaagccaatttgagctaagcaagctctctgaggcagccaaaaagatggatcagctaaaggaccattttttagcttgaatctgtagcagccaaaacgagcagagcaaaatgaaggttgtatgggtttggaattaaggaaccaactcatattattttatttaccctatctaaatcaattgctgagctcaaagcctttccgtggaccagggaaaaaagggcacccagttaggccagcagcaacagtgcaacactgataaggagaccagcccatatgcaccttagaatattgcatagtacaagcattgcatgatagtttttgaagcatattgttagcatctggtgcaccctacttgtccaagcaagcaccaaagattcaatgtcattatcagcatccaaccatgcaatcaattccaaccatttgtccaaactgttaactcaacaaaacaccgcaagtacgctcctcatgtgctcaggataactaaaatatgtgaaaccagcatcagaaaacaaatgtggtccatttcgcgtatatcattacaaacaactgtcaggccaccatcctattattatgccatggtttatgtcactaatgtcaatgcaaaattgatacccatttttaaatatgatcgatgctcattggatgcttgctatatatttacgccaaataaatagggtcaaagactctgccgaggaaaaaaaaaaggtttcatcataaacgccaccctccacattaatggaatagctgagaccacggtaaaatcgtccttggattaatcgatgacagcctaagatttctgtaagagattacaatttagaactgtagtactcgattatagtttattgctttgcaacttcttccaaaaaaaaaagaaattcgcagcggtatacgcccgaaacagcaattcacctacgaatcgtaaaaagaagaagcactggaaatggcgatactctataagactataaccagtaatttgacccattcccctcaaaggcttctcaccttgcccaaagtatccgatcgatcgatcatatcgaggagaagcagaaaaaagattgggatcgatgataccgaggacagctcaccggagtgggaggagagtttggaggagcgcttggtgaggaggacacggagctcgccggcggcgccgcggaagaggcagatcagcacggcggccctccgagggcggaacagcagctcggccggcggcgcggccgcgtcgggcgagggggccgccgcggcggcgtacggggaggggcgcgggcggtggagcctgaggcgctggatgagcgcctggatgtcggcgccgggtgcctccatggaaggtgggatggtgagatcggtggacatggaaagctttggcacttgggtctgcgcggtcgtgtacagtgtagacggtctccatttataatacagcaatgctacgctggtgtactgtccccgtcctaaaatatgctccatcctttctaaattttctaaattgatcatcatataatcgcataaacacggatttcatcgaaatacaattaacacattatagaagaatatgtacatgctagggtgtaattcgtatgatgctttaatcgaatgcgtacatggtatcttaattgatgcgatttaaattatctttggtcttgatgcataaacatatataatgatcattttgggttagagggagtaataacttagaattggatagaaaatttactattactgtaaatatggatattcatatcttgttcggtcctagctattgatattttggatgaaggaaacacataatagaaaaacagttacaaatataaatttctcaacaatgtgatctaaatgattagaagtaaatcaagatttggtcctaatgtaccatatcatgttatgttcttaaaatatttataagaatctgtttttattttaaaaaattacaagtatatatatatatatatatatatatatatatatatatatatatatatatatatatatatatttgtatacacaggtgcacattcatctctttaaactagatgaagcccccactttgcggtgagatatatggatatatgttgaatgtcgtaaaacttatcgatggatttgatttgggtaaatattgtgaaaataacatgagaaatgataatttagcatgcttgtatcttgaggtttagaatgtactctccctccatccacaaaagttacacatatttcacatttaagtttttccaaataaattgtttctatttttagtttgtatacattcaagacttaaatgaaaagataaattaagtgtttgattagaacctaagaagttatttaaatactcattggttgcatggttgtattcactcattgattttgtaacatccaagatgatttaatttcttcttggtcttagtgataaaaataatatgtgtaacttttgtagacgggggagtaatgaattgtagatgttattattagacatgtatgttgagttttaggtgcttagtggattgacgtggcatacttatcaatagatttgatttggagtaaatattgtgaaaataatgtaagaagtgataatttggcatacttgtatgctagaggtttagaatgtaatgaattgtagatgttattgctatgcatgcatatttggttttaggtgttcggtgggttgatatgacatgcttgtatgttaatctttacgatgtagtaataactaatatgcttgtatgttgagatttagatacataatgagttgtaactttatataatgtatagaaacatacaaacacacattatctttgggcatgtttggaggagaaaaaccagcttttaggttctggttcgttttatgaattctagccttccaagaatctgaaaaagagaagattgattggagtagtttttattccgaaagaagctataggcttagttcacgatgcatatattaaatttgattaatcaagtcgcctcgccatacacatctctacgtggtcttgcatgtatttccatttctatcttgcttccgttatttacgaaaaatactctcctgtcaccaagatgctcaaccttttggacttgaaaaagggaatctcattgacatgtatcaggttctttgaaacatcaataattcagtatggattatttcttccagcggctttttcgcaagtgcccttctgaaacgcatctgtgcttgtcccaagatcgaagtgggagcagtaaataagcaattagtttttgattggttacaaacttttgtaattttttcagtgtgttttgttccctttgtaatctgtaaatattaatttatttttataaaatcacactgttgggcaaatgcctgacagtaatttacataaaaaaaataaacaaaaacattgtagcatttctctgctgttcaacctggtaggaggcacctgacactcatgcgacaacgtacttactactgagtgagcatcactgtatccaatcaaattaacccaaactaaaattgatattaaacttccaaattctgactatacaaggtctgtccagtctccagagcatgtatttttttcctgcaagtacaatttaactgtatgtattttcagaatcctgattccatataattcgacttttgctacatattgcattgaattttttttagaacagaatgagcatcggagtttctaaagactgacgctaatcaaaacaaaatatattacataatgaaataaaaaaatgataaagaaaaggtcgctttgcgtttatcttcttggactgacattggtccatattttcattgcgagtgcttaacttggccaatatttccattatttactctatcacaaaacacaccaaaagacacgcaacatatatgtatccacatcctatagtttagtttccacattctcagcagttctgctgcaaacccgtacatctatctggatctgcctgaccacattgtcactacttgctcccccatattctaatgatgtaatatctttatttctaattctctccaccgtactgctacatcacatgagtatgatatctgaaatccatatataattgcaactggttggattgttttctatgcttaaaagaatagccaagcaccaggcttttctgcagaaatgctgacgagtgatgtagcagggaatctcagaaaatcagactatgacaatttttttcatcatcaattatacagtttaaacaatagtttactgttcaacataccagcaggataaggccatctcgcatttaatagcaattaaaagatcagcctgaagataacggattcacaaattggttaactagtgcaggtagtggactagtgatacacaaagaacaccatactgtcatatttgtctcaattttaattttgaaattttgcaagaagcattcataaaaaatcaatcacaggataaccaaaggtgccctgcagcaggcctagtgaacaatagaagtaacagcaggagctacaagagaaaatgtataagaagatccaccacagcccccagcgcacaggtaaggaatagctgttattcttaattactagaaaagataagcatatgcttcacattacttgcttgaaaataacagatatgagcatttgtgaataagcatcaagtgctaaaagacgacctttgtaagctctagttgcatatataggatgaataaacatgtacgtgtacctgccagatttcttcatccataagagaataatccggcacatgttgtcctatacgacaataatgcatcattcctgaatgccctgaaaaacatctgagatggcagaccatttggaatatctgatagacatgtcaaggatccacatgcagcatcattaccctttgctggggacaaaaagcaagcaatgtgtgaaagaattttaatacgaatataacataactcagaaaagaagatagagcaatatatttccttaccatttggtcttgggtgactcaaggatataggcaagctaaaaaacaaaaatatttccttggtaagttgcccagaaactaaattaaagctcttgatagtactatttaaatatgctaggtgcaaagaaatacacaaaattctaaccaaataaatggtcagaaaaataatatttgtgatatatgtttacttaaggaataacactatctggatgagaacatatcgtacacaatagtggactatcaaaattcaagttcatatgccactggaagttatcatgagaatatcttcatcttcacaattagaaagcatctgctctacttgaagcaacacccttaacatctcatagatctcatccatctttgggtgtgatttatcctctgcattgaaagaatgcacctcattcttcacctcaatccagctccacccagggactttgcttaatcctcgtttcttcattaccctctgcactgttgccctatcactccacatcccaagaccagaatacatgctggacaggagaacataggtagagtgctgtctaggttctgccacaaatagatggctggccacatcgcttgctagttccacattcccatggattctgcaagcacccaatagggtcatccataccatggcatctggttcaaatggcatagaatcaattagcttttttgctttatcaagctgtccagccctcccatacagatcaacaccacatgcatagtgctccattcgaagaggaactccatacttagtttccattgtattgagaatctctgacccttcatctacaagaccagcatgactgcaggaagtaattaggccaacaaacgttatgtgatccaaaggagccttacgttgcagcatctcattgaaaagtatgtctacgttttcagcttgtccatgttgtgcataaccaaatatcatagcattccaaggcactgaactactcttatctgcctcctcaaaagatttccgtgcatcgtcaataatgccactcttagagtacatgaagattagcgagctggaaacaaaatcattggaagcaaaaccagaatggatgactaaaccatgtatttgtttacctaactgaagcacagcaagttcagaagaggaccgcagagccgcagaaaatgcatactcatcggttctaacattttccgaacacatacatctgaagaacttcaaggcatcggcactcaaaccgtgctgtgaatatccagtcagcatagaattccaggacactgtgtccttaagcaccaaagagttaaaacacttgtatgcatcttccatcatgcaattctcattgtacctagtgtacatggcaatcagagcattacaaacaggcgtgactccttccagagcactcttgatcaccaacccatgaattactctcccttgatgatcatcatgcccatgctctgaacatgaacttatgatacttgtgaaactatacatgtcaggatgaactccactctcttgcatcatcctaacaaagaatttcatcgcctcgtcgtccattccattgtgagtgtaagctccaagcatcgcattccatgagatcaaatccctaatgtccccaattccatcaaagatccttctagagtctttcagggacccacattgtgaatatgcagtgattgctgcattcaacactgtcagccctaacgcagatccatacttcacaatcttcccatgcaactggtgcatcaagaaacagcttgggccctcaactgctgtgagcagcgacgcaaatgttgcttcatctggagccaaaccttctctttccatctcaagaaacagctcagtgcagatgccatgtccccagattcagtatacccggcaatgagtgcattccaagaaacagtgttccgctctggcattccatcaaacacctgtcgggcatccctcacgcggccacatttagcatacacatcaagtaatgcacttgccgcgaacacattgttggcaaggccggatttcaaagcgagcgactgcagttgggcgccgatggcaggacgccgcgctacggcggcggagcggagggccgagccgagggcgaacgtgttggaagcgagcccctgcgcgtgcatggcccggaggaggcgccatgcttccgggtgcgcgccggacgcggcttgcgcggcgaggagcgcgttccaggagacctcgtcgcggcggggcacctcgtcgaacacccggcgcgcggcggcgaggccatcgggggaggagcgggagtaggcggtgaggagctggttccagggcgtgggggcggcgacgccggacttgaggagggaggcgtgggacctcgcggcggcgacggcgaggtggtggtggcgcatgcgcagcggcggcggcgtctatggccgcggggcattcgcggaggtccggtatctatggacttgccgattctttgggtcgcggaagtagcggccggagcggcaccaacctcacctccgttcgccggaaatccccagccccagctagtcagctacctccctccgctctccatggcggctgggttgaatcgtcgaagagcaacggaggaggaaggaggaggaggagccatggcggctgggaagaagaagaagaagatggccgacaccatgctgggccgcgttgggctaacctcttggctatcttgttaaattggagatatttaaccatttgccacatttagatgtggcaattaactttttgtcactgtacccatatgtcatagacacatgtggacccatatgttattgagatagaggtgggaaatagttatttgccaaatctaaaagtagcaaatagttaaaagccccgttaaattggtggcccattaaagctgaacaatagagcacgaaaaatggaacgagcaactagcgcatgattacgtgaattatttattattattaacttcataaataagggagttgaaaaaacgaaacgaggaaaataacgtgtcataatttaatgagaaaattacttatgtaattgtgagttcttattcaatccattataagctcagaactatactctatatctcatcctcctctgcacgcctctaggttttcattttgaattttcattttgattccctctatatccatttcgctagttgacatggccgtgaattaacagttaacttattttttaaaatgactgtattgtcactgaatggtatagtcatactcttcaattccctgtatttcactagttgtcctatttgattatatagtatttttagcattgagatttatgtttctaagtaggtagcacataagatctataagttgtataagtacgagcgacaaacagtatagctagccatttcagaaaaatctaatagccaactcataatcaactaaacagtatagatatagagggaattgaaatgaaaaaaaaaggaagaaatgaggcaaaattcataggtatagataggattgtgaaacacttggggacatattttctcaattctaaatggggaaaattatgtttagagcacaagtagggtccaaatcagaaaataccataaaagtatcccattattgcctcataccacagtccgcactacaatattcagtttataccatgaccatggtcgaaaataccctcgcgtcaagtgcagttgcccaaacctaaatgtagtggagttaaaaaaaagcaggggaaggggggagggagtaaaaattcatacgaaataatatcctggattctccttacgaaaaaaaatcgtgaatatatctttttttaataatttacatttatatacacgaacgagaagaatttgcttaaatataccaatcccctaggatgaaaacgtgggactaatgtttgccgtagcgcaaaaacgcgggaccgataatctcgcgggatggtcgcacatcaccggccatggcatgcgttgggtgggcatatataatactgtttagcgctgttaatacactgtttggacattatttaccactgtttattactgttcacagagccagtaccgcgcagcgggacaggttggtaccgtgttttttgagcctccggactgtctcggtactatgtagtaccgctagccaccacagtgccgcatttttgagattcgggaccgttgcggtgttgcacgaccatcctgcaatacagtcggtcacgcgtttttgcgctgtggccatcctgcaatacagttggtcacgcgtttttgtgctgtggcaaacattcggtccctcattttcaccctgtggtacgggtatatttatgcaattttccgtgccggtatataaacttaaattattaaaagaataagtatattcgcaaatttctttcttctccttacaacacgatttaatagccctctcgtagttcacatcaatttgatattctttctcaattactgttgtccgccttttttcacctctttccggatgtgttatatgactttttgatggacatggtcccaaccacttttttttttcagcggcatatatgtcgcactaagctcatctttctcatcttgaatctaccgaagaacataattgttcaccttgtagcaaccttgatgtccaagagcgaagactcatgattactatcgcccaacgaaatgctaggcgtgtgcctgaggagggatgccacaatcatatcatagggcctggtcgacatgaatgacaatcacggctcatcgtatattagtatatattcatatgaacgtgtgtcggctttatggccacgagaataggcaagcaacaataataggaggaggagcaaccaatctcagtccaaggtgaattaagaggagccgaggagtatttgcaataattgttttatagggaggaatcttaaatacatggcgatattttgggtggttttttgcaaatatttttttataaaaaaaatggatcgaaaagcgtcacgaggagcacaattgaaaacccaagctattcactcgataatcaaagatccctatcctcctttcccaagagcactgatagcttcacactagctcgtagagatgagaaagtcagagcacgggtagcctcacaatgacttgcattagatgagaaggtgaattataatagtgatatctaggtagggtaccatcgataattttagattcgtgtataaaagtcgactctaacagaagacacatctgttactgtggatggaggtggaataataaagtataaaccaaagaaagttgtgtaagctgcggtataagacgaccctgagattccgaaccatgattttgtttcctgcctgtgctacactgaacttttcctttaatttgatggctcaatcgaaaccaccgaagagcaagcaagtataagcttagactaaaccgagagttaaataataagtaaataaattaggaggcaatgcagtaaattacttaagtatatatcaaccacctaaacagctaaatcctatcagtgctaaataagtactagtaactaacacacgacgatagttaatgacaaatgcctaaattatatcaatctttgataccctagttgtcaaaagcccaagcgttctccttacggacct

SEQ ID NO: 19639 - DNA, 3414 bp, Oryza sativa
aacgggtggcttgcttttactcgaacttagtagatgcagccttttgatcgatcttaatccgcgctaattaaccgaacagagaggtcgttttcttgtttctcctcggtacggcttggagaactgtttggtgggtcctgtatttatagcatgaatcatcaactctgatccgagacggagtcgatcgatttgctgtctgcatagcgctgtttaattaatctgttaaaatcgagtcagagacgaatcatctaaagttaatccgattcggaatccaagtagtattagtaaggatacgtttccttcatctgcgcatggtaagctagctatcgatatcagcacatcccgggaatcatgcgagctcgccttcttggcaaagttatcagtatcatgatatcgtatggcctgtctgagagcttaagaaataattaattggtagccagcttctgagaatctgaaaaaattaggtttcctagcttctgactagactattttgtggattttacaactacattttctcagaatctggatcaaaagttgaactgtttagaggagcttctgattatagaaaaactgtagcagctatataagcttccccaaacatgtccctagtatcttcctgtactaagattctaccaatcccacctaggcaactgtagcagctatataagcttccccaaacaggtccctagtatattcctgtactaagattctaccaatcccacctaggctgtgttactgtttggaggtgagagttggaaacccatctcccatgcacggaaaacggagcagtctattagcgcgtgattaattaaatattagctattatttttcaaaactggatcaatatgatttttctaagcaactttcgtatagaaactttttgcaaaaaacgtaccgtttagcagtttgaaaagcgtgcgcgcgaaaaaccagaggggagagttgggaaaagagagtaccgaacacagccctagtatcctacttttaaagcatctcaatcatactattcattttcacacgatctaacgaaatcttaggtactactacctccgtcccaaaatatagttatttttagcacagtaccttattctaaaatgaagctatttctccacctacctttttctcttaaccaattacaatactacgattctaccaatcccacttagtatcctaattttcatatataatatctcaatactattcattttcacacaatgcaacgaaatcttaggtattactgcctccgtctcaaaatgtagctatttctagctcaatacattgtcccaaaatgaagctatttctccccccacttcctcctctcaaccaatcacaaccattctccttcacctactttttcttttcaaccaatcacacactttctccaaacattctcacatatcttttaatactcgtgtcaactttaaaaatgtctacattttgggacggcggaagtatctcaatattacgatcctaccaaatattatttaaaatcaggtagatttaaaatattgtgaataaaaatgctcaagtttacataaaaaaccaattaaatttatctaaatcaatattatatgctttaatttatacaccatattatatatatatatatatataagtattttctaacatctgatagtatcccgatactatggtagtattatgatactacatataaaaaaagatcctacctagtatctcgatactgattatttggtcggtggctcggtggtttcagcccatcgtcgcatgctcactaggaggtttgacggtctcacacccccctcccccccccgaatctatctattatctatccttttttcctatatagttggtacccactatagcattaactcctataaagtttgctccaggttaatccacgtcctcggcgcatgaaaagccatccgatcaaatccacatccagcatcaactgttgtttgctctcttctctcatcaagctaactctcgctcccccacccataagacgcccatcaaggcctgtgttttttagcctttaatcttcccctcccatccattgaccttccagaatatagcaattttctctccggcagcgaaactgtcgtcgtcaaaaggcatccgagtggtcatatttataattcatttattctcctttcacctaatgtatattttcataattcaccccactaatccttgcgatcctcatatatatcatcgttgatctagctgctgataatctgacatcctctacttccaactacccacacactagctacctccctccgctctccatggtggctagcgcgagtgggttgggttgaatcgtccaagagcaacggaggagcaaggaggaggaggagccatggcggctgggaagaagaagatggccgacaccatgctaggccgcgttgggctcacctcctggcccacagagtagcacggtcgctatgtcccgggggcgacgtgggcagcgaacaagccgcgccgcctccgcccttctcctccacaccccagcctagtcgccgcccaagccgccgccgatgaagccaggcggctgcaaggacggcggcggcggggctccctctccctcgctcgtggtcaaaccggatgggacgccggcaagacaggagctcaggcttggtgctggcgacgaggagaagcgcccggcggcggccagatccggcgccgtggaggccggatccggtcctccatggcgggatctgctcggcggcggggttggaaggtgggtcgggggcggcggcagggtttggcgacgggtcaggggcggtggcgacctggcgtagctggcgacgggtcgctgccggcgctggctcccctagctgcgcacgaacgctggcggggtggcgactggcggcagggagggcaacggcaacagcggcggggagggcgacgacgaaggcaggggcgcgcggcgcctaggcggcggtggttgtctccaccgtgtcggcgccagttcggcgagctgcccctctgtgcttctgatttctgtttgtgctccgcagccgctgtcctcactctccgaagccgctgtactcgctggtccctcaacaccctcctcaccctcatctcccttcgttgccgcttccttaacggtgcgggcgagaaggtctgggagcagccgcacctggctccggtgacctgctcggcaggctagccggctaccttggcagatgcaagcctgcagtttggatttggggagagagggtgaaagccgtgcacacccccggttgtgtgatcgacggcgacgccttttggtgccatatacctccctggaggcattgattctagtctccccaaccaaacctacaaccatctgctcggtgctctattcgtcgatggaggcatccgtggatgtcactttccttgctgaaggcatcgacgcaagcgtgccccctcctgcttcgcccttttgctctc

SEQ ID NO: 19640 - DNA, 1475 bp, Oryza sativa
tgagaatggtaagctcattttacctctttttcgctgcccgagtggatcgcaagttgtattgcgtgggttgcgtcccctgaggcgcgtcgggaagctgtgacatgtctatctcctcggcgtctggtgcgacgtagtcctcatcctcctcgtcctcatcgtcatcgtcgtcgctaggtggagccggcgccttcccctttcccctcccttgcttaatgcgtgacgacgacgagccaccaactccttcacgctcttctatcctgatggagtgtcgagcagtacttggacgcgcggattgaggtagtggtggtggtagtctccccggttggtacacgtcgtccaatccaaccgacctgcaacctaatcttgctgcaagtttccggcacctttgacgaactttctgcattgcaaaaaaaaaaagaagtttgttaggcatatctcaagtaatgcaaagtgctaaataaattttacctctaaaacattgcggagcgtgttctccgtgtcctcaccacccctcggagcttggagggcatgccccatttcattcacactcctgaggagctctctcgactgaaagcgtgaaaagatatatgttagggtctagggtgcaaatggaagtaactttgacaaatgcaagaaaacttacgactctgtctctaagtggggcgtgctccatttgatatccaactgtagtccggacatcatagggattccgcccctcatcggagtcgcggtcatcctctatgtcggcttccgtccaagtagggcggaggaacagtctatatgtcctatgcagccaacgaaggtactctgagaaaagatgattttggtgtatagtctcgatgtacctatcgtccttccggctgttctccattcatcaatgtatctattatgctctagcccccagtctttcaccttctttgttctcaccctgtcatacctagacaagtagaaggtgatgaaacagtagtgagcatcgacaagggttaaatggtacaaaattgaacattgacaatgaaagcaaacaaagataagaaatatttacttgtgtaattcaactccagttgagatgtcctcaaccggccaatcttgtttcttcccgaactgtcgcatgacacggtgcggaaggtggtactcaactgcccagaaacaaatcaatgggcactggtacatgaaatagtcagagtctcgattgcacatcgagttcagggtcaggcttgaagcctcatttgtgtggtatggtaaccactcaatctgcaaaagttgaagagatgtcgttggttagtatctcaattaaagaagtaaatgtctaactagaagtgatattggaagtacttacatgttgaggctgcaagcagtccatctcattgacataatacttgtatgccacatcccggtgagcatgtgcagtggcagtactctcaaaaaggtaggccactgtcttctccatgtctggctcattgtagggccaaggagtg

SEQ ID NO: 19641 - DNA, 15790 bp, Oryza sativa
  unsure (1)..(15790): unsure at all n locations
ttcggaccaccaatccacctgaagttgaaagattcacaatgttaataggatttcaagtttccagagttgatagcacatggatcatgcaatcaatggtactgaccagactgagcttcagaaacaccttcctcagaacaggtgagtggttgacatattggcgtagaggcaagaaattatcggccatgcaccattcacccaagcgcaaggttctgagattcctaaacatcggcctacttccttgttgttccatgaatgtaaacttcatatgtgcaaagcaaaaaattacaagtatgctatgaataccaataatttgtggcaaaactgtgataaataagagaatatntctcctcctcgggttatatttatatatacaacacctcacaaatatgtggtcaaggtaaaagtggtatatacattttttaaaaaagaaaagtggtacataccaattttttgaaaacccaaagtgtattatacattttgttttgaaaaggcaaaatggtatatacatttttttgaaaaggcaaagtgctttataanattttttggataaccaaatggtatatgcatataatccaaaatgatggttcatgctttccttgctatgaaataaatactcactatattattttctaaataatatagcaatttcattcacgtaagtatggtcacataaaaattgtatgatgtttatggaagtaataaaatgtctgcaaaaagggattagtgatacctgtctatcagtagctgtcaactctatgcttgtgacatctgaagcatcaacgagagtgattgttgtgaatgtcaggtaagagtttgtaaatgaaaaactgcccgtttgttgacccttgatgcacaacgagaccaaactcggagtacagatgcttacattatccagaagagagcaaccgatcaaatccaaattttgtagtgaacttgaagaaatgtgttgcacctccattaaacactcttttagtaccagattttccaaaaccgggcatgcgttattgagacgatcaaataccatctcatttagagctgcattagtcagctccaatgtttttagataccgagaactgaactccacaagttctggatccaagtaaaaaggttcccaacttggatactcagaaaatttaactactttagcgttgtgcttgatagcatggttgatccaagaaccggcccggtccactgcaaaagaatctagctggaatgtatccatagaagcatcaagatggtcgcggcttagcaatagtttgtcaatagaactacggaatttttccctatctaggcgaaaccaatttatatcaagctttattgactgcaagcaagtccacttgttgacccaccagtgggacaggacactcgtgcgcaccgcctccttcatcgacaagaaggacattatgtggtggatcagatcatttgggagttcgctgatcctatcttttccatggggatgggagggttccttgtggcctgcagtttagaactggatactgagttacttaaattcagtgtgaacaagttttgacattgattcagtacatgcttcttagtgtaggtacatgatcttggagaaccacacaaacaactcacaacaaatttacaatttctgtgtgggcttaaatctagattcacagagatattgctatcttaaatacactttacataaatgataaaacattgccctagtagctttgagtttttcgtttttttttaaagaaaaaagtaaggaggtgaggctcacacatcaatcatgtgttgcaccagaataacaaatattctcgattttgcaccaaaattaccaatgtgtaaaggatgaaaacatgaaaaatgctttaactcaaacatgggatcgggttgtgtatttacaaattttattctcatatatttttcatgtatcaacctgtctagaagattataatcatgtgtagactatggagaaaatacatcatgtaggcaacataaaaaaaaagaacatactggtgttcaaattttcaagaacttactgctagatgatgtcccctgaacatttccttctgcctggataatttggccctgcttattcttctgatggagcaagaaaaatgaagaggttgaagcttgctgatgaatatgcagaaaattgttcaacatcagaggatatgaatcatccaaatcgccttttatcagactaatcctccgtagataatcaccctatgtagtgcgagaaagaaaaatcatcagaacttttatttaaacataaaatcctatattgaaccataactttataataccagcgaaaacatacaaagttagcaaagagagtgttccacaatctggcaagccaagaataagtgcaaatattattgaatggagaatgaacctaaacaaagtactttctatatgaggataaaatcaatatattatagattttttctagagatgcacatatataagtcaaaaaaacagaaaaggatgatttttgtcaactatataaaaagtgaatcgaaaggggaacataaataattggaattgtttatgaacgatcacttcaattaaatacaacatcaatcctagtggcttctgcgccacagtaaaggaagagtaataaacatttttaattagatgcagaatttgcatagaacatcttgcaaccatatgttttcaagtaagatggtcatcctaacggcctcacacaattgttatagctctaagtagttctagacttctcggcaataagttattgtacttgtttaggagctttaaggttaacactattaaggtgttactattaaggttaacactattacgcgcattaacagacataaaaataaaatttaatacctaaggaaatttgattgcataaaaaactattaagaacaaaccatcgtacaaagtcaatagctattttgtagattctctcctctattctagcagcaactttttgaagatcaatcaatgttgtagaagtagttgtttgcaatttcatctgcaggctgaacaatctgcaagcagaataccaaatattaatacaacatatttaatatttcactatggtacttcactgtttaatattaatccaaaatgtggccagtcaagaaatacatgcatgctatatattcactgtttgagaaatgcatgtttgtgaaagtaacatgtttggaattgtagatacattctcataaatactgaaatatcatttgtccaaccaaaagtgtcatattttagcaaatttgtgccatcatgtatgctaagagtttggaggagagcattcataaccaataataaggaggaattatgtatacgacaaacaaaacaagatggatgtgtgaacatgggaccatctttcttgtaagttttaccacctacatccacccccccccccaaaaaaaaaaaagaaagaaagaaagaaagaaaaagcacctaaacctataagtgatatctaccaacagatttttgcttttttctggagtagctgcatcatctcatatatttttcattgtgtaaggtggactcagttacacaattgcagaaccaacagtccaacaccatgacttctccagttcttcctcctccctcaaggtgggaacatgaatcaccttaagggttttaacacctactccaaattaaatatgctagccaaaaaatttgaaagacagaacaaattaggagcagaactaaaacactagtccataaagcttatacccatgcaccatgcaaggaactggccacataatttagtacggaactattgacatgcaaacttagttcattttcttttggcgatgattcatttactagggtaattttctaaatatgaaacaacttaccttttatacttggatacgatcaaaatacaaaggtttgagtccaatcaacaacgttttgcccagaacaacaatgatttttaggtgatttgggcatatggcagagttagagccggagttgaaccaaacaatactagatcctcagttttctaaaagtgaagtgcgtggatctgctccacaagatatgcagaaagggtggagctacctttttttggatccagaacttcagctacatattagatttgtagctctaccaaacaaatctaactgttacttaaatctagaaaacatcagattggatctgactaccgatatgatgattcagttagatcattaacaagtatagcatggatgacgatttccaatcttgataataaactatcatcaattcaaaactttgtaatcaatttctcatggaaaaaaaagtaagaataggggaagagagagacgaggagggggcacttacatatcacgttttaccctatcgcgaatatcctggccaaggcgggtcctccaatcgacaccttcctcgatgatccctaactcgtccattatgccgattaactcaaatctttgcttctttgctttcgttaggcagaagaagtgctcagagatggcgaagaacaacaagaggtcgatgatataggcagaattgaaccttataggctttagttgttggtgggatccacaaaagaagtaacgcttccgtgggagaagggtatagctcacatgacatgacaaaattacttataacacgggagaaggatatggcccacatgacttgacaacatcacctagcttataacatgtgaggtagcttctagaacctcaatagagacctatacaaaataaaattgtggcaattgacttccaatatctagggttaaaaaaatcgaaaccgaaaatcaaacccaaaataaccaagacaaaaccaaaaaaactgaagcactggtcaatgttcccgacgtcggtctcaggtttgcaaaggccaattcttatttcagtttatttggtctttgtatggggtatccggactacccattctatttacgcgttatccgaatccactccttattcctcagcacatccttgtgcagttgcgctccgtcaactgccgtagccgacacccttcctccattctggtgcttctctccctcttcttcccgccttagaatttcggccgggcccacttacatccggcagctttcataggtcatagactgccctttacgcgttatccgaatccactccttattcctcagcacatccttgtgcagttgcgctccgtcaactgccgtagccgacacccttcctccattccggtgcttctctccctcttcttcccgccttagaatttcggccgggcccacttacatccggcagctttcataggtcatagattgccctttacgtgttatccgaatccactccttattccttagcacatccttgtgcagttgcgctccgtcaactgccgtagccgacacccttcctccattctggtgctttgcgcactctggcagtgcagttgcgctccgtcaactgccgtagccgacacccctcctccattccggtgcttctctccctcttcttcccgtcttagaattttggccgggcccacttacatctggcagctttcataggtcatagactgcccccacagaccaacacaagtcttttctgcacactttgtcctcattcatgcgcacccgggaagaatttccgagtcggtcacccatcccaaattgctccaggccaagcacgcttaaccttggagttctttagagatcggctttcggaaaaaaagttgcaacttgttaatatcagtatcctattaatcctattaagccctaggtcggaatgttacaacatggttctcatcccatctatgcatccacctccacttctagtcgggataccctcctcaggccgccatgcatctacagtaaggtggaaatggtgggggagaactgaagctaagggtgtagcagctggtaggttatggccacgatggtgcctctccggggacatgttgcagcttgcaagggcctatcccctccgtgtaattcgcatcttcacactgctactagcaaaggctgccaatagcggccatctcctctgaggagagttggaagtccacatgaaagttgagaaccacatctggacccatctacatgtaagtgtgcggtttgcctgcatgcagtcctacatgggagatgagtgttctattctggtcggtcataccaagaacagagaccaaactatttgttaaccgaatagtcgattcacacatttgtgctgacaagtgatcagtcttccattttcaaacaccaaaaagactggactgaattatcagtcatgacggaacactcacccctagcaatatctatcaagaagcagttgtattataaagtggatcttatatgatagtacgatgtggtgatttaaaaaaaaaaggaaaagattgggattaatttatccctaaaggtatttctcggaaatgtgtttaacccggagctaaaagcgggacgtttccacccaaagaatagctagtgtcgccatggttggccaccccaacacgccatagttggcgtcacgtcttcatttgcatgtgcaacgtacgttggcattaagctgtctacaagctgactcaaaatcatcatccaggttgacatgcacaacgttgccatagtgaatatagatctactactagtagtagtgttattctcctatatatacctctctccaaaaaaccagtcgaaattgaactagaaagaccgacacgatgtgcatgcaaacgaatgttcagcagccgctcccctagcacatactgtacgtggatgccacattataagggataccaccaactagtttggatagacccagtttttaaaaggagttcagggtgaaatttggactatgattaatgtgtagtgacgcacctcagactaccattgtgaaaagtcatatgtaatcctgtcaaagaaaatgcagatagaaacttcataggtacagtcatctggaggagttggtttgctggctagatgccctcgctttaaagcttttaaaatcaaatcacttagaagccccaaaacaaacagagacatatccctactattataaaaattgaagatgtttttaccagaattttaataagtcatccgtatttgaatcggttttatctatatatttacctattataaaactgaagatgattccgtactcataggtagtttcgtccatcctggtcatgctggttctgtccgattgagttcctattgatcattccttttttttccaacatgagcgttgaatctgcatcggcggcgagcaaactagagcccatatagcttccggtatttttttatccttttttcgctgtttctttatcacactttcgggttttttttctttcgtttttctcgcatctcgccctttttttatctcgtccgatccatctcacgtgcatcccgccaccgccgagacataccctcagcgctgatttttgaaagaaacggaaagaggtgatcgagtggatttgaggggaggattggctcaggcatacagtcacataactgccaccgccaagacaaaccttagcgccgccattcgattttgggaaaaacagaaagagcagatcgagtggattaatagcccttaaccaattttgggagatcaagaaagatttggatgaatttgaggggacaattttgggagatcaagaaagatttggctggatttgaggggaggattggctcatatgaccatcttccgaggttaaagacgactgtcgatgtgtgagcggggtttgtggcctcacttgtgggctaagctcgagaggagagagagagagggagagagaggggggtagtggactgggtggggctaaaaagaaagaaaagaatgggctttcagcccaaaaccaagaatgaatttttattaactttttcaattatgattatacagcggttctaatggttcaatttattggcaagcttccaatagttgttgtatccctgaaaaacggtttctccgttgctacgcacgggcatttttctagtatctatactaatatataaaacgcaagttgtttcttccctacatccacccaagaaagtgtacccataagtttcctagctgttggatcctctaatctaacgatgtacattgccgattggattaacactgtgattagtgtcggattaacaccaattagtgcttcgccaatccttctcttcgctaaaaaaaacggtcgcccgtgtctccacccagaccacccgcccctccacatcccccccaccgccgtccgccctccaccccacccgcacatcccagccacccgccctccatcctcgtttcttaatttctctatttatcttgttttcttccacatttacatatccaaagtggaattcttaggttggacaataccacactttgctaccgtctgcctttgcagggcaggagagaggagggtcagcattctaatggacgaggaggatgcagaccactgccgacatggcgaaggggctcgacttcctcctttgcgcttagatgctggccatctaccaacttcaatccatctaacatcctcctcgactcggtgagagctagcctgtcactttgctcaactgcagtacaattttcagtcattgaccaacatactcttagtactgtcacctattgttgacgcaaaaaacacacactaatcagcacatcaggaactatcttcttgatcacatcttgtagtgtactcatcaaaaccccagactgattctagtaaaaaaaaaacccagactgatcaaacaaggcatgatgaaatgtttcatcaactttatcttgagatgtttcaaccatcggcttaggagattgtcccttgttggcattgacttcctcttcagacatgttgggtataaaacacgtgtcccactgggcgtgccaaaaatgcgttgacgcaaaaaacacacactggcttgggagacctgcttagctctagtgcaggtccaaaggttgatgagatgcagacgtgccagttagtttgaccctgcaactgacaagatatacaaatagcagatcaataagccgatcggctgacaagccgatggagtagttccagcccatgccgatacaagccgatagcgagagggtttcgaggtatcggctatgtgtttgatgtggagtctgacacttgatgtaaataacaacataaaggcaatcggttgatgataatgaaagaaagcaacaatataatccagtagaaaccaatcggctaacaatgacatgatagaataagcactaatccgaaggttaaagcatacatctgctggagatccgatgtcataaaatccacaagattagataaacaataaagtctttgttgtcatcgtctaaatccaatctatatgcaatccttgtaagccgatgcaacgtacagatacctcatcgactgaaaccccgatgaaacccttattgggaatcatgtatcattcttagactatagcaattcagtattttggctgctgatgaaatcattcttgactgaacatgtgatcagtagcatttgtggaaacttgagaataaaacttcagtcaactgcatattgtttgcacaactctaattataatttttcctatcatttgcatgagtttgggtgtacttatttgtttgtgcaaatttaatgcatttttaacattatctgtctgaataatgataccgtcagaaaaattagaacttatactccatttgatatattatgctaacatacatgggttccacatgcacacacaactatgtaattaatgaaaataataaaaaactaacaatttctaccctttcctttctccattaatattaaattatctctttactgtccgattgctacaatatttttatatgtattaccaaataatggataaacatagataatatattttgagaaagtagcatgttttatttgatagtatgatgaaccctgagctccactcgagacactcaaggctgttgttggcctgatctttcgatgagttgatgataactacgatttgggagaaatggtgatgacccgactacaaccgtactagacattgttgtgttgcgccttagcgatcgatacacctcttcgtgagttgttgatcttgccggtgcaaatcaaccttattactgcaaacaaatcgaagaaacaagcaagaacaagataaaagaaatccgaaatgcaaataggaattgagtacaaatgataagttggggttccgtaatgagtaaaccggcgatctaaccgatcacgggattatatggcaaagtagcaaagctaaactttaactaaacaaaacccaagaaaccctggagggatacctagctatttataggggtgggagaacgaccaagggtgccctagggttgttctccaccaggttggggcacaccccacatgggccccacttgagtcggggtcccagacaaagttacaagcccataggccctttataggtgacgcaacatcttgtttcttcaattgcagctcactaagacagaatttcgcaatgagattggatccattagaaagaggcctcggagagctttccatcaagtactcgcggaccaaaaacagagctcgtatgcatatttggcggccgtttgaagttagcaatgtagtaggtggccgaatcgaattccagcacatggaggacttgatcttaatgtcttcttgttgatccatgatatgagcaatggttgtatccatagttgccatgatcacatcatagttcagcacctgtaccaagtcaaagcatacacaacaagcattcttgatttggtttgcgtattttgcaaacaacgttgaaaggctaacttaataaaactttattctaaggtcaaaacatagtagacctaatcatggcttaggcagtttgcatctcttgacgatgttatcttcatagttcttcatttctccctaggaattgactggctgatggagctccctcatcgtcacgatcacatccgtcgcgtatatactgaaagggaactctaacagctctctcctaattgattggttcatagaactcactcttggtcacttgttgtggtggtggatccacttcatcgtcaatcgattcatacgatgccatgagtattgcagcactagtgagtctcgtgggcttatacaacgaaggaggacgtgtgggagtaaggagatgatttgataatatatttatcggcagatgggtacaatgagtcaacgatttttggatgattcacttgcatgtaggaggaaatgacatcacataccatatcattcacaaatattgtcggtgatatgggccagggggtacctggtctaaggggaaggaaagcccttcctgtgtggcgcgcacagcgggcccggtccccctcagggggtcacgccttcgattgggaagcggctgcctgtcccccctcccctcccccgggctcggggtacctcgtcgtacccctcgggcccgaggggttgaaccgcccctgaggccctcgctcggccgccacgtggtgaccacgcaggagcctcgagcaggcgtgagcgctgtccaccaggcgcatttatgagcggcgcgccaaccgccccggtcgcatttaatgcgacgtggcagggcatgcgccgttcaccgatggacgtgcgcctagcgaccgccttttgaccggtctgtgacccggtgatggatggatgggacgggcgacagcgcacccacgtcccgattcgtgtcaggcggcgtgggagcaggtatgccctgtcccatcatgcgcagtgggaggtcctgcaggtcgtcatctccgatgaacgtgtgcccatgaagtcaccaaacatttaatagcgaatgatggggggtgccccccgtgtcagccgtaaagttccggtgggggccacccaaggttagccgcatggattgcttccggcccaaggcacaagatgcattttaatataggcattgtgggccccactcccgtgagaagagagcaggggcgatgcatgtggtatccccttcatctataaaaggaggaccatgccctacgagaaaaggggacgtctcttagaaacccaggtttagggaagaggctggctaagccctagcttgtactcccaggatctgaagtctttgtaaccccacgaagatcatcacacacagacaggagtagggtgttacgattgatagcggcccgaacctgtataaaccctctatgtcaccctctcactttccacctcgagagcttgattcctgtagactcgcctcgctcggacgagtacacgttcctcagcattgcacccagtcccctggccgaactcacaaggggggcctcatagcctcccgctagagaggatcacccctcgacaaatatatatttacattgttttcatcttgcttttcagtgagaaattacggcatggctaactcctatgatctgttagcaattgttgttcatggagttgaaaaatggacatggtagcctcagaagaaatgaaaaaatatctataattttttttttttgcactatgtgaccaatagttttacatacgtgttaaaaagtcacatgtttgacataaaaaaattcaaataaaattaccccgcatatcaagtcaacttttttacaaatttggcatacaataaattttggaatatataaaagaaaaaagtacgaattaccccccctggtctatcacggtcgatcgaattaccccccctgaactacaaaaccggacatccttcaccgcgaactatgcaaaccggacaaataacccccctggctcaatccgcagtggttttcgtcctacgtagcagtacagtcagcaattttattttgttttaaataaatcaatgggccccactgtcagtttcaccctctctacctctccctatcatatctctttccccaatccccctctctcttctccctcccctcaactccagcactcaacggtggtggtgagccgaggacggcggcgaagaagctgggtgctgcggaggggggccaaggacgttgcgggtagttggcgcggacgtcgcgctccacctccgcctccaccgtcggtcgcccaagctcgccgtctccactgcgaccactcgagctcgctcctccaccgtcagcggccgcccgagctcgctccgcgtccgcctacaccataagccactagagctaccggtcgttgaggtaagctccacgtggatccagccaccttgaggtcaagcggcaccacggtggttgggggtggcaacagcgagaaggaggttggggacagggatgacgctggggagattgggcggcggcggcgatttcgcatagagacaccggtggattcgtgcaaacgacgcgctccgcctctacctccacctacaccgtcggccgtccgagcttgccgcctccaccgtgaccacctgagctcgtttcgccaccggcggcagcctcccgagctcactcctccaccgcctccaccgccggccactcgagctcgctctgccactgtcgccacccagcccagcgaggtccacctccaccgctggccacctgagaaagagagagagagagcgcacaagggggacttggagggatttgattgaggaatatgtatgacttgtgggcccagggaatttttttttattttatttgctgactagattccacgttggcgccacgtgtacaagctcaactctaaaccgctatgaacaatgctcaaaggggttatttgtccggtatgaatacttgagggtgtaaaatatctggttttgtggtttagggggtaattcgatcgaccgtggtagttcgtggaggggggtatatcatactttttcctttataaaaaaatatttattaagattggatgatggatacacatctctactacacattttcctttaaaaatcatttttttaaagtcacatgaaaagaaataggtccaatcagaaaaatctctatttttaaagagttccattcgcatggcaacatgcatgcggagatggatggaaggaataattccaatcttacgtgacaatatgcatgcggaataattctaacttgtatggttgatagcgtgcatgcatgcagagatgaatggagtgaattagtctccaactaatatcttttctcctttttgcgctccaacaagcaccgctgtctataaataaccggtgttgggtgaagcctacaattaaaataccagaaatgctcatactatcgtcaacctccaatagtaccctacctttgtgagctggtaaggtgctattatcctttcctttgcttttttttttcatttttagttcacattcctgcatgtatcattgtgttcatacaaatatttgtagaaaccaatcagtttcaccttccagcaagttcaagatgtcgggttctatggggagtaagtcaggtagcgggagaggcagcggtaccaccagcaacaaagttcagtgaacaggtaaatgaaccaacagtgaacatggactccatagatgatgtataacctcctacaaatctaaacacaaagagagaacaccgtcaatacatgaaacaacatagacctgtcagaatcctttttgactatatgtacgatagtaaccatcatgttgagagtgacacggaaaaaatacaagtgcaagtatgaacacttcaaggaggaatttactcggcatatgcacaaagtaaaggctacaatcaaaccaagttggccatcatggatacattctattagatagaactctttcttttttactcccctttctttctccctccctctcttgtattctctcacttatgtacatattattatttattaatatagcacaataggagcctctcctgctgtttaaccgtaaaaaaaaacactcgtcatcacttgtggccgatcttatccattgcgtataacagcacttgtcaacactcgtctaacaactctctctgaattgattggttgatggagctctctcttggtcacttgctgtggcggtggatccaattcttcatcaacagatttataagatgccattagtatttcatcaactcatgggcttatacaacgaaggtggatcgtctgttaggagagaggtgaggagagggaggattgtgtggaagtaaggagataatttgaggatatatttatcgacagatgggtacaaggtgttaatgaattttgatgattcatttgcatgttggaggagataatcatgacaaaactaggtgggactcgcatgtaaatagacacactccaatagaaatacaatacttataagcatgccactatgcaacagaattgaatgagctgtcactcattctcaccccatcactaatttatcacattatatcagcactagaatttaatattaaaatttataaacattattgagatttgataatggataaacatagaaaatatatttctggacatcagttaccatattgttcacaaatatatattcacattgtttttgtcttgcttgtcagtgagaggttacgatgcggataactgtcagaccctaaaaaccgctaaattataaattgttgtgaaaaagaaatttctaggtatttttttaataattaaagtaagtgttgagctagataaaacttctcttaaatactttgagtgttcatgtattttctatattcttcccgtaattttttgagctttggaagtatatttaataagtgaaacaacatttcaacatttatttaaattaataaggaattaaaatctttcttccttccctcgggccaaatccggctcactcctctcctgtctaccttcctcagcccgcagcccgcgcccctctctctcgtccggcctagagagaaagaaaagtctcctttgcaaccctctacctcccttctctctgacgcttcgggtccactcggcacagtgccgtcttcctcctccagccagcctcactccccgtgcccgtgcgttgcaacacagtctcctccaccaaatccgcccgcgccgttgctcctcatccaaaattgatcacgga

SEQ ID NO: 19642 - DNA, 4384 bp, Oryza sativa
aacgaacccgagcgccgctgcctcccgtcgacctccagccgtcacccaccgttgttcccgccattccgaacctttgccgtcgccatccccgtcatcgcagcgccgaggagaagcccgtctaccccttcgatgccgcggcccgtcgccggaaagccgccgcctgcgccgacccgagctcgccgccctttggagctcgccgccggtgtctcccttcgccatgtgtcatcgtgtaagtagtggtaaggatcgcctcggtcccttcttcctccccgtgccctctgtttccgccggagcaccaccgttcgccggcgaccctcggttcctaagccggcccgcgtcgatcccgcatggcttccacgtcgttgccaaattaccaccacctcagcgccacgtcatcattctgtccacgtgggagccgatctaaaccttggatcagcttcaatctaatcggttggatctcaatcaactggcggtcaagatcgatctgagccatccatcccgtggacccgtggaccattttgtggacttggttcatggtagcggctccatgactagtaggtcccacctgtcatcaaccttatctctcttctctcctagtgctgacgtcatattcctctacttttgcgtacaaacataattaaatatgatgcagtaaatcatttagttcgtttttatagggttttattattaaaactttagtaattcataattaattcatatgaactcggaatgagctcgttcaagtttcaattcatatgaactcggaatgagcttgttcaagtttcataattcatatatctctactcatttatgaacttcagttgtactgtttatttggtttctattagtgttttctctcgttctgtttatgaaggatcgttcgttcactggagaagttcctgaagacgaagatgcttatttgtaaggcaagtcacacagatccaaaataccctttgagaatgctgaacacatgtttaaaattctctatttcaatcaaatatgtatttattttcgaatgtcattgggtggtgagccttttttctcatattatggccgaagatgattttattatcttatgggttataatttgactaggttggaccttatatattggttcagctatatattagatgtaattgtttatccatgcttagaaacattagcacactattgggataatgaatgcttcacaattacttaatgatggctatttaatggtagctcgtgatggtaaatcatgattggttaattaaataatcgccagctaaaacctgataatggtgagttgtgagcatagtgttttggtggccatgctgatgacaattaacgaccagttcgcaaactactgttgtgataatgataatggttctgaagcatattattcctccctctccctctttcgatcttctaattggaagaacaaaagagtgggttggaattcggttctttcgagccttgcttgggctcgttctatctttgaatatagcaatttccattccacctcaatccacattcctttcatgctttgagcttccaggaaatcacggttgtgggaaaccacatcacggaagaaaacttatcattcctcatgatcccacagatcctgataagctgcctggagaatagagaaatcatccaggagaatagagaaatcatccattgctcggatagagtcaagataggaacaaagtgccctctctaaaggtagggttccatcagaagtacagctccgttcctcacgtagagagctagaaattcaagaattacatccatcctaacacttgatgtcctttcttccattaagaagagcctcagtcgcccaggtatgttctcgagagggttgatgtcattcaactactgttgatcctactcgtaaaggctcagacataagccaacgtgagcaacgtctggatgcgttgtatagcaatatggttcattgtggagtgccagactgagaagtggcagagagtccacagggttgctggggagtctatacctttaaaaagggtgactatgatccggggatagtgcattgcttttaattgtgtcatgcgaggtgtcttgtcacaatcctgtttcgaggtatcgtggtgctactgatggcatggctacatgttatgggctatgtcttgtgggtaaatttatacacctccggttatggggcgagcctaacaatgttttttcgtgattagtaccagaatattcattaaaaataataatgtgataaatgatgatgctttggtttagctcctggtttggagattgggtctgttcaaccgagcatggttgttcagatatggtggggcatatgcaacaggtatgttgtatatcattggattaataccttttaattaattactctactgttttacaaattctcaactctttgccaaatgcttcttttgcaaatgaaccctatattatgccatcctatattatcgctgtgcacttgcatacttgttgtgtgctttgtgaagtatttcatatactcgccttgcaataatcatcaaacctcacttggagacaaaggattcagaaggagaaaacctttgtcttaaatcctatttgagttgaagcttcgctagattttatttttccgctgcaattttcttcgtggtgaggactaagttattcttctgtaagtattttatcgctttacttattatgatattctgtatattaaattgtcctttcatgcacctcggctaattcctagacgaggatattaatgcataaattagttcgaaaattatttgttagcaattgttgttcatggagttgaaaaatggccttctagcctaagaagaaacgaaaaaagatttataaattcgtttttgcactacgtgaccaatagttggacatacgtgttaaaaagtcacatgtttgatattaaaaactttcaaataaaattaccccacatatcaagtcaatttttttaaaaaaaagataatacaaatttggcttacaatactatttcttttttttaatattggaatttataaataatattattaagattggataatagatacacatctctactaatataaaatttagttttttaatgtcacaatgaaaggaataggtctaataagaaaatctctatttttggaaagtttaattcgcatggcaacatgcatgcggggatggatggaaggaatgatttcaatctcccgtgcatgcggaataattctaacttgtatggttcatagcgtgcatgcatgcaaagatgaatggagataattagtccctaactaatttatcttttcgccttttgtactccaacgagtaccattggctataaataatcggtgttgggtgaaacctccaagcaaaataccagaaatcctcctactatcgtcgaccttcaaaattgtcttgcctttgtcagctaataaggcactacgatcctccactttgctatttccattttcatatttagttcacattcttgcatatatcattgtgttcacacaaatatttgtagaaaccaatcggtttcacgttccagcaagtttaagatgctggctgcactaaggagtaagtcgcgtggcgggagagggtagtggtaccaccattaacaaagtcaatgaatagataaatggaccaacagtaaacatggactccatagatgacgtagatactcgtacaaatccaaacacaaagagtgagcaacatcaatacatgaaacaacagtcttgtcagaatctttttgactatatatgtgatacctaccatcgtgttgagagtgatatggaaaaatacaagtgcaagtagtaatacataagttatacaaagataacaccacctttcaatttattaaataatagtgagatatatggtctccgcaagtaccaataaagcagtttttgttttcttaagtcttttacgtaccagtaaagaaatcttggaagtggactggattattattatgataaaattttaatttagcatgtgcaaatggtttgataaaaaatgtatcttccaatgtaatctttctaaacactgattttgttcttctataatcggacaatctcaggacaaattcaagcatatagttacctcatgacattgccccatgggacaatcataggtattgacgtgctgatgttcaaaaataatttattattatattgcttatgcttttattctttgcagattttactggggtcatagctaatgtggggccaaaggactttagtccggattggcctatgggcgtgagagatgtagcactattagatatttggtactaaagatgctcaatattctttactattatattttaataatttcatatttaagccaccaaccttattgcactttccagccatgatattggattcttttgatgcttggtgataaaggagattattaccgagat

SEQ ID NO: 19643 - DNA, 2652 bp, Oryza sativa
agcaaatctcgctaataatatcctttatcacctagcatcaaaagaaatccaatatcatagctgcaaggtgcaataagattggtggtttaagtatgaaattattaaaatataatagtaaagaatattgagcatctttagtaccaaatatctaatagtgctacatctctcacgcccataatctaagccagactgcagtccttttggccccacattagctatgaccccagcaaaatctgcaaaaattaaaagcataagcaatgtaataataaattatttttgaccatcagcacgtccatatctatgattgtcccatatggcaatgtcatgaggcaactatatgtttgaatttgtcccgagattccctgattatggaagaacaaaattagcgcttagaaagaacaaattggaagatacactttttgtcaaaccatttgcacatgctaaattaaaattgtatcataaaaataatctagtccacatgaaagatttctttattggcatgcataagactcaagaaaacaaagacggctttattggtacttgaggaggtcatatatctcactattatttaataaatttaaaggatggtgttatcttggtataacttatatattccaacatgcacttctattcttccatgtcactctcaacacgatggttggtatcatacatatagtccaaatggattctgacaattctatgttgtttcatgtattcatggttctcactctttgtgtttggatttgaaggaagttgtacatcatctagggttaattggatacatgccactgcaaatatggcaaattagaaaaatgtcactactattcatgaaatcaggtagatgccactataatctactaaaattagaaccatgccactccatcacgatttccgtcctatccatcacattttccgccgtctccgtcttcatcttctcgttgtcctcgtctcgacggcggatgggccgatcaggacggctgtgcgctggtgctgagccaaagcaaccgcacgacggcggtgagatagccggccaatagacagcatgcatggcaggcgggccaacgcagcgggccgacggcagcagcaagagccagcaaccagcaagcaacaagcacaacaagcagaagcagagcaggcaagcaatggcactatggcagcaacattgcagcattcattgatttctctggtggaagaagaaatcaagagtaggaagaaagcatgccctcgccggcggcggccgcagccgctctcgcgaccgtcctcgccagcggcggcgcccgcgcccgcgcccgcctccgtgaccgtcctcgccggcaaccgcgcccctccgcgacctccccgcgagcgtcctcgccggcggcgactgcgcccgcgcccgcctccgcgacctccccacgaacatcctcgccagcggcgcccgcgcccgcattcgcaactgtcctcggcggcgcccgcgaccgtccatgccggcagccgtgtccctccgcgacctccagcgagcatcctcaccggcggcggctgcgcccgcgcccgcctccacgagtgtcctcggcggcggccgcggccctatgcgacctccccgcgagcgtcctcgccggcagcggctgcgcccgctcccctccacgcaactgtcctcgtcactcgccttctcagcgtgcagacgcgacggaggaggatgacaacgtgagagagtaggacggaaatagtgacgggagtggcatagatccaattttaattttttttagtggcacccagacaataaggtaaataatagtggcatttttctgatttgccacatttacagtggcatggatccaattaacccccatcatctatggagtccatgttcactgttggctcatttacctgttcactgactttgttactggtggtaccactgccctctcccgccacctgacttactccccatggcagccgacatcttgaacttgctggaacgtgaaactgattgtttctacaaatatttatatgaacacaatgatacatgcaagaatgtgaattaaagatgaaaatggaaatagcaatgaggaggatcgtagtgccttatcagctgacaaaggtaggataattttggaggtcggcgatagtaggaggatttccggtatttttgttagaggcctcacccaacactggttatttataaccagtggtgctttgttggagtgcaaaaggcgtaaaaataaattagttttggactaattccctccattcatctctgcatgcatgcatgcacactataaaccgtacaaattagaattattctacatgcatataaaccgtacaaattagattggaattattccttccatccatctccgcatgcatgttgccatgcgaatgggactttcagaaatagagattttttattggacctattccttttcatgtgacattaaaaaatatatttttatattagcagagatgtgtatccatcatccaatcttaataaatatttttttataaattccaatattaaaaaagaaatagtattgtatgccaaatttgtatattttttatagaaaagttgactttatatgcgggttaattttatttgaaattgtttaatattaaacatctgactttttaacacgtatgtcaaactattggtcacgtagtgcaaaaacgaattta

SEQ ID NO: 19644 - DNA, 6294 bp, Oryza sativa
tttgtgaacgatatggtatgtgatgtctggaaatatattttctatgtttatacattatcaaatattaataatgtttataaattttaatattaaattccagtattgatataatgagataaatttgcggcgggggtgagaatgagtgacagctcattcaattctgttgcatagtggcatgcgcaaaagtactgtatttctattggagcgtgtctatttacatatgagtcccacctagttttgtcatgattttctcctccaacatgcaaatgaatcataaaaaaatcattgattccttgtacccatctgtcgataaatatatcctcaaatcatctccttccacacaatcctccctctccttacctctcccctaacacacgatcctccttctttgtataagcccatgagactcactagtgctacaatactcatggcatcttatgaatcagtcgatgtcgaagtggatccactgccacagcaaataaccaagagagagctcgatcaacaaatcaattcggagagagttcttagagttctctttcagtatgtacgtgatggatatgatcgaccacaagtaatgacgagggagctctcccagccagtcaattcctaaggagagatgaagaactatgaagataacatcgtcaagagatgcaagctgcctaagccatgattaggtctactgagttttgaccttggaataaagttttattaagttagcctttcaacgctatttgcaaaatgtgcaaaccaaattaagaatgcttgttgtgtatgatttgacttgttgtgtacaatatcatatttcatctacaatctcatacaatctcatactagtctgacaaatcagttttatttattgttaataactaatataatttttacttttagctcgattattaaaaaaaatattaaaagttacttaggaatttccgcagcaaaacgcggggaatcacctagtactatttatgcttaatgccaatcattggaaaataaggagtagagagatacagtgttaattttcatcccctctttacatgtctaattgtttaaacacacctcttaaagtaattgattgatgaaaacaacacaatattatgtgatagattccggtaaaaagaaaaaccgtgtcatgaaaccataatctttgagagaaggcacccgaagtattatcgagtttgttttcttaatcccagataattgtcattagtttccatttggtaataaagaaaatgttattctcatagagcaaacaaagcacaaaatagctagttaatcttaacacgaaaatttattccatcttgatcttgccaatcatatgtatttcataatacgaggcacatcaacaatcttgactggcttcagaatataatcctttgctcctccatccaagcacctccaacaaggaaaaaaaaagaaggaaaagggagcacatattaggatccacatgctcggattaagaatctatcaactaaggaaatcaaggtatacatcgtcatacttactttctgatcctttctgggatgttatcagaggaagcaattacaaccgggagatgtgccagtttaggtgatttctatgagtaaaaacaagcccaatttgaacatgtaaaatatttggtagaaacattataaaatatatatgatgaagattaacactattgtacgtacgcaccttcacttccatgagtaggttatagccggtcatgtctggcatacagtagtcactaacaatcatgtccacatcatgttcctgtgtccatcagacataaatacatgtttgttatatagtttgtaaataacattaccaaataaacaagtagaaaacttttaatttaccgagtccaaaaacatcaatgcttgcatgacactttctactgcagtcactgcatatatcaaacatggaaacacttagttaacaacagtcgaaaagaaggtcagaagatttcaaacatggaaacacttagttaacaacattcaaaaacatggaaacttgcataacaaagaacctcggacattatggcgcattaaggccatggaaacaacatggcgatcaacatgggtatcatccacaacaagcacatggggggacgacattgcaaacttttggtgtagagttactttgaattgttgttgaggaaaatggacctagaatgcacacatttaaagtgcaaaagtcttaaaatcgcggagatattgcaaagatataatatcaaatcactagcatgataattagctctcatatctcacagtatcactagtgaccgtgtatttgataattttgatataccatacaatgtataatgattgatggatttgtcctctttcgtacctatagagttgttcattttttacaaattaactatagtgaccttgcaacaattgtagctacctaggagcaatgatatagtctaatgtatgagcatatatttgatatatctatattgataaatggcttggccctatttaatttgtacatatttaaatgtcaatacaacaaagaggctagtagaaactaattaattggtcacaccctggtttgatagatggtatggtactaaatgaaagaaagcaagtgagtagtggtgtagatgggcatggtttggcccattggtccgaaaggcccatcttgtgaagcttgtaccttctccactatggtttttgtatgatcttattctataaggcccaactcgtggtgttgttttcatggcgactcgcagctgcgtttcatccttcgttgttctccaaggctcccctcacgtgctcctggaatcggggatggatgaatgaaccattgtccatctaaatcgtggtgtttatagataaataaaccattgggaacatgctttcagtcgagaacgatggtgatcaatggcgtcttcccaagtcttgagcatatcgacacgttttcatatgagataaccgcaccgggttataggatccagtcaccggacaaagtgtcagatgtacattgatttggaaaaacaaattctaggcaaatgcacacagttcatgtgaatactagacaaattgtctcctcctttatattttctgatacttacatgtgggacttcgtgacaactattactggagttctatgaccaaaatacttcaccgccatgtgctggccctactcttgtgatgactttgtcatagaatattgtacctacagatggaaccatctaccatggacccatgaggaccatggttaccaagttctatgacggaatactttgtgaccatatgccaacccaaatttctaatgataaattgtgtagtgtttcagatgaccatggtgacattttttgtgaccacaaactcaagctgccactagaatcatccgagcctgaactttacgatgatttcttgaaaattcgtcatagatcaacgatggattccctttttgtcacagtgaatccatcatagaaggccaaatctattgtactgatatatgtcacaggctgaaaaaataaagagaggataagggggacttgcaatggcgttatggcggcgacaaccataaaccgtgactcacgaagatgtaaagtttgcaatatatattaagccatttatagtatgagtgtaatatcttcatcgtgaccatattttgtacaacaaaaagcccaacacatacatactgcaactctcacataccacgtaacatgatgtttagtgtcacgtgaatgcacaacatcataggatagtctctttggaatggtggatatacgaattcaaaagtcttgttctaatccttactacgggtgtgttcagaacccagagttcccaactcacctctcgctttttccgcacgcatgtttttcgaactactaaacaatgcattttttgcaaaaaaaattctatacaaaagttgcttaaaaaatcatattgatccttttttaaaaaaaatagcaaatatttaattaatcacgcactaatggatcactccgttttccgtgcggggagtttagttcccaactccccatatgcgaacacaacctacatatccaaataagacattaggccccttcttagttcccacacaaaaaaaattataccctatcacatcgaacgtttgaatatctgcatgaagtattaaatataggctaaaaacataactaatgcacagattgcgactaatttgcgagacgaatcttttaagcccaattgctccatgatttaataatgtggtgctacagtaaacaattgctaatgatggattaattaggcttaataaattcgtctcgttgtttactgacggattctgtaactagtttttttattagtacccgaacacctcatgcgacaccctgtattacccgatgtgacacgctaaaattttacacccctagatctaaacaccccctaaaatattaccaataatacgagctgtcaacttgccagcactaacaaacagttacccgaaatagttccaggaaagcgttttatgcagcaagctaaaaaccaagcagaattatgacaggtcctgaacacacaaagcaggaggaaatcaaactgctgaattatgaaatgagaaaaaaaaaagaggataaagtatcgcatgatatgaggttctaacgattcactggttcatccatataatagccaaccacaaacagtaaagtaaccaggactccacaatcaaaaacaacatccacactccagactatcgcatatagtcacaaacaaatttgatccactccaattaaaacacaagaacacttatttgggtctcaaatgtttcccgctagcaaacggagcttgcaacactttgcaatagtttaattcagcattgcacactattgcagaaacacctcagccttcagttatagtagaagtcaatatagatggaacctcctcggctaattatgaccaacgccgtcaactgatcggttgtgagttcaaaccgccaattcacctcaaattgaaagattcacaatattattaggattttatgtttctagatatgatagcacatggatgatgcaaatcgatggtactgaccagactgagctttgaaaacaccttcctcaatataggtgagtgcttgatgtattggcgtagaggcatgaaattatcggtaatgcaccattcaccatggtgcaatgttctaagattcatgaacatcggccctctcccattacgctccttgtggtagaacttatccacacgagttaaggtctgaacattgacattattaggacgtaactatgtgcgtgtgtgtgaccatgagtcctttctccttttttttttcttgcaaaattcaccaacgttgcacaaaatatatttctttacacatcacatgcaaaggggattgctctcacttcataatagtttgcttcaataaattttgccaactattcaaatgaaccctttgccttggttttaaagtacaagtgcttcaggtagaattcgattgacagcaaaaagctaaaattatgtggttttgtgttaaaaaaaatcacaaggataagattaacaactcaaggaatgtcatttattcatggattgagtatacggtaggcatcctctgcagatttttcagatttcagcaggtgatgccgtgacatgcatgggatacttcctgaaaatgaaagtgatcaccgacgatcgaaaagaatcaattttcagaaatttaatcactatatattaaaagcactcagtactctgtacattctagtcaacgtctgcgtagtacaatactccgtactacaatgtatacagatacagaaactaacgcaaaaaaaaaagagagaaaatattatccaaaattcatcccatgttctaccaaacaagaacattttataatctctagagtatgaatttcctagctaattaatgagctgatgatcacttgacacgccaaagaatccaattaatcatcactgttctcacacgggaagccggagcagcgtctccgatctgtgcgcgctccggctcggcgcgagaaggcacccactgaaccgctcctcgccgccgtccacgtcgtgttccggcgacctgccgcggcgccggtacgccgcctccacgtcgtcgaggatggcggacacctccgccatccgcggccggctgcgcccgtcgttcgccacgcacgccagcgccaccctggccgtccgcgcgagcaggcgggactcggccttgtccgccggcttgccggcgcgctcgtcgagcacctccgccagcgccggcgggccggcgcgtatcagcgggagcgcccagtgcgccagccggccgccgtcccattgccggccggtgaggaggtggaggagcaccgcgccgaacatgtagacgtcgttctccg

SEQ ID NO: 19645 - DNA, 2944 bp, Oryza sativa
gccgggctccccgagcacgaggtgcggccgcatgcgcttggcggcgagccccggcgccgccgcgtacacggtgaagtgcctcccctgcccgatcaccctgctcgggtggaacccgtcggtggcgcgctccacgtcggccagcgggaccaccggcaacggcgccaccgcaaccgcaatcgcaccaccgtcgccatcaccaccaccaccaccaccgccggcgccaccgcccgctctcgccacgcgcttgttgcgccagagcaggaacagcgcgacggccagcgccacgaccgccgcggcggcgacagcgacgacggcgtggtggacggcttcctcgacggactcgcgcatggccgagctagctagtcaatggatcagagcttcgccgccgccaccgccgccgaggacatggacgaacgggcgtggcacggcgcggcgcggcgcgcgtcggtgtcacctgatgagagagattaattggagacgtttcgtgagcggattttcagtgggattaagtagcacgctaagtgacacggtacgtacttgattaaactaaacatgggtcaaatctgctatgcgtacaatggcaacaaccgaagtcagtgtcattgtgtcaacagaatgccatccaaaatatttattgggtggctgacatggttggaatggttggcatgaattggttttactagaaatacttatgggtatcatgctagtatttttcttggtactttctagtatcttcttaaggcaaaaacaaatataattgttattgttaattttaatgaatttggttggcagtcaagcttatttattgtgttgaacatataagatttatatttctgattcgcacttgctatttgtgtctcaatgaagaatttacatttctttctgcttggttgtttgttttttttttctacatttgaacccgacagataccccattaagaatatgtaggttaacctctgacgatgctggtgtgatcttgtaaattaacaagatttggaccttctggtggcacacgagggattcatgtacaagaacttgccaagttttcttttttagtccagccaaaacatcatgttctaatccaacaaatttgaatgcaaagattgccctctgcctccctagaaaacatattgatttcggattcttattggaaactttggaaatttgtgaaaacataagcggaaggatcattaattggaaataagggcctattcagattgtagccaaaataaaccttaccaaattttagcaataacaaaattttgataagatggtaatattgtcaaaattttggtaggatttcttatgtattaactaaatttagtaacaaactaaacgttttgtaactttaccaaaataaaatggtatggttgaaaatggcatcaaagtgaacagaccctaagttttgttacacattttgaactgaaaaaaactttgagcctgttgttatatatctagctagctgttgagacttcaaagtgtgcattagagggagatcctggacatccaattaattaattaaacagagatgatcatggccattttatgataatgtagtcaagtgcaactgtgcaggtagtaaatcgatcatagcagttgggcggggtttggatgcccaatcttacgtcgactctggaccaaattcatgttaggaattgcaagtttgtatttttatgtttgtgttcatgcacccaacacttgaaacaggtattagttgttataactaacgtgatccggtggagtttattaagggcagagcaggtaaaggaaactgattgttgttaacttcgctcagaagatcttatgtcagcgaaagaacaaatactacaaatggtgaactttctttttttgtgagaacttcgttagttaagtttcttatttgatgatcctccctagtttccgaagttcacaccatgagaacaaagacgagaaatgactacgatacatgggaaaatttaatgaattcattttttttctcttctagttcggacttgtgatttagtgagaatttgtttcacgcatatacccatttctattttttttatgaatttagataacttttatatcctattttgatggatttttacttattaatggtttgatggttatcacagatatgttcacacgatacatcccagttttgatatcttggtaacaacatagagttctttaaaaaaaaaaaacagatagagcaagccacactaacggggatttttttttctagcagatatattttacccatattgttcaacaaaagtagtatatattttctagaaccaagatttgctcaaacaaaaattataaaattcaaccatcaaactaattagaaggatcctcatatttgtaagatgtcctactttcctattaaaattttggatgggctgatcatgggccaactggccgctcagggcccaattaagcctcggagaacaattataaatgcagtggcagatgaccttttttttacaattttttattaaaatatttaaaaatcgtttcaaacatttataaacctagacgtctcacaccctctggaagcgcctttttaaaaaatcgcccttccagacgacgttaagggacctaaatgtaatgtttttatttgtattttttacaggatgtttttatttatattcaaaccctttccgtcggattcaattgcttaaaaacctgtaattaatgcttattcgacactctaaattattttaaaattaaaaagtaataatctaccaagtcgtagatctcgtcgagatctacaatttttatataaagtttattttcatacaatgttttggacatctaaaagatcttaaatgaaaaagttgttaactgcaaagttgtagatcttctcaagctctacaatttcattaaaaattttgatttcatccgattttatatgatatatttttaaattacaaaatcatagaatacacaatctatattgaaa

SEQ ID NO: 19646 - DNA, 2571 bp, Oryza sativa
tttttagttcttaaatataaggtttttttgaaaagagcagtactaactcagttaaatttggaactaagattgagttaatgtttggttgtaaaagagactattgcatacaaatcgacaacaaaaagatttcgaaaatattgcagccaccagcaatgttaatttataaagaaaatgatatgtatatgctatacataccacatttttccacattttccccttgtgtggtaagcatgtttgccacgcttttatgctccaaatttgttttctggcacacttctgacatgttttgctagaaaatgtgtgtcgtatgatttagctaaaacattttatggctccaaatttgtttaccacacttttggtatgtttagctagaaaatatgttcatgacatatgggtctaagagtaaaccttccttttgttttatttcatctcccttcccccttttattttttggaacacatctaaactcttggtgaccatacactgctcactccaacctagcctatgaacgtctataacaaaaaaatcattgacgaaaactccagtcaaagcgtccgtgtcatcgttatcgtccatgacactctcgctatgactgcgggagggaatagaggaaagtcaagggatgacacagaagaggacgcaggcaccaggtggaggaccgtccatcagagatgcaattgatgatggtgagtcgaaaaagatgaagaggatgaagaaatagaatatttcaaatagtagcaatcattcactttgctcccgttacgactgagggggaatgttagaagtacaaatatgttagttagagataagagtcaaatacgaatatggagataagatatatcctagatatagaatcctagagataaaatagagtcctagagataaatctactcttacttgtattgtactctaagtctctatccaagtatgtactcctatatataccctatgagagggtcgatgtaatagattagaaaacattagaatacaacaaattagatttttccacatagatctcagatatttatgatgattattactaatataactgacttgtactccttgaactgaattaggggttctctgatcagaaggaattgaatacaacttccattataggtgaaagtgaaattgagtcacatatcaatttttgtttgttgtaaaagagtttctagcatgcaaatgaaatataaagaagatatagaatattgtaatcaccaagaaagtttacataaaacctgagacatattctacaatgacacaattttccactttttttttgccaaaagtgtggtaagccaaggattttatctcccaatttatgtggcacacttgtggcatgttttagctagctagaaaatgtgtctatgacatatttagataatacagtaaagaaagtagaatgctagaactttgtcaataattcaatactagcctcaaatggttaacttatcaactttgggaaacattggcaacaaatattcgcactaacgagattaaattttagccatttcggttaaaccgagattcatgagattttgagattttcgaaatttttggacaaatttttttgaaagtttaacccaatttaactgaatttgactaaatttaggtcaaattcacaaaaaattaagaaaaaccaaaaatttcagacgagataatgatttgctaatggttcgaacttaccgaaattttgaaaataatcgttgtttaatatttccatccctcccaaaccaagaacacaaacgatcctaagcgtgtccctgtactcaggacaactaaatatcaatggtccaacaaatgttccgaaagaacacagttattccaaaattaaagttatattaaaacacaataaaaaaaaacagcacacgcagcatgttattgtcaactaaataaacaagagatgcacacaaaaacaaaacgaatgacactgactacacctttggtagaaaaataaaagcttaaacattagtccgaaaaatagaattaaacccggaatttgtcccttcgtcccacttactaacagacggtcagtctttaaaactaaacttcgtctttaaatttgcccaatactatgatatttatagtaacaaaatcacaattacatataaaaagtaaattcaaatgtcaatccaataatattaattatttctatcaaataaaactcaatttataataaaacattttttatcaaatatatttcgatagttgaactttaaaatacatgcgggcatttcaatggaacgaaagttataataaaatattactgatcaaatataaaaatatatttggatagttgaattttaaaatacatgcgggtatttcaatggaacgaaaggagtaataataattaattaattaatcaagcgctcatttatacacgaggggtggactcctgcttgccgagcctcgcccggcgctccatcgacagcatccgggcgaagcgcgccagctcctcctcgttggtgcccctgccggcgtcggccacgttcctgccggtctccacgtccaccctgcacgcctgcctccgcagcagcgcggccccggcgccggcgagcgcgcggaggttct

SEQ ID NO: 19647 - DNA, 7074 bp, Oryza sativa
ggatatccgaacgaaattcccggatagtttccaaccgttttccgattccgacggatattatacccatactgtattcgttttcgtttctgagaaaaataaaccgaattcgtttccgaatctgagaatttccgaatagttccgatcaaacctatccgaatccgaaaaatggttttgacggacggattaattaattgcttaccggattgttggcagcaacacctccatcgatgagattgaagacccggggctgaccggccttgtccttggtctcgaaacggtgaccggggaggtaggtcggcgccgctgacgtgctgatgcacacgtcggacaagagagcattcttggatgcatccttctgtgcctggacatacatggatataataaaatgcacatgtaaattttacttctgtttacaatatatagtgatgtcctttttcatcactatagtatatatatactatacagcttacaaaaaggattgtaataagtttacatcaaatctagagaagatggtgggctggaggagcttgatgtcaaatgtggggatgacgacgttggtgatggcctggctaatcctggtgtcaccgagcagctcctgcacaatggaccggaggtatcgcccgtcgtacttgggacccatcatgctcttcagcaaacccaggggtcctttgctgcatttatacatgggaacattaaggtttgcctggatgaattggcatgatcagaaccgtgtagaagtgactgaaatttgtacgtattttcacatgatcttaattaattaactgccagtcgactaaacttgcagaataaatagcctgaattgaaatgcggcaactatagtataaagttgtgaaattcaattttctttctttttaaaactaatttaaaccactttacgcttatctaattatctgctgtttcatctatgctctaagtaaaacttgtactaaagttaactcgctgactgattcacctaattaactacattaattttcataattaagttaacgtaccctttttttcacggcgagaaataaaagtacagaatgttggatgtaaaatttggtcgagaaaaaagtaaatacaaacaccgtatacatgtatacgtacatgacaggagggaatatcttggggctatgccggaggtagaagtcgacgatgtccttggcggcgaagagcggccggccgtcggcgccgggcgccgcgagcatggccgtcaccagcccgcccgtgctcgtcccggcgatgacgtcgaagtagtccgccaccctcgccgccggcccgtccagctcctgcagcttctcctccaggaacgccaggatggtccccgggatgatcccgcgcacgccgccgccgtcgatgctcagcaccgccacgatgctcccgaacgccggcggcggcgacctcggcgtcggcagcgctgccgccgccgcagtcgcctgccgccggccgagcgccgggtccacggtcagtgacccccccgcgcttcctccgccgttgctgctgccgatgagctcagctgggacttgcactggcgccatggctggctgcttgagcgagctagagatcgactgagttgaagggggaggttggtcgcggttgtaattatagtgtgggagcatgcgtccctcgccggcggtgttatatatacggcggcgaatggcggtaggtggtggcgccggagatcagcacgtgcgattggacggcaaagcggatcggggggaggggagctttcccggaatctcgctggctcgtgcttttgcattgcatgcatgctctgcttgaaactgtaaagaaatataatgtgccgtacggataatggcccgtgactccgtgagccgtacttttctacgcggataagctggatatgtgtataatactagtcccgtttttaatagatgacgccgttgactttttccatttgtcttattcaaaaaatttacataattataatttattttgttataagttgttttattactcataatactttaagtgtgatttatgtcttatatatttgaataaaatttttgaataagacgaatggtcaaacatatgagaaaaagtcaacggcatcatctattaaaaaacggagggagtatatactaatatgcttacgaaattaatttggttgcagctaaagctcgtggtcgtcatgatgcacacgctacgcagccacgcatgtaaagtactccctcgttcatattccctagcagttactccctctattctaaaatataagtatttttaattcttacacgattttatatatgctaatttaactaataacatttacaaaaataagattttatttttaataaaaagagttgcatattatgatagcttgttgaatgataaatctaatgacatcaattttacataattgatttttttactattaaaagtcaaagtcaaaaacgtttgatttgtcactatgctaaaaatgcatatatttttgaacggaggaaggagacctattacatatttagatttttcaaatatgttatttctatttatagtctctatttatctcagatttaaatgaaaaggtaaaatgttgggttagaatccaagaagttatcttaatactcatagttttcatgtatatatatactcctttatctttgttacatgtaaaataagttaatttctttttgatcttggtaacaaaagtaataggtgtaacttttgtgaaataagagagtaaaatatataaacctatcataaaaaaagtgatttttgtgtacgtgactctcggtaggttacaaacggacctggccatgtctgcaaaaatcgagcgagcatttttcgtataagggtcattaagaagcccgcatgtaaaaattgatttcgtaggcgaacccctaaggggccgcatgaaaaaataaactctttttttttcatgtggacctcttaaaatgcccgtatatgaaaaatcattatatgaaaaatcatttttatgtatgcgggtctcttaaggatcgatctacaagtctaaatagcctcctccttctcgtcgctgtcctcttcaactgccgccggccccatccacgccaacatcgccgctccacgccgcctgagccacagccccgccggacccgatccgcgctcctcctcctccaacaccgcccccgcatgccctccaacagctgcctccgtggaacaagacatgaagacggaaaaatagacttattcctctacagtaaacatgctcacatcccatatgagaaattaatacccaacggtggcccatttgttacgtgcatataaatacacacacacacacacacatatatatatatatatatatatatatatatatatatatatatatatatatatatatatatatatatatatatataattaaaaaataagtaaggctttcggttgatttttttggtccgtcattaaaggatgggcccacgtgattatttcgccgctaatccgtgaatccggatgcattacggcgatctctgacgctccgcacaaaaagagaaacgaaaaaaagaaaaacctagcgagcagcccagccaagacggcagcaggccggcccaacaaaaagcaaacgtagcccagtagccagcccacagagtagagaagcagcagcccagtacaacatgtgtgatactgtagcaaatgagcactgtagcacgaataataccacctaaataggaggcttgcctgatactatctatatctataactaatataaatattcgtattttttctttcgtcacatctaattttcgtccgtacacaatccgatttggttagcaatagccatggaaaaaattgcaaaaaaaaatccgccgcacccgtcgtcgctacaccgtgccagcgagacaggaaggagagcgggagagggagcgcggacgctgtcgacgccgccgttgggagggcgccgtctccgccgcaccccgccatcaccgcgccgtgccggcgagaagggagggagaagagaagggaagcggtgccggtgggggggagacaacgccggtggcgggggaggcagccggctggggggagggggagaggcgggagagggggagagggagcggcgcccccggaggggaggggagggcgaacggtgccggtggggagatggggagggggagaggcggcgtcggggcgggggaggcagaggcggccggctcggctcggctgggagggagggggagggttagggttcttatcaattttaaactgatctgagccgtccatcaaaacgaacggctgagatcgatcgagggtttgggccgcaccacttgggctgcaccacttgggccgcacgcgggccggcggtccaccaagtgagaggaggagtatgggggcattaagtagactttgatcgcttacgggctgaagaagaaaataggctgaaaaaggctcatagagaaaaaataatttttatttaaataaatgctgaaatgatatttgtattatcaaaattaacaattaagctatgtaaattccaagaaaatttcaatgagtgtaattaatatataatttcaaagagtgtaattaatattgcagaaaatttatatgtcattaaattacaattcattaaatagttcaaatcaaagttcagtcaccatatcattatccggtgtaatgcatgggcattttactagtacacacaagaaataataaaatcagaggtgtcagatcgagaattccagatcgacaccgctctatgcctcgccgtccccacagccacagccgaccgtggcacaggcacttcggcctccgtagcaacgccgtgtgcttggcatcctccgtgccacgccgcggcatccatgctgggcccgcgtcttccacgtcgtgatcccgtcctctatgccacgcagctgcacgcatccacagttccacacggtggggctcccactctactccgcctcctcaaccgcgtcgggcttccgtgccgcaacccgcaaggccgtggcccgttctctctctctctctctcccctttttttccctttttttttgcgtttttctcttttttttctgtcttttcgctttttttcttttttttttgcttccccctcccctcacgcgttttcctttttatcctattctttttccgatttttttaatctatttgagttgaaagttttcaaatcttaacttgcaaatttttcaatctaaagaaaattttaaatctagagtttaaagtacttaaatcttgacttaaaagtttttaaatctcgagttaaaagtttttaaaatttgtcttaaaatttttaaaattataaatcttgacttgaaagtttttaaatttaactgttgaaaatttttaaaaagttaaagcttagagtttcaaattttaaattttaagttgaaaatttctttcgcgtaaagatttattttcaatcttctagtaaaaaaaatcttccaaaaaggaaaaatatttttttagttactgttattatcctaaactaactcggctagtcatgtaactccttcagaaatcgtgcccaaaaatcgcacgtgcgtgagctagctttcacgcaccttgacaccgcctccaagccaatatcgctcccaactccgaacaagcccaacttcagtgacggtgcctgtcttccacgctacgccaccgcatccaagatgggcttatgcactgctctgcctcaatcgcgtcaggcttccacgctgcaagggcatcattgtatgtagacacggacagtttggcaccgcctacaagccacagtcgctcccaactctcaaccagccccacttaagcagtggcggagagaggttgtgctatgggtggtcgcgattcactagggaagttgccatctcatcggcggatgtggctgcttggggcgtcatcaaagatggagaggtagcggcggtgcgagggcaacgattcgtggggtgttgccgggcggcagcaacggccaaaggtattgtcgcacgggatgaggaagcggcgagacggagaggctgcactgctgcagtgagaaggcgagagacgaagacaggccggatgggtcgacagtggcgaatccagaaaatcgattcgttggtgtcataacatgtctatcggtgtcgtagtatgctaattatacttagatcatggtgttataacatatagataagcagttttgttataggttgtaccaaaagtcgacggtgtcgcctgacactggccttagtaccgcagatccacccctgtgggtcgttccggactttgggagcattcgatattgtgggtccgggatatcagttgagagagggggttgcacttggcataacggatatataccaccatttctaatgttttaagtagtatagaaacgagtgtgtgcatgtgcggtgcggatacatccgtcaaagctaggggttgcatttcttcaaaagaaaaaaaaaatccacgcacggttgcacatcacactcatgcaatacatgcgctcctgcatgcatgcctctcttgctgctccaactactagctctttcttgcttaatgagcgtgcagttcctgcatgctcggatggctatctagcttagcaagctaagcatcacttgcttagggattgagctcccgctaatctcgcactccacggtactagagtcacacaaaacagcacaaccacacccgcgcatgtccataatgtggaccaacaggttgcaatacgctatatgcatgcatgccccctcatcacctcatgcatgataatctcattgctgctttaatttgctagtagaagaaagggaaacttgtggccatgcattatcaaacaatattgtttgttgctggtaaataatgaagaaatatatatttttttttgaaaaagatcactttgtattagcagcatctatcagaatgatggtaagagttaataaatactagctcttagcaattgatattgtgtatataactacaaaggttgggttcatgcacttacattagtacttcctccgtttcacaatgtaactcattctaatatttcacacattcatattgatgttaatgaatatagactcatatatctatcgtatatctatctagattgttaatgaatctagatagatatattcattaacatcaatatgaatgtgggaaatg

SEQ ID NO: 19648 - DNA, 8288 bp, Oryza sativa
  unsure (1)..(8288): unsure at all n locations
ctactaatgtgataagagtgtttcttagatttaaataaaaattcctttattctggtcatatataaactggttgtttgtcatcactacttactgtcattgtttaagagttaggtgcacttttaataaatgaaattgtattagtaccactaaaacaaacgatacattattaatacactaaaaaaattcatctacactacataacccgccgttcatcacttatttttacctctatatataaataggctaaatataccatatctaccgaataatacgataacatcattaaaaataaacatgaatgcctctctaatgtatgaagtcggctgtatctaccaaccaaggcttccgtatgtaatgccttaaaacatacaggtctcgcatcgataagccatgcccctaaaaaccatcgtagagtacaattttaacacttagttcactattggtacactcacagttgattatattggtaagtacgtcactttagttacattgcctatgatggcctttcatggacaccaccttaactcaaccatgtacatgtccatacaaatttatgatggcatagcaagtattacaccctgcattgaaggataaagagggacagaaaaaaagaggtgatgaaaataattttttttaagttttgagtcgaattgtggtagagaatagacaaaatatgtatatgaagttagtaataagtacttctcaaattttattggaatacatacaatattatgtttttcaaatgagtggggttaatcattcgacactacttaaaaaaaatataactaaagagacgtaccaccacgaaaatctgcaaaacaccatatcattatttatattttgataaagatttatgcttttgcgccaaatttgtttccacgatatgttgtttataactatacgatactcatttactaattctaagaatgtacttattttcacaaacttatttacactaactaatttgctagagtgcaacttatttacatacactaactaatttgctaatttgctagagtgcacttatagatgggttcagtggtgtataacattcgtccatcaattatacatggtatattagaatttctataactataaaaaatatatcataagtagtttgatgcgtattttattggattattcatgttttgccaatactacttggcaaagaaaatacataattctagtgatgaattaagggttgtattctagcaacacgattgtctaaaatcttatttatttattttttttcacatgtatctatcatgtatgcttcgcactcctcaaataacaataaaaaagttttgaaaacttttaatagttttagaatctcaatctcacccaaaataaacctaaaaagatctacttaaaaaccaaagctaaattatgttgttttattaccactcgctaaaatttaatttaattttctcataaatctattaattgtgcttctgacacctcaaataagaaaagttttgaaaaaattccaaatgctttgagaatctcaatttctcccaaaattaaataaacctaaatagatgtacttaaaaaacaatgctaggttttgtttttttaattttttacatatgtagattcaaattaacgttatatatttgtcaagtgatatttgaaaccataaaatatcatatgaaattatttgaaacattattatcgcattaactattacatgttggcatcatttgccatgatatatttatcacacaataagtttacgattaagtttaactgtgcatatctatgtatagtattatttttaataaaattatagattaaaggttgttgacaacaaattagtgctgaactgatgatttttcctgatcagtatttctttccgatactactatgtacgtgtgcgtgctttctttttatttttttttggctttatctttttttatcatatatggtgtaggtatttaaattttgttttcttcttgggaaggagacgatcgtacgacttaagcacgtcacttttttttaccatgatagagattagtagcataatccctttttttgagaaatcccttttttttagagctctaatccaatgtttaaaataactggtccactaatttaagtgaaaattaaaggttggatggttttctttttttactctaaatttctaagatttctctaattntattagagcatcacgtgataatgtaggagtggttgcagtacatttagtagacttttagtatataatagattggtatgatttctctaaattattggagaaccacgtagcggtgtaaaagcatttgtagaaagtttaatgtacttttagtatataatagatagatttagaagatgcttgaaagaacattgattggatatttattatagatcttaatttaactaaatatatttatatttgtgaagtaatatattttatatttatattgtagaaagtcatattttaaataccgttgatttgtatgaatgtatgttttttctgtcttttttatgtatatgtgtatttgtttttcttctagcgaagattatgaaagttttgttttcaatcatatatacgtttgtacgtacggaaagtacagcagtgacatttgtaacgtacaaactcatacgtacggactgtagcgcttgtatgttataaacatgaggaagttattattttctaataatagatctaatctaatggtgtaaaataacgggtccaccaatttaagtgaaaatcaacggtgagattagatagtgctatgtggcggcttaggagcgtttgtagaagtgccacgtagcggcttgagagcgtttataggatgtttaatggacttttagtagatagattttgtcataaaaagttagaatctttaaaacaattgacaaaatatatcgggcctgtttggcgcagctccagctccagctccatccctcctggagctggagctcagccaaacagtttcagctccaccaaaactgggagtggagttaggtggagttctatcacaaaatatactagagttatatttaggagttgaagctgtaccaaacatgaccataatatatcattttacaaatattcgagtttaaatttttgaaaaattaatttatttttcaacgtttaaatacatgccagtaaaatactttgtttgactgcaaaatggttcttctctaactttgtaaaatggcattttatttgattaaaaaaattatatatcgatttacatttttcttggaaaagatttgactgacaaatttcttatttcgaactgtttgatcacaatttatcatcatgtatgagcaatgccctgcaatgtaaatattatcttatgtgaaacccttccatatcatattatgctttcacctgacaaagctaaaagccatagaaatcataagggcctactttctcaaattaccccacgggcatattcaccacgtgacaagctagcccaagcagttctcactagtaatcatgcaataaaattaaaatattatattaaaataataatttaggaactaatattaaattttcacagataacattcaatataattacaattatattttttaagctctaaatttgacccgccactgcatcgcccccattggatcatgctcactctgtgcgtaggttagcctcaggccctcaagtgtcaccattagcaagcagaacatacgcctactccgtctaaactgagacagaatcacgggcccacccgtcagtcacccaagctccaaaacccaaaccccccctaatctccttcaaaactgacacgagatggtgggtcccacccgtcagtgagacagccgcccacgccttaaagcccaaacccaccttaatagccacccactactcccactcccacttcgctccactccacgcttcccccatgactcccctgctcctcctcctcctcgccctcgccgccggcgccggcgccgcctccttccccgccgacttcgccaacctcttcgccgccaaggccgcgctctccgacccgtcctccgcgctcgccgcgtgggaccctggcctgtccccgtccctctccccgtgccgatggccgcacctcctctgctccaacccgtcgtcctcctcctccgccgccatcgccgccgtgctcctctccaacctctccctcgccggcgagttcccggcgccgctgtgcgagctccggtcgctggcgctgctcgacctgtcgtacaatgacctcaccgggccgttgcccggctgcctcgccgcgatgccgtcgctgaggcaccttgatctcgccgggaatgggttctccggcgaggtcccgaggagctacggcgcggggttcccgtctctcttgacgctcagcctggccgggaacgagctgtccggcgagctcccggcgttcttggcgaacgtgagcgccctcgaggagctcctcctcgcgtacaaccagttcgcgccgtcgccgttgccggagacgttcaccggaatccggaggctacaggtgctgtggctggccgggtgcaacctcgtcggagatatcccgccgtcgatcgggagcctgaagagcctcgtcaacctcgacctctcgacgaacaacctcaccggcgagatcccgagcagcatcggagggttggagagcgtcgtccagctcgagctctactcgaaccagctcaccgggagcttgccggaggggatgtcggcgctcaagaagctgcggttcttcgacgccgccatgaaccagctctccggcgagataccggccgacctgttcctcgcaccgaggctggagagcctccacctgtaccagaacgagcttaccggacgcgtgccggcgacggtggccgacgcggcggcgctcaacgacctcaggctgttcaccaaccggctggtcggggagttgccgccggagttcgggaagaagagcccgcttgagttcttggacttgtcggacaaccgtatctccggcgagattccggcgacgctgtgcagcgccgggaagctggagcagcttctcatgctgaacaacgagctcgtcggcccgattccggcggagctggggcaatgccggacgctgacgcgggtgcggctgccgaacaaccggctctccggcgccgtgccgccggacatgtggggccttccgcacctgtacctgctggagctcgccgggaacgccctgtccggcgccgtcgcgcccgccattgccacggcgaggaacctgtcgcagctgctgatatctgacaaccgcttcgccggcgcgctgccgccggagctaggcagcttgccgaacctgttcgagctgtcggcttccaacaacgtgttctccgggccattgccggcgtcgttgaccgtggtcaccacgctcggccggcttgatttgaggaacaactcgctctccggcgagctgccgcgaggtgttcgacggtggcagaagctgacgcagctcgacctcgccgacaaccgcctcaccggaaacatccccgccgagctcggcgatctgccggtgctcaactcgctcgacctgtcgaacaacgagctcaccggcggcgtgccggtgcaactcgagaaccttaagctgagcctgctcaacctgtcgaacaaccggctcgccggcgtcctgcctcctctgttcgccggcgagatgtacaaggacagcttccttggcaatccggggctgtgcaccggcggttcgtgctcgagcggccgcagagcccgcgccggccgccgcggccttgtcgggagcgtcaccgtcgccgtcgccggcgtcatcctgctgctcggcgccgcgtggttcgcccacaggtacaggagtcaaaggaggtggagcacggaggacgccgccggcgagaagtcgaggtgggtggtcacgtcgttccacaaggcggagtcgacgaggaggacatcctgagctgcctcgacgacgaggacaacgtggtcggcacgggcgcagcgggcaaggtgtacaaggccgtcctcgggaacggcgcccgcggcggcgacgacggcgccgtcgtcgccgtcaagaagctctgggctaacggcggcgcggcgaagaaggcggcggccatggaagccggcggcggcggcggcggcggcggcaaggacacgttcgaggcggaggtggcgacgctggggaggatacggcacaagaacatcgtgaagctgtggtgcagcctcagcagcggcgaccggcggctgctcgtctacgagtacatgcccaacggcagcctcggcgacctcctccacggcggcaagggcggcctcctcgactggccggcgcggcaccgcatcatggtcgacgccgccgagggtctctcctacctccaccacgactgcgcaccgccgatcgtgcaccgcgacgtcaagtccaataacatcctcctcgacgccgacctccgcgccaaggtcgccgacttcggcgtcgccagggccgtctccgccgcgccgcccaccgccgtgtccgccatcgccggctcctgcggctacattgcccccggtgagttaatcattgcgcacctcgatcgccatcgccatggcgcccgctaacgattcttgatttcccagagtactcgtacacgctgcgtatcacggagaagagcgacgtgtacagcttcggcgtggtgatgctggagctcctcaccggcaaggcgccggcggggccggagctcggggagaaggacctcgtcaggtgggtgtgcggctgcgtcgagcgcgacggcgtcgaccgcgtgctcgacgcgaggctcgccggcgcgccgcgcgacgagacgcggagggcgctcaacgtcgcgctgctctgcgcgtccagcctcccgatcaaccgcccgtcgatgaggtccgtcgtgaagctgctgctggagctccggccggagagcaaggagaaggccatggcggaggagaagcctctcctcgtttgatcacacaaagccagcactgatgaacacactgaacagtagtacctcactttaattagcaattagcataatcactcgcttcaaaaatcagttagcataatcacattaacaatcagtagtaattaatgtactcaagtacccagcattaaggttgaagcctcaagcatgcaatgtaagctagaactacttaagtaaaggtcctctatgtatagctcattctagtattttcatgggttaatgtactactaccagtttgtctaaagtatcaatgccaacaaggatttggtttaagctagatggtgctaacacttttgactctgtggaccatctgcattattctgtgctcatttcagaccctgaaaagtgaaaaaggtgcctcttgttgtacctgaacttgttgagcggcttttttccattttacatgttcagttatcacttgctatcagtttatcacacagacacatgtataagatatagtgattgatttggcttggatcgaacaaactattgggtagtaattactcatagcaatctaaaatcgtatggaacacaacatagtacaataaatttggatagatctcctgtccaaattaattgtactatgttatgtcccattcagttcagattcatatattatgggataaggggagtaaaattgctattttagttttaacatgttaattacttttcattttagtataagcatttctaggtatgtacctgaacatcatctctcgacccggataaatatgatccttcagtgctgtaatttttgggccattcagtgctccattcaattgcaggcttaggttgcagcttttgctattaagttgggagcattcagctgtggtggagatcaagtgacagcaacagaacaagaggctgtacagaagctgtgctggctcttttcccttcttcccttacctttctgctagcctgcagggtttagatccaaaaaggttaggtgatttgttgttgggattactgttgggctttgcatctgtcaggatatgcaaattgtggacacagtctggagtcctggaccatagccacacaactgtgtagtgaatgtctgcatctacagtaacatgtacatttggtgtcaatggtcctgaagaaaacctttatgaaatgctaagctccaaattgtcctcatagatttcagagaaaatgtttttactgtctttaagtcctttgtcactgactgatccagacaattaccctctgcttggacagtttatatgaggggacaggatcagcatcagtgaattttcgttttcacttctgtaactaactgaattcaacggctgccgcacaccatagcacagtaaccagttaaccccaaacttgcccaagtgtctgtctgaattacatgtgggtccatgctgttggtactagtagtagacaggagactcttcggatag

SEQ ID NO: 19649 - DNA, 2859 bp, Oryza sativa
tctaacccatactcatgcccatcgagtggggtaccagacttacgggtaaaattgtcatccatggttcgagggaatgcaacaggatgaacggcggggcaggaggggctggtgtttgtcttggtcagaagtaattatttattttatcatataagaacaagctatcggatattaagataatggaagtacaactcagcacattagttaaattacttctgccttagaataccgaactctcacaaatatacatttttacaactcacgtgggagaaaccttgtttatttctataccaggaggaatgttaggttgccattctggaatattttgttagcagtgcaaatatgtgtactaactgaatgctaaaagtggtagtacctttgaaggcattgtttgatattcatgtgatgattgcaaacctgtaggggggttttttcctcgagccttgaccagtttcaattttctcaatattctactttgatgttgtaaacttgagaggttaaacatttaagtggttgtattatctgctaaatctataatctatctcattacgggattgtccaaaacatcgttagtcggatgtagagagctcgaatatatataagccagttgggatcaatcaggctagcaaacagaggaagccaaatcagccaagcctgaattctgaatgtgaccacgaatcaccgtatcgtcctgtttttggatgtgaatcgacacgagattttgtcaatctaagagatgtaccacaagtactcaagcgaaggcccatggttattgagtgcaagcaaacgcaattctccacgcggagacacaggagttggcgtaacgggcttgcaactccattacccgtacccgttagcaggcagctgcaccataagctcagttgcagcttttatatatacatggataattttactcgatttattcagagtagggacatgtatacaaccactaccatagaaatttatttatattatatttaaatcataaattattgattttgacatgtagctttatgcaagttgggtttcggatcttggaaggttaggagatacagtaacccgggaagcaacaattgcctggatttcttggaagcaagctccatgaattttgcttgcctgaccctcctcccaagtctttgatcccaagcgacaagccaagccagaatgtaccgttggtaccacgtactgatcctatccattaatccataagcaacccagctccaccactctgccactagcacacccacacacaaataaacccggattaaaacgcaatcatgcatgcgccacgatcagatcacattctcaagaacacaaataagataatagcatcatggctatgtgagcttagagagagaataatgcagagccagagagacagagagaggtaggtgattgataataagaaagaagggaagaagaacacaggtctaaccggaggagggcaagagaagatggtggtgatgatgatgcagaagagctccctggacctggtgcttgtgccatgtggtctggtgatcatgttcggctaccacctcatcctcctctaccggattctccgccgccccgccgccaccgtcatcggctacgagaaccacaacaagctggcatgggtccgccgcatggtgcaggtaaaccacccaccgccggccgccggcgacatggagcaactgaattttctgtgacaactgaacagctgaatccaagtgtggccgtggtgatgggaggttggtgatttaccgtgttgctgtcgttgcaggcgagcccggacgagacggggctggcactgagcgtcatctccagcaacatctcggcgtcgacgaacctggcgtcgctgtgcatcgcgctgggctcgctcatcggggcctgggtgagcagcacctccaaggttttcatgacggagctcgtctacggcgaccgcacccaggcgacggccaccgtgaagtacatctcccttctcgtctgcttcctcgtctccttcacttgcttcatccactctgcaaggttagcttcccttcaggcttcagctgctgctcacctctgaaaccagcctctgtaaatacctgaaagaaggatattcaaatttaaattttgaaacttgaatttagaaaaattttagtggttaccagtaaaaaaatacaaccttttgcatttgaatctttaaagttgaatttttggagccactaattctggagatactaccggtattccaaccctgctgaggtaacataacatggcatcaaaatcagaaattttcagacctgtttcctctggagatgcaggtactatgtccaagccagcttcctaataaccacgctggattctgatgtcccggcaagctacatccagcatgctgtgatccgaggaggcaacttctggtcaatggggctccgtgcactctacttcgcgacaacgctgctgatgtggatcttcgggccaataccaatgttcacctgctcggtgttgatggtgttcatcctgcacctgctggacagcaattccctgccattgcacaaccatcagttcacaattagaaaacggcatgatcagagagctctggcatctacagtggttacaaggcaccccagccctcagaatccgattctcagtaacccggtcttgtctcctgtaactttttcaataaattaatagatatgtttgctgcaaagcttggaggtttgtatggagtaacattacatgagaatatgagattcaggtacaaaattttcatcagaaatattgcttccctaaaacaaatgctactacatgaaatgtgataaatccatggaatcgtgacactgtcatcgagaaatgtgttgatgttatcatgattgagctgcaccacatcttgggtcagcatac

SEQ ID NO: 19650 - DNA, 5282 bp, Oryza sativa
ttcttctcccatactttcttatgcttgttgtaaatgaacattgctgcacgagcatcctcaatctataagagtatcaaaatggccacgaaaattagtatttagtacaagcataaatgatattgacaagaaagtttagtcaaatgattacaagttttcgctgtacaagtgattaaccatgtgaaagattactagcagtaattcaagagtaatcagaagtacattttaaaatgaataaacaaatctacattgcataaagagaaaaatattatgtataacttactgggcaatgctctttctgttgtattttagcaccaagtacttgagcagtaagatctttcagtgatctcctcttcccttccctaatataacaggagcacatgtcaatacaatgttgagcaatcttaacaagagcacataatatagaaaatatatatgtcaagatcatctaaccttcgaaaaacctcatattctgaggtatcccttatgtccttctttgggtggcctagtagcaaaacctggaaaatgtttaccgtgttacacaagaacacaaagtgcataaataattaaattatggtcattgacaaccttaagatcatggtgcaaggcatgcccaacaagaattcttcctttgatcagctcagctacatctttctgaacaacccagaaatctttggctgcagtgttgtacaacattgttgcataacccatataggttgccatcctctaaagaaataaaatcatgcagtgccagtttagtgatgtttacctttattcatgtgcttcggtctaatcccactaatatgggtacggtagtcaacaatccgctctaccggtcttgtatattcatcatatacaacgttaccccaagagttaacctagtaaaaagcacaataagattaatgggtgatattcaaaagaagggtatttattataactaaacttcttcataaagaggctagaattctcttcagctttctaaatcaaccttaagtccacagcaatttacagattccatgaaatcctttgatgcttcaaccagtgaaatcaatccaacactcaacatactaagaaataacatatatgtacattcaaattacgaaagcaaagcaggaagtaactatacattggtttttgttccttctcaagaactacatcatgcccattgctccccatcagtaaaagaaaataagagtatgggacttccttagttgcttccttccttcctagagagtagagtgcataataaaatgatacaaacataacctctcctcgacgcattgttagcattaccacatagctggtattacagtttaatagtgggtctcatagtttaactccagcttctttgttctttgataaagataacgaaaatgggtacacaaatcagcagaatacttatatggtacaattaatcatgccatgcccatttgactgtaatattacaaatcatgaatttcaagcataacccttaaaatctcagccaatgcatgggaaccatttccatagcacagcacaaagactaggtgacaatattgccaaacaaactagtcactacttagtgaaaataaaaattgaactggctactggtgagaaattcatgtttcttactatatattccttgcaaccaaataaggccataaattcaatcaagtaaatgatccatctgagttccaaagttaataccaatacatactagctaagcccaacattttgtcattacccatcctcctattgtgaatagtccaactagaatataatccaaatcaaactctgtactcaaaacagttgcaatctcattgccagcaaaacacaaatcacgatactaccttctttcaagattaaacagcttatgtcgcctcctcaccattttcatcaaatcgtaacaacaaactccgaaactaatgctcgcgcatatccttgactcccgaactatactgagctgattaatatatactatgatatttagctcattcatcattgctgtgcgcacagaatacaaaaggatgtatggaattgagatttgggaggacggtgcttattaccaaggtgactctgccgagggcgctcttgctgccgcctgcgccgaccccgaccatctcgcaatccacagcgaccgccttcgtcaagctgccaaaaccattccccatccatccggccatccccacagcaatcaaaatcaaaacccaaagcatctcaaaagcggcagcacaatacaaagacaagaagatgcctcctcgcgcggcgtttgctctgatggctcacctggtgtcgtcggaggtgggcacgagcttgacctccgccgcctcctcctccgcggcgggctcggtgggcgcgggggccggagaagggtggtcggggcggtgcttgcgcttgccgagggtggtggcggcgacggggcgggggagcttggactggagctgcgcccagttagggtttagggtggaggcgccggctgccttcggcttgggcttgggtttccgcttcgggctcgcggcggcggcggccgccggtggcggcggagaagccatggatgatttttgcggcgcgggggaaccgcgggatttggggttttctgctctcaacgagggttcatttgatttttgtcttgattttatactgtaatcctgaaggaaatattttgcttccaccttatgcacttatataaagctatactccctccgtttcacaatgcaagactctagcattgcccacatacatatagatgttagtgaatataaacacatacatatgtatagatttattaacatctaaatgaatgtggacaatgttagaaagtcttatattataaaacggagaaagtaatattctcttatcaaacatttttacctttaccaagattcattgaaggctcggatggcctaatcaacaaaaaagaaacaaattttaaattttcaaacttaattttgagatattttcaatctaattttttttcagcattagcttttaagttacctagaacacatatataaaagttttacctacaaatttatttttattccctaataagccgttttagcttattagggaaaaagccaaatgatggggccgcaattgtttaaattttaattaaaataataaaaaccaacatcttatagccaacgttaagtatgtcttgtgacatataatcacacattttatagtctaaatatttcttaaaaccccactcttaacaaatatcaactaatttcagaatatctaaaacaatactttttaaagcagtggagagttaaaccaacaatataataaagaaattggcaattgcaagtttcatatatactctatatttcaaaaattgaagcaagtgacatttactaaatgtgtatttaaaatgtataatggtggggttttatgaaactttataaccatagtttatgtaatgtacatggtactttgtgcattttcgaccactaatcctcgctttttctatctgttggttccctctcaatcaatttcaatatctctaaatatatcgttggatacgatccggctctggtaattttagggttcgcctctccttacttcttagctcctcttcttgaccaacaatgcccaaatgtgttctactttaaaataacactgcacatgacctgtttggttgatatactcaacttgcctaagatcgtcataacttttataacttgtcaaaaacttcagctattataacttttgtttggcattaaaatggtgaagaaaaaatcctgtcataagtgtatcactgaagcaaatggatgcctaacagcccgtgatgattcatttaggcaaaaaatcaagatttgatctaaaagtaatcctgtttaggacacttgaaaagttgcacctgatccagattgtccaagagagcttaaaaggttagacaggttgggattgacttggacagagagaacacttaaaccttcttgaacagaagcaagaggcatcctcaaaatctattgatacaagtagaataggagaacaagtcatggtatcgcggttcaacattttacccattatttcatttagaaataaaaccactatacacaaacttaaaaaatccaaatagaaacatgagctaccacagttttgcaacttgggaactacgtaccccaccagcatatacaaatttggggaggcccaacccagcatcaagatagaaagaaagcctgtcaactgtcgctctcactccatgtatgcaatgttagacggtatcatatcttacaaaaagaaataactcttatgcaaaatatttgtacaagggaacatctcagatgagaaaagggatcactcataagcattttctaattcaggtcgaactgtctgttgcttctaattttctacttccaaaacctccagaactggtgtcattttcaggtcaaaatagatcctgatctctgactactgtaggcattcctctcaaatactccatccgtcccaaaaaaaaaaaagacaaacccagggtttccgtgtccaacgtttgaccgtccgtcttatttaaaaaaaatatgaaaaaaattaaaaagataagtcacacataaagtattaatcatattttattatctaacaacaatgaaaatactaattataaaaagattttatataagacgaacagtcaaacgttaaacacggaaacccagggtttgtctttttttggacggatggagtatagtagcagtggtgtataatcaactgattagacacttgagatcaagaaaacatctcaaactcgttgggctgggaaacactctcaatgccatggatcaatttcctccgtggacctacagcatcaagacccatatcttttagctggttcattgtaagggaaactatctgatgcatccccagcttttcactgtccaatatgtcaacaaaccaccacaattgaaaagccaattcttcagcccaccaaatccagcaatccgtctctcgagaagtcgtgctcgtattatcctattcgtaacttgggacgaaataactggcagctcttcctttataaatgtttccaaaagaatttcctgctttctcatattctcatgaaactgtccttgaatggaagcatggtttgctttcacaacaggggcaacaggacggcgtgaagatgtagcattttcctgagctttcttgatgttggtagcaactttgatgccctctggaagtggctcgtgagctttgttggtagtcatctgctttggatgcttctttctcgcagcatcacagttttccatgctctttttggctaagcaagctcttgttcaaaacttatttttgcatatcatcctgaagacttg

SEQ ID NO: 19651 - DNA, 1416 bp, Oryza sativa
gatgacatgacgtacatccaaaacaacttttcatgacctgatggaacactatataattaatgttatgtttgtaacatgcaataagaacagttagtggctgtgtcgtacatctttgttatgagaaaagaagttgtagtcagtacaatgcatgaacactggaaaatccaaagtcccagctggctcataggcattaagctccaattatactaacctccacaatagaagtcagggttggctcaaaactccaaagctaaaacatcaggtaaggccagattcagggaaccactatttacatagccttgtgtatgaagaaacaattaatgcattatttctttctatttaattgttcctatcagcattatgcatggactttcgaggaaaaatgatgcctagagaacagaaaacaggaactaaaccaaaagttacgtgctcaaaacctaaaagcatattaattgaaccaaaagctattcaatactcacaatgttcaggctcacaacatgcaaaggggcatcatagaatgcaacagcagtcaattcagcaccagtccacttgtttaatgtgatcttaggaccagaagctatcagcagatgaccttgaagagacgcaacagctgatacagcacctttactctcttttgagtagacttcagtgacctgcaattagtgtttacatgttatcaaatcaatcgatacgtaacggaagtaataacctttttcccaattgcaataatgctccctcacagtaccagattttgagaattttcacttttcgtgaaagagaacagaagcacacgtcctctagcagctacatcctccccaagaacataagcagtcccaatggccaacagggtctcattttccttggtggttgtattctgaagtaaaaatgcataactgttcagtgaataatataattaaacctacagacatgtgtacctttgatcattaaattttcaaacaagataaatctcaagcatagaaatgacatggcaaccatgcatttggaagaaaagaagatagaaaaaggaagtaatgatgactttattatagctgacagtttatgctaacagctccataattgaattataaagggtcaaatatagagtatagagggcatttagtttgcaaaaatgtgcttgtgggttgctaaaatatggtgtcttcaaccagacaggttcacttggtttgtcacagaagttcatatagtttggtttcaagtgggaatgagaaaagacgcatacatgtaatgtaacaatgcgcacgttagagcattttcaaacaattgcattggaattgtggacttcgtctcccaatgtccaccaggtttctccagctccaaaatgcggacctcaaattcatcaacagtatatgtcttatgaagggcatcagtgcttgtaacatcgttatccatgtgatg

SEQ ID NO: 19652 - DNA, 2208 bp, Oryza sativa
tttcagctagtacatggaaaagcttgtacctccaggatgggataaaaccgggacaacatccattttgattcttctcctatccgctcctttctgataccatgccttttctaaaatttgtagagttaagtacaattaaaattactatggttgaaaaggtacatgacaacaaaactaaaagcctaatgaaataacacaagataccttacgtagatcaaatttcagagtaaagccacctgccgaagactttttagaatcatgcccacaaaggcaacgcatattactcactgcaatcatgtcatcagcagataatcctgcgagctgcaaagaaaatgggttcttgctgaatcttgtggtattagtcagtatatagtgtagcaactgaacctataagcttttgcaataactatttctaatttatctactgtggaaaaaatgaatgaaacatagacctttggggaaaaaaacataaatcaagccccccatcagaacataggaaaaatgcaagtttagaatcctaatttttttccctttgaacccctttggatcgaaggaatggtcccatgaaatcctatgaaattcttaagttcaatcaacgggaatttttgaagacttctagcatgatgtttggacttcaaggaaaatttccttacttttggtgctgcatgcgctgaatggaagagaaaaaagtgtggcaggtgtgtatagccattttggcttcaaatgaaattcatgtcaattgatagcatacttatacctcaacttatttagtactacctccgtttcaaaataattgtaattttagattgtttagcatatattaaggtttgagaagaaagactatggtgccccttattaaattgtgtataggtaagagtgggagggtagttgaggtacaataggaaaaattttgaatgagaagtgattgatgggacaattaatactgtatcgtgacaaatatttttggacaaatttaaattctagaaatataattatcatgggacggaggtagtaggaaatactgatgtactccctccatactcgtaaaggaagtcgtttaggacagcgacacggtctccaaaacacaattttgacttgttgtttctataaaaatatttattgaaaagtgatatatgtatacttttatgaaagtattttcaagacaaatctatacatataatttttgcattttcaaactcaacaacttgagagttattcatgatttatattttcaaggtttgacttaaacattgtcctaaacgacttcctttatgagtacggagggagtattaccaatcaatagcacataattacatcaaatttatatcggtacagcagtttacactgaaagacatacatccatgtgattaataaatatatgcctatcctatatacttatgtgactacttcaacctgggcttcaactgaagatttgatattttgcagaatggaccaactgaaaacatgtaatcaaaataaataataaaagaactagctgctacaggtagttcatcttttcaatttttaattgtttctacagcttacattgtactttggttttttgaagtccccaatgtgtagatctccagattgaattttttttttttatgcttatgaaagcacaggcagagcttcctatgaatatggtgtcaaattgccgggcttcaacttcctatttttcatgcttaaattatgttctgttagggacaaggtcaatgttgctctacacagagagtccaccattacatgagacctaatttttgttcactgtacatacacagaccaagtaccataaatattacgttgccttttaatcaaccccatttgtcatgttgagataacactgatgttttcctaaatttcttacgcatgatagtattttctgcagcaacgcataagcatcatctagcaatcaggcatgcatgaatcttgaggtgcttgttcagtgacaaggcaccattcaagttggtaaagttttattttaaaaataactgagcagatttcatgatagaaaagtaaagttacctgcatcaactttgcacccttatcacttcgagttttatctggattgatggcagcataaaccataagcaaacgcagcttattttcacgactgatatcctgcattagatccatgaaaatattaatattatatacatacaggtaaaatattccaataatttgtccaaatagccattaccaaatgtgtcc

SEQ ID NO: 19653 - DNA, 4941 bp, Oryza sativa
caggcattggtagatcacatattggcagtgatcattgcatattgacaggcggacaaggcagggaatgtaactactaacctcaacatgaagcgcaagcttgtcaatttgatcactgtactgcggaagagcttgaaccattttttgcaactctttggttgataaatctccaccatttctgacaaatataacacaagcatttacattacaaaaagaaaaggatcctatcaacagaaataattaattcaacataaaacaaatctttgaataccattaactattcagtatggcaagtataccaagaaactagatgcatcagatatttaggctgtcattgtacgttgcagaaagtattaaattctcactaattgaaaaaccaaaataaatggaacaatcaagcaaacaccgtgtctcaatgacaaatagtaggaacttaaaataatcttattgacacaaatggactaaccctttgggaatcagtgcagtagtccatggttcaatctgaatctgagctatatcaaatttacccgctattcaccttagtaatcatctgttgaccactataaatgtttctaaataaccaccagaatattcatggctcatcatttcaatgaatagataataatacatcaagtcatcaacaaaagctaacacactctggcaaacagcctaggcaggagcgaagctacattaacttacccaggtgcacgggacacccagtgttaatcagtttccagtagtatcgttgcatgccctaagagagggacaccccatgggccaagcataggaacacccgtccaagccaaccagctgagagcgcagcctaggaatgtctccgttcagcagatatcgctgttcagcaagataggcctgggcaaggatcaactcactgagaggctgagactgcgtagctatgctgtcgtctggagtgtcttaagcctaccaggtgctatcgtttttgcattcctggtttctttgaattatcccatgttcaattatctgtcctacacaaccaatatttatttatgataaacacttctataactaaatatctgtctgcatattattagaaataagattaaaatgagctatgtttgctctcaaagcctataaatgatcacgttaatcgaaaaaagcaaaactatactgtcaggtcctgttcatttttagctttttgtctggattattgtcgcagattatttgctccacccttctaaaaataaagcttctcaaaaaagaaaaaaaaaggactaaccctttgggtataatccatgtaaataatccacacaaaaatctgtttccaacagggccatatgactactacaaaaaattgcctaagcaatattgatgtataagttatagggaacacattgttttagggacttaggaaacatgccgcataccagacacaagccataagcgaaaaatagcgcacaattagtgatacatatggggcacccggttatttttgttctgggtttgctcctgagcctaggttttgcaatcatttgcacaaaaaagtaagcataataataaatgcaataatgcatttaatataaattccaacatatgttgttgtaatagttgcagaccacggtcagttagtattccattcatccccctaatttgtgacaattacatttattgaacaaaccttgcttgatgtagttgagcagctttgttttttgatacaaaattggtcatcttctcatgcaatctttcactagcctgcaatattgactccatgatgcattaatgaagcatatagataatgtttggagacaatggtgacagtctcacattggctatatgtacatgccgaagctaagccatattggatcatgatcctccaacaaaacctccttgttctcagtgcctgaaccagacttgcttgggacctgttgtttcatggtcagcattcaagagcacaacagaactgaaaattggtaaacaagctactacaaatgaagattttgacatgctcacctgttgtacatacttgttgccatccatgcagagtagatcatgacacatggcatcataggtccattcgtgaataattggtgcgatctgaaaacattaaggaaacatgagaacaaatcattgcttcattcaatgtggtagtcagtcaaactaaaacactaaaaaagggaaaattgcaaaaatcaccccagaaatgacttgaagtttgacattccacctcatacctgatctattgatcggtctacgataagtaattcacatgtttcagtctgagggaattcaggtatcatagccttaaatcttgcaaggcaattccacacaccagcagcaagctttgtgggtgccaaatctcgtagtgttgtcaaagtagaagcatcaatcgtcctggcaacacgatagtgcacacgaggaaattcctaaaataattgaaagcaaacaacttaagtaaaatgtatggcacaaagaagtttttttaagccaaaagtttcttaagaaaatagacacccaaacaaatattagcaaaacacaacaaaataaaatttgaatgactcgataagtcgtcaaatagttcttttacttttttagtaatatttttaatggaaaattgtaagtatcgggtttcaaattcttttgctaaaatagcactcactcagcacgccatatacccaagcagaatgccgactagccctgtcgacacgtggcgtgctgaaaaggtggacatgtgtccggagtggccgtcaccgagacaggtcctcttggcaaaaacacatgctgacaggtcatatccgcaaaccatttgccgatagggctacctggttaccagcaggccgttggcctcctcccatgccaacagatagcgaggcagctgctagcctttcaacacagtgaatgaatgtgtacccatgcagtgctattttggtaaatttgtttgaaaccctatactattttagcaattctccttttaacaaataatagtaaaatatatttaaaaactctcaaattggatcctgttttgaggaataattcttccatatgtgtatcagtggataattggatggaacaacctatttgtttgatatttctttaagtttgtttcctccattggcagaaaaacaacaacccaccacatctgcagtgtgcatgcttaattttttatagttccaggcttgcagaagacatgcgttacaattaccatatgtttttcctttctcattctttaacagtatattaatttcttacttatcaccaactgttcttttcatgtttaaaccataagaacaggaaaataaacatttaggtatatagacatgtcaagtagcataaaatgggaaaacagtaccctcattgatgcgaatactgtagcaatacgagtggccatcatgttaaggcaagagttatacttgagtgaaccttctgcattttcactaaatagctcttctagggccttgtcatggtcagttgtaaagccctgtatataacaacaatagattcactgaagccaaatacaaaattttatgatgaactaaatcaataaggagaaaggattgatttctttatggtttaaattaagtcattaattttttttaatctaaagccagcagtatcaaaaggctatgctaatatacctggctatcgatagcaaaatattccagattcatctgcaagcataaagcacaaatgaattaagaggaacaagtgtaattgcaatgttgaaaaatgagaacatgcaaggaacagataatagttaaactgacctcactgagtgcacctatgcgtgctctaacatttgaatctttttttatttgggccaccaactctctttgtacgggtgaactgaaaaacacataggctctgaaacacgtaagtatcgtgtccaaaataaaccatggttggtaaggtgtctccagtgttaccaggaatcagacaaaccggtttaaccggttgtttaccggtttgattgcacagcggtcttttaatcgaaccagaccagtaagagcattggttccggtttattctggtcggaccggcagtccagtccggttctaataactatggcgacaatcctaccacgatccaattgattctctcgtgtactctccccttcctgtatttgcggatctattgcttcctgtactaattgtcttcccctatgttccttcccaacgcttacatcccctgctgttgtactcttctatgctcttcctccccaggcaccatctgttccttcccacacttacatccagttgtgtactagtgtctaagccgtcgcctcgccttatgccttgccgctaaggcagtctagggtcgccttaggttgccttactgccttaacaaccatgaactaaacttggaagtgatacaacatgcataaacaagtaaatgcacaggacacatacttcttatacagtggtattttccctgacatgtcggacatgaatatgcgaatgctgcatcaacaccataataaattggttagagagtttgatggacaatacaactttcaatatcagcagcaaaccattgacatatatgactggcagttatcaatatcagcaggaaaccattgtctatctatatttccacatatgtttttcagtggaattaaatgaaagctccagcacaaattaaaggataaaaacaaatttaacacatcatatataattattcactaacaaatggaaaaattcggttttgtgcctactatcaatcagtaaattatttctgtgatcaatcagtaacaatggtaataggatgtggtaactagtcacacttacttttccttagttggttgaatgaaataaattgcatccatcaatggtaatggttgcctccgcatgtataagtcctcaaccactgcaaaaaaaaaaaaagaagcaaattctcaaatgtatatagatagacaatatttctgcgaggaaaatttcaaaaaactaaagataaattatcataacgatacagggg

SEQ ID NO: 19654 - DNA, 3237 bp, Oryza sativa
cattggtgatgcccttaggctgtgtttgcaatctggttcccaacatgcacagtacgcacagaaaatggagcggtccattaacacatgattaattaaacattagctaattttttaaaaaatagattaatataaatttttaagcaacttttatatagaaactttttacgaaaaacgcaccgtttagcactttgaaaagcgtgcgcggaatatatttgactacagaagataaaaaacagataattatggaatgaatacaaataatagtgatttgaatgaggacaaaacaattatgctcaaaatatcataccctaattatgtttgcccaagcagcatcatcagcaataatctgcaccgttgattatcccaagaagctccactctgtttccttgcctccttaagcaacctataatctcgttttaactgcttctccttatcttggatctgttgcttattcatggtgacatagggatgtctgttacgaaattctttgacgaccttgttccatgcttcacttgtccacccgttttggcaccggtaatgtcggttattgtgctcatgaagtaaatcaactaaagccttttctagtcccgggttccatgaagctcttaattgttgagctattagacaaaattagatgatagtaagtaaattttgtaataattaacatgaaaggaaaatactccacaaaaccaagttagatactacctttgggagaaaccttcttcttctgtgtgctacagctctttggcgataccttcttttgtagatgcctttgttgttgctgcaataggcttgctttcggagatagtcttccaaacatcataactgtattgcaatattttattgaatgaggaaatacaaactacattacttactattaattgcccatatcataaatgttgattacataaataaatacaaatcataaaaaaccaaaatattatctatactattcttgctagctacaaacataatcttcccacatctaatactattcccactgatcatttgattgctaagagatgccacatcattttggtattcactgtcaccttccggtagatcaacaaaattagtaggctttatattatcaggtgggttgtccaaccagccctcatcaccattaagaaatcggatcatgttgtggaataccgcagcagctgctggaatccacacttggttctttatccgatggaaagtacctactttcaagatgggaaatcgcttctttaaaacccctagagctctctctacatggtttcttagaatggaatgtcgatgattgaataactccttgtagtctctaggtcgacgatgaccacatccaaactcctttagatggtaccgaacaccacgataaggagcaatgaactgtggtgtgttggcataactaccaactagagaaaatttaccatctaggacttgaaagccactattcattgctgatgtaaggaccctagcatctgttgcagatccctcccaaccacatgagataaaagtgaaatttaggtcaaaatcacaagcaaccatcacattttggctcaaagtcccctttttgttcctataaggagctgccttctgtcacaccctaaaaaatcctaaatatataaattgttgtttaattggaattattagaatttattttaaaaagcctagaagagaagatctaattttaattaataaattccaatataaaatggggccagataaaatttcattaaatactttgcttaattctataattcctagatttttctgggatttatttgagctaaggaagtatttttaataaatggaattacatttaatgaataatttaaattggaaaaggttttaaaaatcctcttttggctttgggccgaaagtcggcccaaaaccttctctctccctctccctggcccaagtcggcccagtccgcccgtagtcgcccgcgcgcgcgctcggccgctgacaggtgggtcccacctgtcggactcgtcgtcctcctcgcgtcgtcgcccggccggaaccctagctgagccgcgccgccgtctccttccaaattcgctcgcgcctttccttctccggtgaaatcaatagaggggaaatgatcttcgggatctcctctaccttttctcttttggaatcgtcggctaaaatcgtttggaaatccgtggattcgagttcgattcggatcgatctctctcctccgaaccctagactttccttcgtgtcgccggtcaccgtgggccttcgccgccgcctccttgctcctataaaaggacccccaagcccgccgctaaccgccgccaccctcgtcgtcacctctcgtcgccggtagagccctagcatcgtgtagcctagcgccgccgtcgccgccacagctctagccgtgcgccgccgtcgctccggttgttgtcgctgctcggggaggtcgccgtcgtggtcaccaagccgtcgccgatctcgtccaccccttcgccgacgccgtaagtcgccggagcaccgccgtcgtcgtcaagccgaaggttgccgccgcttcttcctcgacgtcgtcgccgtcggttgatcttccgccgttgttttggtcaccggtgagttcgccgcttcgccctctacgtgttagtgtcctccgttcgcgtcgtcgcgccgtcgttcgccggcgagcttgccgcccgagccgccgccggtgatgacgtcatcgccgacgtcatcgttgtcgtccgtcgtagaccggttgtagaccgttagatcttggccgttcgttggggataggatcgatctcggccgttcgtttccgtgagccgccgccgtgcacccggttcaccgcgaaccctagccgctgacgcaataattctcttttccttttcaaaaataattcattattgcgtcataattcaattaaaatccatataagtgatttaatccgatttaatctttaaaaattcataactaattcatctcagctcggatttagttggttcaagtctctaaatttttctaaaattgagatctacatgttaaaaatatccacatgtactgttcatgcttgtttatgtgctgttttggtgtttttgctcttttctgtttagattccgacgtttccggagagtccgttttcgcaggagaagaatttgaggagttccaaggccagcaaggcaagtcacacagatcctaaacacaatcctttgagcatgttgatcctatatttaaattctctatttatttcaactgtgcatttattttcgaatgtcactg

SEQ ID NO: 19655 - DNA, 3203 bp, Oryza sativa
aagttagcattcttcatttgtcaaacatttcatccatcatccacaaaataatactccatgtcatttatgcctcttcctccaaagctctttcaaaaaaaaggaagagagaggcatggctatgcaaaaagaaataaaaaaagtgctcatacaagtatggagcatgatgatgaaaaaaaaaagaaaaaaagaaagccatgcactctcccaaattttcaaaagaaaaaaaataaatggaggaggaggtatacaaaaggagttggtcatatttttcctttttccacccacaaattaaccatacacatacacatgcacattcttgaccagaaagtatgtcttgtatttccatatatcctttatttgactttgcaatatgtgttatgcaagtaatgctctactcttttccataccttgagctccacataagccttattagatgataggaaaagaaaaggcacaatcgtatgcctttgtgaggaatcatacaccttgagtgattaagagaatcaattgaggagcaaagcaaagttataattttgtgttacataaaagaacccaagttgttcttcatgaaaagttagggtgacttgagtcaagattgttccatttctcaattgctcaggatcgcatggtagacactacgaagatccaaagtataggtattactttgaataatttgtttgaatgattattagtaaggaagtcatgaccctgttatagagtccatagccttcactcgggacgagcaaaggttaagtgtgggggtgttgtggacggcccttaaatcataatatctgaccgtcaatacttgcatataatgaaataaaacatggtatccaacttagtgtaatcatttctactagtgttggtgaaatatgtgtatgcaggtaatttgagaagcaaacacatccgtcatgcaacaaaatgcacctccgcgcattcgggacgcatttacacggattggaggcccaataagtcaataaaacccatttagaattggaccaaaacatagcccaggttgttggggcccattaagcaatctcccagctgaaggagaggccgggatgagtgtttttgggttcggccgaacccaccaattcggccaaacccttcctgtcgcttcccgccatctgcttccaggtggacggcgtggattcctcccctatggcggttgcagggtgttttggtcatttcctatacccctaaccgtcatttggagcctatataagaaggtattcatctcacttcaagcatacacaaccttgagctgaattacaagaggctctattgtatcttttgtacattagaataatgtagagagtgaggggaagctctagaggagtgcccggaagtttggcgctcatccaacttctacctcgacgagtgtagtttactaggaggaattcgggaggagtaccggagctgtcggtacactctgcttcgggttcggagaacttcttctataaagtaagcattcgtgttcttttcttatgttatttaattactttgtctgagtaagatagatttccatctttgcaggttcattgtttagtattttgatgtgaccatgactactaccgatacaaccattactcacatcatggatgaacaagcagatatgaagatcaagtcctccaagtgctggaatctgattcggccacctgctgcattgctgacttcaaacggccgccgaatctgcatacgacctccgtttttggcccgtgagtacttgatggaaagctctcagagccctctttcttacggagctagcctcatcaccaaattccatgtcgtttggaagcaatcacataaacaaggtgctgcatcacctgtcttgggcctctgagcttgtaactttgtttgggaccccggaccaattggagcccatgtggggtgcgccccaaccaggtggagcacgaccctagggtcctcccacctctataaatagttaggtaccccttcaggattttttgggttttgtttagataaaagtttagcttcgctacttttccgtgtaatcccgtgatcggttagatcgccggtttactcgttacggaaccccaaacctatcatttgtattcaattcctatctgcaattcagattgcttttatcttgttcttgcttgtttcttcgatttgcttgcaggaacaaggttgatctgcaccgacaagatcaacaacccacaaagaggtgtatcaatcgctaaggcgcaacacaacaacgtctagtacggttgtagtcgggtcgtcaacgtttctcccaaatcgtagttatcttcaactcaccgaaagatcgggccaacaacagccttgagtgtctcaagtggaactcagggttcatcaggtggtatcagagctttcgttgctcggtgagttttcatttacctataaccagaaaatagccaaaaaaaatttcatacattacctagccacatttgtgccattgcattgttctattcagtttttgctttgttgaatttttgttgcattgtcacgtcgtgttgctggtcttagcgtctagttcgtttagagtttcgagttctggtcacgttttgtaccacagtcgtcgccgccaccgtgtctctgttgtcgtcgggacctatgaaaacggaatcggctcgctgctacggttccatttttctagttttcagaagtttctgtcggtcggttttggtgttgttgagttgcatctagggtttctgccgtgtggttgtctcgctcccgaggttgtgccgtgcatgctgttctattgtgcgcgaggaagaagatctgttgcgcgaggaaggagaaagaaaggataacggatcggttattggaggaagttttgcggattagattagattgggtcggtttgtttccatctaagaccgaacttaccatcttggcatagttagttttccaccgcacagaagttggcgttgttccctgactccgactccctctcgtctcggttccaatgcataccgtgagtggctagacaccttggtaaaaaattttggagtgtcgaattggagatctgttcgtaaaaatggaaccagtataaattcagcattccatttttgtataatttgtaatttgggttttgacttttacagttgagtccatgtaattttttttatttaagtttaagtccttgtaacgttacattgaggtccttgaatctgtttttgtaaaaaaaaatcaaaaaaagaaagaaagaaaaaggc

SEQ ID NO: 19656 - DNA, 836 bp, Oryza sativa
cgtcctcgcgcgcgaactcccccttcgtcttcagtgacagggtccccctgtacaccgacccgtacttcccggcgccgacgaggttggcgtcggcgaagtcgtcggtggctttcgcgagctcggcgtacgtgaccctcgggtagtagttgccgttgagcacgctgcgagcggcggcgtttccggttctcgaactcctgatcttgcggcgccaccggagcaaggcgaacatcacggcgaagcaaagggccgccgcgacgacaggcagagcgatcttgaggaagagatgagctcgtcgtgtggagttgcccggcgccggacatggcggcaaccgtagccgcgccgcgccgccgcagagcgcggtgttcccggcaatcctcagcccggtcgtgttcgcgaacacgccgtggactggaacctggccggcgagacggttgtaggacacgtcgagctccatcagcgagctcatggtctcgaggctcgccggtatgccgccggacaggtcgttccgcgagaggtacagctcttgcagtcccggcatcccgccgagctccggcggaatgctcccggacaacctgttgcccgtcaggttcagcctcctgagccctttcagcccactcagagatggcgggatgcttccgacgaacacgttgcgggccaaatcaaggaactccaagctctggcagctctccagctcggtcggcacctcgccagagaagcgggttcccccgacaacgccatgaacgcgagcttcgtgagctggccgacgtcgggagggatcgggccgtccagctggttgtccgacaagtccatcagcagcgacagcgacgagagggtga

SEQ ID NO: 19657 - DNA, 610 bp, Oryza sativa
cattttcccctatgagtttttacatgacaaagtttttaacgaggcagcatgtatcattgtatcctgtaatgatataaacattaataaaggtcattactatttttaacaaattcttttgcaatattttcgcaagtgtggatttacctttaaattatttcaaaataatgaatcacaatctatatttttaaatttttcaacacaacaaaaaaataccattttttcttttttttaacattagcaaatcattacttttttaaaaaacttttatttccattttttaaataccattttttcattttttaacattagtaaatcattacttttttttaaacattttatttccatttttaatttttttttccttatacatttcctttcctttttttaaaaaaaaaaacactgtgcatgcactgtgggctggcggcctgccttcacgggccgccgtgccccgaacggcccgtgggccgcgggcgtgccgtgccggcacgggcacggcccggccatccacgggccgtgcttgggccggcggctctgcacgtgggccgacacggcacggcccgtttcatcagccgtgcctaacgggccgtgccgaaacgggccgtgccggacc

SEQ ID NO: 19658 - DNA, 593 bp, Oryza sativa
gggaatggccatgattcagagattgatgagtttgtgaagatagcttttgcgtgtatcatggttcacccgagggagaggttctcaatgtaccgggtttaccactctctgaagagcattggacagggtcgtgatgtctcagagcaatttgatgagttcccgctggcctataacaaggatgaatcagataccatgtaactaatggtggtggtcttgcttgggattgtgaaccgccctcggtcaggctcaatggatgcttctttgtgtagtcctgctacttgaattgatgaagagcatgctgaggcaaccatattggcatgataattattgctggatgatcaattcgatgcttgcctcatctcctgtcgagataatcgtgtaagctgtaagattttagtctgtattgtctttttacattattgctagcgcttgtagtatctcgctttatgcctaaattctgatatgaccttccttcttggaacaacttgcctccttccccaatctcctaagaacaatattggcagtgaacaaaattaatcttgaccaatttatctaaagtttacaggaatgtttcgctctgtcatgtactcatgttc

SEQ ID NO: 19659 - DNA, 1577 bp, Oryza sativa
tctatctttgcgggttcattgtttagtattcatactaagtgctctagtactaggactccggataaagaaggaagttcctacgcaagtattagagtagtaattaataacttagacgtggtgtataggttagagattacctttgtttgttgtgtatcccacggatttgtcagaggtaggtggcaggtggtgacagccctgaatcccgtcctagtaatcctccacattcaggcatatcatagagctatagccggaaccacgctggcagaccagcaggggtcggtgcccgaagcaacagatagggaatgacctttacttagcttagataattaaaacacatagaaagtcctctctagcctagcctgcttaccatcagttgttatccttggatagtcttagccttaggtagattacatatgttccctgagttcaatatccttttggggtcatctgaaggtgaagtgctacagcggtattccgtgcgcttgcggatttatttgtggtcgtaagaaataccaacacacatagaaaggattagagtatcataaagatgtaagtactaattccgagaatacaatccgccataacaagctttacctattcgtcagagatcgaacccgatgcagcccaactcgaaagcaaaaactcgttgaaacaatgaaattaaaaaagggtggcgatacaccgaagtattattgaactgtcgtcctttgatcacaaggtgtcgggtcctatttatacccaaagtacataatatatccttgttggacacggctcttatgtctaatacaatttaaaacacgaacaagtcccctaggcggactattaccaaaaatatctctaagaaaactaaaaatatcataattaatagatacaattactcattttcaagactccaatccttgtgtggtaatggctatgaagtgctttgatagatcccgatgatagatgtgggaccgtctttttcaagactgattgcatcggcttgactccgttggatttggcgccaacctatatatggcagccgatgccgctcgtggccgatatgcaccctactcttcttaaacagaattcctccaaatcgactttgattctagctttgaatctggcccatggcattaccaaatttggtcgttaacagatctacgatccgatcacaccattgtatttgtcgtaattaaatctttacaacaaagatattgcatggttatattgtaatgaaaaaaaagatgtgtgttcaaccattataattcaatatttcctatgtcatatagatatgtttcccattgtgttccaaaaattcacacaactacctccctcttctctttctcctgcttctctccattctatccatcaatgcatggatttagtgagctttacaatgatttttcttctaaactatttatcaaatctatgatccaatatcgtaccatttgtatttgttgtaattaaatctttagaacaagatatcgcatgattatattccgacaaaagaaaaatgtacatttcaggacattaaagctcattgttttatatgtgacagcaacatgttgcaacacacgttctcattgtttcacaaa

SEQ ID NO: 19660 - DNA, 1163 bp, Oryza sativa
tgctttttgaactttttgattcctgtcgaaaacatcacacccacgtgtgacattattggcattaattgacaaaagttcgtcgcgtgaatcacgaagtgattttttgccacgaacgcacccaatacactccaatatgttcaaaaatcatgttttggtgctttttgaacttttgcattccagtcaaaaacaccgcagccacgtgtgccagtattggcattaattgacaaaagttcgccgcgcgaatcacaaagtgattttttgccacgaacgcacccaatacactccaatatgttcaaaaatcatgttttggtgctttttgaacttttgcattccagtcaaaaacaccgcagccacgtgtgccagtattggcattaattgacaaaagtttgccgcgcgaatcacgaagtgattttttttgccacgaacacacccaatacactccaatttgcccaaaaatcttgttttggtgctttttgaacttttttattccggtgaaaaacttcgcacacaagtgtgccaatattggcattaattgacaatagttcgacgcgcgaaacacgtagtgattttttgcaacgaacgcacccaatacactccaatatgtcaaaaaatcatgtttcggtgctttttgaacttttgcaatccggtgaaaaacatcgcatccacgtgtgccaatatatgccaaaagaaatgatcagcaaggatatcctccgtcttcttcacaccaaagtgtcccatcagccctccaccatgcgcttcctgcaataatagcatacgcacggagctagctggaatgcataacttattagctctaaacacaaacccattggtgagaacgaatttgttccaagtccttccctccttgcaattcaacaacacatctttaaaatcatcatcgtgcgcatgttgctcttttattgtttctaagccaaaaattttgaagtcaagttgggatagcattgcgtaacgtctagacaaagcatcagcaatgacattttcttttcccttcttatgtttgatgacatatggaaaagattcaataaattcaacccatttagcatgcctacggttaagttttgcttgacttcgaatgtttttcaaagattcatgatcagagtgtataacaaattctttgggccataaataatgctgccatgtttcca

SEQ ID NO: 19661 - DNA, 1380 bp, Oryza sativa
tgatgggccatcgagcgatcgccggccctatggccccaaggcttgatgggctggaaaggcttcttcggtcctcgcgggggcgaacttgccatggcaaagtcgtcttccttcggcaggtactcttcgccttacacccttcgtccgagacgcctctggcttgacaaggtactcgcacgacccctcgcctctcgctgttctcgctccatagtcttcgccatgggtttcggcagatttggtcgaagggcctcatgccatccttcgaccgtgcaaaccatgtggtatggtatgcggcgccccctttcgaccgatgctcctgccgaaacctacaatgttcttacgaataaagtttgttatttgcgcggcctgtactattttgccgctcttcgcctcctgcagtctgtggcatacatatatatattttttacttttccccggccgaaaagaacagtattgggctttcccttcgtgggcttttttactgtgctgcccggtcagtgggaatttaccgtttctcctacccttgcgacacgtggcgctttattactggtgggtaggcgaaccgtcgctcgggtgagctatatattcccacccctctttcctttccaccgccacacttgacatttttaccgcgtgcgctctcttcgtccgttcctttcttccatagcatttcttgaaccctcaggtgtttcgcccattctcttccttcgccaccgcatacacgccattcgccatggcccctcgcaagccaaaccttgcttcggcgaaagggccggatcccggccgggtcgatgacgacagcaccgccttcttgggggtttctctcgtggatgacgtcgagctggcgaagttggtcagctctggtgcgttggttgaggggcaggctttcgccccagggaaagccgtggtgccgaagcctgtcgacaatcggacggtggtgttcgccgtcctttttgaggcggggctacggcttccgtgcaacgtgttgttgccggagatccttcgcctattccaggtggagcttccacagttgagcccgtcggcgctagtccggatctccatcttcgactgggcgtgccggacctccgggtttgagcctagcgtcgagctcttcggcaccatatttttcgccaccgtgaactcaaagacggtgattaccccagcttgaacaaagaagacagtgttcgggagcgtgaactttaacgttcgccccgagcggtccgatctttggccggtgaatgctgccatgtcgaggtggttctatcacaccatccccttcgaggctggttccgactcgacgaaagccctccggtgccggcgtagggcgattgcgccgaaccgaaaaccctagatcgccgtggggggcgctatggaggcgcggtt

SEQ ID NO: 19662 - DNA, 1712 bp, Oryza sativa
cctccccgggcaaacccccacaaagccgacgacaatgcaggaccttcgcgaaagcgaatgcgcggacaagtgaagcttgcccctaggaagcgaatggttcctgcttcgtcgtactccgacgccgacgacgaagacgatgccgaagagcatgacgcgaggaggaaagagaggaggaagaggaggtggaggccgtggccgaaaaggccgcgaacgaggcgatcaaagaccgcgtcgacacccctggctatactcctactcccagtccaggtcacaaggagaccggggtggagtcaaacagctccccccttcgacgaaaggatttggaaggggcgaaggccctagttgcattttcgtcgggcaaggcggtgaaaggaggtcgggtcaagaagatctctaaaaagaaaggactcgttgacatcgctcgcgttttcagcgacgacgagtcttctgacgagacttcgactttgcccgctggccacagtctggacctttcgactgctccccttcttccactcggcgttgctggggcaggcggtagcgccgccgccggagcttcagcctccgccaaacggatcgtgacggctgcagcgagggtctttgggagccctctgcgtgaaccagctgtttcgccgttggtcaagacgaaggggaagggtgtggccgccgaagcatctgcctcggaatattcccttgcggcgccccacttcgcccctggtgatttcgagacccgggcggaccttattccctttgtggagggagtaagcaatcttgtcctacccgccggtacctcgagcctgttcaccgaactgaatgagttcgatgaggggtgttctgctattaaaagcttggctgttcaggtacgctttttctcccttcttcgttttcctctccccccttttttttacatcacacaattaacattttgttctcttcgcccgctcttatcttgcctccagatccttgcggctcactgttcgacagagcgaaccgtgcgggcccgtcttgacggatttaagaaccgtcttcgggccaaggacgacgaaataagccgcaagaacttggaggtggaggccctcgcgaacactctcaaagaggtgaaagttgaagtcaagcgccttcaatccgagttggagaaagggaaagaggccagggccgaggtcgatcgcctcaaggccgaactggagaaggggagagaagccatagcggaggttgatcgtctgcagaccgaattgaaggaggagaaggcccattccgccgtgctgactgattactataacctcactgagccgaagatggaggctcttcgcctgaaggttagcaaggccgaagcgagtgctgtggaggagtcgcagtggttttcgcgggagatggtgaaaactaccgaatccgcgagaacggcctgccaaacgctccgcctcgcccttactgacatgggcgcgaaggtgtgaggggtccctgctggctggtgattctgtttcggactgcgccaccgcgtacggcgattgctgcgtgcgtgtatcggcggccttcaccttgggccttttgcaacagttcggctgcgagcacgtcgccgagttccctaactatgcgaagggggactaggagattagtgcgcgtggcgaaaacagttctggcagaaggacggccggtccgctgccaaggcgcgcctttgggagcaactagcaaaggcgaaggtggcagaccagtgcaaa

SEQ ID NO: 19663 - DNA, 4615 bp, Oryza sativa
gtttttatgttgatcgaacataacggcgttcggctagttattttttgaaataagctgttgtggtttcaacgttcggtgagcgatgcttcggccgattcgtttcgcccccctggcctttttcgctgatcaggcgtttgccttggtgtttttccacaaattatcaatcacacaaaaaataaaaagaaggcggaggacacaaaggttttatactggttcgggcctccgtgatggataatagccctacatccggttttttttccttttcttttatttttctgccgaaaggcttacatagtgccgaagggcttacataacaatatgtacatttttacaagttggcgatttgggtgccacccattcttagacatagaagcgcttgagagaggcggtgttccaggaatggtcgaactcgtcaccttctagtgtcgccaatcgaaaagatcccgtcctagacttgtgtttgatgaggtatggtccttcccactttgattcaagcttgccaacagcaatcgggttcgctttcttccttaggacaaaatgaccaggcatcagttccgtcggtcgaacttttttgttgtaagttgccgaagtgcttgtggcatacttgcgcatgtgctcaagtgcttcaactcttaccccctccaagagttcgagcgacacttcgcgcccctcttcgcctccagagaacatcacccttggtgagttagcccctagctctgctggggtcattgcttcgtcgccataaagaagcatgaacgggctaaacttggttggtcttgtgggggtcgtccgaagggcccagagaacggatagcatttcctctggccatttgcccttcgctgccccctcgagccttttctttagtgcttctaggatcttgccatttgtacgttcggccgccccatttgactgcgggtgcacgaccgatgcgaacctgatttccaggttcagccctacgcacatttctctgaacttgtcagagttgaactgcttgccattgtcggtgatgaactcttttggtactccgaaacagcagacaatgtttttccacacaaacttctgtactgctgccgaagtgattgccccgaggggttcggcttcaatccatcgagagaaatattccactgccacaattgcgaacttatacccgtttcgcgccactgggaatggcccaatgatgtccaatccccatctggcgaagggccagactggcgcattgggctgcaaatcatactggggcgcggtttggcttcgaccatgacgctggcaactttcgcacttcttgatttgctcaacacagactttcaacacagtgggccaataaactccgtgtctaaacactttggaggccactgttcttgcggcctggtgagcgccacatagcctctggtgtatctcctttgccatttccttgccttcggcgaaagagatgcaacgaagtaagggttgaagtaccccggagcgatagagctggcccgagaccatcttatacttcgtggctctaagttgcaagcgctttgcttctgcttcgtcttccggaagctagccagtttcaaggtgttttacaaacggggttcgccagtcgtatgggtcttcgcccagtttcacctggtcgattgccatgatctccaagctgtccgtgggcacacttggtgcatgcaggacttcgaaaaagatgccaggcgaatgtgggccaccacaagcagcagatttcgccaaggcgtctgcttcctcgttctggcctctaggtaagtgttcaaccgttatgccggtgaagcacttttccatggaccgaacggcctccaaatacctcttcatccctttttcttttgcctcgaaggatttgtccacatggcctttgatgtgaccatggctactacgaatacatccgttgctcacatcatggatgaacaacaagatatcaagttcgagtcctccaagtgccaaaatccaattcggccacctgctacactgctgacttcaaatggccgccgaagctgcatacgacctccgttttcggcccgtgagtacttggtggaaagctctcggagtcctctttctaacagatgcagcctcatcgccaatttccatgtagtttggccgcaatcacataaacaagatgctacgtcacctgtcttgggcctatgggcttgtaacttttgtttgggacccggccccaaatggggcccatgtggggtgtgccccaaccaggtggaggacgacctagggtcctcccacccccataaatagctaggtaccctttcagggtttcttgggttttgtttagatgaaagtttagccattgctacttgcttgcagcgcgcgtgtcggctagaccgtccgtctgcttgttcttcggaaccccaacttatcatttgtattaaattcctatttgcaatatcagattgtttttatcttgttcttgcttgtttcttcgatttgcttgcaggaatagggttgatctgcaccggcaagatcagcaacccacggagaggtgtatcgatcgctaaggcgcaacacaacgtctcgtacggttgtagtcggatcgtcaacgtttctcccaaatcgtagttatcacaactcaccgaaagatcgggccaacaacagccttgagtgtcgagaggaactcagggttcatcaggtggtatcagagctttcgttgctcggtgagtttttatcttcctataaccagaaaatagccatacaaaaaaattcgtatcatttacctagccatattgtgccattgcattgttcttttcagttttgctttgttgaattttgtgttgcattgtcacgacgtgttgctggtcttagcgtctagttcgtttagagtttcgagttctggtcacgttttgtaccacagtcgtcgctgccaccgtgtctctgttgttgtcgggacctacgaaaacggaatcggctcgctgccacggttctatttttgtagttttcagaagtttctgtcggttagttttggagttcttgagttgcatctagagtttgccgatccttgtgtgtgtttgttttggccgtgcctgtgtcgtgcacgagaggaggaaggtgaattaccatatctgattttggaagtagtcaagtttgttttggaaagatatagtagattggattggttaaaaatcagtttcctttttatcccatacacaaaattcggctgccatccactccacctcctggccgagtcccactcgccccattggccgagtccgactccctccctctcttccaccgttccgagttgtgtcaaacaccttggcgaatttttgtttggtgtcggtttcgagatctgtttggaaaaacggaaccggcataaattcagcattccattttttgtataatgttaattttgggtttagacttttacatttgagtccctataaattttatatttatgtttgagtccctgtaatcttacattaaggtccttgagtcagtttttgttaaaaaaataagaaaaaaagtgagaaaaaaaaggcagaaaggtgcaaaaaaaaaaaagaaaaaaaaagccgcaccaaaaaaaatcagaaaagaaaaggaaaaaaaaaagaaaagaagaaagaagaaagaaagaaaagagaaaatactgttatgtttgagctaaacttcatatatcagagttgggcatgagttgttcctagtgctatcttgtggtatcgtttgtgtctaggctcgcgtctctagtacgttctagcctaggaccagcacggtacttgactttgaacaattattcaactttgcattatctgatttgagcatttgctattcctttgctacatatttaagcctacccagagctccacatatttgattacagccgtaccgcaagtgtttgccaaggcatcgatacatccaaccttcattggggtgcttggttgagtcggtgtatgtcaccattccacttgcattggtaagatcttgtaagagcttggttaaaagcttgagtgtgtgcgatttttgagctgccactacctagtagttaataggaacgcgcatatttttgtgtatgtttcttgttttctactaacaatggcagggatatgcaagataattggggatagctgtgctcaacatcgacatcttcgtcgagacatgaggagggatcaacatgaccattatgaggtaagtgatgatgttctaggtaagatcaaatctgcactgccttatttcgagggaaactatgatcctcgtgcttacattaattgggagctagcggttgatagtgaatttcaaaagcatgtcttgtcagagaaacaaaaggttatgtgtgcctctagtgttttaattaaacatgcttctaatgattggaaacgtctttgtaggcataacaaaataccacaatcttggaaagacctgaaacgatatttcagagatgtttatgttcccatgtattatgctgacattttgttcaacaaactacaatgtttaaaacaagataccagaactgttacttcatactatcatgatatgcaagcttgtttattacgttgtggtttagatgaatgcgaagaagctaaagaattgaggtttttatgtgggcttaacaaagaaattcaggacatgcttgattgtcaaagatatacatctctttctcatttgttac

SEQ ID NO: 19664 - DNA, 2437 bp, Oryza sativa
gaaacaggttattttgaatggactatatgaagaacaccatatggaaaaaccgaggacggttttccgtgaagaaggggaggatgatgtgaccatggctactacgaatacatccgttgctcacatcatggatgaacaacaagatatcaagttcgagtcctccaagtgccaaaatccaattcggccacctgctacactgctgacttcaaacggccgccgaagctccatacgacctccgttttcagcccgtgagtacttgatggaaagctctcggagtcctctttccaatgcatcaagcctcattgccaaattccatctcagtcggcagcaactgaagaaacaaggtgctgtgacacctgtaatgggcctatgggcttgtaacctcatttgggaccccggcccaggtggggcccatgtggggtgcgccccaagctggtggagcacgaccctaggcacccctaggtcgtcctcccacccctatatatagctagttaccccttcagggtttctggggttttgttagattaaagtttagccattgctacttgcttgcagcgcgcgtgtcggctagaccgtccgtctgcttgttcttcggaaccccaacttatcatttgtattaaattcctatttgcaatatcagattgtttttatcttgttcttgcttgtttcttcgatttgcttgcaggaatagggttgatctgcaccggcaagatcagcaacccacggagaggtgtatcgatcgctaaggcgcaacacaacgtctcgtacggttgtagtcggatcgtcaacgtttctcccaaatcgtagttatcacaactcactgaaagatcgggccaacaacagccttgagtgtcgagaggaactcagggttcatcagccttccaccaacttggagtcggttcggattagcaagcgccggaaccccagtgctttcgcctttcttagacccaggagaatatcttcgtattccgctgcgttgttggttgtgttgaactgcagccttgcagcgtaccgaatcggcacaccattcggtgaaatgagcactgacgcaatgccttgtgcgaccacgaaccgtcggagcacatcacccagaattattcgatgagctcgggctcaggggcaaataccggtgtccattcagctacgaagtcagctagcacttgagacttgatagcagtgcgtgcaacaaaatgcaagtctaacagggatagctctgccgcccacttgctgagccggccggtgacttccttgcctcggagtatttcgcccaaagggtactatgatggcactatgactttgtgggcctggaagtagtgcttaagcttgcgcgaagccatcaccagggcgtaagtgagcttttccatttcaatgtatcttgtcctcgctccttgcaatgcttcggagacgaaatagaccggtttttggccgaactctgtttcctggacaagggtagcgctgacttccaccggcgaagcttctaagtatagtagcagttcgcttcctggtgttgggcttatcagagctggcgggctttgcaggtattactttagctcgtcgaacgctgcttggcagtctggtgtccaattaaactttcccgtgccccggagggtcttgaagaagggcaaacctctttcggctgcttttgagaggaattgactgagtgccgcaattcggcccgcgagcttttgtacttcatgtatgctcgatggatgattcatttgctgaatggcatcgattttctcgggattcgcctcgatgcctctttcagaaacaaggaagcctaacagattacctgcgtgaacgccgaaaacgcacttgtcaggattgagttttatgcccgctgcacacatggtcgaaagccttgcggctttttacgacgatgtcatcgacataggcttccacgtttcgccccaactgcttgcaaaggaccttatacactagcctggcgaaggttgctcctgcattcctcaggccggaaggcatcctgaggtgacaaaatgtgccgaacggagtgatgaaggatgttttggggatgtcgagtgggttcatgtggatctggtggtagccggaatattcatccaggaaactcatgagttcgcagccagctattgaatccacgagctggtcgatccacggcaaagggaaatcgtctttcggacatgccttgttcaggtccgtgaagtcgacaaacatgcgcaattcccgtttgacttccgcaccagcactagattcgccagccactccagatggtcaatctcttgaatgaccccggctctgagaagtttctggacttcgacttttgctgcttcttggcgatcggcggacatcttgcgcaacttctgtttttttggcttggtattcggtttaactgccaggtgatgcatgatgagatatgtcgaaacacctcccacctcatcggggctccaggcgaagatatcaa

SEQ ID NO: 19665 - DNA, 629 bp, Oryza sativa
cgtaccaaccacaagccagcgtgggcaacggctttatcttttgtatagcatggttcattacggggtgccagactgagaagcggcgagaagtccgtgggggtcgctggggagtccatgcctttggtttttgagggggtgattataatccaggaatggtgcactatggtgagttgtgttgtgcgaagggtattgtcacgatttccccctttgcagtgccgtggtggtacttcggggcatggcaacatgtgtggaatcgtgtcttgtgggtacagtggtacacctctggccagagtaaaactattcgaatagccgtgcccgcggttatgggctggttgagcaatatttttcgtgattagtctcacacctctcacaaatagttattgatgcaataactggtaataatttgtttagctcctggtttggagtttgtgcagcattggggtgctgttcagtgttgattaaaattgatgattaattactctactgttttacttctcttaaatgtttgctaaatgctgcttttgcaaatgagcctatattatgccatcctttggtatccttgtgcacttgcatatttgctgtgtggcttgttgagtatgtcatatgctcattcttgcaataatcaatca

SEQ ID NO: 19666 - DNA, 11920 bp, Oryza sativa
  unsure (1)..(11920): unsure at all n locations
atcgatgcttatcgtcgctaaattaaatgggagtacaggctaaacacatgagacatccctcgatttaaaaacagattacaaacacatggatgttcacttcacacacacgacaagcaggaggaggagcagctgctgaaacaaaacgaccagcggcgaacttaatttttttgaaaaagggagaatcataacacggtagaactcatcatcatggccaattgcttcatcaacgccttccagccattatcccccaacaatggctgctcgaactcctttgatatcacgcgttgctcctgaaggagccgagggctttgatggcgccggcccggaggatgtactggtggtagaacgccgcgatggcggcgccgacgaacgggccgacccagaagatccactgcaaccggagacggggaagacgatcagtcacaattcacacaacccaaaaaaaaaagaaaatcatgatcaggccatgcccaattgaggtaatttgtagtagtagaatgtatgtgtcttcttacatggttgcgccacgccttctcgttgttgaagatgacggccgctccgatgctcctggccgggttgatgccggtgccggtgatcgggatcgtcgccaggtggaccatgaacacggcgaagccgattggcagcggcgccaagacctggtgacatccacacacacatgaacaaaaaacaaaaaatcagaaattagcataggtttgcaagatgttaggcgagtaaccaaactatcagtagtactgttcagcaacaagtgtcgttttaacacagtgagtcaagtgaggcacaataattcacaaaactgtgctgctgccaaaccaaaccacaccctgcatgacatgtgtagggtgtcttttcagccacatgacccatgtatacgttttaatggtcatcaacatcagtggactattagggagcaagttagtggccaaaaagcccacaagccttcttgtcacgaaatgcccctttcaacaaggaactggaaacgaactagctagagcaccaccaaatggctgcttttagccttggcttagtgcgcatttcacctcctccctaaacaccaggtcacccagggcatattttgacaagatgtgtgcaaatctgcaaaagcagagaagcacagcacccccaacgcttcttcacgccttgtcacctccaccaaagggaagaaagaaagaaaggaagaccctcatgtcaagatgcccaccttcactcacacaacctcacatgttcaccaccatataaagtgacctatccatttccccttctccagaaaaaagaaaaaactactactagtactcctctacaatttcacctaataatatttggtcttgttttttagtgaggagctagcacaaaacaacatggcgtgaaaggacacgaaatagttttgggaaaaaacagaggggggtggtgaagaatttgtaccggcggtccagccaaaattcatcatggagatcacatgaaaacctagccgctgcctgcacggaccagctcacccccggtctggaccatacagtacaccggaccagctcagcctttttggctttgctagggccacatgtagtacgcgcgcgcccgcacagccatgctaccgtgatgggatggaacagtaatagcggcagacgtgacaaatgagctacagtaaataagttatagggtcccatcggttgccctattaagccgaagcaaaagccaaaaatttaaatttttaaatttaattttaaagttgattttaagatattttgaacttagttttttttacagtattagcttttaagtcagctagaaatacatatataaaaattttaactacaaattattttttattccttagtaaaacattttatcttattagggaatataagttttagttataaattattttttattcgctagaaaaacattttagcttattagaaaatatatgagcaaccgatgaggcttatagattatttgtaatcctctccgtccttccgtgtgtactaggaccatcttgaatcttctactaccaaaaaaaaaaaactactactactttcaattatgtggtgactatctatctactgctagtctgctactgtactggagtgatacggagtaagaacggtaagagcaaattcaacactacggtatgcttaataatgttcatgtagtactatctgaaggagatctgaaaattgacaatctgtaggcatgcgaatagcaataaaactgtgtaattttagaatttttttcttccgaaaagaattaagagtttttgaaggaaattattgcttctcttctgttcaatatgcgcttgcttttatcaaagaggatatataggatattcttccactgcttttcattcctttttgtacacatctgtcattcttccgatctaaacaaactaatattctcatactaacacatgcatgttagttgttagattaaagcatctaccgtcacttaagctccaattaagcaagcacaattttcaaagagaagaaaagaaaaagaaaaatttgggagagctagctccgatgcttcttaccgggacatgtgagtcgcgggcgttgcgcttggggtcggtggcggagaagacggtgtagacgagcacgaaggtgccgatgatctcggcggcgaggccggtgcccttggagtagccggcggcgagggtgttggcgccgccgccgtacctgttgaagtaggcgctctggaacgccttgacgaggccgacgccgcagatggcgccgaggcactgcgccacgatgtagaggatggcgcggaccagggacaccttgcgcgccaggaagagcccgaacgtcaccgccgggttgatgtgcccgccggagatgccggcggtgcagtagaccagnnnnnnnnnnnnnnnnnnnnacgcccacgcgatgccgagcacgcccacgccgccgcacgccgcgtcggcgccggaggccgacgcgtccgtctggtgcttgtacccgatcaccgtggccacggtgatgtacaggaacagcagcgtggcgatgaactcggcgatgacggcgcggtacagcgaccacgaccccagctccgccgcgtcgatcagcggcgccggcggcgggtccgtgtagtccttggccgcgaactcgccggcggcgccgccgctctccatcacctcgtccttccccatgcccgacctagcttagcttgctctcgccgccgcgggaagcttaacgggaggagtgacacgaccagctttgcaagcaatggtggagagcttagctgagcggagagcttgtgtgcgagagtgagaaggaggtggtatttatggagaagaaagagagttggtgagtgacaacgaggcaagctgagactctggcgtgtgggactaccctcctcaacgtatgagactctatttctgtacttttttattttgtcttaaaaaaatatactttttatttccttttttattttcttttgctgtccatggagcagaaaatttggctgtttttcttttatttaacttgttttgataagaatggatgggccttttggttttcttgctccaatgatgcctatgacgagctgggatgataagctactgcgtgttggggcctggggcttacgtgcttcaaactcagaagaatgtatccaagccaagaattcccggttttgttctaaaaacaaaaagaataattcccggttttgtttttgttgctgtgagtggaagattccggaggagagaagtgaggcagtgtccaaaagacacctttcaatcctaaccattcatttctcattttctatttaatcttaacccttcattcatttcctaatcccaatcacaccccttattttccattatccaaacacacactgaaaaactaaggggagacagagaggagatttgttgcgtgttgccgtgataagggataggatcaatgtacccgtgaccattgtgacaaaatgatcatgtgcttagtgtttttttaagacaatgatgtgtatattgcttgctataggtttatttaatacgcatttggcaactaattaagctgagttctttccttcattgaacccacctctacgtataatagttatgcatagcgcattgttatattacttattgaaatgcatggttgagaaaacagaagattaggaaaacatagaattttaataggaatatataagtgcaaacaaaatattgcaagacataaaaatgattgtttgaatagaagcaacaaaaaatacgcagtaaacagacttgaaaggaaaatttcttagatattagaactcttgttaacttcccttccaaatctacatgtattgagctatttctaaggaattttatatgatttagaaagcttcaatcctctatttcacaaaacgaaaaaaaactcctatcagattttaatactacaaattcctccacaaataatctaataaatgaaaaatgtttttacacatctgtttttggcagccaaaagatcatgttaaaataaattacttcctctatttttaaatataaggtgtatttttttcatcaggacaagctttaactacctattactttattgtaatatattacttttgtcccagtttagtactatccagggtttcacttatcgcatgataatcgcgcttatcgcgggggtacggtaggggaaaccggcgatatggtttggatgaattttgaccaaattcaaaattctggaaaaaaatcgaaaaaaactgaaaatattcatggatgtagttgttgatttgtaattgccaatggtgaagaatttttttgaaatagagtaagctaaattcaaatttgagtgcaaaaccaaaaatggtttacaaattgaaaaaggaagaggatattgggccttaagtatcctacatattcttccaattattctcagtttctagttttctacacatattcaaccgtattttttattttttaccctatttattttacatttacattatttcagctatacagcccgcgataaccgtgcgaatatcgcggttatcgcggtaaatcgtgcgattatcgcggtgaaaccgcgaaactgtcgagttttgaattcaaatttttggatgtgatttttgtgcgattttagacgattatcgcgctattatcacggttatcacgctaccgcggggtggcgataaccccggccctaacgataaggtaaaccctggtactatctccgttctaaaatatctatttttagtacagtaccttgttccaaaatgaaactatttctccgtctaccttcttctctcaaccaatcacaaccatttttcttcatctactttcttctttttaaccaatcacacactttctcctttcaaccaattacacactttcttcaatcattattacatactttctcaatacccatgccaacctcaaaagtgtttacattttgggataggcaaagtagttgttctaggagagaagcgataaaatatggtgttgtagaaataaccaatgtgtcccgacgttaatcattttaatgcttattaaaaattgtcacaaagttagtactacgtcagccattttgacatatctgctacaagtatggagaagaaaattaatgggagcactcttgctagtggctagctgttggttgccccacgcctaaacgatctcttttttagacaatgaccatatatctccaagcaacaactaaattgtgacgaagggaataatttttcgtggcacaaaattgatatgagatttattttggaaagtatttgtgacgattataatttgcatcacacaagcaaatatattagtgaagcaactattaatcaaagccttatcctaacaaaataaaatgcatctaatatcttgaaattgaggtagttgtagaaaacaacgaaaaatttcctaattaatatgaaaattaaattctaaaactgaaaattgactgtggcttataatcgagggaggggtcaaatagaacctgaattagttattaggataatgtgggcaggaattatatattcgcagttgtagctgttttgaaggcccggtgttcctcgcggggatttaattaggttatcacggacgggacgtacgtaaccaccataaccgcaggtcgctccctccgaaacggcgccaccgcacagagcagaagggaagcgaagggaaggaaggcaatctcctgaccacatggatgtgcgcgcatcgcattaatattccccacgcacgattaaattaattacacgggattcagtggcgcgccgagtcgatatacgagacgtaacgtactcgatcgtggctgggcatgggcatgggtccggtcgatcggtcgacgtccatccctaatcccttccgtttgggcaccgcacggccggttggcggttgcatgcgaccatgttccgaaccgacgacgccgatgcgacgcggcctcacgataaggcgatggcgtacgtcttcgcccgggggggaggggggggggtgccgttcggtcgtggtcgatcagtagtactaggtcacctgcaggccgttcctgcccctgcgctgcgctgcgcctgcggcggagagtagtactactcgcgtgtagcacgatggccagccagcctcgcgtcgcgcgtgggccgcgccgcgcgcgcggccgcagcagcgcaggttgcgcacttccgccgcagatggctgcggctggctgcgggtgggaagccagcctggtccacgcgtgtgcatgcatgcgtccatcctatgatgcgccctccgtccgccaatgcgttgtggtggtggagtggtcaggtcaccaacaccagggccgcggccaggtaagatgagatgagatgagacgagatgaggtggagagagatggtcgcatgtgatgtgtgtgtgtacgggctgggtggaggacaaatcagcagcagcggcatagtagtaggagtaggtgcgtttcgctcgctgtttttgggagcaagttgcgggcgggcgcggcgccgtccggacggagggggctggaccgccatatgatagatcggtccatccatctgcctgccaggggatcgccgtaaatcagatcacggttttggttggtgcgtacgtgagtggtgacacgctggcatccacacggcggagagatccgtaatccccatctgcaaacgatcgatagaattttgcatgattcgtttagtactggttgaattgttttgtgcgtgtataaatattgtggtaatttttttatgtgaatttggtgcgctctaaaggagacatgagggagccaacaaatgatgtggatattttcatcaggatctgtttattatatttttttatgaaactgtttattatattttgaaatgtgtatagttttacaataatttagccgttgcacacgcagaataggcactttttggtgcgaagtcggttaacgtagcagctgcggctaccacgtaccacatcgtttgatatatagcacaatctacaggtaagtatgcctggatgtggcctttaatggtttgtcttttcctctggattcgccgattagccgatctgtcggggcgttccttgttctctttacccctttccttccttagccggcgtgtaaagtgcaatgtattcctatatccacttcaccttcccctacattttttttctctttcctgagaggattaactttttccttgttcagttggtgtgtttcaatctgtgtgcacgctcccgctaacaaacatagtactagaaacaactaaacaaaccgttaattaagtataagagcatatacttgtcccgtttgtcttggagtgctccggtgtggacttgcaggccggctagcagctagatcgccccgagtgcagcgtgacagcagcaaaaggatcgaagcagttgcagccagttggtgcaatgcaatgcaagccaaaaaaggggattaccgccatcatggcggttagctacatatcatctctacccgcgcacactaccgttgctggatggatcggagtagtcctagtcctagctagctgccgccgctgggaatccaatgatttggtccctggcccgtcctcgctgtcctgtccatacgtgcggccgaatcagctgcccgcgccccgctcccggcacgttgcgtcgcgtcgccttcagcgtgcggcgcgggcgacctccgtcgcgacgcacgcttttccctggcacacgcgccgcgcgggatcggcatcgcgctcggatgcggccagcgtccagcgagcgtgtaggccgcgatatgatcgagtggttcggcagtgtgggccgccacggcacggcgcgcgcatcacgcacggacgcgcctcgccccagcgcgcgaagcacaacggctagctgcgtgtcgcgcctcggctcgattgggtggtgtgccgcgcgcggtttcccccctttcaaacccccgtcgatcgagacgcagacgctcgcacgttgatctcgtgctactacatgttacagcagtcatcagctgcttgtatagtgctactagctgcttcgcggcgtcgcgcgactacgcgcgtacagtaccagcctaccaggacgcgactggcttgtgcgggtgcacgcgacgcctagcaaattacgccaccgaccggtcacgcgcggcctagatgctcagcgtgattgctagcaggggagtcgtacttctcttgtccacggcttcttttcgcctttgctgtttctggcgatgcgggcgtccacctgtccatcggaatcccgacatgccagattcccaatatctccggccaccgtgacatcgtccccgatcacacagataatcccctgctttggaatcgtcgatacttgataggactactgtgactgtaagagtgtgtgccctaaacaaaaataggttctatttgcggtaataattgaggctacctgttacacgtggagcaagctagttccatgcattccaaatcaagccatagtcaatgtgcagtcttcgagcttcattttaatttacgagcacgttgcgtcgtggggaatgatgagcccgtccatgcttcttggaagggctgcatctgcatctgcttcccgaccgagcaggatcagtgatgtttgaaaaggattactctactgtaattagcccaacgagcgatcatactatactcctatacagtactctactgtaaggcgtactagttaattaaccagtccttgcattaactacttggtccgaggcgcattaatcggcaggggtctgacagaaggaaattaaatgtgtaatcggcgggcgacatatccatatccaaggccacgctgtggcacgacggccattgctaattccggatagcaacggcggccacgcgtaacatccggaccctgtagtcgcacaccctgtagtcccacagccccagaacgcgaactcactgcctaggcctaggcatgcgagccagcaaagtgctttgtcactactactcctacagtgctatagtactcctatagtagtcctattatggtgggatagttctaatgtcctagtattatggtgggatcagcatatgggcatggcacggtgtgacatcgatctttgatttttcctgaccagatatcaacgatgataaaacacctaaaaacatttgtttacctgttccaactttttttttgactggaattacctgttccgatttgacaagtgctataaggatgtgttaatttgccttccctccacagacaaacgcaaattaacgcgtgattaattaagtattagctatgaaaaactttaaaaatgattaatatgactttaaaaatgacttttctatttaaaaatttttgcaaaaaaaaaacactctataaaaaacgcaccgtctaataatttgataagcgtgcgcacgaaaaataaggaatatgagttgggaacttaggataaagaacatagccgaaggctcgcatcgtttggcttatttgtaaaataagacaaacggcatatttgtaaacaaaaaataatttgtggataaaacctttatatacgggttcttagcgatctaaaagcaaagctaaaaaataaacttcgacgaaaaaccccaaatcagcttcaaatttaaggttgaaaatttaagagtgaagtacatggacggtccctaaacttgtgccggtgtgtcatctaggtccttaaactcctaaaatgcatttttagatccctgaacttgccatgtgtgttatataggtccaaacggattttaacccactcgatgcgctgacgtgacaatgccacggtgacgcctacatgtcagtggaatccacatgtcaagcatatataaaaaataaaattaaaaaccatattttctcctcttaggtagacagaaaaaaagataaaaattctaaggtagagaggagaaaatatgtttttctacttatatttttttatatgtgactgacacgtgggtccaactaacatgtatgaactatcgtggcatgtcacatcagcgcatggaaggggttggagctcgtttggacctatatgacaccccaaaacaagtttaaggacccaaaaatgcattttgagagtttagggacctagatgacacacctgcacaagtttagggaccactcgtgcacttcactcaaaatttaaattttggctaataagtataagcataagcataaacataaacgaaaagatgaggccgtaagttattttaaaactccactcatgatttgagcattgcaattgtaaaaggccgctatcgaagtaatcatattttgaaatggtatgatatcaagtggatactagatactccctccatcccaaaataagacaacctcgtactaggatagggagttgttgacgaaaaatccacacttggctgatggtgctagaactgtgttggcccaaactaagtcgacgaacacaacggcctgggagatctgcttagcttcagtgcaggttcaaatgttgatgagatgcgggcgtgccagtcagtttgatcctacaactaacaagatatacaaaaaaacagatcaatgagccgatcggctgacaagtcgatggagtaattccagctgatgctgataccagccgatagcaataggattttgagctatcgtctatatggttgatgtacaatctaacacttgatataaataaagacaacaggcttatgataatataacaaaacaacaatataatctgtaaaatcaaaatgtttttgattcttattccgtgatgaacaattggcatctaatattattagttttgatatttggagattattggtgaagtggttttgaagatgattgacttgcaggtgatgaacagggtccgctgattgaatgggtccagtcaaaccggcgtgtaccatgtggtcagaccggccagcccgcagtcaatctagctgactctgtgtctatttctgttttgggttgatttgttgggtatctatggataattcgtgtttatgacttctagatagatactatgcgtatgtaatacttttgtttgctaacaatgattcaagttggtgagaacttgtgttcggatatggttttttggttgatgcatgtgtaggtggtcttgatgcctcgagagagtgtcgccggtgatggatcgggagtcaacttgggagaagataacgcccgaacgatcaggatatcatgcgggatgcttaggctaaagatcaatgcatgtggttggtgaagattccatatggtatacgatggatatattgtgtgcgtatgggatatggagtcgaatttggaaggagtccaaatttagtacaattggagtttattaagtttgtttcttgtacagaaatgtttcttaggggattagtacttcttgtatgagttgaattcatggctttaggctacctacttcgagtacaaatagagagggagggtgtggcctcccagtattgcttcagagagtagagttgagagataagttagggtttcgagtttagtcaagattttcgtgagtagtgctgttgttgcagtttataaacacagagagaagtaatatagttgcaatctactttgagagat

SEQ ID NO: 19667 - DNA, 9350 bp, Oryza sativa
  unsure (1)..(9350): unsure at all n locations
tcctgcaccccccacccaattaatcctcgaataaaccatgataatatatatgcaataaaaaaagaaaaatacctcagttttactttacacttacttttcgttgacatgtattctaaagaaaataagtctacctttttcaagtgatgaagaagattataaataattgcttatagatattactttaatatgatataatataaaactaatatgttagaaaattataaaagaaattaatgtagacgaaaacaatttatggagaaatcgtggtagatattcacggttaatattttgctcttataaatgtctcaaacttagcgtatgacgtatgcccgcgcattcgcgcgggctaccttcctagttttataaatagcctaaaaatatcctaagtttggaccccttgacacggagttatgggtgattaggttccacactttctacattttttgatgcaccgatacaatagttttcagctgttctggtatcggatatatgtatccgatacagtgataagccactactgtataaaagctcataggtaccggttccaaaggggtagccggtgctggcaccaattattcaataccaatgactttgggtctatgtgacactataggtgtcggttctaaattagaaccggcacctttaggggtgcacttattttttaaaatttgcaggtgctaaaaaaattgaaaaaaatatttggtatttccattaggcacctatacgatcactcttcttccaaccagtcacatggatgtttcaacaaatctatactttctgtatagttgttacccactaaagttaaagctcaacatgtaagcatgccacatcatcacccactagcaattactattctagcccatttaaaatcccatgcaagcatgccacatcttcactcactagcaattattattctagtctattttaaatcccaagcaagcatgacatatcatctacaatattctattatagagttcaacaagtatgtgtcaaatcatcttcctcacattattttcttaacatttcaactttcatcatttcgacaatatttaatatatactcatccgtgaatcccgcaacagagcgcggggtatcacctagtattcatatatatgtgtgtcatgtaagattcaaactcaaaatctctctcttcaaccaaagcttcctcaccatcttacacacacgcacttgtcttgaaaacaaatgttattcttttgagactattgtcatccaaacttataattcataattaacaccttagatgagctcaaataaaaagtttgtcaactacataaatgtagatatcatctatctctacaacttttatatagattttgtctcctttagatattgtttagaaaatttaaatatccacttgagcaaatagatccaagaccttgtaacacatttttgatatccaaacaaccttaaatcgaaaagtcatcaactagaaaattataaatctcgtcgagttctacaaatttgatacaaagtttatctttgtccgacttcaaatgaaaaagttagataaaaaacacacgtatattgtatcatcataggcaccggttttaatggtaaaccgctacctatgggctcataagtgccggtttttattgaaaactgacacatgaacgatgcccgtatgagctggttcataataaaaaggtacctatgataccgcacttattggtgtcggtttattataagaactagcacctataccatgtccatgtatatcagtttgttataagaaccggcacctataactttagaggactattggtgccggtttttgaaataaaccggtaccgatgagtggttataggtaccggttctcaattttacattgaaaaaaatgtagaaaaagcttcatagccggttttaaataagccagcacctataagactaatctctatgtgatgttttatagtagtgagcgggatatgccagcgatacggtatttggtaagtattgttaattcgttagaaaaataaattaagaaaaaatagagatatgtcctcgatacataccggaggagagtatagatgaagctagataagagagtttgggcagtccaatgtgtaacacagataatcttaccttattccaatgtgagaatattagttaagggtagtaagtaaaactttagtaataaaaggtggtccaaactgtcaattcactcaatagtaaaagtatggtcgaatattcatttttcaaagtataccaaccgtttcatattataacacgctttaattttattctagtcaatttttttacgtttgaccaattctatagaaaaaattagtaatatctaccacatcaaatttgtttcactaaatctaacattgaataacattttgatcatatgttttttagtgttgaaaaatgttgttgtgtatttctataaatttgattaaacttaaaaattttgacttagaaaaaaaaaggaggaagtatataacaacatatttttcttcttaaagttctttaggagcatgtcacttgctaagagcctgtcacatggacaatttcgcccttaatttgtaggcacccttgatcacttcaactctaccacctcaatttattgacttttggttcacttagattcttagaaacatgaagacaacagagggacagagtttacacttgcattgcaaacactgaaacatacaccacactgcagggcttctcacttaaactgaagctgcttctactactgacgaacaggtgctctgttctctccattcaccttaaactctgaaggagaaagagcccaaacaatgccgacttgaccacggatatcaccagacgagctcaactacgcgttgctccggaaggagccgtagccccttgcactggcacggaggatgacctggtggtacagcgccgcgatcgccgcgccgatgaacggcccaacccagaagatccactgcgtcacacagatgaacaccaatgcaatgtcagttcatggccaattaaccagccaggaatgagaaacaaacaaagcaattcttgcacaatttggcagtaaggtagtatgtacctgatcactccaggccttgttgttgttgtagaccacggcgacgccgaggctcctggccgggttgatgccggtgccggtgatcgggatcgtcgccaggtgcaccatgaacaccgcgaacccgattggcagcggagccaacacctttgatttatcgaaattaaatagaagcaatgagctcgagttcttgcaatgtgcaaattgctgcagggtgcaaacacaaatcgatggaaagtttatgcacttacgggaacatgtgagtcgcgggcgttgcgcttgggatcggtggcggagaagacggtgtacacgagcacgaaggtgccgatgatctcggcggcgaggccggtgccggtggagtagccggcggcgagctcgttggcgccgccgccgtacctgtcgtagagcgagctctggaaccccttgacgagcgcgacgccgcagatggcgccgaggcactgcgccgccatgtacaggagggcgcgcaccagggacaccttccgcgccaggaagaggccgagtgtcaccgccgggttgatgtgcccgccggagacgccggcggtgcagtagacgagnnnnnnnnnnnnnnnnnnnnacgcccacgcgatgccgaggacgcccacaccgccgcacgccgcgtcggcgccgttcacggcggcgtccgtctggtgcttgtacccgatcaccgtggccaccgtgacgtagaggaagagcagcgtggcgacgaactcggcgatcagcgcgcggtacagcgaccacttgcccagctcgtcgacgtcgacgagcggcgccggcggcgggtcgatgtagtcccgggcgccgccggcctcgagagtggacacgtccacctctttgcccattgacctcgttgaggactcgattggtttgcaagaagtgatcacagaaggaggaggcaggagctaagctgcttgagagaggtttgcaagtgttgtggtttgctggttgtgttgggatgtatatttataggggtttcagtggtactgggatttgttctagggtttatgtttcattgattttaatcgaaatttgaattggttatataatatacccaattccctggcattctctggagcttccctggcattaacgcgtgttgtttgaatataacgatatagttgtttcgacgatatttattgaactaattttgaagattaggtcctgatattgatacaatcgcggatatccttgacatcagattataaagaaaactagtaaatcgttgaagattttgacttcctctatggtttgttcttaaacatcaataggaccaccatatctgttgatcattaccatgttttatgacctgcatatgttattatccaacatttcgtaggaatatcactgattgaataaactatatttcttaaataaataatatagtcaagagtataactaaaaatcagggctacactaattttttgggagtgttccaattaattattactttatttaagctgctagaaatattgaagatgtatatgtttttttttaaaataaagtgtactgacagaatgatggtcctcaaacttatatagatatgttatctaggttcttcaattctcaaaaatacaattttgggtccctggtcttatttgggtgccatacatatttaaacgggctctaacccactctgtaccacagtgatgcctatgtgttggtggcaccaatatgttagtcacatagaaaaaaaataaaaaaaacatattttctcttttctccaatctcttctttttctctatgattggcatgttgatcctgctgacacctaagcgtcaccataccatgtcatgttagcgcacagagcaagtgaaaacccatttaaatctatatgacactcacaacaagttttggtataaaaatacattttgaaggttaaggcatctagattagggatgaaaacagtacgtaatttttccggattccgggccagttttcgaaaacggaatcagtcggtcggaattttttcggaatttttcgaaaacggaaacgaattcggaaatattttgccggaaacggaatcgaatatgataatagcagtttccgtcggaactcggaatcggttggaaattttccgaaaactttctcggaatttccgaagttacagaaggcccatacaagtacaactacaagtccataatacctccccagcccaacccaactcagcatctaccctaagtcctaacctaattcagaatagagattagagaatagagaagagtgagagacagagagtcagagcgagccgggcggaggagcggcatacagatctcgcggccgtcctcgccccctcgcccctcgcggccctgcgcggccgcgcccctgcggtctcgcgccgccgcgccccggccgtcctcgccccccgcggccctgcgcggccgcgcccccaccgtccacgccccccatggccccgcgccccagccgcctctcgtagccgctgaagcctcatgctccactagtccactgggcaagtgggcagtgggcactggcagtggcaagtggcaactcttcctcaccgccatcgacgccgacgacacctcgcatcgcaacagccagcagtgagtgaatgttgaatgattgatttatgaatgattgatttatgtgtagtctctgtatatattgttgagcaatgagcatgactgcatgagtctatatatatatatgtgtgttttttgtgatatattgttgattgttgagacttgagaattagacttgacaaagtttgaagctcagtttgagggtttttttttattccgataaattttcgttaccgtatccgcgccgattcattttcgtttcgttttcggtttcgattatattcgattccgttttcgtatccggggtttccgattccgtttccgattccgaaaaaaaaatatgaaaacgaaaacgataaagatggtttccgtccgtttccgtaccgttttcatccctaatctagatggcatacttgtttagagatcgctcgcacacttcactaaatactcccacatgtatagtaattatttctttagactcctatcggtttgccatttactagttgtaagccatatggtttatgagcaacaaaaaatattttgtgggttaaatttttcaaaaaagtctgaattacacccctaacctgtagcgattgtacgaattactcctctaaaccacaaaagaaggcacccttcacccttgactattcatactagacgaattactcctctgcctcactctggatggttttggtcctacgtgatgcactcgtggcagtccagtcagcataaaaaaacgaagggacccacatatcagttctgctttttgggcccaccgctctttaaatttttttatactgattggattgctacgtgtaaattacgtaggaccaaaaccgctcaagagcgagataaggggtaatttgtccggtataaaaagttacaggtgaaggatgtctgttttttaggggtaattcgtaccgtccttatagtttaggggataattcggattttttttcctaaatctttatacacgttaataatttaaaatccaatactaaaagataaaaaaacttaaaataagatttaaaatttaacagtggcttataagctaatacttttctatggcagcttaagacggtgatatgatgattttggaactacggatgatagagcatctcaatgattacctgtaggccgggttggatcattggatggccgtccaacaccggcttgatcctcatgctgacgtcatctcccctatcctgctcacgggacccaccaccagaggtccagcgtatatatatcacttcggatcatcttgtggccaagatgcactagcagactagcttagcattccacaaattaattgttggcctaatttttttatcatttttttcttgagatggcataattaagttagttcactctcaataattaactaggagcccaagcttagccacaattaatcagtgtggcaactagttagtgttgtgctagtgttgtcatgcctagccggtggttgaacgccatccacaaaggaaaagaaagttgggcgccgaaatcaatctcttgtcaccgttttctgtcattgctgatattatatgtgcatggctaccaatttcttggcttgattgggtcattatttttttctggtctatctgaatgggtttttgtttgtggctatgtacatataagaggagaaaggcaagcatgcatgcgccgaccaaagaatgagagaatcttagggaaatttcacatgctagctagaagctataggttgacaaaaagttgttgtgatggggagttggttggatcaggggcggatccaggaacaaaaaattagaggggctcaattacacaatttcttcaacctccagccatttagggacttttagtttatcattcatggtgaaaaaattaaagggggtgctccgagggtattcatgggtcttgtgggtgtaggngnantnnagtccccctgcaccacgttggatccgcccctggttggatccaagtagtgattagatttatcagctagttcatggtctcttttcatccaaggtttttcttatggatcaggcatttataattccctttaaaaatgtccttttttacatgtctggaaaatgagagggaaattgtagtaaagtctgagaacaaatgggtctaattcaccctttttttttttcaaacaagtcctaagtgattgtttacattcatttcacattacgcctaatctgttcgggttggcagtgcatgtgaactacggccttttttttaatcgaaaacactttcccgttgctatatgaattcgttatcagaaaaagaaaattcatagaggaattgaactaattactataaaaagatgctataatatttgcattctaattaattaaaggaggcataaaatttctgtaaaaccaaagggatccaggtaatccactttctatgggcctgtttggtatagctccaactcctaaatttagctccaggagttgagtctagagtggagttgtggagctgtctaaacccagctccataactctagtatattttgtgagagagctccaccctactccactcccagttttgatggagctgaaactgtttggctgaactctagctccaggagaggtggagctgaagctgcagctgtgccaagcaggctctatatatcaaacatgtccaggcttgattacatgataattaatctgcttaattatctgcacttgttcttctgcaatgcagctatcagcaactaaatgtatgatcaggagcacgtacggccgcgacgcctagtcataggctttccaaaaggaacaagaaagcgaagtgagcatagctcaactggctaggtttcttgtggtggaaccagcccacctagatttaaattatagatttgacgcgggtgctcgtatttatggctaattatgctttcagtggtaggcgacgtacccgtcgacagcgaggcgcctgtggtgacttcgtaaatcttaagatttgccggcccagtcttccggaggtgcttacaggggtagggtgtgcgtgtgtgtgtttatagggggtgagtgtgcgcacgttgtgagcgcctgcgtttgtactgtgtttctaaaaaaaaaaaagaagaacaagaaaaaaaaactgtagctacgttttgagaggagcagttgcaaaacatggtgaggtgtgacgaacgtgatgaatgactcggattcttgtctgtttccccggtggtttctattgcttgtcccttcttctggattcagtcattactagggcaacgatctcaggtttcatatttgattttactttttttttcctttttaatatttgtatggtaactaaatcgtttgattttcatggtgttgatttactgtttttcttagggggcaattactagaatatcctatctatgcaagtcacgtaaaaataaggaataaattcatctgagatcccttaacttgtcaacgagtccgattttcgtccttcaaccagaaaaccagatacaacgggtccctcaattatcaaaactagtgcagatgaggtccctcgacggttttgagagtggttttggttgacgtggcgcctacgtggcaaatttgacttgtcttcatctgatgtggcattaacgtggcgcatatgtggcaatttgatccgaaaaaataataaacttcgtgggacccacatgttagtctcacacataaattaataaaaaatggtgggggcccacgtgggccccacatgtcattctcagcatctacctctcttcaactacagcccctcttcttcttcctctctctcacttctcccatccc

SEQ ID NO: 19668 - DNA, 2611 bp, Oryza sativa
accgccgcgagcctagaactgggtgatacaggatggtgtatcatgggccccgccgccgctccgtccgccggcatgctcctgccgccgctcccgcgaggacgaggaagagcttagaggaagagaaacgagagccgagaaggacttgtggggcccacgtgggccccaccattcttttattgatttatgtgtgagactgacatgtgggtcccacgaagtttactatttttccggatcaaattggcacgtatggcgccacgtcaatgccacatcaaaagaagaccaagtcaaatttgctacgtagacgccacgtcagccaaaaccaccctcaaaaccgccgagggatctcatctgcactggttttgatagttgagggacccgttgtatctggtgttccggttgaaggacgaaaatcggattcgttgacaagttaagggacgtcatatgtacttattcctaaaaataacggttacactaccaattcaagatttcagtgttcgcttaaatggtcaattagttgctaaaataagtgtaaaagcttttacctatccatcgaccgttgtcttcctatagctgccatcctccacctcacacgtgaggctgtaaggcaaggactataatctcctgacccggtttactgccttcatgacaatccactatattttttttatcattgcattataaggtgtacgtacgcatcactatacacgcaacatcacatgcacacatccagtcaaaagagatgaaaatcaattataatcttactaaattcctatagtaagtttatttgaatacgcataatacttatgtccacccatgacaccatgtcaacaataatttccttcgtaaccatctgctatattagtaggtccttccatgttaatgtatttcgttcgagacatgtattgagagatggagcaatgtggaccgtttgatcgagagagaggggcaagatacaaaataattggtagtggagtaattaactagtaaaatatatgcgttttatttttattgaatacctttactacaaagtattgtttggtattgttaggtagaaatcaaagtaaatattctaataaacaatttaatgaatcgaatcgtacataaaaaaagattgatgcctcttttttttttttttgagaacctttcactttgttcttgtacttggatttatacatgttcaccgaaagaagacagagaaagaagcaatccccgtatggttaagggttgaagaggagatgagatggaccgatcaaaggttaggcgcaaccgcacaagcgcatcagagaacggagaacccagttttagatgtacatagcgctactatggagctccagatctttctggaagcagcatctgagaatcgatcgagtgcttgattacaccagcaacggggcggttgctcatggcccacatccagtacacccgagtggcgtccacatcagaggtcaccgtccacggtcaggtcggcgcacgcgcggtaaaatatcatcagttcatcttgcctgtcacatcgccacctttttacgacacaccctctcaccctcaattccgttcaaaaaggtggcagtagtactactatattataatggacgatttaaccagggaagattatgtacgataccattggaagagctaccgttttgtgaaaagtttttctttttttatttgaattaaaatgtttcttttactttgggtatgaatttgatgaaaagttatcatgtttatacaccataacactagcagattcgtgctcacaaaatgataaatacatggcagatatacaaaatatagtaaactaataatttgaggtcatgaatggaacttataccaataaccatgaaaatttatacgagcaagacaacagaaacatgaaatattttcatttgatgataacatcgttccgaaaaccgactgccttcacagcactctgatgacgatataagcaatccgaaaacacattgacgatggtatataagattcctgacaactactttgtatattttctttaaaacacgaaaattagtcttccttgtttgacatttccataccaaacaaagaccaagtaaagccgaaaagtcaaaaccatgtaatattatgtgtaagcctgaatgcaagtacgtctatgtatagtactgtggtgcgtttctctcatcccagctcaacaaaggcatgtgatggctgcagattatcgtcgccgccgcaatacttccatcactgctgcaaaaacttgttcaatgccgttatgtccaatgctggaaattcacttacggcagtaagcactgcaagcccaagcttaatggcatcatccttgctcggcgcctgtgcatgcacatgttcacatgtcagttaaatggatgattggaaggcttgggatttcagatagggcaaagggaggctgacctcgatgttaaggggaagaactgggtcatggagggataaccgcaataagaaccagccaccatatcctgaaactcttacctgcgtagtaaaaatatagcatgatacagcaataagaaagcccagctactttacccaagaaaaggtagatatatcaagatatatactcaaacttgtgaaaacaagcaaagaataatgacatacgggggcgcag

SEQ ID NO: 19669 - DNA, 1330 bp, Oryza sativa
tagagctcgccgccgcccaccattcgtcgtcgtccatcgcgtttgctagtaccggtgagttcgcgtcatcgtcctctacgtgtagatgactttagatagccctgccgacctctctatcgccggcaaggtcgttgcccgtgaaattgcgcgatgatgacgtcagcatgacgtcatattttctttttccagttttttttctagatgcaaatagattaaaacttcagaaattcataactaattcatcgtaactccgatttgagtggttcaagttgctaaatttttctaaaatcgagatctacatgttaaaaatatccacatgtattgtttatgcttgtttttgtactgttttgttgattttgttctttcgctttagtttccgacgttctgaaggagagcgttttcgttgaggaaggttcagaagcgcttgatgaagctcaaggcaagtcacacagatcccaaacgaccctttgagcatgttgaacccatttaaagctaatgttttatttcaacttatgcattattttcgaatgtcatcgggtggtgagcctttcccaattaattattggccgaagatgactttattttcctatgggttagaattcgattagctagaaccttatatattggtttggttcagctaaatgctatatagatataattgcttagccatgcttagaaacattagctcattaatggggtgaatcatattacattattacttatggttagatttaaatgtagcttacgatggttaatcgtgttatgataattaattgataattaaaacttgtcaatggtgggttgtgagcacatggttttgaagttcgtgctcatgacaattaaggatcggttcgcgagctactgttgtgagacattaaccgtgccaaccacaagccagcgtgggcaacggctttaccttttgtatagcatggttcattgcggggcaccagactgtgaagcggcgagaagtccgtgggggtcgctggggagtccatgcctctggttattgaggggatgattatgatccagggacggtgcgctgtggtggattgtgttgtgcaaggggtactgtcacagttcctatccgagatatcgtggtggtattgaggcgcatggtaacatgtcgtggagctgtgtcttgtgagtacagtggtacatctctagctagagtaaaactattcgaatagccgtgcccgcggttatgggcaagttgagcaatgtttttcgtgattatctcataataattatggatgctataactagtaataatttatttagctcctggtttggagtttgatctgtatagccgggtatggttgttcagaatggt

SEQ ID NO: 19670 - DNA, 2115 bp, Oryza sativa
attattcataatcacatgagacacctttactaattaatttagagaataaatctattttcccaaacttatttacaataactaatttattgaagtatactttatagttacgtcaatagtgtgtataatatacatccatcaaattgatacttgatgtgttggaattcctcaactataaaaaaattatatcatgagtagtttattgtgcatgttacttgattgttcatttgttgccaaaactatttagaaaagagaaaaacatagatatatgaccataaatctcatggtggattaaatggttgtattatagcaagatcattggtatgaaatatttttttcataatttctttacatctatgcaacatttatgttgcccacttattagatactaatgaaatagttctaaagattccaaaaaaaaattgagaatcttagtctcaaacaaattaaaattaaatgaaatatacttaaaaatacacaactaaattgtgttgttttcatttattttacatatatggatttaaattaccattgtatagtcgtcaagtgatatttgacacatgaaatatgatgtgaaattatttaaaataggaaaaagcaataattaccccctaaacctgaaaaccagacatctttcaccctcaactattaatatcggatgaattaccctaaccaacccggagtgggtttgttcctacgtgacagtccagttagcacttttttttaaaaaaaaaaataggtggggcttacctgtcacactctctaccctctatatatctctctctcctctctctctcttccacaatcccattacctagcctctctctcttctccttctccttgctacaggggccaaccgggtaggcgagccgccgccccgccacacttttccttcctccttcatctattcccctgcacttgctctcttaattgatccaccttgttgttcttttattgattggtgctttctgtctcgtcaggagaaaggcattggtggtggggatcgattaagaaccatggtgggatggcatgctgtggtagacagagctacgggggcgtagccgaacttggccatggaggaccagcgcaggtgctcgcctccggcggccatcacgtgatgatgagatgtgacagaaatgatggtgaagacagcctccatcagagtgcgcatgtggtggccgagatagccgaggaggagccgcctctgctactcactgccctcgttcgcctccaccgcggttgtcctcttcacgcgccagtggatgttgaggagaagccacacggccatcaaggaggcgcgcgccagcagagaccgagaggacccgctcactgcccttagccttgcctattgatagacatggagggagaagaaagagaaagggggaggggtgaggcagagatatgataggtgggtcccatcaatttatttttaagaaaatgctgacgggactgccacgtaggatcaaaaccacttcaggctgtgtcagcggggtaattcgttcggtattaatagttgagggtgaaagatgtctagctttcagatttatgggggtaattcggtctaccataatagtttaggagggtaattcgtcatttttccttgaaaatattatcataacattatttattatatgtcagcctcatgtgttatgatgtatttaggaacatagacatcaatagtttatttaattaaaggaatctgactggatcacaaattagatatataattttaaaataatttaaagataggatatttttttatattgtagaagatctagtttaacttaattttatagagtattatacttttgtttttaaatagtagaaaatcatatattatggaccatcgatttttttatggcactacatactacctatgttacgtaagtttttttactttattgattttatcgtcagttcgtacataggttttctttaagattcattgattcttttccagcacgtaagtacgtacaccaagtatacttatgtttggtttcttttttgggcccacattatgagaggaaattattaccttcttaaaataatacatctaatctaacgatctaaaatatcgggtccaccaacttaagtgaaaattaacggtgagattatata

SEQ ID NO: 19671 - DNA, 6773 bp, Oryza sativa
gactagggctgatgtagcaaaaagtatgaaaataaacataatatctagacaatcaagctcttgactgatttttagggtggtagatagcttacctagtctaatatggtaaagcaatttagccgatgccagcataaacgttaaaacgaatcttagctgatataagtaaattgattcttatatgcattctagacgcttctcgcaatcttccttgttttttaattttaatttttaattatttctaaattgaatttctatatgaaatgtaaacttaactttatttttttaatattttgactttcacttctaaattcctacatggactctagactattattttaatattccttattttttattttggattttcattatttctaattgtatttttatatgaattctaaactcatctttcaatattccttatttttaaatttggaattttagttatttataaattatatttctatatgaactctacacactttttctaatatttcatttaaaaaaaatcgaattttatttatttaaaactatatttctatatggattctaacctctatttttaattttcttatttttaattctgaatttcaattagctctaaatttattcatgtatagactctagtttccttttctaatattttttactttttaattttgaattttagctgtttttaaattctatcatatatgggctctatcttttccttttctccgattaaaatgagaatttctaagcagtgagagcgaaggtgatggctcctttttctattacatttataagttaacagatagatttggaaaagatataaatgtctggatgcaccaatatttcaggcaaatataaaattaatgcatcccaaatgaagcctcgtgccaacatttgatcatcagcacttagtgattggtttctgttcgcctgtactacgaggtaatacaatctgatcaccactccaatgcctacacgttcgcacgcccatcgaccggggattaaccgatgattaatcactgatcagcacgcagtcaggatgtcctaatcactcactgtcaccgatccagcacagtcatcagcatctaacaaaccgtgctgttaaggtaagaaattgacgtgcctttactttagctactcatcttgccccctcccgccgaatttcacggccacggcacgagcaaaatggagcacccacctgcctgcctaggacgagaaaaggtgtagctacagatgtgggcgatgtgggcagctaggttggcttgcttgcaaggcagccaaggtaagggggaagagcactactcgctcgccgaaagcaggctgatcatagtacaagccagtgaggtcatgtacatgtgcgcagcgtggtttgatttgctcgctttgccggtctgtcgagcggagtgtcgacctttgaatggagcacttgtcccttgctgctattccacaatcagctggacaagtgggactctccgagttgatacatataataaggtgctatttgatactactcatgaagatgaagattaagttgacgtgtgtaaaacgagaaaactattagcatataattatttaagttttaattattacaaacttgatacaaagtagtttgaaaaacgtgctaaccgaaaccgaggtaaaatctgtatagtaagtgatcaaataattttccttgggtcagctcgggctcgttagcgggttgcaacgtatcagtggtggagccagaaaattttcggagctcgaacaaatataaatatattataccttaagtatctgttactgtcgatgggagatacccgcaactatattttagggtatttggctacattggtacgaggatctacacgatatggcatcaagcataaaaaagataaggattatactggttcaggcctctcataaggtaatagccctaatccagtttatatgggattatagaataaaccacagagtacaagagagaacaacaaaactccaagattaccaacgagattcctttcgagagagaggctcgacgagatctatcagcgaattggcttcaagtcctccggattgtaatagccctaattcagtttatatgggattatagaataaaccacagagtataagagagaacaacaaaactctaagattactgacgagattccttccgagagaggctcgacgagatctgtcagcgaattggctttaagtcttccggattgcttctgtggtgttgagtgtcttgcaggccaccttggtctccaagtacaattcggaaacaacggaccccgtacgatatgacaacctcattttcccctccgagtagtactctgatatttcctattcctataaattatttccgtaagagcatcaatcattactgtatactttataatataccgtatccgtatacctcacgactcctaggataataggtatgccttatctgtaaccctgataattgaaatatcactttaatcataaagtagtgtccaaactataaggcacattcgagcctaggctgtcactcggggtcagacactgcaactctctactccatccgttctaaaatatagtaattttttggtggatgaaatatattctaatactataaatctagatatactctctatccagattcatagtacttgcatatatgtcttgttaacggctgacaatatttctaaccatttacacatgctatacgttggctaggcttattttttttattataaatatgtaacataagtacttaaacatgagagaaataatttatcaacaacctgagatttgaaatggaagttatctctggcaatgtttgaattgggagatatcttttctcgtactttgcagtagtacttggaattgagctcttccatttccaaaattccaagcggaagtcctcagtctttgctgtccatatcacacttctccttggaacccagtgggtggatatatatagttctagaccctgctagaagggaagaggaattattagagacatcgggaccgggattaattaacaagtaatgccacttagggtccttatcgatggagacagtgtgtggtagtagcgtagtagcttttgtggtcaggagaggcacggcggccggtgtactgctaccgccagccagccattctacccgtcacccacgacgcgtccacgttggctgtcgctctcaaggccggctgcccgggagacgtttttttatggctctaatcgatcttgtgtcctcgctacctttccctcctcccggatcctctacggagctgtttggatcagggcacgtcggatgtttagatattaatttagagtattaaacatagattatttaaaataattaattatgtgaatgagagttaattcgcgtgacaatttttcaggggcaattgcttatttgaccccgttttaaaccgtaactaccaatttgaccatactttttaaaatttgcttatttaaccctcattttcaaaaacgaagctccggtctgaccctattctgtttgggtgagttaacggtgttaattttagggtaaatagtctattttgcccttacttatttgaccatattatatcttgcttgtttgcttgtttgaccctataatgttgaaatatttgtaataatttttgctcaagtttgacagatttgccattaatttaataaattttaatcattttgtcaaataaattaaataaaatgtgacgacagatttgccataaattttgacaaatttgattcattttgacagattttgacatcacggcatgagtggtatatacgaccagaaactaacaaagcagatgagctcttgagtgaaatattcaaaacattcacatccaaatgaaatcttgatgccgccactggaaactaacagcatcactccgccgccgcccccacagacctctcccgcgcctcctcagagcgccgccgctgccgccctatacctccacgagccggaggcccgctggcacccgcttcacgacgccgccgtccccttagagcgctgccgccgccctctcgctgccgctgccccctctccaccaccgtccccatgccgccgccgcccccacagacctccgcgcctcctcagagcgccgccgccgccgccctatacctccacaagcggaaggcccgccggtgcccgcttcatgacgccaacgtcccctccgagcgccgccgttgccccctcttcgccgtcgtacccacgctgccgccgcccccacaaacctcctccgtgcctcctcagagcgctgccgccgccctatacctccacaagcggaaggcccgccggcgcccgcttcatgacgctggccgtcaccttagagcgccgccgccgccccctcgccgccgctgtccccttgccgccgccgtccccacgccgcgctgaccccacagaactccttcgtgccccctcatagcaccgctgccgccgccgccctccacctccacgagcgggcgccggcggggctctgcttcacgtcgccgccgccgctcgctgccaccgcatgatttgcatgagagagagagtgttgcacgagacagtagatagggtttgggggtattttgggcattaggaatattagaaacattttctctttttttttttttaaaaaaaaccaatcctatcggagtcatggaatggggtcagacgagagcttcatttttgaaaaggagggtaaataagcaaactttaaaaaagtatggttaaattggtagttagtgctcaaaacagggtcaaataagcaattgtcccaattttaattttttaagcctaactgatccataattaggatatgtttactgtagcatcacatagactaatcatggattaattaggctcaataaattcgtctcgcgaattagtctagagttatagaatgagttttgttaatagtatacgtttaatacttctaatcagtgtccaaacatctgatatgacaggaaccatccaatcagggtctacgtcgcgtccaccattcactgtcactagaagaaccgtactagatggtggttaactggctattaagcagtgagattgcacttgatagtgcagtggtaagaaatgtcgtggtctcaattctaaagtcctgtgttcaattctcaatacgcttaaaatttcttcttaaaaatgtttggagggacgtttttcctttatagacaaggattaaggtcatttcgtcccaaagtttcgtaaagttttgtcgtttagaaactgacccctttttttttgaaaaaaaatgaactgatttcttctatgtagaaatgttgtgaagttcatctatttctcttttttttttccccctaaaagcacgatacaaatgccaaccatgtgaacaccttcggagataggtacgttatctgaagttaaatccgaataagtttcaaaataaactaataacctaacgagttaagttacgtttatttcacagtttctaattagggtttggttgatatttctctagaagtgatgcatatgttgattgggtaattgagggtgaaaacaaggtgtagaaatacccctaaacacccctaaacacactgctgtgtaatttatttgttccgtacattaaacaggtaataaatatgtgaccgtagaggcgcagaggatcgtcgaaactaacataagtaccaccaactaaaggataaagcacacgacgggtgtaattagtgcgcacatgattgttcttagcatgctaagtgacaaacattcttgggtggctaatcctcctctctcccataggctagatcgagctaaagccagatcttgtgtactccaaaagtcagcaagtgctgctactctgtctcttggattgtattgcctcttatctctcggcaagcagcgcctcctctgcctttgcaggccactactgagttcatcgtcagatttgttgggattccgatttccatttcatccatccatccatccatccatccatccatccatccatgtagtcgatccactattgattgatccatgcgtgtgagcgtgctccacgaccgactctggtaaaaaatggagaatatttttcacttcaccgcccgattcgtgccgtcagattctgggtgtctgttcctatctgctggaatgtgcgatcccctgactctgaatccatccatcaggagacgaccggcagaatttcttgtgatagggatgcgcaacttgtagaattttaacttggggatgcaagatgcatatggtttaatttcgttaatttgacatggccgtgacaaggacttattttgagctggtgcaatggcggttaaattatatggttgttttatacggcgattattttgtactgccataatttgttttgactacttaatagatcagaatcagaatgacacatagaagactgatatatacttcagcatgaggtgaatgataattacgccacaacttacagatagaaaaaccagtcaaattgtttctgatagaggcacagaatcaaactaaagtatctaaaagtcattaactactatataatatattctgtaagaccataaagcattacaaaagccatgcattattcacgtatgtggagtggtttttcactcctaatctcctccgaaaaattgtactaataccacttgcttttctttcccatatctttgatttgcttatagcccataatcttgtactcctacatagcaaacgccaaaacacacataattcagcagcagtgctccgtaaatattcaagtcgcaaaccacaactaacctagtcctcttggtcggcagactttgttgctgatatgacgatgatccagacaaaacacaagtaccttgcacccaatga

SEQ ID NO: 19672 - DNA, 6820 bp, Oryza sativa
aagcatggtagaataaacccccgtccgatcattcaccagaatgctctccatgcatctcccttccagataattcaaggcacaatttgcttggttttgtcgctgcattatattattgccatctctggattgagaagtgatgtgttgaagtgcagttgtttgaatttaagtttcagactaagcgcgcaggggtattgatagggatgggtattgcccagccataccgaccagttcaatcaaaaagcttaagctaataagaaaatgtgccgagtagtagtgctattgttttttttctactatttgttagggaattataattttgcaagaatgcttagctgttcatcataacactgccgaattaaggtagatggtcgaatctccacgagtaagaaataaaacctaggcttagaaacagctggagctaaaaggatatcttcttctttcttttttaacttgtggatagtattagcgttgtcgccgtaggagtataattttgagaagacagtgacttgtgagctaactggagccgatggtgagacgcctgaagaaacctgtgtgatgctgggaatagaaaatggtatttggcaggccagcagctagcagaggcattgctggtaatggaatgatgaggcaatgaagttgtttgattaaccaactaataaaggtcaccgtaggattaacaaaatctcatgctagtatcagcccccagccagccacaagatattgtgactgtagtaggttaccttttcctattagcccccagcacagaaacaaactcaactgacaaaaatgaaaatgtgaaattaggagtagcaagaacaaattctccacttctaactgttgtatgcatctgatctgatgatctgaacccaccagagctgttattacaatgacagtatggcacggcccaatccagtttatatgggctactctatacctgtatcatcgacacggccgttcagcccaagcaaccgagagcccgtgagctgaggactagtttgcacctccgaagctttattttacgggactacctatactacatttgttcacaaattttctcctaaaaatttgacaaatgtaattatagtatcattatagtgtaattttactgtaacttatatgtaattacactgtaacttgcatgtaactaaagtgtaacttatatgtaagtttcacataattttgaattgttagatctattacaagatttattttggtgaggaagaaaacaaatcatagcacacacatatgtgaaagagtttgttcccacgacctccattttactgaaataacatgttacggagagatttttgaaagttacatacaagttacactatagttacagtgatattacatgtaagttacagtgtaattacactatgattgtactgtaattacatctgtcaaatttttggaggaaaatttatcgacaaatatatagcaaaatcgttattttacacctgcaatttccctaatcgatcgaggttttgacggaaaggtttattacgaaatcatatatgttattattactattatttaattttactataaaaagttttactaggtcattagaacctcattttaatattttgcacggggacccaatttaaccgggatgcccctgccgacaacgagtgccgtggcggagtcgaaccacagcatgacggcggtgggcgagggaaagtgggaggtgatgagcatcccgatcaaggcggaggatcaggggagcaagacggagctgtctcaaggtgcgcgccaggagtacatcgacgccctcatgagcattgtggattgcatcctcttcccagagctccgtgagcacatccgcgccaccatggccggttttggcgagactgtcaggatggcccaggctgagcaagccaacgctactagaaaaagcattttcacggacgtgaggtttttttttccagacgggtatgacttttgaagttaaatgaccgtctatgaaaatataaaccagggtgaagctcggcgtccgcctatgaaaatcaattttttctagacggaccacttaataggttcacatacgaaaatacctttattttcgtagagtgacctcttaagtggtgcgcttaaaaaagattaattttcgcaggagaaccttatgtggcctgtaatagtaaataataataataataataataataataataataataataataataataataataataataataataataataataataataataataataataataataataataataataataataatagcagcagcagcagcaggagggaatcgctcgatacgtaaacttaaatacattctattgtgacagcagcagcatcagggaatcgctcgatgcgtaaccttaaatacattctattgtgactcatgaattgttttgcgagaggaggacagataaataaatatcactgagtcttgatggataggatcaaacccttccaaggtaaggaagagagagacctcatcatgcctctggacagatgtcctccccagactgaagaaaacaactctatttaagccgtacttgatcctacaccacttgtccatcagtagtacttactacttttttctgctctggctgtggtgaggtccgtgagaaatttgagagcattagagctagtagaagtcttctaggtgggacgcacgggtagaacagcaggagacctggcaagactgcgcccattagctattttacttaatcatctctaactaaatttgtttacctgtattatattaagatggtgatactaacaatctaacagtaaatattattaacatccgaataatagatcgatgattttatcagtgaaaataataatgtgattgtgatactaagcctgagacgaccgatatttgagacaacgatatcgggtcggctgatatcagtgtgagatgaggaatgcctcacacaagtagggaatttggcggcgtgattctcagatgagggtatcactagttggggaggaaaatggattgaaggaacgagattattttaatacctttgtagtgtatatttaactcatttactctgtgtaatgtcttttattatttctcagttgttaatatctacgggcaatattatttttcttttaaaaacatatatatatagctatatgtactaatcttgctgagtatgtacaacatactcatatattattactatttgatgtgcgcagaaactaatcaagatgagatgtctgagggaaatgatgacacgcaaacctagtggggagtgtggtctacttagtatttagagtcatacaagaggacatatacctgcatgctaggtatagggaatcgtcatggtgataataagttggtcagtgaaccaaccgatgtattaagcaatatagctggtgaaaaataaatggaaccattactgcaggtgtccaagctccagttgtcagggtaagacattacatctcgccttgtatccttgtggacatatataagtatttggtatatatgcttataaggatacgacagactgccacaaatttttttttggtagtgacatagtctgcctgcaaaaatcatgcctacagaaaaaaaatctaagttctatccttatcttttcctctagcatcttatcctctccacccctcattttcctcacccccctctctctctcatttccctccagctccctcccctcccctcccatattaggcggaggggaggtgcggctgccctctctctcctctccctcaggtctactctccctccgcggtcggccgcgccgacgccgacgccgactgcgacaacaccaccgcctagatccgggcatgggaggggaggcagtggcatagacggagggcgggggggggggggggaggggcatcggcggtggcgcggctcccctctctttcctctccctccgcggctagccgcaacaacaacgacgctaatgatgacgccgcctggatctagggaggagaggggagacggcggtgacgaggagcttccatggcggcacggcaggaggggaggtgtagctccccttcctctcatctccctccgcggctggccacgacgacgacgacgccgactgtgacgatgacgccgactggatccagggaggggaggggaggggaggcggcggcacggctgaaggggggcgtcggcgtcggtgcggttggagcggcacctcccctccctctcctctcccgtagctctactcctccacgcccggccgtgacgacgatgactaccgcgactgcgacgatgacgacaacgcctggatccggggaggggaggccagtggcaccgccggcggggtggtggcgccagattttttttattcgctaaaaatatttttgcaggcggatggttctaccgcctataaaaatagatgccgcctgcaaaaatgattttcaatggtggacccatctattttcgcaagtctttgcatgcaggcggtcctttcccccgcctgaaaaaccatttttggctgcctcgaaaaactatttttctagtagtgcaacatcatcgagcagtacagcgcaactgcgttgcctacgtcgatcgaggtcttcgtcaatcacgacaacaccgagaggaaggcacaagtaatgtaggatagatcaggtgtcaaaggctaatcggtgttggtttgaaaatctctcgtaagtgccggtttttccaaccgacaaccctcacacggcaccgatgaccctataacaatatataggtactggttgagtggttgtcgacgataaacaacacttgcagctttgaacgagaaaacaaaaaggggaagctgatgaatcagctcattcgagccggttttgttttgcatctaaggtccttcgtccaacgaatttgatgtttctgctaagacttagatttgctggatgtggcactcagcgcttaccagattttggactggcctaattactcagttcaacatcaagagatgctaacgtacaaagcaagcatcagagcgaaggagattctgaaaaaaaaaaaagtttagtcggcaaatttctccgggatgtggcggatgaaaccataaaaaagttaatccaggatctgcaccgtcgcgccgactgccccctaattgaaaacgatatttgaagagaaattcagtgcacatctaataattgagcacaatagagcagcaacaccgaccaccgtcatgaactggtgaaagtccctgctaataaaagatgaaatatttttggggcaattgctgttctctgccggtctatatgatgtgtactctaatttgggcaagacaaggacctaagaacgaacaggaaccatgaaaaagacctcagtgatgtaatgctgttggcccttgaaagggctctttaacttgcagcattgcagtgacgcatgcttttgttgtttagcctcggaagatgtcgctgttaccaagaaagaaaagtgaaggttggatttatttggcatattgatcgacaattttttttggtgaacacacaaaaatattgcacgtcaatggacacggctagatcgcgcgctagcggcatatcgctaaccagcgacgcccttctcttcccaaaacgttactagtacactcaacagtacatgccttttttttttcttccttgagaattttctcctaaattacttatccgatctataatccgattacactgttatgatcattgcaattaaatctttacaacaagatcttaaacgattatattctgataaaaaaatatctatgttgtaaattacttttattatatatgtaagttacttttgtcctatatataaattacttatagattcaagctctttaataacttatatattttaaatcacgtattattttcatgatctatttatttacatcattgtactctacataagatatgagacaaaacaatatccatgttgaatatattcaaacatttcattaatttaaaagtaatttatttaaattgtagtagtaacttagctatgcaatagatgtaacttagctatgcaatagaggtaagttagtacaaaatagaagtaagttgttacaacattagaagtaaattcgagagaaaaatattttgtatctaaaaattaaatttaaagtccataaattatagaattgactaaaaactataataaacataatcgacttaaagcattatgaatatataaaaagtaatttatatatatgataaaagtaacttaagtatatgataaaagtaacttaactatatataataaaagtaatttacaagtataaatattttttcatcgtagtataatcatgtaagatctagttttgaagatttaattgcaacgaacgcaatggtgtaatcggattatagatcggataagtaatttgagagaaaactttgtaagggaaaaaatacatgcatgtgtaatagaaataaaaggcatgcatatgcgctggcttctccacggtttctatggttggcgtcacgtgataagacaatatcgagaggcctcactgattagtttttgtgcacgtcaatgtattagaattctgatcgataaggaaaaaaaacaatgtacgatggatggtcatctaaggggcatctacgacgcggatgttcgtgcaagaaacaagtcaacgaacgccacgttaatgcgctaccggttttccttgatttggtacgttttttcatagggaaatttgtatgatcaacagctaccacgcaggtgaatctcaaacccttttattcatctatcgctatatggcttcaggtgtacgtgggtcatattgctatacacctgaatcgtttgtatagtgagactcttttctcacatttattttctcaggtccgtttttacgcactttgatcaaaaaaatactccggg

SEQ ID NO: 19673 - DNA, 6497 bp, Oryza sativa
aaaatatattaacaaggaaaaaatcactaatttttaaaataactaggaaggtagcccgcgcattgcgcgggtatgtattttagattgtgtttgaaaacttatataggtggaatatcaaccggatgacaccagtttttcaaaagtactactacaaaaaacttatattgccatgtttgaaaaacttatattgtacgggcatgtatttagattgcatttgaaaagcttatataggcgaaatatcaaccggataacacctgctttcaaaagtattatttcttcatcaacattgcttagatatttttccatgctatttgttagcttttaaaatatataatatttaatccatcggtataaacaattatgtatgatccatataaacgcctgccatgtttcaaaaatatctatttttttctttggataaatctaacggtggtaaataacgggtccacctgatttaatgaaaatcgatggctagatgtttagtttttatttcttagaatttttagaaatttctctaatttaagatgccacgttgtggcttaggagcatttgtagtaaaactctcttaggccgtcacgtggtattctacaatcttattgttgatttttatttaaattggtggacctgttattttagattgctagattatatctatttagaaagttctctgtcgattttcatttaaattagtgggtccattattttagaccattagattatatctattttagaaagttatttttaataagataacttatgttatcatcatagattatatattgtgttacaaatattatatataaaattaaaattatgctcatcatagactacattaaaatccataaactttagactgcactgaaattacacatcagattatatgtaatgggtcacaattatgctcgttgcaaagaatcccatataattgacagctcatgccatcctcatatttcaaatatgtattttttttcccgtaaaatatgagacccatgaagacacattttttacttacagtaacatcgagaccactcttttatataacagtgattgtgtgttcgctcccggctaaaactccatggaaaaacagatcttttgattccacggtaacaaattatggtgtgtatttttgactgccttaattaggaaagaaaagaagagattgatgggggaggaatttgtacgtaagtacgtacacatgtggggacggccaaggaaagggtgagggggattaagttttgatctaatggttaatagtatcgggtccaccgttttaaatgaaaattgatggttagatgttttttcttttttcatattttttctctaatttattaaagcgtcacgtggtggcttaggaacgtttgtagggtgccacatggcggtttaggagcgtttgtaggaagtttaatggacttttagtatataataatagatagatagatttcaaaactccatagaaaactttgactagaaactaaaaatctttatatgtaaaaacattatgtacaaaaacttcagtttattataaaatagattcaaagagaaaaaccactcaatctaaaaataatttctataggatattcaaaactttcatgtaaagactaaaaattacatgcccgcatgcaataggcatgtagatgcaggggtgggaagatttgaaattggaattttttttgcaatactaaaataaattcatagacaagcggaacatccgacacacattatgaaccctgcttacagctcagtcataatacttccaccatttgcccaattaattttagtggttcttccttggcttctggttgtaaaagaaaacggggtactttttaagagagattttacagtacaacaggcaatccggtacaaaatctcagtcattggcagggtctgatcggatggttggtgttaatcagtaccttgaggtaccatttactccatcatcaggtggtaactgaccatgttgagcgaggtggatggataaaattaaaaattcgtgttggagattaggatcaatcaatgtgagcgatatgtttcggcgaggcatgtggaaactggaaactgcagtttctaacccaaatccctgagacggcgatgcacaattgtcgtcggcagcgaggtggccggtttgtgtcaccgtgtggagcgaagatgctccaggagtggtggtcaagcaatggatttggcggtgctcgaggactcaattagcagtggtggcagcggtgcttggcaaaagcatccctccatgattctactaccactaagtatggtggtagtagaaatagatatgaactattaaatcaaatgagatcaatcgttcagatttttttctacggtaggtagagagcaccggagtgagacttctcgatttttagataatggaaatggattacatctccggcttctgtcataagacacacagccataagtttaataataataaaaaggtaagataaaaataaatcaagtattttcttctcgattaccctcctagattgaatgtcctgattcttgaaaaacctggtggtattggtaccttgaggtacgttggaccagaacaaaccttttacttttattacaccaaacatggaatttatgcttagttcttcgcaaataagctgtacgaatcccacaatattttgttaagagaatcaatagaagaagcgacacaatttctcctcatatcttgcattcattcatatatatcataatttattcgatcgaacaatgtcacacttgcttttgatagcgcacacacaaaacacttgagggtgcaggcttcactcttcttaattgaagccgcttctactactgatcaccctgtgctctgttcttcccattcaccttaaactctgaaaggagaaagagcacatttgattgcggcttaagcattgctccggaaggagccgtaccccctggcgctggcacgaaggacgatctggtggtacagcgctgcgatcgccgccccgatgaacggcccaacccagaagatccactgcgtcacacagatgaacagcaatgcaattgcaatatcagttcatagcttgataattcagagttcaaccgcatgatgaaaccatgcatatttttctgtttgatagtagtaatcttggaagaacatatgtacctgatcactccatgccttgctgttgttgtagacgacggcggcgccgaggctcctcgccgggttgatgccggtgccggtgacggggatggtcgccaggtgcaccatgaacacggcgaacccgatcggcagcggcgccaacaccttgattgattaattcattgaaaaaagagaggcaatgagatcgagttcttgcaacgtgcaatcacaagtatgaagtgtgtgtctccggtgcttaccgggacatgggagtcgcgggcgttgcgcttggggtcggtggcggagaagacggtgtacacgagcacgaaggtgccgatgatctcggcggcgaggccggtgcccttggagtagccggcggcgagctcgttggcgccgccgccgtacctgtcgtagaacgagctctggaaccccttgacgagcgcgacgccgcagacggcgccgaggcactgcgccacgatgtagaggatggcgcggaccagggacaccttgcgcgccaggaagaggccgaacgtcaccgccgggttgatgtgcccgccggagatgccggcggtgcagtacaccaggatgaagatcatgccgtccaacgcccacgcgatgccgaggacgcccacgccgccgcacgccgcgtcgtcgccggacgccgacgcgtccgtctggtgcttgtacccgatcaccgtggccaccgtgacgtacaggaacagcagcgtggccacgaactcggcgatgacggcgcggtacagcgaccacctcccgagctcgtcgatgtcgacgagaggcgccggcggcgggtcctcgtagtcccggacgccgccggcctcgacgtcggcctctttgcccattgcgtttgctctcgcttgcctgattggctcgacggacggaggagagcaagaaacggaaatgcttgggggttgcaagtgtttgtgttgtggaatcttgggtgccatgggggaggtatttataggggtttaagggttttgtgagaagaacaagaggatggtcttattgtatggtttaatttggttttcttaattttggaaactttgtagtgatcttggctatagctgtcaacattattgtacagcaaatcccatgagctgtgtgtgcctgtgaaccatgtagtatgtacaactcccttaatgctccattaaatgttttgttctggcaccatagctacaacataaatccacggcgacatagctcggttttgtggaagggatgacctgctgatgagctgagttatgaaatatgtgcaaataaatcaggaatgcatcgaaatagtcagtagtttaaactgaacttggtattcaaatataggcaaattttgttacatcacattgtaacatcatgattttagctataccgtaaaattgggagaacgacactttcaaaggttggatatttattgatggacaccataactttaaaatatttatttctaattgaataggagaaataaatcgtttgaaatgtcaggaatactcacgggcccacatttcagctttcccactcctatctttctctcatcccctccgtccacatcaacacaaaagtgtggtgaggcagggactcgtcgtctcctgagacggccgacaactccctcgaggccgagctgccactgctattgttgtgtcaccgcctctccttcttcctctacctggaccacaatggcgttaatctggacggggaggaggtccacatgggcgggagggaggcgaggagttggcaagggatggacaagaagatgtggtggtagtcgtcggacagcggtgatctacacaagaaggggatttgcgcgggccgacagggggagggaggtggccttggcagccaaggatggcgacgatagggttgtggcggcggtcattggacagctggtggatgagaatggactcacatgggctgattgctagagggaggtagtgaaggcgattgagattggggacgagagggcagtggcggcggtcctccggcattgctgatgtggatggaggggatagagagaagagaagatggatgggagatatgacatgtgggctcaaaggtattttcgacatttcacacgatttctctctccaattcaactaaaagtaaatattttaattggtgtagtgtacactagcaaatatccaactttgagtatgtgatcttctaaaggttcacttttgtggcttcctatgttaaaacgtgaagttaacgatgttatgtagcaaaatttatctcaaatatatacatgtatatataaatgggataggcagcacaaacttttcaactagaaaagatgtccgtgcgttgcaatgggtagagccaatttaatttgcacatatgtgtcagatagaaaggggatgacatataggtcccactattatttttaaaaaattttctaccgacttagcataaacaattgtctaaaccactaatggagctaatttgcaatttgcaccggttttttatgttgagggaagcattatacccggttttgggttgagagatgccatttgatcataagcaaaacaggagataggtaaaatagacttattccttttcctcaagtttacaacccatatatgttagtttggctatctttctacagcccaattatatttgagagaatccattatatgccactgactttgtcactcggctatgatttgccactgactttgtcatgttctacaatatgtcattgaatttcgcctaacttctacaatttaccatcatcgtccggttagcctctgttagcattgtacaattttgtctaaatgaccaaaatacccctagtacaaaacttccaaaatttggataaaattatcaaaatatcatattataaacataagattgtaaacatccattttttttccaaaaacttaaaatatgatacttcagaatttttatccgaattttgaaaattttgtcctaggggtattttggtcatttcaacaaatttgtacagtactaacggagactaactagacggcgatggtaaatcgtaaaagttaagcaaaagtcgatggcatattgtaggacatgataaagtcagtggcaactcgcgacgtgtgacaaagtcaatggcatataatggattctctcattaaatttgcacacataaagcaagaaaataatcattttctttacatagctcgattcaatcttcattgtcagtccgagcgagcgaacggtggctgaatcatgccgaactaaactgatacgacaacggaaacaaatcggacgacatacacaatttttaggcaaaaacaccttaaacttttataataataatagtagagattacctaaagatgaacttgtgcacacccaccatatcacacaatacacacgcacacattacacttgtaaacttgcaaatgcatctttggggtgca

SEQ ID NO: 19674 - DNA, 8467 bp, Oryza sativa
caaaatcccttatatttagggacggaggaagtaatcaattagtacatccatgccaagaatcaatgatgcaatcggggtttccttattatgtggttactgtgataaccgtacgtaccataggtttattgtctgtgggtaggtaacgtgtcccacgccattacctgaccaagtttattttaaacataaattaaaagttttgataaattttgttccgtttctatcggtttattagaattaccgtggttggatatcgccgggtgctataaccctcccccaaacggctaaactgaaagagaaaccttggagacatcgtatgcaataacctgactcaaattattaaactaccacagaaaattaacatcaaaactatggttcaactgcctcaacaagtaattgtcgttgagaaggtaataattgaataatcccatgatgatctattggtttgggcagccgttcagcgccgaccctcatccccatctttgctgcagtatgggcccaccaccagcatcatgtatccttccatctaaatcctgtggccaggaaacactaataaaagctagattatttaaccagccagttcagtgatctcaatcaagacaatggaaaggcttaaccacataattaattaatacaaacgtaccaaatgtaaagtgtacattctgcctctggatgttgtcatgctgagccggagattcaattccatccacaattaagccggttgttctcctgtcatgaactatggatataattatctcacctttttctctgcatatctacctgctgcctgcctgcttgatagctatcatttagtatcaagatttactgtttgcctaattagatatagaatgagatcgagccttctctgtttggtattatgtatgcatgcgccgaccaaataatctagattaattaagtaaattcgtatgaccaaaaaaggctgagatgaggagctcagttcactggatacaacttgattagcccatggtttttacacttctgaccaccattagttggatggattcgagaatttacttgccaattgccattgtcttggaccttgtggatgctggattggcttgcattatatttgacatagatgtggtaatataatccatggctcctgattgttttgctattttacagttgtgtgtttatcatgcgaagacagtacttagggtgtattatgttgataaaaagtgagctgttcaagttagtatgtaagatatagtagattcttttctataaaaagttagactctctccagcaagtgcggtaagttgataaatgcaagcataacgctgacaataaaatctaggcaagttaatttgctcgtgtaactatgttggacttgagcgtagactgcttgttgcacttagagcaggtacgatagtagactataaatcagctataaacatattttaaggagagataagagtagcggtctacagatttgtagccagctgcaacacgaactccaagatacatgtggatatgacaagtgggaccatgcattaattatgtagtacatgtttatatgtaactattgtatgaattagctactaaattaactatagatgatttagagccaatagttggttatactattaaacttgctcttactcaaatttttcttttgaggtaatattttaatgagtaaattttacaaaactatagatactatgaccaaattatcacaaaactacagatttaacttggtgtatcacaaaactacacatataacactaaatttatcacaaaactacacatttaagatgaagtgtcacgaactacatatttagtaattaaattatcacaaaactttaggtttagaatcaatttaatcacaaagtaatgatgtttatagctccaccataacaatggtgctagggatataaactccaaaagttgtagttttgtgataagttcaatattaaatatgcatttttatgatacttaatctaaaatatgtagttttgtgataaatttggtgctaaatatgtagttttgtgatgcaactccttaaatctatagttttgtgataatttggtcaaaatacttgtcagcagctaagggtatatgtgctcttttagatttggaaaaacgtgcacatatactttcctcatcagttcaccacgctccatttaactcactaaatatttttttgttgttattctatgtttgtttagctattactcctatattattacaagaagaccgaagtagaagtagaaccagaaccactgtgcttactgtattggtaaaaaaaaatcatgttagaaagagatgtttctactgtcaaatcatggtgggtctatcttatgacggtgttgattgatttatatagctataatgtataattgtatttatgaaaatagtagcaatagttgaatatcaaattcaactatagttgaaaatatcttactatagcagaatttataactgggtattgtccgtcctttagctctcttcagggatatacaggtttatcccaggttagacgcacgagagattttacaaagttgtaggcctttctcagtgtaacaatcctacaccctattgtatatggaaatagttaaaagatatatatgcagatctagtctagtcctatatatgtacatagtctcgtcgggaactctgatggcatggcttgatgaagcgtttggctctatagattaatagatggctcgttgattgtagacttgatgcttgattcaatacttgatctgagattcaaagtcctggctctatcttaggtccttaatttgaacccctagattcttttgtatttgggatggacttaaagatttattcttggaagtcttcggtagagttaggtctttgagatcttactgaagttggtcttgtgatccttatctctgtttgcggtcctatacccatttgagaaaatcctttccatagaagtatatgtattcatacatgtgtatttaagtctccaatgtcatcgggggtatctcatattttaccaaaagcaaatttgctactttagtcaataccttcaagctttctaaggcctactcatccgtttcatattataagatgtttgtttttttagtcaaacttctttaagtttgactaaatttagagaaaaagtataataatattttcaatacaaaacaaatatattatcaaaatacattcaatcctagatttaataaaactaatttgataatttagatattgctaattttctataaacttggttaaacttaataaagtttgactagaaaaaaaagtcaaacgtcttatatatgaaacgaagggagtatgtagcaatcaggtttcatgtggttttggcgccattgggttcagagtatttccatacggatactttagtactttacacatgcggattcttaatcactatgtatggtttggtttgggaatgtggtaaggtgtgttggacttgtacttgtttttttgatgggatgatcccattcatctgtttaacataagggatgatcctatgtaataccttttaagtgatatccacatgtcagcaagagggaaaagtggattgaattgttctaccagttttttagggacaaagtcaacccggatattggattacatctatctccaaaccaaacaccgagaaaattttgttcagagtatgatccatcctgatccatctcattcctggaacccaaacacacggtacattggtacatttgtacatctcagtgtttagtggatttcaaaaaattattgattgattttcaggttcaaaccgaagggcatacatagaaaaaggtcacatttgcacgtacgcacaaacacacgaatgcttgcactgctgcagcactgcaatcttcacacttagactgaagctgcatatctccactacggataaaaagccagcgctctagctatctgttccctccatttcatcttaaactctgaaggagaagcagagagcctgaataataatggcttccacttggccatgcagatcacaggacgaacgaacgagctaggttaggcgttactccggaaggagccgtagccccttgcgctggcgcggaggatgacctggtggtacagcgccgcgatcgccgccccgatgaacggcccgacccagaagatccactgcgtgtgcgtcaatgcaatgtcagttcattatcctggcttgtgatcaacagcattattaattattctcgcacaaatttggcagcaagattacgttacctgatcactccatgccttgctgttgttgtacatgacggcggcgccgaggctcctcgccgggttgatgccggtgccggtgatcgggatcgtcgccaggtgcaccatgaacaccgcgaacccgatcggcagcggcgccaacaccttgatttttaccacagaagtgaagcaatgagctcgagttcttgccatgtaacacaaagttgtgtactccgatatatgcttaccggaacatgggagtcgcgggcgttgcgcttggggtcggtggcggagaagacggtgtacaccagcacgaacgtgccgatgatctccgcggcgaggccggtgcccgtggagtagccggcggcgagctcgttggcgccgccgccgtgccgcgcgtagaggccgctctggaaccccttgacgagcgcgacgccgcagatggcgccgaggcactgcgccgccatgtacaggagggcgcgcaccagggacaccttccgggccaggaagaggccgagcgtcaccgccgggttgatgtgcccgccggagacgccggcggtgcagtagacgaggacgaagatcatgccgccgaacgcccacgcgatgccgaggacgcccacgccgcgtcggcgccgttcgcggcggcgtccgtctggtgcttgtacccgatcaccgtggccaccgtgacgtagaggaacagcagcgtggccacgaactcggcgatgacggcgcggtacagggaccacctgcacagctcgtcggcgtcgacgagcggcgccggcggcgggtcctcgtagtcccggacgccgccggcctcgagagtggacacgtcaacctctttgcccattgttgccttggaagagacaaatggagaaatgctcaggaagttggaagtgttttgagctgtggtgtttgtggttgtgataggaaccatttatagagggtttatgagtgaatcagggaaagaagaagatggcttcatcatggtttgtaatgaaatttggaaggcattttcagctgtcaatgttgatggacaactaacggcgtttagatccttccacatttattttgtttgtcatttggatttttcttatctctactgctaaaaacagagtcatcatcattccatcccctcctcccacaacacgttcgtacactcagcgtacatagccacgaggccgaatgttttattcttaatcatccttctcgtctatctctaattatatgaacctggttcattacattatacagaaatgttattactaatatatataggaagacatacatatattacttatacacgcaatcaacgtatacaacgacaaatctctaataatgctaaatttctattgagaacatatccgcatacgcgggcagcataacatatattctggtgggtgtaggcatacaccctaaccgtttttttttctattatagttttagagtttcttactatgttttcttatttggacaatacatttttcatactccaactagatttatatatttgattatgattcttctcgttaattgaaatattttacattgacaaagtttgaaatctggtaagacctaagaagttcgttcaaactattgctaacgagctggtaataaggatggaaggggttatcttgaaacacatgggaatccctattaatgaatgagactgttatgaaatggaaaatgctacgtatatgatgtttttgtacgatcaaatgaggacggcgcttggcatcttaacgttacgtggtgcacgcgcatgttgcagcccaatcccatacgcatatactcattatttttctttgccttttttgctctatctatatccaaataaatataaaccatgtcaaacattggctcatacataaacgtttgctgcatcttatcctgatttgtgccattggaaatttagaatacttacaactaggggtgatgctaccagggtccgagatgcaaggaacatatttgcatgggtaatcctatatatctataaagctcatccccactaaatgtagttaatgctaattctctcttctctcgtgaagccacgtcacctcaattgtttttagcccttggatgattcatcaagggtgcaaattgcatctcttcttcctaaaagccacaacatataactcaaccatttataacttttgaataattgatcgaggtacaaaatatacaagcacataaaacaaaatcatatagtaaataagatattttttctacaactcatatctaactattttatcacacaattctcccgtagcaacgcgcggggtacctatctagtttacttaaactaggttcacggtaaaataatttacttaacttaagctgggtcacatgataagtgttaagcgacagtacgagtatataagatttattaggaaaaataaattactctggttagctgtgccaggaggcttaattgtaagatgtcaggacgatgatgtgatgagcttgggtttttggatatagggtcagcgctagaagaggtccagtgtgggaccagaacttgcaacgttaataagctttatgagcctagaagagaaacaattcatcgtacaactatcgtaacaaattagtcgtatgtatagcagcgccggttataaaatacgtgaggtgtactagtacttgagtcaggactttacatgtcctctagcgtttctaaaacttcttgtggtcataaagttttaaagttttgtataagatataaaaaacacgaatattagggaatgacttaatatcaaataattagaagtggtgagtccccgcaaaaaaaaaatagaagtggtgaggttctgaaactctaggtcgtttagcccaccaccttgtggagctagccggaagacctctagacgtttctcttgtgtaagatttcatcgaacttttaaaacttaaatataggacagtttcaatagaaatcgttgaatttcatcaacaaatcctgtgtgttgtatggtctgtcttctaatttatagttgatgtaggttcattctgccacccttattagcgtttgttagtgttcctttgctaagtggcacctctggttgtaacaaaaccgtccatcatatatagcctcattcccggagctgacaccatctctccatctagcacactttttggttcatgtcttgtggctaagatgcactgacactcatcacctaactgatagaattaattaagttagctcactttcaagaattaacaaggacaaagaaaagcttgatcacaacacagttggatcggtcatcatcagtcctctggcacgttgctagtgctgtcattctggtcaccggaggttcaattccatccacaaggatgaaacaatttgaaaagaagcgagcattctgttttcacgtcaccggccggccaatctgtacatcctataccaaaagcttgtcatgtattgagcaatatcatcttaaaaaaatattctcatgctttgatcttaaccatccatttatcatatgtattaaaactcactaaatatagttattgcacattgaactatgacacttagaaaactaatagtcactggatccttcttatgtttgatacataaccatccaagtatcatatagaattgcaatttcacatcaactaatatagaaaaaatgttatctatttagatattatgtgtaaacaatttacttattatattgttttcttcgagatttctttgaagtatattaaattttccgttgtaatgcgtggggtatctaatagttattttagccggcacttcccctaagcttgtcaacagccacattcctgagctcgccccatagtgttgccatcacttgcatcatatgttgctgccgctagcctcatgctcactttcgcatgcacatgcgcgggcatattaattatgtttcatagattttattatgttaagatgtactggtgattttactttattatttgttaaaaattaaattatatgatcttcatcgaaaaatgtttggtattgctgatccttcactggttgtatatatttacaaaaaccacaaaggtatttatatagataactgtgcgggcatcttgttaatatattacaaaattatacaaccatgtttttttttcttttgaatatgagtgtttgatattttaaaaacaaaatgttgaacatatttggtcactaaaatatttgaatcaaattaaattatattctatatgacggcttagtccagcatcgtaccattatatcttttcctcacgcgtgcattattactagtttcttcgataaaggatttatagttctggcctctacatgccaactaag

SEQ ID NO: 19675 - DNA, 1254 bp, Oryza sativa
agagagagattagaggattttcacaaataagaaaggatttttattttgaaaatattgctaaggtttgggatctacggctcgtcctagggtcaagggggctctgataccaacttgtcacgatcggaattaacccaacgggcgttccttacgtgcgtgtattattccttgtcccaggaggcaaggtacaccaaaagttgatacatttcagagtttataaagtggaagcgtaaatagttaatttattacatgggcggcgaagacccagcacacacaaaaacaaacggaaaacagcggaagactagggcgacgaccacaggcgcttgacggcaggcttttgtttataaccagactgagccacaaactaagccttacctactagacatgtggaagtacggtagtgctttgcaacagaggctcgaagaccggtccttatatggccgaggtgctactatcaaaaccatgcaccccgagcccagcctaaaaccattttgaggattttgaatagagggggaggtgtgaatccaatttccacaataatcaaaccattccatagtgtccaggtgatatgaatatcccaaagtctagagttgtaaaaccacctaatgttgcctaattaaccagcgaagcatctacctaaaatcatactagtggtaccatgagtagagtgtccactagttggggttttgtttattctagggtgaacaaggaaataataacaataacaataataaggtcataacaaaggtaaataggcatggctagataaaacagtgataacgcgggaatttaaataaagcgataatgcaataatttaaatcaacataattttataaactgggattcaatatgtttaaggatgatgtgacttgccttgctcgctttcccaaacgtcggcttcaacttcaacgaagagcggatcttctgaagctgcagcgtctacacgaccaacggaaaagaaaaggcttttactctaataaactccatataacaagcacgaacaaagcacaaaaatgggttcttgacttcttaaggaaaaattagagacttgaacggtccaattccgagttcaaatggccaagttatggccatttgaaggttatatgctctttaaatgaatatttgcgaatttcttcatttaaattttaattttaaaagggtttattgcgtcagccgaggggagggggcgcgcggaccgggtccacgggagtggggcccacgcggcagcctcacggtccacggtggaccgggtgcact

SEQ ID NO: 19676 - DNA, 24821 bp, Oryza sativa
taagaacaaaattagctacgatactattgcatcacgctgatggagcatgaatatcttccatcttatgaaaacctacaccatcaaaaccatcatcactaccaaagcaaccactatctatcttaataaatagaaaaaacaagccaacttatccatcgtaatgatgtcttctttccaaaaaaaaaaaaaaaaaaaaaaaaaaaaaaaaaaaaaaaaccctctgatgaatcttctttgtaatatgccacgtacttcatccagatcctttgggttctcccagttctctcgtcaagcatcttcttgaatatgccaccatcatgttctcctagttctctcgtcaagcatctgctaccatcataatactgatagacaattggaatatataccattaggaataatacactgtaacgtagcaaaaatgatgtaggactggagagatgaaccttaccataagaaaaccaacttacattggttacatattaattgtttataaatatgtccaacaccaccgtgtcatcctcctctcaccaacactaatccgctctccttcatcctacctagggttgtcactgggtattcattaaccatccccatatccatatccacattttaagtggtctctctgaatgaagcaaactggaatccgtgcaacttcgtaatccatccacatttatatttcatcctgtacatacatgttagtaaaagcaaatttgccaacaattgtaagtgaacttcagagttaatgcataagttcagaccaaagcgtgctacacataactggctataattaaatttatgcaaattgatctcattaacattagaaaaaaaacaatcagtttacgacggccaattgtagaccgaaccgaaacatcaaaaccatttccactgctttataaaacataacctttatatagaagcaaattaaagctgcaaattcgcccaatacctgtactcaaagaagcaagtagttagttcattctcagattaatcccaattatgccacccagcagtcttagtgtagctatccacaaaaatatgtgcaaaggcaaccctcccaaatggttcacatcaatgacccatgaacataaaatacgcatgaatgtgttcatccatccaaatataacatcaagcaggagaaaaataggcatgttaaaaatgatcaaatttattgttttctgtagtgcaaatagtgtggcctgaattctttattggataaaagtaaaaatcttataaaataacaaaagtaatgctggtgtatcatcttaactaattaagtgatttaaacaagagttggataagtgagcatacctgccaatgaaggaacctgcaataaggcacatctatatgttgttactacatatatttgcccatacccctgcaccacaactggtagatcagttatctgcactcatcagccatcacataggtgtctctctatggaacgcgaacaagttttgttagaaaaaaagaacaagtaaacattaagcaccttaggagctgagttgtcaaacatgacaatctctgcagtgaaaataattgctccacatccaaatgttcccgtcccaataatagtggatgaatttacaagagaaaagggagtgatgattaattaaaaagataacataactattcaagttacacaaaaaagggccacttagcattttgcagactctgcaatcaaaattagaagggtcagttatggtattgcctactgaaatgagcattgtttttctaataatctcaaatgccttcacttctttgggggtaaaggtgaaacttgaaagtgctctacacctatctcttcataataatctacagaggtacgatagacatacaatctgctaaaattacctatttattcctattaacatactattggcagtcatgagtagaagaaatcgatgaacataggaaacacataatggcatattggcagtcatgaaacagtgtgatgagtgcacagggatatgcataaaagtacaccattacccatgctctcaaattaaagtatatactactgactacttctcaggacctgtcaagtgttaaccacaaggatagtgcaaactaaagaaagtgaagaaacaaaaactcttacaaggtaaattatgttccatatgtggtggtatagaaccagtaggaaatattcatggcataggcctcaataggaaaatcgacctcccttcttgtttcagtccaaactgaagaaaagaaagtgctcatgtcacttgatgctttcacgcagggatcatccattctatctgaaatattcagaaactgtcaagctaggaatgataaatattcatcccgcattgttgtaatctaaaacatgtagctaaagttatgtcaataaatagagcatgcatgccaaagagatctaacaagcccaccataagttatttcatttagctggcctcatcaaaacaagtgcagacaaacttggatgaaaatgagctcgtataactctgtttttcttcaatggaaaactattatactaaaaacagattatggaagtgctcatatcaattcagaaatatgatccgtgaaaatgatgactcactatatttgtttggacatgctcgtgagtatccaatctggaagcatggagaagatgctacaatcagacagaacggaaaaatagaagaacgtgtccttgagccatgaacgagtgtgaatgatatgattcaagtaaacaaaaataatcatcctccaggtaattccaccaagcatattgtgcgggaaaaaaaaaaggcacaatggccagtgtcgatattgaacgtgcctccacccttccgacgtggatgcgcatcgatatatcccctctgccgcccctctgtcgagccccttggtggccatcgccagcttcgtccgcggcggccacgcacctccgatttcacccgcgccaccgccgctgccacccacgacgacgctggtcctatagatgcggcatcggcggcggtggcggcggcgatgaagcggaggaggatacggggcaatggctgcggaggaaaagtgaacgccgcaagatcggagtttggcggaggaaggtcggcgactcccgtcgatccggcggcggggcaggtgaaggtgctgccgtcggcgggggagcggcaggagggaggaaggggcgcgaggggtgggtgcacggacggagggggcggttggcggctgaagggatggacggatggtggcgcagcgatatccggaggaaaagaggaggcgtggaaggaaacaaagattttatgcccggtgactacgcgtgcgcgcgatctccctcccactgcgtgatccgcgtgcgctgctatcattgaatcggaaatgtttgatgattttcatccgttggatttgatgaatgaagttagtgaattataggatagatatgagtaatcatcgtagcattagcacctgagtgaccagttcttatcgtaaactgtaacctaccaccatgattatgcttcataagaatatacattattatgtatttgctaatccaagagccaagagagcctagcaatgatatttgccggtttattgataggaatgagagaacttcaatcgtacatgccctattattcaataccattacaactacccatcacttggtaaactattggaacaaactgtaaaaaggaattaaggtttgctaagattgtaaggcaaatatgatgattttcattggtctttaataacttattgggacaaattgtgaaaaggaaaaaagatttgctcagattgtaaggccaatatgatgactttccttggtcttcgtgcagtcatctaatatgacgatcaattaggcgaggtaagagtactacgcgtacacacgtactcagtcaaaaaccaagaattggaacaatacagtatgacaggttttcatccttttgatccagtgaaatggggcagagaagctgactggactactcacaagttgcaatcacacagcatctccagccaatcctaagggaacgccgaaaatcaaaatgatcgtgacaacgataatcacttgtcatcacatacatactagtagtgtagttatgtatcaaaaagacctgactgaaaacaagaggatatataacttgtactagaaaggcaagacaagaacattcttaatgctaactcctggcagagaattggggaacagggcaatatcagcatcttagaagagtgaagttcccttgcccttcttgtctccaccgatttcaaagtgcttgcacctctgaagtcagattgcaacaagacgggtcagatgcttctaaaaaaccgaatgctataacatgatgaggaggaaaaaaaaaaagaagctgaaagcattgataaagaccttgatcgggtgctgagagtagtgcttgcagctctggcactgcagcttcagaacgatcttctttgttgtcttggcctgaatgacaacaaatattagaggtaagtaaattaacacacagaagcaacactaccaaacaagctagtagctatcctttaaattcgcaaggcatagagaaatcaaggtcaaaccttcttgtgaaaaacaggctttgtctgcccaccatatcctgactgcttgcggtcataacgacgcttcccctgagcagaaaggctatcctttcctttcttgtactgggtaaccttgtgtagggtgtgcttcctgcattccttgttcttacagtaagtcttcttagtttttggcacgttcacctaaaaaacagtgataacatattcaatactacaagaatacagatgacattaagcataaatagtgctcactttctaatgccttatttgcaatatcagattaactaatttgaaatgcaaatacagagaactacaaaaccaaaaagctacaggcatgtcagtacacacaacacactggaaagaacagaagcaagtggtcatatgtaagacaaataggacaattgtgaaatcaagatggcacttaaattataccagtgaattcagggtgatttaagaacgccaaacaggaaatgtctaagcaagaactcttaacatacatagaaaatatagaagatgtcacgctaatttctgtaaccagtactgttcaggtccagttcattcacaaaaataagaaaccatacgtcatcagaggctggtcttttagaaaaggaaaaaggtaaaatagctcataacagggtaatatcttctggtatcaacaagctttccagaatagatggactaattattttagaattttcctaaaaaggattattttttggataatagcagaacagtgttgttagacaatagaatgatgctgattgctgaaaactaatatgtcaggcatcgcattagtgtaaggatttagtacacatgcagatatgacatgtccaacaccaaaataatgaaacctatataaattttagattaatgccaacgtacaataggataaaagaacccttaaattggttcacttaccctaacttaaagtgaaatacacaatactaaagacaccaccctattctaaccctattctaactagtactccctccatcccaaaatatttgacgccgttgatttttttaaaaatgtttgaccgttcgtcttattcaaaaaatttaagtaattattaattcttttcctatcatttgatttattgttaaatatacttttatgtatacatatagttttacatatttcacaaaagtttttaaataagacgaacgatcaaacatgtttaaaaaagtcgacggcgtcaaacatttagggaaggagggagtataagataagatgctacaaagtagcacggtaacccactgataactagtcacactaacatacaattcggcataattcaatttccaaatatacttccagccaacagagaagcagaaaccactttctctgttaaggtttcagctcagaagctcaagaggcgcaaacgataacagccatcatgccgatagcaaacatcctctattgcaagggcggatcagcaatatctcaaatactgaaaatcctaaataacagagaccacggctcatttcctctctggaagaatcagaaacaccgcccaatgggctacaatttgagatgcaaaagccctagacaacaaactctatgataatgcagccaccaaagcaaatccctgcttaaaacaggccgaaaacatgacatccacagactagccaaccaaaaacagcctaatttggcatattttcgatactgagccgctggaacccacacccaagatcgtgcacgatctaggcaactacagaaatggcaagaaacaagcaaaatctaaacagggcaaagagtaggaggagagaaggacgagacacggggattctgaccatggcgccgagctttgggttcctctccctccttcggtgggtgcgatggcggcggcgcgagctcggtgccgaaaaccctagcagcctggtggcggcggctacaatatagaggaagtcaaacgggccggcctgtttgtaacctatgggccgaacggtcggcccaaatgattggctcgaaagagagaagaaaaaagaaggaataagttcatcttaggtcccttaattttacgccaaatccgattttcatccttaaccccaaaaccagatataaccggtccctaaattatcaaaaacggtgcaaatgagatctctcggcggttttgaaggtggttttggctgacgtggcgtctacgtctacgtggctggtttaactaggcctccgttccacatggcattgacgtggcacttacgtagcaattatatctaaaataataataaaaaccatgggcccacctgtcagctaaaaataataattttaaaacggcgtggcccacgtgggccccacatgtcattccctctcccctctcagctctccctcttcctcatcaagccatctcctcgcgccgcggcgccgcctcacagccggcaggagcatgccgacgaagcggagaggcggcggcggcggcaggccgcggggtcggtgcctactcccgcgccgccacatcatgttagatgctgcacagcggtgaggaggagaggcagagttcgagctcagtacagcgaggattagtgtacagatcgagctaaacagccaacaggattagtggcaggcaccaacaagcagttgctgctgctgctgctgctcgagacatgcatgagctcgtgttcactacagtgaggccggccatctgcaagactgcaaccatgtcagatttggcacggagacgaaaaacacacatgttagtgacccaagttgttgtcgtcgtccatgctcgccaaggccgccgccattgccgccggtgtcaatgactgcccgactgaccgtctgtcttcaactcgttcttctcgttggcagagagagaagctgggagagagggggacagaggaggaggtacagccgcatcgcctcgctgatggtcgcgtgcagccgtgcaggtagtgcatccgcttcagctcgtcgtatccgtcgcagtcgccgtcttctccggcgtcggcgcggcgagcgtccgcgtgccgcgacacctcctcgtgcacgcgccgctcgcagcgcgggttcgcggcgaggagccacaagagccacgtcagcgcgggtgctcgtgctcgtcctccccgcgacggaggcgctcctccgacgccacgtcggcgggagaggagggagcggcgcgcggagatgtcggcggtagaggagggagcggcccctcctcacctgcttcctctccaacctcctcatcatccccggccgccgcctcctcccttcctagttcctccgggctccggccccctcatcttgagcctcgtcctcctgctcttcccttcgccggacgccgtcgacctcgctttcctggtgccgatacacgcctccgcccgcgcgagccaacccgacgctgctactcctcgatgggacatggaagcatgccaaggagatgcaggccgccagcctcccgttcttgtcctccttcgtctcgtccccgtgtcattgctcgtctactgcgatgtcggcgccggcggggtcgaggtggtggagtatgacgacggtggtggaggcgggttgcggcggagggcgtgcgccgctccctcctctcccgccagagccgccgcgcgctgcgccctctctgttgcgcctgagagaggagatggggagagagaggaggaagaagaggaggggagtgagaatgacatgtggggcccacgtaggccccaccattttttattaattcatgtgtgaaactgacatgtgggtcccacgggtttattatttttcttagatcgaattgccgcataaacgccacgtcaaatgaagaacgaatcaaattagccacgtaggcgccacatcagccaaaaccaccatccaaaccgctaagggacctcatacgtgctggttttgacagttgagggactcgttgtatctagtttttcggttggagaatgaaaatcggattcgttgacaagttaagggacctagggtgaacttattccaaaaaagaaatcgatgggctcgttggggattctgttctgtcaatggagttttccttcgaggagcaagaagtcaacgggaatggcgatgattctgagcgccttcgtgtccgcgtgcgcctcgaagctcgcgggcctgatcgccgacaggagcgccgccggcctcggcgtggaggacgacgtccggagcatgcagtggcggatggagcgcgtgggtgccgttcttgaggacgcgggcgacggcgccgacgaagcggcgtccgccggcgcgtggatcgacgagctcagggacttcgtctacgacgccgacgacgtgctcgacctctgcaggtgccgcggtgaccgccttctggcggaacgccggccacgctcacggccaccgatggcgccggtgaatctggtctcgtcactccaaaaactgcaggctcggcttgagattggggcacagattactcgcctgaaccgcagattcgaggagatatgcaaggataagctgttcttgagcctctccgtcgatgactccaaggcggaggacggcggctctcgcggtggcggtggcggcggcagccgggttcgaacacgtacgagcacccctgtgctggaaaccaacgtggtgggaaaagaaatcaagagcgcgacggaggcgctggtggagaagataatgcgcgacgacggccgtggagaggtcgtcgccgtcgttgggatgctccgagatttacagcatttgtcaaggagggaaagcatctgcggaaatttacaggcagtcggttgttcttcgtcccttatcaagctccgccgactgtcgctgatgaacttagaagaggcaatggtgccatgcaatgcaatctcccgtgatcgaaaatgtttccggactctttctaatggccatcccaaaggttgatggtaggctcgtggtaaagttttgcggtcttcggacattgttcctcagtgactgtaacatcggcaaacttcctgattcaattggggatatgatgcacttgagatatctaggctttgacaacgttgacatgccagcactaccggagagcatcggccaccttactaatctgcagtttctgaatgttaagaggtgcgcattgcgcattgccaagagcactcactcggattcaaagtttacggcgccttggaattgaagaaacaccgataagtttggtgccccgtggcatcggagggctgcattcccttgctggtttgcaagggttcatagtgggtagtgcaattagtagcagcacaatgcagcaagggtggttcttgacagagctagaaagtctctcccggctaagggcccctttgaatcaaaggatttatgtaggaatttcataggattcaaatcctatagggaattttcctatttggccctttgattcaaaggattgaagctttccaaatcctatgaaattcctatagaatggcacattgcatgtggattttggagcaaatttagtaagagctccaacctcttggaaaatttcctttgagtctatctctctcatccgattcctgtgtttttcctgcactccaatcaaacgacaattcctatgtttttcctgtgttttgcaatcctctgttttacacttcaattcctgtcagaatcctgtgttttttctattcctccgttttttctaccctactattcaaaggggccctaaaatggcttcgtattgatagttgggaaaggcagcaattgacaatgtagatatcgttgctaccgaacaacatctgaagagattagagctgtcatgttctctaaaatcaaatggtgaccataacccatgggatgaaatagaggttaaaaagactgaagcaatctttgagaagttacttcctgcaagttgtttagaggaccttctcatcagaggattcttttgccgaagatttccaacatggatggagtcatcttctctctgcaatgtgacatggttgaaacttattgattgcaggttctgcctcaaatttccaccactgggtcagctgccacatctgaccttccttaagattgtgcgtgcaaattctgtaatcgcagtgggctcttagtttcatggccatggagcgactgcctttcccaaacttgcgccgtgtttagttccaaaatatttcttcaaacttccaacttttctatcacatcaaaactttcctatacacataaacttctaacttttccgtcacatcgttccaatttcaaccaaacttccaattttatcgtgaactaaacacagccttgagttcttgtggattgggaagatgcctaactgggaagagtggtcatttcacatagcacaagcaacacacagttcttctcttcagacattcccttgtctgcatcaacttgaactgaaggactgttcaaaactcagagctctacctgaacagctgaagcatgcccccaagatgcagaggctgcgcatacagggagctcatgcactgaagaagatcaagaaccttcatgaactttcaggctcgctacgtatcaacggaagccactctctcgcgagcatttcagacctgtatcagatcaaagagctctatgtagctgactgccctgcactgcagtttgtgaacaatctaaatgcgttgaagtggctgtacctcgaagatgagacgatggactgtatcccgatgtggctctcgaggctggcagagagtggtgagcaagccggtgaggacggcctcgagttggagctgcattgcagcactgaaatgctcgataggtggctaattgagcgtcaggattggacaatcctggagaggttcacaagtgttgctgcatattgcaaagaagattacatgtgctattcgagacacccagttagctaccacacaagcaagagtggctcaaactcaaaaatagaaatgcatctaagttagctactgccttgtgtatgtctgtttggacaagaaatgcaagattagtcaattcatcaaacttgatgcgcactgcttcgtgcataaaatttccctgttaaaataacagaatgttcgacagcaacagaagaacaaagcagcgaaatgaatcaccagctggggaatccaccgccaccggctcgccgcgccgtcgaattggtggtcatcacgacgaggagtaagcatatgtgtttatgattcgatacgttttgcatatttcggggaaaaagattccatgtctctgatctctgaacctgactatggaatttcagtgtttcggttagctctgtctgcctcggagtggcaagcattcattctgctgattatctcgatgacagagatattggatctttagatcttgtctgctgattatctcgatgatagagatattggatcttcagatcttgcccctgagtggcttgcattttgttgaacaacccaaaacagagttggggctgcggtctagtacaatgcttggaggtttttaatgaggcttcaggactggggggccatcatagttcatttctttaattttgttgcttcttcaacggaagaaatgtgaagtatgtaagtatgtactattccaaacacacaattaaatacagaagtagacaattaaacacacaattcctctgtgtactagtgacagtttttctttccataagtaagaccctgtttagatggtaaaacttttaagtccctatcacatcgaatgtttggacactaattataaaactcatccataattttagactaatccgcaagacgaatttattgagcctaattaatccatgattagcctatgtgatgctataataaacattatctaattatggattaattaggcttaaaaaatttgtctcgcgaattagctttcatttatataattagttttgtaagtagtctatatttaatactctaagggcctctttgaatcaaaggatttatataggaatttcatatgattcaaatcctataggaaattttcctatttggccctttgattcaaaggattgaagctttccaaatcctatgaaattcctatggaatggcacattgcatgaggattttggaggaaatttagcaagagctccaacctcttggaaaattttctttgagtctatctctctcatccgatttctgcgtttttcctgcgctccaatcaaacgatcattcatatgtttttcctgtgttttgcaatcctctgttttacacttcaattcctgtcagaatcctatgtttttcctattcctccattttttctaccctgcgattcaaaggggccctaaattaatgtctaaatacagggactaaagttaagtccatggatccaaacaccacctaaaactatcacaaaccgcttagtcctagcagtctaacagaagtggtcagcaaattaatgtactactacttgtagtactagtagttaccttcagaacaaaatcatgcgtgcaacctgaacactcgacaaatacacatgtcattagcttgccacaagctgcctacaagctacagctacaagaaaacagatcactcaaaacatcagatcaaaccgaagagaccatcataagtaagatcttgtcggtctactagtacatttcatcgcctagcatttactacatctacaagatcatctacatctacaatgcatcacggagaaaatggccaccgtcgacaccggagatcgcctccggcgaacacggcggcggacgccggtcagtcgagttcactgcagcatccggctggttatgcgggagatgtccgccggtcggacgggcttgagcaggaagtcctccgcgccttcttccaagcatctgaaaccaatagagaaaaaaaacacagcatctttcttttgtcaagggtaacacttggcaagagaattaaaaaaagcatgtcacgcttgatcggtgaagagacgggctcactcacctgctgatccttgtgggcacgttctctgacgacattatcaccaccgggatctgcttcagctcagacgattcctgcttgcagatttcgttttgttattcagaagctttgacatggccgcgcaatgtggtgtgcacatcaatattattagagcctttttagaggccaattaattgtgcacagtgatgtagttagaattttctcaagtctaagattcaactagtataatttacataatttaattttatctttcatagtttgaagttttgaaatgtaaattttgatggatattgaaggttaggagtaggtgctgcttcccctgtttcgggcactgattatgcggttgcagtggttctgttttgtgttaattaattaccttgatcttcttgagcaggtcgtacccggtcatctccggcatccagtagtccgtgatgatcatgctcacattaggttcctgattaaacacatcaacatttttttagaaactagggcttaataatctgataaaagaataaaaatggagaagaatgacagaagataccgagcccaatatctccagcgcccttttcccactgtctacggcagtgactgcatcaacaaaaattaaaacgcgccatgagaaactgatgagaatagtgtacggttgttgccacgtataacaaaagaaaaatgtaaaaataaatcttaatactacctgtaactctgtaaatttgttggcacgtgtgttgggtgtatgtgcttaccgcggtacttggatcgccggagcagcgccgtgatgacggcgcggtcgacggagctgtcatcgacggccatcacgtacggcggcgccgcctcctcctcatcgtcctcgtcgtcatcatcatcatcatcttcgtcatcgtcttcttcgtcgtcgtcgtcgtcctctgccgatgcgttgtcgtgcagcggcaccacttgcgccatcctcgtccagcccttgacgacgacactcttcatctcatcatccttcccctcctcccagtcggcgagcttgccaccaccgcggcagcaacctccgccgccgtcgacaccgcatccgcaccctcccgtcaccgccgccggcaccctcatctccatcgatcaacaacgttaacaacaagtattcaacaagggatgaatcgatcacacgtagctgtgatatatggaccaagtgattgatttcctagcaacggaaactgtgtgcatatatatatatagcggaaggagaagatgaatcaatactacacgatcgaggcgtatcgctgtatcaggtgtaaggcagggccggccgattcgtcgaatcgggacagggatcgcgctcgatctcgcgctcacctgcccactccctcccggccatatacgtgatgtacgttggtacagaaccgtacgtcgtcggtgagcagcagcagagaggagcatcagatgatcgacgatatacgagtataggagtatctctcagcggatctcacgtactacgcatagatcgaattatttatccaccacggacggccgcatcgtactataactctcgtatcacgagggcgcagagcgagcgcggcgggatagcgtggcaggcggcggcagagaagggtcgtacacgcgcgggcggatgctggtagagatttcgggtgatccgctagctgctgcacgccgtgcgcgatcgaggacagcgaggtgcagcgtgccgcgcgctggctaggcagctggctgtgtgccgggcgctgggcatgatggcatgtggagtgaatgttcacggcagcatcgtggatacgcttgccggccgctgaaaccccctttgcctccgaatctcgcctgtcgcgcgggccagcggcagcggaatcttacgctcggctcggcgtctttttggggggatatccatctcgcgatatggacgttcattgaaccgccaccggcctcgttgctgtctgcgcggccggcatgtacggcagtatgtactccaatatcgatctctcggcgcagcgccggcgtcggcagcggggacagcgccctctgcttacagtacgtatgcccgtactgtaccagggggtcggggtcccgtccccaggcaacgtctcctgcccgtcgtactccctccgtcccaaaaaaaaaaaaaaaaagacaaaccctggtttccgtgcccaacgtttaaccgtctgttttatttgaaaaaaaatttaaaaaattaaaaagacaagtcacgcataaaatattaatcatgttttattatctaacaacaatgaaaatacgaattataaaaaaaattcatataagacggatagtcaaagttggacacgcaaacccaaggtttgccttttttttgggacggagagagtatgctgtgggggtggtgggtccacaggattatatcgctggggagaaatttgcatatctgccattttaaaagccagcttcgttagaatgtcatggttaaaatgagatttgctctaatgccactcttaaatcgtgagcattctacaatgtcactctagttgtttcttatatttctaaatcatcatttttcatccgattcaatttatctcggacacttttacccttgaaccataagtttttcatctcgctcttattcatctcacgcgaggagagacgaggagggggggggggggggcgaccacgaccacgctggcaccacacaccacctgctccgcccgtactctctccctacctcagcccccttcctcaaccgtgtcacctctccccaccgccacctctccctgtcaggtgttcctagcctgccacccccatgcacgtaggccgctatcccctgaacccaccgctcccccctggcttccctgccaagcctagtcgccatgtccttcggcggcaaagtgctgatggccacaccagtagcgcgcgggggcaggaggcagggtcgaggacgaggatgcaaaagagtgtcctggacgacgcggcgtagcgccaacggtggcaggcgagtgcggcgtggaggaggtcggcggggaccaggtggcgtaggatgctgcggatgctgtcatcggtgaggatggcgaccatcgtcgtcagcgcttctgacaccatcgatgagcgagaagatgtggttcggttcaaccacaactagggggcaaaaatgtccaagaaaaaatatttggatgaaaattgtcttacaaatgtaagaaacgcgcggaagtggcattgtagcgaatacccccagcttaagagtggcattgtagcgaatcccattttaacgatggcattctagcgaaactggattttaaaaatagcacatatgcaaatttctccttctcaacctacttgttgccccttttcttcgtcatttgaattctaaaattcgatcataatcatcatttactttttttctatacattttagttgtcctactctttcatggctcgtccgctcaccctctcccccccccaacacccctcttttgtcatttgccaccattgtgttataaacagacggttctttcagatttaattttttaattccaaattttttttaattatatttcttctcgaactctttttttttcaaatttgacaattttttattcataatattctcaaaattctatttcaattttattttttctaatttctgaatttattttatttttaatttcgaattttacttatttctaaattatattcatacttcaactcttattttcatttttctaatttcataatttattttatttttattccaaacttcaattaatctcttgttgtaatcaagatggtttctttttcactaaaactttctttactctgaattttagttactctaaattatattcctacttgaaatcttttttagttttataatttcattatttattttatttttactttgaatttcagttatttataaattttagtcctcttcttttttttctttttttctgattattatgtaaatttttaacccttacagtaaattggttatctccttttaaagttgttttggtaatataatagattttctatatctctaggcctctcttgagagatatataagttttactatggagaaagaaaaaaaataatatcagataatagaataagtttccaactacattaaaagataaccagctgaattaaaaaaataagacaaatcatatactaagtaattttataggtattacaacatccaaagcagaataaaaaatccttgttggctaccaaatccaacagtacagcatcactgcacaccgtatcccacttcttatgtgatagtatcaaatactgagctagcaggtatatgtgaagatatagggccagtttggtttggtgccctaccaaaatcttggtagtaccaaagtttaggcaacttttggcactaccaaatttgggtggataaattttgtactacctaagaactggtgttggtaaaatttagcaccaatccaaacatatagaagcactattcaaaattaccaatgaattggtagggcataatttggcaccaaaccaaacaagcccataacctacactatcgttttgacaacgcaaaattaaccaatacagttcactcaccccaaatatttttgggttaattagatccttgccattaaaaatttgccggttttgaaatatatcattactatttacgtatttgtaacgatatcactgctacttatttgtaatctcaatggtgccattgaaatacgtattttgcacgtattggacgaaaatgccctcattttctacctttctcttccccatcttctacccctctctctctcttctctactgcatagcttgctccatagccgttcccgccgctgcttgctccgtcaccgttcccgccgccgcgcgcacagcttgctgctccgccaccgtagttgcttgctccgccgtcgtccccaccaccgcgcgcgccgcttgctccgccgtcgccgcagttgctcgcgccgccgtccccgccgccacgcaccgcagcttgctccgccgccgccgcagatgctcgctccgccgccgccctcgctgttgctcgctcccccgccgtccccgccgctcctcctgctgttgctcacgctgcagcttgctccgccgatgccgcagttgctcgcgccgccgtccccaccgccgtgcaccgcagcttgctccggcgccgccacagttgctcgctctgccgccgtccccgtcgctcctgctgctgctgctcatgctgcagcttgctctcccgccgccgccctcgctgccgccgcccgctgctactcgcgtcgccgtccccgcttctcctgcccgtactcgctgtgctgctccaccatcgccgtcgagcgggaagaagggagaagaaggggaggaagaagaacggagaagaagggcaatttggtctaaaatttattataaatgcatctaagaggtaagtagtggtatatctcgaacacgtgcaaaattataatggcatggttacaaatacctgaatactagtggcatattttaaaaccggtaaatttttaatggcacgtatataataaaccctatatttttttacatggaaatcatagtaagccagttagatttgtgtgctggtacctaagaggcacctactagatctaaatattgacacgcatctgcaaccaattagatagtatagttcatataaatatatattacatcattaattaatatttgacccacctatgatacacatggtgttttaaacatgtactacaactatctacaaatttataccccttttcttctctctcttctacctaatcacaaatctaatgtgataatttctagagcccatttacctcacttaggccatgtttagttccaaattttttctttaaactttcaacttttccatcacatcaaaattttcctacacacacaaactttcaactttttcatcacatcgttttaatttcaaccaaactttcaattttaatgtgaactaaacacaccccttattgtactatctctaactacagtacatctccgctgtgcgctcagctcacagtgaaggtagtccaaccagggttcacatcatctgcctttgaggggccaaagacaaagtttgccattgctttcatccacgtcctccattttcgatcaacagttacatggtttaggcctcttccatgactaactaccgctatttaattgatagaatttactctgtagaaaaagacaataaaacacctctaacggtaagcgggaaaaaaaacagaaaatagctacacattttttcgctttttggaaccgtttggtatagaactaatattaggagcgtcgcgctcctaatattccaagcgccaaacatgcattagcttaggctcaccccacccccacatcccttcattccactcctaccgttgtcggagtaaacgatttactcctatcgtgcgctcaccacccacctttatttgagtaaacgacttacttcgataatagaaacaactccccaactttcgatcccaccccacgtcccgcatcgtgcttccaccattatcggagtaaatgatttacttcgataaaaacaacttctctgcttccgatatatattctattttcccatacccaaccaaccactctcacccccacttcaattttttttcctttttttgggatttgaatcgatccaccatcccagcccacggatcggtgatacaccatagaggaggacgacgacaccgtagcggttgatggcggtggcaggcggcggttgaggcgaaggcactgcttcgggcctcgctgctggacgctgggcagcaccttaaccagcaaggagatgttcacctgggccaatagaaacaaccagtggctgctccacgtcagcgacattgatagaacaagcaattaaggaaatgacactctgatttgcatcttcatactctccttcaacttcacgcatgaaggcccgattttttttttcaaatcaaattaacgtgcaatctccaatattacctgatctcaattgatgggctgcacaggtcctacatttacagatcgtgctccatgtggctagctgcagaggatagggtgggagtccgccggtgatggaggttgtttgctatttttcttttgctcgtcatctctattgacataaacgagaatgtttttggtattttttttcatgcttgctagatgatggatagctgctactactcaatgtcgagctcatctctataccacacggctacatccttctatgattccatcgtcgactactgctcaccacacggttgccctctccactaccagttacaagatatagaccgtgctctttatccttatagtaagatccaacaaagtcaccagatggatttttggctgaatcattttttttcttttttagtttgattcacctgtgagtaattttatcgcttgtgtgtgattgagtctgtaattttttcattcatacgaatattttttgatacagatcaacaatactcttagtattagcttttactcttatactgtacattgaacacatcagtaaacatattactacatggtaactacgagatcatggctatatcgagaggaaggtggtaattgttttactcgcagaccacaaaatctcagtttttactcttatcctgtgtattaaatacatcagtaaacatattactacacgatggctacgagatcatggtctatgttgagaggaaggtagtaattgttttagtcacagaccacgaaatctaaacaatatttataatattggtaaaagaattactagcgttgtaagccggtagtaattcttttacgaccatctaggtatggcatcatacaatgtgaaggcattcatgcgagtaaatttgttacttttgaatgagtagatatgggaggctgggagtaaatgaaaaactccacgaagtaaattcgttactttttatacgtgcggagatactagaaaagcggaaaacttggaaagaaatactagacagtaaatattttactaaaacgcgaaaacagaaaaactagatagaaggaatgaaaaacagaaaaatttaatattttaccgggcccattgatgaagcattgatgagatagaaaagagaaaaaagaaacacgaaggtagagtggtaaaaaaggaaaaaacgaaccgagaaaaggtgggatgcggaggaaaggtggggtggtaaaaaacggaaaaccaaaagaagaaagcgttgtgcggcgctcgaattaatattatgcgctgtagagcgcggaatagcgctaccgccatttgatatgcattcattcaggaaaacaatttcatcatacaatactattatatttttgttgttttatcgaaagaaaagtaatagcgatagctaatctttagaaaaggctgtagggaaaaagttcttacaaatcttttataaacgctgatttgacacggtgggagtaaatacagattttctacaggtttcctctagtgaaatcaaatggtagcaggactttttttttaggagtacattgtgaggatttttgaagtacgtgcagcaaaactaatcaatcaattgtattataaatatgtccagcataactgatatattaattaattggttgataataatctttgaagtgggaaaaaacatgcaatcattgagggcctctttagttggaaaaaaaattggcccctgcttatcacatcggatatacggacacatatttgaattattaaaagtagtctaataacaaaacaaattacagattccgccagaaaaccgtgagatgaatttattaagcctaattattcattattagcaaatgtttactgtagcaccacattgtcaaatcatagcgcattaggcttaaaaaatccgtctcgcaattttctggcgaactgtgtaattggttttttctacatttaataccccatgcatgtgtccaaatattcgatgtgacagcatgaaaaactttgtttgggaactacggtctcgcaattttctggcgaactgtgtaattggttttttctacatttaataccccatgcatgtgtccaaatattcgatgtgacaggatgaaaaactttgtttgggaactacggccttgtttagttggggaaaatttttgggtttgattatcacatcggatatacggacacacatttgaagtattaaacgtagcctaataacaaaaaaaattatagattccgccgggaaactgcgaaaagaatttattaagtctaattaatccgtcattagcaaatgtttactgtagcaccacattatcaaatcattgcacaattaggcttaaaagattcgtctcgcaatttacacgtaatatgtgtaattgtttttttcatatattaatattctatatatttattcaaatattcgatgtgacagtgtgaaaatctttattttgaaaactaaacagagcctaaacaggccctgaataagagatggatgggctagagatggcagcaacagtaaactttgtctttggtctcaaaaggcagcggatgtggacctgaacccgcccagccaggacataggtagtaatgaatgtaggcagctcaggaagtaatatctcgcggactgtggcatcattacgcagcttcaggcctccttcagctgatctattgaagtagctgagtattgttacgagcttacggtgcacggagcacctgcgttttgatccatccgcctccgtcaccggccccttcctcgcctctggctgactgtgactgactgactgcctttcaattcctccgtatatggagacgtcgcagtgggagctggcttcccaaatcgctaggaggtcagctaatccagcatctttagggcaaaacagaggaatcgcaggttagaaaaaatgaggagtaggaaaaatacaaaattctgacaggatttgaagggtaaaacagaggattgcaaaatatagaaaaaacacagaaatggtcatttgattggagcgcagaaaaaacgtaagaatcggatgagagagatagactcaaaggaaatttttcaagacgttagagcacttgctaaatttcctccaaaatccacatgcaatgtgctattccataggaatttcataggatttggaaagcttcaatcctttaaatcaaagggctaaataggaaaattttctataggatttgaatcctatgaaattcctacgtaaatcatttgattcagagggacccttaagatatctaatatacctatacactgtacaagcacgcggtccgaggggatctgtcctagcaaaatactgtagcgagatctactcccgtactacggcgagatgaatgccttcttgtcgagaagcaaaatttgcacggatcaagtatagcttgagcaatcccgggagctcagatcggttctcctaacggctaacggcaaatatgtgtgagctctgtgagcgatgcgtgctggatttttcatcatttgattctattgaaattttctttttatatatagatcctaaaaaattttattccacaaaaagacatgtccccctcaccactcccccccccctccccccttccccctcaaccgaggaaagttaaagtcgctaatacgaagaatgactataccaatatcgttggtcctaaggacctatttgtaatataaaagaatctaattgtaataaaaaatatttacaaatacatcctcagtgacacaacactatcgtcgatgatgtatttgtaattttttttacaaacagatccttttttattacatataggtcatttttcgaaaagaaaatacaaatatatcatcggtgccaatgacattggtgtagcttccatcgggggctagagggacgacgccaatgtcattggcgccgttatattggaccacgacgccaatgacatttgcgttatagaaatgatttcttctagaataagttttttagggtctacttatagaataagttttttgaaaaatcaaaaggtgaaaaatcaagtcaatgcatgtgtatgacgtcttttaaagccaagaactactgaactggttcattgacttcagaatagtctcttcagaataacatcagaggctagaacaatatactattaaaccaatgtagatgtggataattaatcttttttttgttgtttatgcgctaagagcaggtacgatagtaggctataagccagctgtaaacatattttaaagagataaaggaaaagagagaagagcaccgggctacagatttatagctagctgcagcacggattccaagacgacaagacgtaatgtgtgtatggcaggtgagactaggtattgatagtatagtaagcaactatggtatgaattggctattagattggctatagatgaattggagctagcaatgggctatactattaaacttgctcaaaaggactcactaccgcctatttgtgtttttgataaggaatggctatgtcacatttgataaaaaaaccctctcattttagtcattttttaaacgactcagaacgctttgagatcaatgcagcggccattaccttatcatctcccagccctctcccttcctctctcgcatagatccatgcgcaacaaccataccccccatgcaattgggctttgtccttggcccccagcctcactagcagcgacgaggttccctcgcctta

SEQ ID NO: 19677 - DNA, 10202 bp, Oryza sativa
ggtcggcgcgcacgccggtgggtccgccgcggagggggcgcagctcgaccgggctcgccggcctcctcttccctctctaccgcctggcctcgccgccgccgccgcctcctccgccgcaccccgccgccgctcgcctcttccaccgccgccgcctcgcctcctccgcgagcagtgcgagctcccgccgctgctcgcctcctccgccgccctgccccgccgctcgcctcccggcgctcgctgcctccaccgccgcctcgcctcgccgccgccgctgcctccgtcgtcgtcgtcctcgctgtccccgcaccgtccccacaagccgcgagagagaaaaagcaagagagagagaatagagagagaggaagaagagaatagtatggcatgcgggtcccacaaatttttaattaaaaaaagctgaccggattgccacgtgtgcgccacgttggacaaaaccgctctgaattggttcgaggggggtaattcgtccggtttgcatagttgggggatgaagaatgtccgattttgtggttcaggggggtaattcggacgaccgcgatagttcggggaggtaattcgtactttttcctaacttataaacgggaacggtataaaaaggcaaattttccattatggccgtgtttagtttctcctccaaaatttttttacgtatacgtacgtatatttgaaatattaaacgtagactaataacaaaacaaattacatattccgcttgtaaattgcgagaaaaatttattaagtctaattaattcatcattagtaaatattgactatagcaccatattgtcaaatcatgggtaattaggctcaaaatattcgtcttgtaatttacacgtaaaaactgtgcaattggtttttttcgtccatatttaatgctctatgtatatgcctaaacatttgatgtgacggaatttttaaagtttaaaggaacacagcctatatttgtatcactcctaccactaaaggaagagatagtctgcatagctgaagtctgaagattatggtatatggatgatgaaacgggtcgacggccagtgagaggtctacagcgaaaccataccacctgttatctccatctattttatattctgaattaatattcttaggcccaatttttttgaccagtgaactgagatgctccttgatttttttttacacgtttcaaaatgcgctaaatgttgtgttttcttaaaagaataactttttatatattgaagtttatttgaaaatgaataaatcattttttaagtttataatagttaatccttaattagtcatgtgcaaataacctatcacgttttatgtgccacaatcatcttatcgaccaggctaagtcgaatggagtcttaactttgaccaaatttataaaaaatactttcctcttccccaatcctccctcttcatgggaagctgtcgcctccacctggggacttcaccaactagcacacactagagccgacgccgtggaggaagtcgatggtgcagaggcgttggggagttcatcagccactgccaccgctcgtcatccctgagagcaagttcaatagtatagccaactactagctccaattcatctatagccaatctaatagctcattcatacaatagttacatactacactattaatacctggtcccacctgtcatagacacactgcgtcttgaagtccgtgctacagctggctacaaatctgtagcccgctgctcttctctctcctgatttatctccttaaaatatgtttacagctggcttatagcctgctattgtacctgctctgagagatggggatgtgaggagagaccaggaacacgatgccgctaacatgtgggtctcacgctgactcatcaagttgaacgcagtcaactcatcacatatatgtgagtcccacaagttttttattttcttttcactaactagggtgccacgtcagtgtatgctaccatgaaaccaaatttaagatggttttgtaagttggagggtgtcctgaagaggataggaaaaagtacgaattaccctcccccaactcaaatactagacattttacaccctaaactatttataccggactaatgacctctcctgacactgttctgagcggttttgacttgagctagcatacgtggcgctaacatggcagactagtcaggaaaaaaagtttaaaaacccctggacccacctgtcatccctctcttcaacctaacctctcctagccaccccccccccccccgcgttctctctccatcgcgtgcgttcactcggggggcagtggcggaggtgggtggagcttacttgcgcggtagggggcgaaggcggaggcgagccggttccccaattctggtcgtcggcgccctcttctcccctttggccgcccgcagaggaggcagccggagctcgctcgggagaggcgtgtcaaggtgggcggagagcgattgctccatggctccggcacgctcccctactgcactgcgctcatcgccgtcttcgtcaagggcctcatcttcctcttcatctctctcttaagcgcacatggcgcgcatagcggcgcggggacaggcggtggatggatggtcggctcggatgggcggtgtgcggggacaaggcatgggcaggcagacggtcggagcggacggctagtgtgcgggggcacggggaagacaaggtggcccccgcctgcctctctgtcatggccctgcctcgcccctgccattcgccagccactcgccacctagctcctgcctccacctccgcgtctcgcgtcaccgcccacctcccaccgttgcgccgtcctgtgagagagagtgtgtgtgtgcgcgcgcgcgcgtgtgtgagatcagcaggaggtgctccatcccgcgtggcttcactgcgctcctcgccggcaaagtcgcggcacgcgcgccgctgtctccgggtatggcgttcatgtacgtcgctgcgatgaaggaaggtctaatgcggcttctgctgcaaccattgttcgccgcagtgctccccacttcgagcttgtgccgagccagctcacgcccaattcatgacgcctcctcgccggcttcgccgcactctgccatcgcgtcggcgtcgcgccgctgccgttgaccgtgttccggcacttcttcacgacggtcgggtgctcgcctggggcttggtactccttccgcgccgacccatgagagagagagagtgtgtgtatgtgtgtgtgaagagagagagaaagaggggaaggggagatatgacaggtgggtcccacaactttttaaaaagaaaatactgactggattgccacgcgtatgtcacgtaggacaaaaccgctttggattgggtcgagggggtaatttgttcgttattaaaagttcagggtgagcaatgcctggtttttgagtttagagggtaatttggtcgaccacgatagttaaggggtgaaattcgtactttctccgatgaggatacaatttcaaactcgacagaatgataagagacctaaaatgaacttattgctaaaacaaaactaaacagagttagatttctatcgggcttactaatggttactaggcctatgggctgatttaccggcctcacttcccagcccgactggcaacaattaagcccgttaaccatccgggccgtaatatgtgaattcaccactccggttcggtgatccgggcccaatttaccatttctaagttgcaacactgaaaatattttaggttgcagcgaggagggttggtgaagatcgaagaaataatcccccggtagggagcatatcgctcctccgctgctgtctcgcgcgagcgtccgccgcctcgtctcggtgaagaatcgccgcctcccaccctctgcgagcgccgccgccctccccaactccggcgacgactattcccaaggttggtgtactcaccccccatcccgtaccctcctcttggtcctaggtttattaaagattgttagtaggtctctaaatctgcatattcgccgtcgatttagggctgcgattagcttgtcttctttaaattttactgtccatttctaggctgctaagctacagaattaggggcgatttgtgagctcgtcccttggtagttgatacggtttaatatggtgtaggattctggaatttagttgttcctttgagccggttacatgaattattttggtttcatcgccgtcattggatgaaatacttctcatcttattgacgtttatcgttgatctttcattgtaaagttgtgagaaaatggaatggcccgcctatgataattctttggtgtcgattttcctatgtgattgttttgcagtagatagtttacggtggtgtttggactcatcatttgtcattgtttgccaatgcaaacctgcggaaatagtctgcatcatgtgagttatatataatgttacagatcacaaattgtagcaccagtatttatttgatttataatatagaatacaactaggtgcttccattatctcaaaaaatatagaatactactagttaatgtgccaaggccctgtttagttcacaccaaacttcccccaaactcccaactttccatcacatcacatcacatccaaaactttcctactcacataaactcctaactttttttccaaactaccaactttccccaaacttctccccaatttcaggaactaaacacagctcaagttactcctatgctttacggtattaaaacagggcaccacacaagtaagattttaaaacaagtactacagtaactctgatatctttatgtaccccttgccattgtgaaaagtgatagccacgatgcaaagttgcaaacatatgaaaaaaaaggatgtctgtgatgcgaaatatactcataagctagtggccaaataaaaaaaggagaaatttcatttgatttccatccaatgttttatggccttcctcttctgctgccacatgggatcccctagtccatgagccaagcttatagctatgactgttcaatgaacctggttttcaatttgttgtcaatccatttatgcttcatcgccagcatgttctgctgctgcagtcaggagtgatgctgcctgtagtggcctctgctgtggttttgaacaggttggctagcttgtttttgaataggcctacatataaatggaactctgtgtgatatgaataagtggtggtatctcagacgctgtatttgcatattctggttgaggttcatctatgccctattactcttggtagatgggcttgtctgaaattaatcttgtttcacgtatgccgtttgagatatcatgattttcctttttctgcttgtagggtgcagtggaagtgtaaacagtttctgtggaaggacagaaaaggcattcatttgctaaatggcatcaaagcttcaagccttttggaaccatcctgctggccctaaaactagttagtttccttatctttattatttcctggctgctcctgcttatcttagatttctgtgtatcatttctgatcctggttatcatctctacttttatcatgtaaacatggaaataataaaggaatcaccataaacttgatacaagtctatctataatgtttattatttatttatttgacatcccttgtctgcattcttgggtatttgatactgaataaaccattactatggaaatgtaatcttgcttggtactttaaactgaatttttgtattaatgcaagcgccccatacctttgtatttcactataggaaattgtgatggatatctatcatttattgataccacctataacttatatgaccttaattattgcagttcatttctgggctccaacatttaaatggggtatcagtattgccaatgttgcggactttgctaagcctcctgaaaagatatcctatcctcagcaagtcggtatgtttaggttaccccattagcccatcatattcattcattccagatatcagggccatatcggtttgtttatgtattcttgtgcactgttagcattcttattctgttggatggcatgcagctgtggcttgcactggagtcatttggtctcgctacagtatggttatcacaccggtaagaccttttttacttgtctatatgcacaccatgttgaaactttccactatagtgatcatgggccgctttgtttgcaaactacattttggtttcaaattgaacgtatatactcccattggtcacaaatacatgtcattgcagacaaacatgtgtttcaccttttaaaacattaagcatcaatatgcttgataattatgcttttacatttttctaaaaagaatatactttagtgaaattgtggttttagctagtttattactaaattacaaaataaaagaaaagaaaatgaaccatccagtttacattttgaatattttgcccatgcccaaaatgatgtgtatttctggccaaagagagtattacacattgaaataatttgagttttacctatgtgagcacgagatgttgtcatcacatgttgtttcctgttttaattcttgctcttcgttggcaatgctataatgtcacagaaaaactggaatcttttcagcgttaatgttgcaatggctggtacaggcttgtatcagctttctcgtaaaataaggtttgtatgagagctatgctaatttccgccattcgtatttaatgtctcataagagcaacataacctttatattcacttgcaggaaagattacttttctgatgagaaggatgctgctgcatcactggaaggataatgacgacagattagattaaccgacctacagcctttgagccagtctcagttcactctggagtctggacgtactgcagatatctctggctttacccaagacaagaacctgttgtttctttctgtatttcttctacacccactgctggagcagttgaaaatattgtccccaaaatccaaataatgcttttttgcattttgtgaaaataatatgcatatactcaaaacatccgtttctgttatgctggtggtgcccattaaaatctgtatcggggatacttcgctaacagtagtcaaggatcacttctgttatcatcagaaagaagctatatatactacagtttcccctggattcagagtagcgttgtctttgctggtagaaaagcagttttagccctcgacttacgttacctgccatttcttactgttatatttttgggtacttgttggttttgttgcagtggcttgcgcaatcaagcatgaagtcgttgcatagttgacagcaactgttcgaaacatatataaagttgttgtggttaatcagaaatttgatctttcagagaaagaaatggagattgtttacaggtttgttaagcggcacctttttgaacagacattatccttttagagcaccaatgtgtttggttggtagtaagtggtttatttcgaaacagaaacagcaagttcctcgcagcatgagccttctccagttgagtgagtttggcattttgagagggaaagagggaggactgcaaagttgctgttgaatgttgatccatgggctgtgtttagatccaaagtttggatccaaacttcagtcattttccatcacatcaacctgtcatacacataggggtggacaggaagctcgtggctcgttagctcgctcggctcgtgacaggctcggctcggctcggctcggctcgtttgaattttctaacgagccgagctggcatttcagctcgttagagataacgagccaactcgagctggctcgcgagccgctcgcgagccttaacgagccagagcagatgaggcccaggcgcctagcccagcctaacagcccatcacccagcccatcaccttgtgaaaaccctagagtcaatccccttctggcttgtccccatcctcaatccccacccaagccaccgccggcctcatggctgccgctcgcccgtgcctatcctccccggcgccgacgccgccgcccccgcctctcctccccggcgccgacgccgccggccatggacgccgccgcccgcgccgctccttcccgccgccgccgccaccgcccgcgcctctcctccccggcgccgacgcggccggccgtggacgccgccgctcgcgccgctcctccccggcgttgacgcaaccaaccgtggacgccgccgcccgcgccggtcctccccggcgccgacaccgtcgtggacgccgctggccgcgccgctcctccccggcgcccctcctcggctcctccccttgttcactttctctcttgtccccaaagctcacgagcctaacgagctggctcgagctttcaaacgagccgagccgagctgggtttctagctcgttaggataacgagtcgagaagagctagctcgttatcctaacgagccagaccgagccgagccgagccgagccgagccgagccagctcgacatctacccctacatacacacacaacttttcagtcacatcattttcaatttcaaccaaaatctaaactttgcgctgaactaaacacagccggtctggttcttttgatttttgaattctcgctgtagtcaggtactccgtccatccaaaaaaaactcaacctaatatgggatgtgaagtctgaccaaatttattataattatgtcacatctcatactagtttgggttttatggaacggagtccatactcaggtccagctcccctttcaaactaggcaggcacgtcattgcagacctgcagttgcaggtttgctgtaaaattcctttcaccaattgggcaacagatccttgtcaatcgccatttgattagccatgggccctgtttgatccggagggctaataattagctcttcggaatcttgttatttaggagtattaaatttaaattattgacaaagcccatttcataacccctaggctaatttacgagataaatctaatgagcctagttaatccatgatttgctacagtgatgctacagtaatcatccgctaatcatagattaatatacctcgttagattcgtcttgcgaattagcccaggggtttcgcaagtagttttgcctaggggttaattattagtccttcggatccaaacgagcccatggttagctaaacgtgcccaggtcaaatcttttactccctccgttccaaaatataacaacttttagccttcagtatttgtaccaaaatataacaacttctccaccaatattatcttcccaaccaatcacaactctccaccatttactttttctacctacctcttctactcatctaatcacaactctccaccattcacttctacgtatttttttaataaccgtgtcaatctctaaaacttcttatattctggacggggggagtaacatgttttacttggaacccactccttttgtaatgacggcccttcaacaaagtgcaaatagtgaactaccaaacaaacctagagatggggcacctaaatacattgatctctcttatccgatatataaaaaaatgcaagtcgtttcaggtgcatatgctctccaatcggcacatttgaccattgtacgctactagtaaaaaaattcaaaaaaataacatttcgaaagtaatatttacatacaaatctaccaattattttcatacaacaaatacatatatctattatattaattaagagagagcgaaagaagccatcacttttttgatctagatacacagaattgccactttaatcaaagaaaacgataaagatatgaacctttcgactatgataggttgaggttatacaaaatgggacgacaaattaatttcaaacatgaaaccgtacctgcatttatccaaaccccaacaaattaaaattgatagggccctcgcctatccattgccagcccctgtcactaattagtggggttgttgcgacgtcatgatctgatgatccaatcatagggcctgaatcagacggcccagctcaatcattacacgctctctttcggattgggttgtccttaagcacaatgcttaactaaactaacctaaaatttgttctctctaaccatctggagaacatgccaagcactgacgcatgcacacacttcacacattgtggagttaggtatatcattctcaactaaactactactcttttagtatatcttttaataacaagtcaagagaaaagaaggctcatgaacatttttctggcttgtcaattattttgggaagctgcactttcttcatgcccatgtgtatttccagg

SEQ ID NO: 19678 - DNA, 614 bp, Oryza sativa
atttaatcatgccacagttctagagtgtctcatagcaaatgcccacaaaactagtcacacgaccaactttgccttgtgagatcttacctcttcaagaactatggcagacatcaaagcaatcaatctgttacggtttaactcacgaccacttgaatcaacagcagcagacctgcaaacggcacaattttagggttgtgcattacgaacctgtataatttcaatggctatatattttatacctgtcaacatcagtatcaaatatgatgcccaagtctgccttgttatcggccacagcttgtgtaatggctttcattgcagttttgtcctcaggatttggaatgtgatttggaaacatgcctgaatatgtaatttgtaaaatgacaggcaagacgagactaccggcatgaagaaaaggtgcagatattaccatcaggctctaggaattggctcccagtagtaatagcgcctaacggcttgagtaccttatcctgatccaagaacaacatgaacttcaaacaaaaaatggtgcattgctgaaaaacaattaatggaaatatggaagtaaagggattaccacaaaaaagccacctgctccattccctgcatccacgact

SEQ ID NO: 19679 - DNA, 964 bp, Oryza sativa
tattcgctctcatgcaaaacgatctatgcataaaatttcgttcttactcgcttctcttatttgagtcctttattgctttatttaaatttggatttgagcatgcattgatcctactcctttgtcttctctagatggccgaccacccacccaaccaccgcggagaaggcatgattgactttgtggcagagttggcacgtatgacgctggtggtgggctaccccaacgcgccagagtacacgactgttccacctctcagtggtgagcttcctcaccgtgtccgcctggaggtccatggctacgtgggtacctgcctagctaatatggtggttgaggcgtccggaggcatagcagatcacgcctgtcaggaggcagcatacctgatgatgcccagactacgggagcgccacaactacatcttccacgacacggcgtaccaatttcaccctcgtcgagccagcggtgatgatgtcagtaccttccgtccaacagccggtgagaacgacaccaccttcggccacatgtgcgccgtgatgaggggaatggataggatgcactcgaatctacacaaggcgtccaaggccttgaacgatgggaagctcgtgaggatcatagctctgaaggatgagatagcacgcctaaagagggagaatgctcaattgaagggtctcccagcgccaggaggagtccggatccgcaccacgccccgcaagtcgacgactgcacctgtgcgcattcagcttgcgcccaggaacccacctctgcccgcaattcccgcagctccagctccagccccagctccagttctagttccagtgccagctcccgcgtccgctctctccttcgctccagcatcggccgccaggggtccagctagtggcaacgggggttggttgcctgctactcccagtggcagtcgcgaccacagcagcagcagttccagtggtacatagccgggtagtggcga

SEQ ID NO: 19680 - DNA, 2021 bp, Oryza sativa
tgagcatctgtttttcttcttttgccccgtctgctcttcctccagatggtctacaccaggaatggtagccgtacaacaggcgagggcagcaacggcgaagagcgcactgatggtgtgcatcccaacagcgatttcggcaatggtccgccaccactccccgagaatccgacccttgcccaagtaatggctcatcagacacagatgatgacagctatgacgcagcaggtgcagcagcagcaccagcagatgtaccagaggatgcagcagcaagccgagcagcagtagcagcagtttggtccccctccccctccgtccaaactgccggagtttcgacgcattagaccacccaccttctccagcaccaccaaccctatggaggcgaatgactggctccatgccatagagaagaagctaaatctcctacagtgcaatgatcaggagaaggtcgccttcgccacacaccagctccaaggtcccgcatcagcttggtgggacaatcacatggccacacgcccaccaggcactgaagtcacttgggcagagttctgtcgcagcttcaggcaagtgccagatgggttgtggcacaaaagaagagggaattccgggcactccaccagggcaacaggacagtgacggagtatttccatgagttcaatcgcctcgcgcgatatgcaccggaggatgtccgtaccgacgccgagaagcaggagaaattcctagcaggtctggatgatgagctaaccaatcagttgatatctggagattacgccgactttgagaggctggttgacaaggcaatccgccaggaggatcaacgcaacaaaatggacaggaagagcaaggcggcgcagttccggtcaaaccaagggagccaccagcgaccgcgcttcactcccggacagcagagtggacctaccaccctgatcgtccaccagcaccgccctttcaatgccagcaacttccatcagggtgccagtggcagccagaaccaccatggtggtcagcccaaccgcagtgcagctccgcgcccacaaatggcactagcacagtcagctacgtccgcgcaagccaagaaggagactgggacaaagccagggtcctgcttcaactgtggcgagcttggccacttcgctaagaaatgcccgaagcctaggcgtgccgagccaaggtttgtccaggcccgtgtcaaccacgcatctacagaggaggcacaagcagcaccagaggtggtactaggtaggtttcctgttaactcaatcccagcaacaatactttttgattctggtgcaacgcattcgttcatttcaaagaagtttgttgggatgcatgggttaataagagaggaacttagcacaccaatgcgggttcataccccagggaatagctccacttcggttcaattcagcccttctataacaatagaaattcaaagatcaccatttctggccaacctcatccttctcggatccaaagacctagatgtcattcttgggatggattggctgaccaagttcaagggagtcattgattgtgcgaatcgcacagtcaccttgaccaacgagaagggagaaacagtagtgtacaaatcaccagtctcaccaaagcaaggggtctctttgaatcagattgaggtggaaatcccagtggtcaccgaggagaagaattcgaggaaattggaagagattcccatagtctgcgagtacccaaaagtgtttcccgaagacctcactaccatgccacccaagagagagattgaattccggattgatttggcaccgggaaccgctccaatttacaagagaccgtacaggatggcagccaacgagctagcagaggtcaagaagtaggttgatgagcagctgcagaaagggtacattcgaccaagtacctcaccttggggtgctccggtcatttttgtggagaagaaggacaagcaaagagcatgtgcgtcgattatcgcgcactcaatgaggtcacaatcaagaacaaatatcctttgccgcggattgggctgcaggaat

SEQ ID NO: 19681 - DNA, 6903 bp, Oryza sativa
gccgcggattgatgatttgtttgatcagctgaaaggagctaaagtgttttctaagatagacctgcgatcaggctaccaccagttgagaattcgggaagaggatattccaaagacggccttcaccactcggtacgggctatatgagtgcacggttatgtctttcggacttaccaacgcacccgcattcttcatgaatctgatgaacaaagtgttcatggaatttctggacaagtttgttgtggtattcatcgatgacatacttatctattcaaagtccgaagaagaacatgagcaacatctccgtctggtactcgagaagttaaaggagcaccagttatacgctaagtccagcaagtgtgacttctggttgtctgaagtcaaatttctacgtcacgttattacagctcagggcgtggcagttgatccatcgaatgtggagtcaattaccaaatggaccccacctaaggccgtgtcgcagattcggagttttcttggacttgcgggttattaccgccgattcattgaaaacttctccaggatcgcccgacccatgactcagttgcttaagaaagatgagaagtttaaatggacagctgagtgcgacaaaagttttgaggagctcaaaaagaaattagtatccgcaccagttttgattctgcccgccagatgaaagacttccaagtctattgcgatgcatcccgccacgggcttggatgtgttctaatgcaggaaggtagagtggtctcatatgcctcgcggcagttgcgtccacatgaagggaattatccaactcatgatctagaattggcagcagtggttcatgctttgaagatctggaggcactatctgattggcaaccgctgcgaagtatatacggaccataagagtctgaaatacatcttcacccaaccggacctaaatctccgacaacgaagatggttagaactaatcaaagactatgacatgagcattcactaccacccgggtaaagccaatgtggtggcagatgcgctaagcaggaaaagctactgcaatgccctatgcatcgagggcatgtgtggagaattgcagcaggatcttgagcgtctcaacgtgggaattgttgaacacgggttcgtagccgctctggaagcacagcctacgctcgtggatcaagtcagagcagctcaagtaaatgaccccaaaatagctgaactgaaaaagaatatgagggtgggaaaagcccgggacttccttgaggatgaacatggcacaatctggatgggagaaagattgtgtgtacctgacgacaaggaactgaaggatctgatacttatcgaggctcatcagactcagtactcaattcatccaggcagcaccaaaatgtataaagacctcaaagaaaagttttggtgggtcagcatgagaagggaaatagcggaattcgtcgcactctgcgacgtttgccaacgagtgaaggcagagcaccaaaggccagcaggtttactccaacctcttcaaatcccggaatggaaatgggaggagattggaatggactttataataggactgccccggacatcatcgggtcacgattcaatctgggtagtcgtggatcgactcactaaggttgctcacttcataccagtacataccacgtatacgtgcaaaaggttggcagagctctacctctcgagaatcatgtgtctacatggagtacccaagaagattgtatctgatcgagggagccaattcacttcaaagttctagcagaaattgcaagaggaattgggaacccggttaaatttcagcacagcctaccatccgcagaccgatggtcagacagaagagtcaatcaaatattggaggacatgttaagggcttgcgcacttgattttggtggagcttgggacaaaagcttgccgtatgcggagttctcttacaacaacagttaccaggctagccttcaaatggcactgttcaaagcattatacggtcggaagtgccgcacacctctcttctgggatcagacaggcgaacgtcaactgttcggaacagaagtgttagcggaagcagaagagaaagtcaggactgtcagagagaggctgaggattgcccagtctcgacagaaaagctacgcggacaaccgccgacgagagctcacttttgaagcaggggattacgtgtatcttcgtgttactccactccggggagtgcaccgttttcaaacgaaaggcaagttggcaccacgcttcgtgggaccatacaaaatcttggaacaaagaggagaagttgcgtatcagctagaacttccatccaatatgatcggtatccatgacgtgttccacgcatcccaattaaagaagtgcttgagggtacccaaagaacaagccaattcggagcacatcgatatccaagaagatatgacgtatgtggagaggccagttcgtatccttgagaccagcgaaaggaggactagaaacaaggtcaccaggttttgccgggttcagtggagccaccattctgaggaagaagcaacctgggaaagggaagatgagttgaaggccacccatccgcacctcttcgccagctcctccaaatctcggggtcgagatttcatttaaggggggtaggtttgtcacatcccgaagttctttcccaagcctaaattggagttttaaatggtctcaagaaaatacctatgtcaagcaagagtaaaccttaataaattaatgcaaataataatcggaattggcatgtggaatttttcttgagttttacataccgaaatacgctaacaagatttttagtggaattttcagagttcttgaaataattttaaccaattaaaattgagcacatgcaattttaatcccatgaaaaatcctttttccttctttttcctttttctttcttttcttttctttttttttcctttgaatgggccgccggcccattcctcctttttctccccctcctcccgctggatccggccgaaggccgaggcccagctaagctgcgcgggcctgccgcccgcctcccctctctccccgggacgccgacaggtgggccccacctgtcggggtcgtccccttcctccagccgcccgtccccacgtcgccaccaccgccgaaaccgccgccgcgcccacatcccgccccctccgggccacgtcggccgccccggtcatgcgccgcgtctcccgcgcccacttccccctcactctcccgctcgcccgcgctcccgagacgaccgggattcgattttcgaatcccgcctctctctcctctcccactcacccacgtcggccggcgattcccgcctctcccggccacgtccggccccctctctccctatttaagctccgccgccaccctctctctctttttccccatttcgccgaactctcccgagctctccatcgctcccgcaccgtgcatccacccgccgccgcctttcccgctactccgggcgccgctagtgtattaatccccgtcccaggaaaagccggggtacaccatacaaacatgatataaaagacacatctttattatatcgataatatttacattattacaaaggcacttaaggcctgacaatcaaaaataaatagcagcggactagcgggcctacggctccatcttcacaggcgctcaactggggtataagccaggactccacctaagacttcttctccaaagcttctcttactgaagggggaaaagattgagcaagaatgagtacaaccacagtactcagcgagccacaccggcagatgcacgattaatgcaagggggtacaaggggtaatgatataggggttaagttttgcagaaaacatcatttaaaagtcacttagttgcccaaagccatttataaagacgatcctagagctacacaatattattaatcaaggccgtgaaccctcacgaacctgccttaacccaaggcctacgatgattcagaccgaactggcaacccgaccctgggtcccagctcgtcccaagccaacccaggccaaccattccacattttagttgttaagcaaattttaagaattaaaacactaacttgggtacattgctcggcttgcccataaccgagggcgcggctattcgaatagattatactctgatcagaggtgtacatctttacccacaagacacatcttcctcacgtgtaaccatgtgccacataccaccatggtatacggacggaagacgtgacatagtttccaacccatcctagccataaacaagagtaccgacccaaccccacctacggccggaacctccgggacaggtatgcaggattgagcccctagcagcaggacaccagccctgtgccatgacatctcgactaccgggccgcagctcgtgtagccttcatttgtcctagagatgtccatcgacccccgacttcgtccatctccatccgtgtacttttgtttataaccagactgagccacaaactaagccttacccactagacatgtggaagtacggtagtgctttgcaacagaggcccgagcttaatccttatagtggccggggtgctacttcccacaactggcatgcacccaaaccccaccggaaaacaggttttaggggttttgaaagaggaagagaggtgtatgtccaattccaccataagccaaccattccatagtgtccaaatgatatgagaatttccaaagtctaaagttataaaaaccacctaatgttgtcctatttaatcagcgaagcatctacctaatttcatactagtggaaccatgaatagagtacccactagttggggttttgttttcctagggtgaacaaggtaataataacaatagcaataataaggtcttaacaaaggtaaataggcatggctaaataaaacagtgataacacgggaatttaaataaagcgataatgcattaatttaaatcaaaataattttataaactgggattcaatatgttcaaagatgatgtgacttgccttgctcagagagaacggccttccgaaccttcggcgacgaccacgaaccacgcttcgggaacctccggaacgacgaaagctacgcgaagcacacaagcaaagctacaagcctataaagaagcaataacaatacataaaaagaaagcacagggttctttaggttataacaaacattaggagacttgaacgggtcgattcagagttcgtatgaccaagatatgatcatccgaagtttaatgctgttatatggagatttgcggattattataattaggctttgcaaccataaaacatgtggaagcgctagcctgggaaaagacaggaaggctgcgctgttgacatgcggaccccacatgtcaacctaaaggaccgcggtagaccgagtacacagagacggtccacgggtcgacggaagcggaccccgtgtgtcaactgaggcgagtggccgacaaacggactccactagacaccacacgggttgcacacgtggagtccacgcggctactgagtgggtacactaacacggtcaccacacgcgcaagcgaacgactactgacaccggtacacgggtaccggggtcgacaaccgcacaacgggcacgggcgacaccgaaaggacgaggacggggcagcgagggagagggatccttaccaccacgcgacgaggcgtgggaacgacaacgacgaacgggcgcggcggagacagctcagggacgatggaggcgaacggcgagggaacgacttcggcggcgatccttggacgaaggcgagacgcggccggcacaaggcttgacgacgcggagccgaggacgaagacgacgacggggctgctgcacacttgacgaaacgcgggcggcggacgagaatggcttgacggagggacgaacgccacaacgagcgaaaccgggaacgacgagaggacgacgacgacgacgaccggagccggcgaggaggcgacgagggcagccggcagcggctgcacggagacgaggacggcgtgttccacgccgcagcaatgccgacgacggaggcggcgccgcgagatgacgagccggcgaggaggaacgatgacgacgacgacgaacaccggcggggttcggtcgaaggggaggcgaggccgagggcggcgtcgcggctgcgatgccgaaggtggtggaggtgcggccgaccggtgcacgggtgaggagggacgggcggccgaacaactccggcgaggcggatggagaggttcgcggcgatgtgcggcggcttccgggcgaaaccgaggggtggacgaggtggagggctacgtcaccgtgccgagggaggggacggcagcgccggctgacgcacgggcatggcgaaaggggttgccggaggagacgtcgacgaggaggaaggtgaggccggcgcgggcgacggtgttccggtgaaattcgggcgaggaggaggtgatgccggggatgagagcagcgtcgcggagccgagggaggtggtggcaacgtcgaccggcgctcaggcagggagacagaggcggctggaggcggccggcgcggaggaaagggaagggcgacggcgggaacgcagctccgggggtcaccgcgcgaaacggagggtaggccgtgggagaggaggcggctgcgacaccggggaaggcgacggcacggccggccggcgtggtgacgcggcggcaggggcggctggaggaaggccggcgccggagggagagaaggagaaggcggggagaggtggtgaggccacgggggggctcgggaggaggctaaaacggtagaacgcaaagagggggttccattttataggatgggggagggagccgggcatgggagagggcggaacggcgacgagaaacacggccggcggccatggttggtggccgggaaaggcgcggccgttcccgatgattgaaggcacgaatcaagggggaatttggggggaatga

SEQ ID NO: 19682 - DNA, 568 bp, Oryza sativa
catgttggcgcacggaaacgtgtcgtggggctgtgtcttgtgggtacagttgtacacctctgatcagagtaaaactattcgaatagccgtgcccgcggttatgggcggtcaaccagattcactgtgattagtctcatcctagtttagtctaatgaaattggatagtataggtggatggttgggcctgtcgcaacggggtatagcgttggacagtggatgaataatattgattaattatcacgactgtttaattcttttaacttctgtttataaatgctcgctttatgcaaatgaaccactctagctctcctttgataattccctgcatcatacccctattccggtatgacttgctgagtacagtgggtagttctcagtcttgctctattttccccaaccccagagtacgagtatgtgtcagatggtggtttctccgaggagtaggcttcgtccgtgccgtcgaggatgcctgtggagtggtgttcccgctgcagatcaagtcaaggcttagctccagttatctttcatttttccgctgcatttatgtaagacttttatgatgtttgta

SEQ ID NO: 19683 - DNA, 1088 bp, Oryza sativa
accctcggaaagtaaacgtcgcaatgctcgaccaatatccacaagaaacagaggacaatctcgtccatctcctgaaggcgcagcattacaagacgttcatattgttgccatacaacacagagttagtttaattttactgtcttcctacataccaaatttcattcccgtacgaacttgctaagtgtttcatatgtaatgcatcccacgcacattgcagattccactgggtgcttttactcttcgacctggaggcctgcaccgtcaacgtatatgactcaatggataaaaaagagtctacgtttgacaaggttttcgaacttatagacaggtaccgtcataagttcctttgttaattaagaaaatcttgttatgttaattgctactacgaatcatagctttaaactctatgtagggcttggtatcggttccgtcatttggtccgcggcaaatggagagaaagacttaggcggaagttcaaatttcctgtgaatacacatgctctacatttatatttctccgattcaaatacatacaagtgtatattaattagatctctcgttgtttgtcatttatttgtagtgcgcaaagcaaaagcagggaactaacttgtgcggctattacgtgtgcgagtattgccactgccttgcagaccaaatcatcaccacaagagagctcgatgtacgtacaaataaattcaaaatttcattacgtagcgatttcttgtttaattactaatcaatttcatacattcatatagtttattcgcatgagggataacctgaccacacacaaggaatttatcggggcggttcaagaacaactcatgggattcatcaacgaagaaatccttgatcccaagggtgaattctactacgacggaaacacaattcaccggtccttagcttctgagctagcagcgagtactactacgtcgaaatcgtagctagctaggacatataatggattgtaattaatacatgactacatatgtttctatatgcatgtgtacacattttctataatgtaaatatattttggtcatatatatatctatatacatatgcatttgcataacatatatatgtata

SEQ ID NO: 19684 - DNA, 825 bp, Oryza sativa
ccgacgaacttggtgatgttggggtggtcgatcttgtgccaggcttcggccacgcccctgagcgacgcgcgcaggtgggcgatctgctcgggcgtcgagaacccctccttcccccagtcgaggagcttcacggcgacgtcgcggccatcgtagtccgcgcggaacagcgagccgcggaagccgtgcttgacgggagcgccctggcggatacgcagcctcgagaggtcgatctcccacgccgccttgggctcgtcgccgccgccttcgcagccattgttgctgctgctgatgcccttgcccaatgccctagcagccatcttctcctcgagctccatatccaacagtgcgaggtcgaccggcacgcacgaacactgtaaaagtgcgtaagcgttctcacctcgtctcgaggccgcgtatgaatatttatatgttgttgagaagaaccctcaacgtggcttacaagattgaatcagtttggatccgattacaagagataaaacattgtttcatgtgagaaacaaactctagacttatctctaagcctatgcaaatctaaaccatactttatctctaacagcccccctcaatcataacttatctaagttaagattgtatacaaaattcttgaattgttgagctgaaagagacttagtaaatccatctgcaatctgatctccagaagcaataaacttaataaccaattgcttttgagccactctttctctaacaaaatgataatcaacttcaatgtgctttgtccttgcatgaaaaaccggattaactgaaagatacatggcttccaaattatcacaccacaaacatgct

SEQ ID NO: 19685 - DNA, 676 bp, Oryza sativa
aattcctgcagcccacaaaatactcaaataatttgtagccagttttttttttttacattttgtatctctttctagttaactggcctattttcttgttacattttttaggtggttttgcgaccaatatcattggaatgacttctacggtggccagatcacttgctgatgatccagatccaagagatattatggaccatgtaccaatcggaaaatggatagtatacctattccttgttggtatgacgggagtgttaataaatgtgccatttaaccaggtttcttctttcactgattgatcatttttttttaattttagaagtttctacttaacatttctaagattgttttgcattattctcatccttaaacataattcataagttgatttccttatactgcaggtcatgattattgactacaaattactatttccaacaggaacagttatagctcagcttattaatagctttcatacccctgaaggagcttacgtagcaaagtaatgaagtcttgttttcttagtaaaaaattgacagattgaatttcatttaactatattcatgattttgtgcactaatatttgcatgtaatccagaatgcaggttgcgaccattttcaaagtattttttggcagtttttcttggtctatgttccagtggttctatactgcaggcga

SEQ ID NO: 19686 - DNA, 5670 bp, Oryza sativa
ttctctaagtcaaacttctttaattttgatcaaatttatataacaatatagcaatattttcaacataaaaaactatcaaaatatattcaatgttaaatttaatgaaactaatttagtgctataaatgttgctatgtttttttataaatttggtcaaactttttagaaaattgattttgcaaaagtcaaagcgtaaaatatgaaacggagggagtattatcttctgaacatatgtttgaccattggattaattaaaaaattatataattatcgttatttcattatagcttggttaattttcaaaatatatgttttgtatgacttatatttttatatatttatataaaattttgaataagtcaaatagttaaacatacgtcgaaaagtcgacggcgccatttattaaaaatccaggagtattcatcaactgacaattctcttaattttttttgtcgtaaaataaaattttatttcgtatacacatgtggctataatttataatgtttggttgcacgttctgtacatggacatctatttaacaagcagcgcaatgcttgttttggcagcaatagtgtgagagagagagatgtggcgttgctgcagcagcaacagagcctctgggcttctcgtgtggctggtgcttgtgtgctcatggcagattgcagctgctcagcctcaacaagcagcaaaaactgatccaaccgaaggtaagaacgtaaccatgttccccgcaaaaaaaaagaacgtaaccatgttcttgggttttcttggcttaatttgtccgtggacactacatgattaatttagaggaatttgtgttgattcatcgcctaattctgcttacacatagtattaattaatgttgactttgttgagttaaccgtgcagtggcagccctgaacacgattttgggaagatggagcaagaaggcatcgtcggagtggaacatcagtggcgagccctgcagcggtgtggcctcggatccgagcaactgggataacttccccaacatcaaccccctcatcaagtgcgcttgcacttactacaacaacaccgtttgccacattaccaaactgtatgcacagtagcaattttgtgtctgacattttgctattgaagttaattagaacctgtacaaatcaattacaaattaaacaccaaaattacaaaatatttggctaaatttgaataaacttatgctaaattagaaaggaatgaaaattttgtcctgaagaacatcctagcagggaccgagtgacaaactgacaatcccaaaattctgaaactcttcccaaatatggaactgttagacacctcttctctcaacaaataacagcatatctaatacaagctcgacaagtacaaccagctgtttgaggtgaaactgaggaagaaaagggatagaggatacaagctctaaaaggtctagaagctaggaagagcaagtggagctaggaggagaggtagtggaaagatcgccgaggttccagcccggaaccaggacactgccatcgccgagccaccatggccaagtcaccgttttctgctctgttccatcgttgaagtcctcctgtttcggccttttctattcctctacattgcttgtttgagcctcggcatggattagcaattgagtaggccctacagcccaacgggttcctaataggaggcaactattttttgcacctgaagatccttaatagaaaaccccttatattttcagggcttcaggctggaaggcagaggcatttggtgtttcttccaatcagtaacttgggattcacatcgactaaccattacttctctcaaatgtttttagttggccatagaggaaatgttggtatgtcctttacaaaaaccgatggtgtattcagtcctccaggtcaagtggcatggttttgcatgcccttgcaggaaaatcaaacggtttataagttaggggtgaaaatttaactgtccctatagaagttgagagcagatgtcacgtcctgataaattcatcccgaaataaaaatcatcttctaaaaggaataatagaattaattaaaattcgaaaagaaattggcaaaccctaaaatacgtacaagaaaaattcaaatgtggcccggagaatttttgttaaattctccttggtctaaaaggagccctcaaattttagtggaattttcagagcacaaataataattattaagaaataaacaaagttgaaaaggttttataaaaagaaaaatccctaaaagtcttcttttccccccccttcctctcttgggccggctcggcccaactctccctccctctctctcctctccccccccccgcggcccatcggtctcccccgcgcacgcgccgctgacaggcgggcccgcccgccgccctcgctgacgggtggggcccacctgtcatcgccttcctcctgccgctcccgccgctcgcccgtgccctagcgccgccgccaccgccgaatccgccgcatcccgccgtccccgcacgccataatgaggggggaatcattccccgcgattccctctcccgattcccccgctttttccctctctctctccctcggtttcgttcggagttaatcccgcaagtttcgccggcgtcttcaagggcggccgagatctccgcgcccgtttcctccctctccggccgcgctctccccctccagacgctatataagagttccccgtgctctcctcctccgtttccgccactcgccgcctctcctccccgtcggaatcgagcccgcaccgtcgcaccttctctccgccgtcgccgccgagctccggttcgccgccgtcgtcgctccggacctcctccccactcggcgtcacctccatcggcttcgccgcgtccccgtcgacctcggccacccctccgcttcgctcgccgaccgccggagcaccgtcgccctcgccgtcccgaaccgcgccgccgccttcctccgcttcggccgccgttcccgtcgtcgccgtcgactcggggtgagccgaagaccgccctttcgcttccctctcctctccgctctctcgggcgccgctccgccgcgccggtggtcgccggcggtgaccatcggggcgcggtcgtgccgcctcccgtcggccgtgccggcgaggccgccttcgggcgcgccctcgcggctgccaagtgggcccggccgtcagccgcccgcgcccgcgggtgcggctgacgcgtgggacccacggcgccggccgccgccagccgcgtgctcccggtccaccgtggaccgagaggctgacgcgtgggccccactcccgtggacccggtccgcgcgccctctctcccggctgacgcaataaatgggtttttaattaaaatttaaatgaagaaattcgcaaatatccatttaaagagcatataaacttcaaatggccatatcttggccatttgaactcggaattggaccgttcaagtctctaatttttccttaagaagtcaagaacccatttttgtgctttgtttctgctgttatgtggagtttagtagagtaaaagccttttcttttccgtcggtcgtgtagacgctgcagcttcggaagatccgctcttcgtggaagttgaagccggtgtttgggaaagcgagcaaggcaagtcacatcatccttgaacatattgaatcccagtttgtaaaattatgttgatttaaattattgcattatcgctttatttaaattcccgcgttatcactgttttatctagccatacctatttacctttgttatgaccttattattattgttattgttattatttccttgttcaccctagagtaaacaaaaccccaactagtggacactctactcatggcaccactagtttaattttaggtagatgcttcgcaatttaattaggtaacattaggtggttttacaactctagactttgggaattctcatatcatttggacactatggaattgttggtttatggtggaattggacatacacctctcttcctctttcaaaacccctaaaacctgttttcggtggggtttgggtgcatgccagttgtgggaagtagcaccccggccactataaggattaagctcgggcctctgttgcaaagcactaccgtacttccacatgtctagtgggtaaggcttagtttgtggctcagtctggttataaacaaaagtacacggattggagatggatgaagtcgggggtcgatggacattctccagggcaaatgaaggctacacgagctgcggcccggtagtcgagatgtcatggcagagggttggtgccctgctgctaggggctcagtcctgcctgcctgtcccgggggtcccggccgtaggtgggattgggtcggtactcttgtctatggctaggatgggttggaaactatgtcacgtcttccgtctgtataccgtggtggtatgtggcacgtggttacacgtgaggaagatgtgtcttgtgggtaaagatgtacacctctgatcagagtataatctattcgaatagccgcgccctcggttatgggcaagccgagcaatgtacccaagtcagtgttttaattcttaaaatttgctcaacaactaaaatgtggaatggttggcctgggttggcttgggacgagctgggacccagggtcgggttgccagttcggtctgaatcatcgtaggccttgggttaaggcaggttcgtgagggttcacggccttgattaataatattgtatagctctaggatcgtgtttacaaaatagctttgggcaactaagtgacttttaaatgctgtttactgcaaaacttaacccctatattattatccccttgtacccccttgcattaatcatgcatccgccggtgtggcttgctgagtactgtggttgtactcattcttgctcaatctttccccccttcagtaagagaagctttggagaagatgtcttaggtggagtcctggcttataccccagttgagcgcctgtgaagatggagccgtaggccgctagtccgctgctgtttatttttgtttgtcaggcctgaagtgcctttgtaataatgtaaatattatcgatataataaagatgtgtcttttatatcatgtttgtgtggtgtaccccggcttttcctgggacggggattaatacactagcgttcgggaaaaggcgattttcccggtcgcgacagcagaaatgggggattttactgttaattcaatgatttggcctgaatggcatataaaagtctacaataatcacatatgaatattacttgtagttcttaaaataaaaagaatattactggtttgtttgggcaggaaggtatataagttggacgtggttggtcaaataccagcggagctgcagaatctcacctacctagaggacctgtacagtatctaagacttatcatcttatttcttgacaatgaaatgttaaaccgcccatctatgttgtgccaaaaaaaaatgctatctctggtttttaacagatgccaacatttactttttaatacatgtttgatcaatcatcttattaaaaaaattacataattataatttattttgttgcaacatggtttatcattaaaggtctattaagctgacttacatatttgcataaaactttttaatacgacatgatcaaacgtgtgtcaaaagtcaaaggcattgttcattttttaaaccagatgagggctgcagga

SEQ ID NO: 19687 - DNA, 588 bp, Oryza sativa
tgtcaacagcgcagccttcctgtcttttcccaggctagcgcttccacatgttttatggttgcaaagcctcattataataatccgcaaatctccatataacagcattaaacttcggatgatcatatcttggtcatacgaactctgaatcgacccgttcaagtctcctaatgtttgttataacctaaagaaccctgtgctttctttttatgtattgttattgcttctttataggcttgtagctttgcttgtgtgcttcgcgtagctttcgtcgttccggaggttcccgaagcgtggttcgtggtcgtcgccgaaggttcggaaggccgttctctctgagcaaggcaagtcacatcatctttgaacatattgaatcccagtttataaaattattttgatttaaattaatgcattatcgctttatttaaattcccgtgttatcactgttttatttagccatgcctatttacctttgttaagaccttattattgctattgttattattaccttggttccaaaaccccccccccttttaaggggggggggaaaaaaaaaaaacccccaaaaaaaaaaaaaaaccccccccccaa

SEQ ID NO: 19688 - DNA, 5973 bp, Oryza sativa
cagaacatccatatagctagctatctaactgatttggcagacttaacttattattactcacttcaatagtcttttcatgtactctcttctttccgagcatatgacattaggacccatacaccagcctctagtactaccccttcttcctactcctctttctcccctcttcctcctctcccggccttttaacggcggcgatgacaacgtcagccgcaacccagaactcagcttggggagacggaggcggtgaaggccacgaagctgcaaatccaacccgctagtcgaatttgcgctagagcgggtgtcgtgtagccctcgaatccacaccgtgttgcccgaatccgacacaagccctcgcgaatccgcgccacgccagtcgaatccagtaggggcacaggtggcggaggcttccagactatggcgaatacaacagcgacaacggatagtaacctcgaggtggatggcaacggctagtgatggcacaaacgacagtggcggtggctggcgatagtcatggttggaaatttcggactgaaatttccgaaatttcgatcatttcggtcccctccgatacgatattacttcggccgaaatttttcattttttcatgaattttggtaatatttgttcaaattcaactaaattttgttcaaaatttcggaccgaaatttcggcattttggtgaggcccgatcaaatcagcataaccgataggattaaccctggcgacagtgacctcggtagcaacaacggatgatgatggcgaccttgatgacgatggtggccggcagcgctcctctgcatgggtgcgggaaaagagagagaaggggagaagggtatctgacgactggatcccctggttggcaacatggcttggcccgctaggtaggatgcccatgtttagctagctagagagttaattttgtgagccagatggcttggagggtttgttggcaggtctattggaggatattttttcatcgaacttacctaattttagtttggagaatgcattggaaaggctgttttttataggttcgttgcaatgatatacctcaaatttaaatatttaaagtaaaacacatgttcagctgtgaaaaagggagtactatgttagttttctctagagtttttattctttcgtggagtttgggatgcaaataaaaatcccacatagtacataaaaaacaatagaaattagaattttccaaattcaaacattgctaaggcatccacgttaaattgaaataaccaactacggaatcatttttaatcaaatttaataccaggctaattataaggattgaacacaagtttttactttttttctataaagtgtgtgaaattcaacaacgccttcaaaatgaaaacacgatcatgaaatttgtgtacatggataacaaatgtaaaatttttgagacctactatatttcaagtaaattgagggtaaatcagctggttatatttttttttaaccaacacaaattcaactcaaaaacttgacatggcagcactcgtacgtacgattaattattattccagtgataagcgaggtacctgtctatagcatagcacctttgatgattttatcaatcttgatataccgtctcactctctcgaagtttttgttggggaagggtatgctgtgtttataggatgagtgtacttgcgtgtatgaaccactgtgtttcttttttttttaaaaaaaaaaggtcctcgatacttgtttacaggaccaagaaagtctctttcaaagcttgttttatgtcacaaataatatggtcaatccaatcaattatgatcaaaatgtgaaaatcttacaccaggcaccaaaggctacctatccatgagcccactctaaaaatgataggtcaatccaaatagtctactccctacatcttagaatatagcaacctaaaaccaccggatgtgatatatcctagtactacgaatctagacagaggtatgtccagattcatagtacatccaatccggttttaggttaatatattctggaacgaagggagtagctatcttgtcttggaaattcggaaacatttactgatcaaagaacgattttgctatatctcactcgaaagattttttcttatctcttactcgattttctcactcaaatttacagtgtgttttcttgtaagttacaatataatttatgaaatttgcactgtaacttttgtaagttacagtgtaatttttgaatcttcgcatataagttttgaaatttatattggatttggtcttttttttctgaagatatggtaatatagtatccattatggtgtttcttagttgttttttgtattttactgtgtctattggattttaatccaagaattaaaaatctgtgtgatatgattataaaaatctttcgaaagatgcatagatatccaaatcggccctgaccacatcatggacccacacacaccgcgcagcctaggagggccgaagcacaggcctcattttccatttggaataagttaacttttggtctcttaaattttcgacgaatccgaattccgtcgttgaaccggaaaaccagatacggctgtcaaaaccggtacaatatagatcccatggtaagacaacagttttagctgacgtggcacctacatggctgatttaactcggtctttatcccacgtggaattgacgtgacgcttacgtggcaattttatctagaaaaaaataaaaaccatgggcccacacatcagttacagtaaaataataaaaattaaaaatggtggggcccacatgggcccccacatgtcattctcactcctggacatttttcttcctccagcggtttcttctgcggcgacttcggcgcccactactaggaaaagcatttttgtaagtggccaaaacctattttcgcaggcggaggggaggaccgcctgcagacgaacgacggtgaaaatcatccattttcgcaagcgggcaaatggcccgcgtgcgaaaatccaataaaaaacaaaaaaaaaatcgcctccacgccgccgctgccgcagcaccgggagccgccgccgccgccctcccccggcctccctccggccgaatctaggaggggaggccggggtagccgccgccgctgccgcagcaacaggagccgctgccgctgccctcccccggcctctctccggccgaatctgggaggggaggccggggtagccgcagccgccgcgtccgcgcaccgccgccgccaccgtgtccgcgcgcgccgccgctgccctcccccggcctccctccggccggatcttggaggggaggccggggaaccacgtcgccgccgtcctcccccggcctccctccgaccggatctgggaggggaggccggggagccgccgtcgccgcaccgggtcgccgcagcgtccgtgcgccgccgcctccgcgtccgcgcgcgccgccgctgccctcccccggcctccctccggtcggatctgggaggggaggccggggaaccacgtcgccgccgccgccgcaacgggtcgctgccgtgtccgtgcgctgccgctgccaccgcgtccgcgcgccgccgccgccacggtgtccgcgcgcaccgccgctgccctcccccggcatccctctggccggatctgggaggggaggtcggggagccgccgccgccgccgcagcgcgctccgccgccggtggaccacataagatgcgcctcgcaggggaggggaggggatggtagaggaggggatgggggagctaagaagccggtggtggagggagagagagagttgagaagatagaaatgagtggtagggaggggttggagtactggataaggattgaagttttttttttggtagatacgatttttgcaggtggaccacataagatgcgcctcgcaggcgtggcttaggtggtccgcctgcgaaaatgattttcacaggcgccgcttaagtagtccgcctgcggaaatcttttcgcaggcggacaacgaacttcacctcgatttatatttttgtaggcggtcatttgactcccaagcttatgtccgcctgcgaaaataagacacctacattgggaaaaatgatttttctagtacctgcacgtcgaccggtggcgaatgccggtgcgtcaaagggttcaagctgtcggacacgtacgaaggagtggggcggctcggctactttgtcaccggctgctcgaggtctctcccactgagctgcgagcctgcgacgccaacggccagaacgagcacggcgactccttcgctattcttgacaatctcgaagggctcccttacaacgctcaggacgaaccaggtgacaccgatgaagattgcagagaagcttgcctgaacaaatgctactgcattgcatactcaagtgaatatggatgcaagctctggtattacgacctgtacaatctgagctcacctaataaacctccatacagcaagatctatgtccgagcaccgccgcgtcctccagcgtgtcaccgtcgccccttctccggatactagcacggaagtcgtgcaggcgctgaatcgatgagcttgatgggatgcttcaatttttgcttgagatttcatatgtactgttgatcacattcaactctgatcagttttgggtgcagcgactaatagccggacttgtagccgggggaagaagatcgcccgagagagaggaagcagaagaggagggactgagaatgacatgtgggccctaatatttttaattatttttattttaactgacatgtaggcccacgatttttattcatttttccagatcaaattgcaacataatcgccacgtcaatgccacgtgagataaagaccgagtcaaactagccaccacatcaactaaaaccgccgtccaaaccgtcatgggatctatattgtattggttttgagtccaaaccatcatgggatctatattgcattaattttgatagttgagggttcaaggatgaaatcggattcgttgataagttaagggaccttaagtgaactttttcctttccattttcaccccgtgcttgcgcctctggacctctgcttcgcaacgcggcctagcaggtccgagacaacgacgagccagctgggtcgctcactcgttctgccctgctctagattctagaaccgtagactacccgctggattcttaaaagatatcaatcttttcatatttttcgtggctgaaagttgatggattacctagggaaaaatattgatgtattgttaactttattcggtatttatgtataattttaaacattttttattaaatataataatgatatccaacaaaattataatattgtaaaagtacataaaaaaatctattcaaaagtacataaaaaaatctattcaaaatattttcatgttttgaaattaaatcattgatggtcaattttaaaatttttgactgaataaagtcgacaatattatttatttaaatagagtgtgtatatatgatagtaaaacactagattacaaatactttgtataagtggtctgcaatgtggtagacctttttttcataaattgtatatttagatataaatacgagcaattctcaacaaaaatctaatgaataagctgaaaaagggacaactagcaacaatttaacttccatatatataagtggcgaccttaatagtaaaccataacgcaatgccacttttgcacttgcggaagtggtgagctacacataaactgatccgaactactacaagctaagataaccatgtgtataagttgggggcacgagttatccctaaaatctatcactggtggagaaaccatctttcgtcggtcggccgatttccacaatagtcccggatacaataaaaaccggggctaaagatgatctttagtcccggttcaaaagggtaacgggcatatttgatctttagtcccggtttgtgtaccaaccgggactaaagatcatctttagtcccggttcgaatgctgtcagggcctgtcaggcccccccggg

SEQ ID NO: 19689 - DNA, 6575 bp, Oryza sativa
cacccgtcggatagactcgaagcaaaagtgcaaaacagaccaaaccagacgatcagctactttattacatatccaggataacccgatagcatatcatctgaaaaattatactagtaccaatttaccattcctggcatcgacaacgaatgcacgcacgtaataaaggtacatgggctccctaaaaacagacacaatttatgaaagtatagaagaagtatggaaattaaaataaaggaaaattcacggcatgaactttgctatagtttggatattctcaaagatagatacaacaagaattcaaaaaaaaaagaattcacaattcatgacaataaacaacagtgtcaagttattacataaagagtaaattaggatttattatgtaaaagtactaatattaatagatttatcatgaaaaatgctttcatatatagttatatgttagtaactttttatacaacataaagttagaaaaagtaataagggaacatgtgtttttggagactgtgtttgtgtctaaaatgtaagtaaaagagaatggagataataacattcagttccatctactttgtaaatttcggcggtgccagccagcattaattaatgaacccatagcattgaattggcacaacaagaaaaaggagaagtctttcaatggtcaagatgcttttgggcggagataccacacatctaataatgattaaagattgaagggctaacctcatgtagcactggtacatgcttaatttaccgctaaatatacccacgtgtgcatgttctacactactatagatcctgctattgttggtggcctatttattattggtggcctatttgttatggatcaatacaacacatcacagaaacctttatctctaacatgtagaacattagcccgcttaagattatattgtccggaacaacctgccacaaatcgaggttatatgtgatatagtaattgtagcccgtcacggatcatttatgataggtcataacgacaacccgttatggatgatcccacacctttaacagtctattaacccatcactgataagagtgacgggtacccgatagaaataacaaatcatccctaacgagtttgttttttaacccatcaccaatgtggaaaaaccgattgagcggtcaattgcatgtcatccacacataaaagatcttcaagatatctctcttgctagctagtcagcctctcccttcttgttgctatctcccaccttcaccgtcagcaccaactccaactccaccagccatgccggcaccagctcgatctcgaccggccactgcagcctctagatctgagagttcaggccgctagcctcctcctagggtcaaatatgaagaacaccgtttaagcgtaatagcagatcaaccaacaaaactaatgttggactataataatggattaaatgttattgtggttactaagaacgctatgtggtaaaaaaaaaggggggacacatttaagtatttgccacttcacaaatacgacgtttaacaattgatcactcatgttgtgtctatgaatatggacctaagctagagccctcgtatcttaaacacgtaatgtgaaaaattattaaataccacgttaaaattgataaatacttaaatatcccctgtttggcacccgtcggatagactcgaagcaaaagtgcaaaacagaccaaaccagacgatcagctactttattacatatccaggataacccgatagcatatcatctgaaaaattatactagtaccaatttaccattcctggcatcgacaacgaatgcacgcatgaaataaaggtacatgggctccctaaaaacagacacaatttatggcgattttgacgatacgaagtatctagatttattcggtcggatcacacactgtacgcccctaatcaacgccgaattttcgccatgtcctatattatttcgatgtcgggcaagctgccaatcccaaaccaagattatgctctctccatacaattaactcgatctacaactactctgccgctgcacatgcctgcaaattcgccagtgcgtgtttgatctcgcatcagcaacttgtcctcttccagagcacagatctatctgtcaaatcgcatgtcacccctgcattgctgctgccacttgaccctacacaacaaattatacaattattcatcaaatgatgattcatccatctcatgagtttttttcccttaaacaattgttagcataatcccttgcagaatatatgcgagataatgacgtatcttgttggagcaataaaaaaaattatggccattgttgggtgaagcaaaggttatagcagaacgtgcagccacactagccatgatccatccatgaaccatgatccacaatatatatacgtgtgtgtgatggtggctttgccattgtcatcgtggacactgcaatttgcagctacctctcctaatctctctttgatcaaatcactatcgtgtaattaacgcatagttagctatgaggaaggtgtgccctaaccttgaccgggaggacggcctcgacaccgtgctggaggtgccggtgccggagctccaccgccaggcaccgcggcggcgagggcggcgcggcggcggcggcacggtgaagtcgtgggtgcgggcgaggatggagcacgggcggaggcgcgacggcgcggcgccgtcgcgcgccgaggtgcagctgatgctcggcgtggtcggcgcgccgctggtgccgcaggccgtggaggcgaggaaggccatggtggccgggcggggcgtcgggggggagggggaggagcccctggacctggaggcgtccaaggcgaggtacatcgtcgagcagtacgtcgcggcggccggcggcgaggccgcgctgggcgccgcgacgagcatgtacgcgatggggaaggtgcggatgaggacgacgacgacgagcaaggcgaacaagggcaaggtgatgggcgtggccgccggcggcgaggtggccggcgggttcgtggtgtggcagaagaagccggatctgtggtgcgtggagatggtcgtcgccggtggcgtcaagatgagcgccggcagcgacggcaaggtcgcatggcgccagacgccatggcaggaagcccacgcctcccgtggcccgccacggccgctccgccgatgtattcaggtactgaactgttctttcgtctctgcgtttttacccaaaagaaaatcaaatttgactaaaacttgtaataattgagcaaatcacaattgcatgcaagaacatggtgtaccgtacccggacaatccggccggacgaacgtgctcccatgtgcttgtaaatgtatgattatttaattttgatttaattactgtattaatcaattttgattatgtgtgatgcagggcttggacccgaagtcgacggccgacctgttctcgagcgcggcgtgggtgggcgagaggtgcgtcgacggcgacgactgcttcgtgctccgcgtcgacgccgaccacgccgcgctgcgcgcccggagcagcggcgacgtcgaggtggtccggcacgccgtgctcggctacttcagccagaggacggggctgctcgtccgcctcgaggacagccacctgctgcgcatcggcctcgcccacgccgccgccgagagcgcctactgggagaccaccatggagtcctccatcggcgactaccgcgccgtcgacggcatcaacatcgcgcacgccggccgcaccgccgtgtcgctgtcccggttcgagagcgccgacgacgccgccgccgccgcgcgcggtagtaataagcggtcgtggggcaccaccaccatggaggagacgtggagcatcgaggaggtggacttcaacgtcgtggggctctccatggattgcttcctgcctccccgggacctagtgctcaacgactgcagcaagcagcagcagaaagaggacgccgccgccgccgtcgtcgtcaaggacgccgccgccgccgtcgacgtcaaggacgccgccggtgccgccgcgaacgccaagggcggtagtgacgacggcaagaccaacggcggtgacgtcggccgcggcgtggtggtgaagaaggcgcttgttccggcggtgaccggactgggttggttcggtccggccaaggtggttgccgtcgacgacacggtggacgacggcgtcgccgccgcagccgacgacgacaagtaaatgtagatatctctcggctactcgctagatcaggtggtgctcgcttctgcgcccctcaagagtaaatattaattcgtatagtttaagttaatttctactacttaggaacatgcaagcttgatcatgttatatgttagatctagcaactgcattccattgtagatgttgggggaggagactaagtttatgttcttctccattcgagtttgaggacattttgcgtagtgtccggccggtgcttcattcatgatgtaatttaatactttggaaacaaacatccaaaggaaactttgtgtatccattttgttaagaacgacatgggggcttcagttccaggtccattcatcagaaactaaagttattaccgccaacgacgaaaagcatccaaaattttgacaaattgacttgtttataaaaaattattttaaaaataaaacgtaaaaaaataatttcagaaatagatcatgacctcaacgacaattttgtgctgagctaaatgtctcaactccaccactattgatgttgagatctcatgatcttgtccgacgtgacataaatctgcaaggacacgggagctcagcataagtgtgctggcggcatcgatcgatgtatggttcagcatcctccactatcctccgaatgcatatttacattttttgagttgatattaagatgcaagaaataatttgaaccacgtcaaaatgtgatcaccatcatggatctcaaaaggtacaatctggaacacatacacatacgcacacatccccctccaaacaaaaatatttacgtaccagattaaatcttagcctctacatctaaattagatgaatacaacaccaacccaaaaaatataaactatttcttagcttccaatgttccaatacaaacaacaagatatattacttcgctcaaccatgcgcaatcataagagtggagtgcattttccgtacaataaaataaattgagtgcctaaacttcaggcaccatttttcttgttctagctaggtgacaatccaataattctcaacacttctctattgctaatttaaaaaagtctattcgatttaaataaaaggtcaaaacaataaattattatgacataaaatgcaaagttatatgaaatgaacttacaattaataaaaataaaaaatacattaaaataggcttagataaagaaaaaattaaaccatatatttcaaaaaatgctaaaaaattatacattttaggtgcattaagtgtgaatcttttttggatgggtcaactagggtgtgtttggttgcctgtatgaggcctggcccacatctgtagatgcaattttcggtttttggttacctgcgtggccttcccagcctcgccccgctcatgcaaaaaggcctccgtagccaggctgagtggaaacagtcaattcgagcttcacaactcagcttggcccgatggatgtaactggctgtatccgcgcgtgcaactggtaaagatggggtcagtttgcccctcctcatttctccccccaaatccaaaagctagggtttggtgccagcgtgccaccctcctccttgacactactcgtggacacatggcctagaaaagagagacgtacatgggctgatacaagtgcatatagatgtattttgtcgttctccatcatccgcacgatatataaaagttagagtaaaatgcttggagagggtcatctaacttatttagacgtgtcacataggtcactcttctaattttaaattgcacatctgaatcacgttagtgagtcaactgagtcatttagtcaactaactatccacatgaggacgccttgtatatatgacatgtcacctagaattgacaaaaatacatcatccgcagccgctgcctcttaggaattcgactccatttctgtttacatccatagtttatcattgccgtcgggtttgatggcaagtgagagaggactgagaactagcagaaaaactcatcaaaacagacacaagtgaaatgatttggttcctttcatttcttgttagtgttgtgacaaaaggggaaaagaacacacatgtggtttcctgcatgtccaaaagcaatttttccaataagggcacccacaatggttatctataggctctctacaagagatccatgtcagcatattttcctacttggaaggtattaaatgaagagagagagcaaagctatctactaacttagagataatctatagagaaaaacgaggcaatgcatgagagagttatagataccaatgtagacatactattaaggtggtttactattaatcgagtctattgctgagatatacaagttttatagatagcaccttacttaccattgcgggtgctctaataggtggcatgccatgcgtataagatatcgtgtggatacattaattagat

SEQ ID NO: 19690 - DNA, 5926 bp, Oryza sativa
aattcaatgagaagggaggatgaatctggagaaacgattgatctaccaaaaatggatcagccatcacgagccccaattgagctaaagcccttaccttcaggcctacgctatgcctttctgaatggtgatgcggagtctccagtcattataagtgacgaactctctgagagggagacgacccgacttatcgccgttttagaaaaacattgtgctgcttttggctattccctccaagatttaaaaggcatcagtccgaccctttgcacccatcgcattcccttagatccatcttgcacaccatctagggaacctcagaggaggctaaacaatgcgatgaggaggtcgtcaaaaaggaagtcttgaaactcctacatgccgggattatttatcccgtgccatatagtgagcgggttagccatgtccaagtagtgcctaagaagggaggcatgacggtcgttgaaaactcaaaaaacgagttgatcccacaacgaaccattacgggatggaggatgtgcattgactataggaaactcaacaaggctacgaagaaggatcactttccgctgcctttcattgatgaaatgcttgagcggctagcgaaccattccttcttttgtttccttaatgggtattctggttatcaccaaatccccattcatcccgatgatcaaattaagactacattcacgtgcccataccgaaaaatgtcgtttgggttgtgtaatgcaccagcgtcatttcaaagatgcatgacgtctatttcatttttcaagcaaacgaagagctttttccagtaaatgccgtgtgtacttttttagaaaatggattaaaatccggcctctacatccataatggatgtacacagcccaaaatgccgtgtgtacttgtgtacgtagatactgtgtacattctgtacagtaaatagaaaaatcagaacaagatttcaaggaacagtgtggatgccttgacaagacaggacgagcatgctgagaacaagaaaggcagccgccgccgttcgaaagaaccccatggccatcgtgtatctctcgatcgatcggctcaatgtgcgtcgacgtttagtaacctgtacgtatgaaccttctgaagatcggcctttgtttgtcgacccgcacggcgattcaatcgcaccctctggtatatatattgcacaatcggggtacaagataaggtaatttcagaagtatatttatagaatttctcgataaacagatgaatccaaaattgatatctattgagccatcattaaaaataaaaaatagtattctttgtatgcatcgtatttgaatcttaaccttccataagccatgtgcactaagtgtagttgccattgatataaaacttaactagcaaatatgcccgtgacttgcaacgggatatgtatattatatatatattattcctatttattgcatgatttgttttttttctatacttatacgatagtggtgagacagatgattcacatgggatttggagagatttgtttttaaaatgtttggcgtgggtctagtacacgtgatagatgaaacatatgatagagatctaaaggtcaatttacgtattgttgctagatctaatgattcgtattcaccacaaggaattggctgaaatcactccatggacctgataagcctgggatggtgaatcaagcccacgcttgttggttttaataaaaagatgtgtaagtattttattatctaaattttaataaaatttattacatacacaaccagtgaatcagtgaaaaacaatcaattaatagctaaaagtgcttcaggaaaagaaagcacaacacaaaatttatataaaaaatgcacgattcgataaattttataaaatctacttatacatcatgtagaatatctcattaaatttatttttaccatgataaatcagtaaaaccagagtatagaaaagaaagaaaagtaaaaacaaacaatgtagcatcgcctcggctagcttctcataccacttcgctgagccactcaccttgccttgttactcgcctcgtggcttaccggcgctaggtggttggatccgatggcctggtgactaagaatttagagtcaaccttgatgatagggagaatcagcaccactggtggacaaacccgttttaatcccggttcacaactcccctatagtcccggttatgcaaccgggactacgaatccaggactaaaaatacctatttttagtcccggttcaaataaccgggactaaaaaaggatctttagtcccggttggagttccgaaccgggactaatgctcttttttcttttttttttgtttcctgctacttgcatgatttcgagccccacgaatctccacaaatcattcgaacaccacgtatcattcaaaaaatccccaaatatttctatccccaaatacatcacaaatcattcacaaaatcataaaatcatctccacaaattcattcacacatcacatatcacacagatcagaaaaagaaatccacatcgcacagatcggccgcacagattagaaaaagaaaccacatcgcacagatcgaccacacacatcacatagatcaggaaaaaaccacatcgcagagatcgggcgccggccgtccgccgcctcgccggcatcccgcccgggcctcaggctccgccgccgcctggggagcgtcgccgcccgccgccagccgcctatgcggccggtgcgtgcctgctgccacctcgagctccgccgcctcgccggcctcgctgacctcgctggccgcctggtgggccgcccgccgccggcctcgcaagccgcctgcccggccgccggcctcgcctacctcgcaagccgctgcctcggccgcccgctgctccgcgccctccctgccaccgcgcgccgcccggcctcacgtggtaggaggaggaggaggaagagaatagaagggagaggaatgggagaggagaagggatgaggatggaggaggatggatgaggctgaggatggagaagggataagggctgtttaattaatgagaggggaggagagaggaaaggggagagaccgaggcggccgggcgaggcagtggcgccagctcggttgattttttagtcccggttggtataaacaaccgggactaaaaaagaattggggtctaactcggtccgataaccttttgaaccgggactaaaaatgatctttagtcctggttggtgttaccaaccggggctaaagatcaaaaggtttttaaccgggactaaaaataatctttagtcccggttcctattcgaatcgggactattgtggattttgggcgaccgagcaaagatggtttctccaccagtgcactatgctcagaaaagagccaattttcatatggtccgagatgttgggtgaaaatatttatattaaattatgaaaaaaataaaaatagaaagagtatagaataattttatttttgaaatcatcaaatgaatatcatttcaccgtgttcacgcatgtgcatgcactgataatcgcgtcatgcacaagctttgtgatggcaagggcagtttggctcggggccgctaatgggcgggtgatcgccccccatccccctatacactactctcttatacactactctcttgcttcctcatctccttcttctcttcctactacaccataaaattttaaaaaataaaaaacacaaagttgaaaaaacttatgtatagaaatactatatataaaaaatttgaattcaaatataaatttaaaacgggtatgtaaacttttgacttacaaactttgggtctataaattaatatttgaattcaaattcaaatttgaatcggatatgtaaacttttgacttataaattttggatctgtaaactttaggtgtataaactttagatgtataaaaatactatatataaaaaatatttgaatcaaattcaaatttgaatcggatataatttaaattcaaatttgaatcgagtatgtaaacttttgacttataaactttgggtctataaactttaggtgtacaaactttagatgtatagaaatactatatataaaaaatatttgaattcaaattcaaatttgaatcggatatacaaacttttgatttataaactttggttctttaaactttagatttgtaaacttaaggtgcacaaaatttaggtgcataaatttactaaaattaaaaagtaatacagtgccaaaaaagaaaaccacgtgaaggagaggggggcgccctagggtcgatcgatcgctccttagcaatggctcaggttggtgccggttgaggacgtgtgttagacttgcagttggggcctgtgggcaaatggcccagctggtccagataaaagatcagcagcgacgctgggtgcagaggaaacgcgtaacgcgggcccaactccgagcgagcgcgtgcgtgcgtgaacggatgattttttttttttggaattaaatgcgttttggaattaaatgcgtgcgtgcgtgcgtgcccatctgtgttgaaatataatgatttttggaggtgtgtatgggtattaatgaagtggaattaaatagggacgtttgtgattgttttagataagaaagtactcgctcggtcctaaaataaacaaaccaaccaatcaatcgatgcgaggtgcctatgatgacttcgacaatctaatgatatatatgctaccctagtctcttgaggtagaatgtgcgtttgtatatccatagggataagtgtgtgcacatgtatgtgtatttattgttttttgtttgtgaaaagaaaatgacgatgaaaagagttaaaccctgcattttaaatcagcaggtagggtttgtgtgcgtgccttcataggggtaagtgtgtatgtgttatgagtgcttgcgttgtactgtataattctcaaaaaaaaatcagtagtgttttatctttgtgaaacattttattaacttggttgaaacaattttctataagtggtgaaacaacctatgaggccatgactagttatgacatatataattaatataattgtatgatatcatattataaatatttaattgtaatgaatataactgtataattggattatagattgaataaacaatataggagggaaaatgattaaaagttaataaaaagattatgcaagcacgtacatatgctggcatgctgctaattataagagggagagagagggatgccatcctgatgttcagaggcacagaaagagggggcagggagtacgtacacaagcattaccgtgagatctgatttttcattcccgtcggacgtctaatgtgtagctctctccaagttgtaccgatatattagagatagctactaatgtgtctgtactaacgttacggcgaaatttagtaatacaaacaaaacaacatgaagatgacaatttaattttaaaattcatgtaaagaaagaaggatgaatagctaatctagtccttcaactcatatagatcctcatatgagttgcatcttatcatatatatagatcctctaagtattcatttttggctcaaaatttttcatggactcacttgatgtgccacatggttaatccaattcaacatttatattacaaaatgtccattatacgctcacaacaattagaatacaacaatcagatcagcatcataaaatgcaatattttcatagaaacggtatacaatagtcaataaagataacatgcttgtagttatggaggatacttgacgttgattcttacaaggacacctttattggcaaaattggttatatagcattgaatgttcacgtttttggttttatagcaccgaaaaataccggttcactttaatagcacccaaagtttaccatgttcccatttttagcacttccgtcaacttttccgtccgtcttgatcgttattgacccagctacgcatacgatatgacgtttctacccctcattgacatgc

SEQ ID NO: 19691 - DNA, 621 bp, Oryza sativa
aggtcagccatgcttaaaggattcaatgtgcctcaaggcaaatattatctcgttgatggtggatatgctaacacgccatccttccttgcaccgtaccgtggtgttcgataccatctgaaggaatttgggcgtggacagcaacgaccaagaaagtatacggagttgttcaatcataggcatgccatattgcggaatcacatagagagagcaattagtgttcttaagaaacggttccctattttaaaagttggaacgcatcattctattgaaaaccaagtgaagattccagttgccatagtggtgttccacaatcttatacggatgcttaatggggatgagggttggttgaatcaccaaggaagcaacatatctccagaacagtttattgatgtccctgaaggtgacgatgaatatagtaatgatgtgatgtcccttaacagtcaagtagatgatggaaacgcggttagagatatgatagccctaaatatgtggaatgactacagtcaaaacttgtcttaataaatgtgagtcttaactggtctcatgaaatattttgcttttgtatttgcatcatgatgtttttgcatgcttaaatttgataacggttttttttttaattcg

SEQ ID NO: 19692 - DNA, 1834 bp, Oryza sativa
cggggtacctgaatcacgccatgaagggagactacggggaaagggaactctcggaaggaaagcaataatgacggtagacaacaatttattccgtaaagcccatttcactgttctgcaacactcttcattggtagctccttacatcgaggagcacttggctctagttcgcgccaggaacatcggtaagtccgatgcatggattacacggcatcacattgatactttccccgcgtggctacgacaacatctcatgggtaacgagtcgatcaaccaacaacttgccttcctggcgaggggaccgtctgggtcgatcacgacattccagggatatgagatcaatgggtacacattctacacgagagcccaagacatgaagagcacgaaccaaaacagcgctattcgtgtcgatgccatgggacacgatggaacaactgccacgtattacgatgccatcgaggacatatgggaacttgactatggtcctctcaaggttcctctgttccggtgccaatgggttaggttgactggtggaggcgtaatgattgatgatagtgggatgacaactgttgaccttaacaaggttggatactcggacgaaccttttgtccttgccaatgatgtaacgcaagtctttttcgtgaaggacatgtctagcaaaggaaagaagggcagagggcctgatgagcctaagcgtcaagtggttctcccaggcaaaagaaaaatcgtcggagttgaggacaagactgacgaggattacgatcagttggatgggcaaccccctttcacggtgacgattgaccctagcatcctcctatcaaatgaagacaccccttactcacgcagcgatcacaaggagggaacaatagtgaggagaaagtacgtgcggtcaaccgtcaccgccgatgtaatgccgtaattattgtgtacacgatgtaaactattttggatgtattgattatccatataaatcaattgatgtatggcatatgttaattacgcatgattattagaggtttcaacaagtttaaatcatgtatatgctagttatatgtgatacttacaatttttaaaagttttaaatcacacaggtggcaatttcatatgtatgttaattagagtttttaacatttaatttactagcattcatatgctaattataattgactagaggatttttaaaagttttaaatcacgcaagtggcaatttcatatgttaattagagtttttaacatttaatttactatcattcatatgctaattataattgactggagaatttttaaaagtattaaatttaatatatttttaaaactatcattcatatattagagtttttcacaatttaatttactatctttcatatgctacttatatatgactattcgaatttttaaaaggtttaaatcatgcatgtggcatttacatatgttaattagagtttttagcatttaatttaatataattcctacgctaagtatatatgatgattacaatttttattaattttaaatcatgcagtatgtacatacatatcttaattagagtttttaccaatataataatatcattcatatatatgctaagtatatatatatattggaatttttattaattataagtcatatatttgcttattacgatttatccacttaatttattacagacaaaaataatttttcgaagtaattgtcattaatttttgtactttaaataatattaatgcattaacttctattttataaacacatatgtaagcgaaaatcatatgcagtgctataatctttagtcccggttcttaaccctaaccgggtttaaaaagaatttcgaaatagc

SEQ ID NO: 19693 - DNA, 10026 bp, Oryza sativa
actaaagatttagtcccggttgttctcaacaaccgggagtaaacatctgggggtatatatattcccggtgcgccctcgtcttcttcaccaacacttagacgttttcggccgatcgatctctctcggcctctctccttcgccgccactgcctagggcaaatccccgcgccgacgccgccgtatctcgccgtcgtctcgagctcgtcgtcctcgccgccgcctccacctcctccgctgccgccgcatctctggggtgagagccgccgccgccagatctcccttcatgcatctcgatctctccgatctcgatctctctccgtcgcgccgcccgccacgagacgccgcgccacgacgacgacgcgccacgacgacgacgcgccacgccgccgccttcgccgccgccgcatgccaacgccacgccgccgccgccgtcgccacgccgccgccgccttcgccgccgcgcgcgcaatgccgccgccgccacgccacgccgccgccgccacgccacgccacgccgccgccgccacggccccgcaacgccacgccgccgccgccgtcgccacgctgccgccgccgccgccacgccgccgcgccaaccgccgccccgatgccgccacaccgccgttaacgaacgagaacgatcgaacgaacgagagcgagaacgaacacgtcaacgtacattgccgcgagaacgtgaacgagaacgagaacgatcgaacgaacgagagcgagaacgagaacgatcgatcgaagacaagcgagaacgagggaacgaacgtgaatgagaacaagcgaacgaacgtgaatgagaacgagcgaacgaacgaggacgaacgttaacgtgaaatgcaatatatatatatatatatatatatatatatatatatatatatatatatatatatatatatatatatatatatatatgttacttcgcatttatcctaatacatctttttgtatcttgcagaaaagacgtgttgtcggagtcgtccgtcaagcctgagtggaagagctagccctagaaggaattggagcatgcaagtgacgtaataatataaatgattgttatatttgtaatgcaattaattaagattattagacctgtaattagacttatcatataagattgtgtagtgttctaatattatttgagttttaatataagattactttatttgtaattagacttagtatgtaattattgactacggaattggtgcgacaagtagcaattgactattgtagtcttaattagacttagcatatacatgactattttagtcttagcatgtaatattatttgagttttaatataagattactttatttgtaattagacttagtatgtaattattgactacggaattggtgcgacaagtagcaattgactattgtagtcttaattagacttagcatatacgcacgaaacacttagcatatacatgactattgtagtcttagcatgtaatattatttgagttttaatataagattattttatttgtaattagacttagtatataattatttactagctagggttgtataatatacgtcacctagacttagcttatatcacgatttgtaattagacttagcacgtaaggttgtgtagggttctaatgtacgacatttacacttagcatacatgacttagattgttaaaacataaatgtctcgtgacttagcagatgtttcttgtatcaacagatggctgaccgcgatgaggaacagatattgtacgatacaatcgcggagggaagcagccagtactggaatgaagaagaggggaacgaggatccaaaccagtacttgaacgaggaagggaacgtggagagggatgctgtcgcgtcccaaaacgactctaaaatacatcctcaaaattatgcatagaataattaaaatccatgtgaaagcctccaacaattaaaatgtgcaaatttaaaagtcaaataaggcttggaggatttttgtatatttcctaaaagcctaaaatgcgtaaataaattttagtggaattttcagagcacaaataataattaagaagaaataaacaaagttaaaaaggtttcaaaaaagtcctttccccccctttccctcttgggccggctcggcccacctccctccctctctctcctctcccccgcggcccatcggcctcctccccgcgcgcgcgccgctgacgggcgggcccgcccgccaccctcgctgacgggtggggcccacccgtcatcccctacctcgcgccgcacccgccgcctcgcccgtgccctagcgccgccgccgccgcggattccgccgcatcccgccgcccccgcacgcaataaagagggggaaatcactccccgtgattccctctccctttccccccacttttctctctctctctgtcacatcctgattttcgtttcaggatttataaattatttaataaatcattaatagaatttatattaaatgatctttaatttacaagtgaagttaaatgtgggaaataaaatttcctaaatataaagcatggatggatttaattttttattaaattctccatgattaagtcaactctctgaaattttctcggatttttcagagctcaattcctaaatgatacaaagaacagtttagcaattatttaaaaaataaattaatcattaaatgatctggatattattatattaaatactttgagtgtccaagtatgttcaagatttttcttggaattatttgagcattggaagtatttttaacaattgaaagatcatctcattggttaatttatttggaaaagtaataaaaatcctccttcctagtcttgggccgaatccagcccattccctcctctcctctctcccttcctgtcagcccagccaaagtctgtttaacctccctggtgctacagtactccatcttcctcctccagtcagagccgagccagccgtgctcgtgcacagtgccgccgattcccttccaaaatccgacctccccgttgctcctctttccaaattggttgcgggaatggaatcctctcaatctcctcttccttttccccaagaaatccccaaaagtttctatggaaatcctttccaatttcgcggatcaaatcctttcctttttccggcgaagataaactttcccgagtttttcccgtcgatgtgggctcgatcccggcctcccatggctatatatagagcccccagcctctcctctttcggccgccacctcctccttcttctgccgccgcccgaaaccctctccccacgctctccctttctctccacctccggccgccgctccagcagccccgcgccgtcgctgtggtcgtcgccttcggtcgccgctgccgccgttgggttcgcgaggaggagaagaagaccggcctccacttccccgtcgtcgaagaccccgggaagcccgtcgtcaccgtgaagccgatccgttccatcttcagccgcgccgttcgtcgccgtccatcgccgccttcattcaccgtcaccaccctcgggatcgcaggagcgaggtgaagaccgtccgcccctcggttgttgcctctcgtcgccggaaagccgtcgccatcgtcaacccaaggtcgccgcctttggagctcgtcgcctgccatctccctcgccgtctgtcgtcgcataagtggtggtaagggtcactttgatcccctctcgctcccggtgccctccgtttgcgtttgtgccgtggttcgccggcaaccgccgctcctttgccgttcacctgtgaggttttccctagggccttaatccgatctaatctaatcttgtttggccctagcgtcatcatcgtctccgtgtgtgtcgtcgtcgttgtgtcgtagctgcttgccgtgccgctgctgcgcgtgtgccggctgagccgcttagctgcagctgcttgccgctttgccacagccgcagccgtgccggttgcgtttttgctcgcagccctgctgctctagccgtgcatggtcgctactggctgtgccgtcaccctaaccctagctgcgtgtttccgcctagccgccacctagccgagtcaagttgtcttagtgccgccgtgtcgcagctgtgtgccgtttaaacctagccgccgctttagccgttgctcggtagccaagttgtctagccgtaggtgcatccctaggttcctaccggcctatcgtttgtcgtaccagggctttaccgtgaatcgtgtctagccgaccggtttaaccacaaccgttgttgagtcgttcgctcgttcgttcgaacgaggtgttccccgtgcttcgttcattcgtccgtgttgagtcgtcctttagtttagagccgtacagagccgccggttctgttcgccggtttcggttgatcatttaggtgatctcatgtcacgtggagttgactcgttgagtcggtatctcgtgaggcttgcttgccagatcaatccaagccatccgatcttagtcgactcggtcaaggttaatctcagccgtccaaaatcaatataaattcgttctatcttttcaatggcatattagtcctttttctttttatcatatgtcatctaccaatataatctaatcttttccggaggttgctttaatcttttctctccgttataaatcatttgtaaatgatttaattaattgggaatagtcttcgtttaataggtttaattggaattaaatcttgtaaaattcataataaattcatatgaaatcagaatgaggccgttcaagtctcataattcatctaaaattatgatctacatgtttgtttactttttatgtattgtttatttggtttttattagtctttttcctcgttttgcgtgttagcttgtcgtttccgtcgttgcgaaggttcgcgagtgcgccggaagtattcagaagattaattgaagaccgattattgcaaggcaagtcacacagatcctaaacacaatcctttgagcatgttgatcctatatttaaattctctatttatttcaactgtgcatttattttcgaatgtcaccgggtggtgtgaacctattcctttgttatggcctgtttgcattgattactctattccttgataccttgggatattataatttgactagttgagctttatatatattggttcaactagatattagatattattgcttagctatgcttagaaacattagcacacaattgggataactaatgtttcactatcacttaaggttatatttaatggtagctcacgatggtcaatcgtgattggttaattaattacttgccaactaaaacttgataatggtgggttgtgagcacatggttttgagagtcgtgctcatgacaattaaggaccggttcgcgagctactgttgtgaaacattaaccgtgccaaccacaagccagcgtgggcaacggctttatcttttgtatagcatggttcattgcggggcaccagactgagaagtggcggagataagcccacgggggtcgctggggagtccatgccttgttttataagggggtgattatgatccaggaatggtgcactgtggtgagttgtattatgcagagggtattgtcacagcctctattcgggtactttccagtatcgcgacgcatggtagacatgatgttgaggctgtgtcttgtgggtacagtggtacacctctggccagagtaaaactattcgaatagccgtgcccgcggttatgggcgagttgagcaatgtttttcgtgattagtcccacacctctcacaataattatggatgttataactggtaataatttgcttagctcctggtttggaatggataattcctggtttggagattagatctgtacagccgggtatggttgttcaggatggtcgggcctgtgcagcatgggtgtgctgttcagtgttgattaaaattcctgattaattactccactgttttacttctcttaaatgttttgctaaatgctgcttttgcaaatgagcctatattatgccatcctttggtatccttgtgcacttgcatatttgctgtgtggcttgctgagtatgtcatatgctcaccttgcaataatcaatcaacctcagttgaagaaaaatgatccagaaggagaagacgtttggcttataccccagttgagctgcctgtgggagtggagctggagcttcgctagattttattttccgctgcagttttcttcttgatgaggactaagtgcctcataagtaagtatttatcgttttagttaatttgatgaatctgtatattaaattgtcagtttgtgtacctcggctgattcctggacgaggattttatgcacaaataagttcggaaattacttgtgaattttcgggcgtgacactctccctcggattcgtttggaaacactcccgcaaacttcgccggcgcatcaatggcggccggatcttccgcggccgattccccctcatccggccgctctctccccctcccaacgctatttaaacactccccgtgcctccctcctccttttccgccactcgccgctctctctccccgtcggaatcgagctcgcgccgtcgtcctccctctccgccgtcgccgccgagctccggttcgccgccgtcgtcgccccggaccttctcccgcttcggcatcgccttcttcgggttcgccgcgacctcgccgacctcgtccacccctccgtttcgctcaccgaccgccggaacgccgccgtcctcgtctacccgagccgcgccgccgccttcctccactccggtcgccgtttccgtcgtcgccgtcgacccggggtgagccgtggaccgccgtttcacttcccccttccctcccctctctcgggcgccgctccgccgcgctggtggtcgccgccggcgaccatcggggcgcgggcgcgccgcctccccgtcggccgtgccggcgaggccgccttcgggcgcgccccgcggctgccatgtggggcccggccgtcagccggccgcgccctcgggtacggctgacgcgtgggacccacggcgccggccggcgtaagccgcgtgcacccggtccaccgtggaccgagaggctgccgagtgggccccactcccgtggacccggtccgcgcgctcctctctcccggctgacacaataaatccgattttaaattaaaatttaaatgaagaaattcgcaaatatccatttaaagagcatataaacttcaaatggccataacttggccatttgaactcggaattggaccgttcaagtctctaatttttccttaagaagtcaagaacccatttttgtgctttgtttctgcttgttatatggagtttattagagtaaaagccttttcttttccgttggtcgtgtagacgctgcagcttcggaagatccgctcttcgtggaagttgaagccggcgtttgggaaagcgagcaaggcaagtcacatcatctttgaacatattgaatcccagtttataaaattatgttgattcaaattattgcattatcgctttatttaaattcccgcgttatcactgttttatttagccatgcccatttacctttgttatgaccttattattgttattgttattatttccttgttcaccctagcataaacaaaaccccaactagtggacactctactcatggtcccactagtatgattttaggtagatgcttcgcttttaattaggtaacattaggcggttttacaactctagactttgggaatattcatatcacctggacaccatggaatggtttggttattgtggaattggattcacaccgccccctctattcaaaatccccaaaaatggttttaggctgggctcggggtgcatggttttgatagtagcacctcggccatataaggaccggtcttcgggcctctgttgcaaagcactaccgtacttccacatgtctagtgggtaaggcttagtttgtggctcagtctggttataaacaaaagtacacggatggaggtggatgaagtcgggggtcgatggacattctccagggcaaatgaaggctacacgagctgcggcccggtagtcgagatgtcatggcacagggccggtgtcctgctgctaggggctcagtcctgcctgcctgtcccgggtgttccggccgtaggtgggattgggttggtactcttgtctatggctaggatgggttggaaactatgtcacgtcttccgtctgtataccgtggtggtatgtggcacgtggttacacgtgaggaagatgtgtcttgtgggtaaagatgtacacctctgatcagagtataatctattcgaatagccgcgccctcggttatgggcaagccgagcaatgtacccaagttagtgttttaattcttaaaacctgcttaacaactaaaatgtggaatggttggcctgggttggcttgggacgagctgggacccagggtcgggttgccagttcggtctgaatcatcgtaggccttgggttaaggcaggttcgtgtgggttcacggccttgataaataatattgtttagttctagaatcgcgtttacaaaatagctttgagcaactaatgtctttaaatgctgtttactgcaaccctaaccctttatagtgtaactcctttgtactcccttgcatttatcctgcacttgtgggtgtgtcttgttgagtacggtggttgtactcagtcttgctcaatttttcccaaacccagaagaggagttcctggaggatgaaggctttggtgtctagctcgtgcctgccgtcaagtgcctgtggtcgtcgccctagtcttccgctgtttctcgtttgtctctgtgtgtgctcggccttcgctgcccatgtaataaattaactatttacgcttccgcttgttaaactctgaattgtatcaacttttggtgtaccttgcctcctgggacaaggattaatgcacgcacgtaaggaacgcccgttgggtgatttccggtcgtgacagatgcggaggggaaccagcaggggcacgtggaaagggatgtggaggggaaccaggaggaggaggctagtggtagtcaaccctccgttggacagaagagggcacgcgggcaacgaggtgcagcgaagaagcttgagggtcggcacatcataacggaagtgcaagaagatggacgtcctagtgccccggccgaagccgccaagaactatgtacgtcacagcggttgggttgtgcgggataacgtgcctgtcagtagggtgtactggcgaagaacaagggcacgcggagatcatgagagctttgtcccagattcggagaaagagatgctgtggaccacaatgctcgagacattcacccttcctgcgggtacagaggacaaagtgaaaaggtggactctgaagaaaatggcagaacagttttagagcttcaagggagatctgtaccagaagtatatactgaaggggcagacaccgaacttcgacacattcccaaagctaagggatcactgggacgagttcgttgcatataagacaggtgaacaagggcaggcgatgatgaaaagaaacaaagaaaatgccgccaagaagaagtaccatcaccacttggggtcaggaggctatagcgtcgcgatgccgaagtgggagcagatggaggctagcttgattgagaggggtatcgaaccggcaacagccaattggccggaacgatcgaagttctggtactatgctcacggtggaacgctcaacccagctgatggctcactggtcttcggcgatcagatacgagaggctgcgcgacgactaacagatgcagtggaagcctcctctcagggcacgttccgaccagacagagatagggacgagctgacactcgccctgcagactccagagcatccaggacgaacacgagggaaaggggtgattccttggaagattggtttcaaggaggacatccacacgtacaggagtcggatgaggagcaagagagataccgaggcgaagattgcagacctagagttccgggtatcgagctacgaactcaacatgcaagaggaggtggcaaggaaggttgatgaacgcatggccgcacatcggtcccatgatccccagccg

SEQ ID NO: 19694 - DNA, 1735 bp, Oryza sativa
acgtagctgaatcatgtgcctcgggagcatctggagtcgtggccgacgctgaatggctggcagtaggagacaccggagccttaggaatcacaggcaacgatgacggcgacgtgacagcagctcccgatcccgagggcgacgacagagcgggagaatctccgcccgtatcatcatgatcttctgtgaactccggatcttgtgtggctgtgttgaaatccagctctatatgatctgtattctctgcattttcttcagcaaaagtattagtatgttcaggattatcaagcatatggtcatctcctattgttgtacccctaccagtactatcatccgggttcagaagtgtaggtggcagcaataaaatctcagaccgtagtcttgcaccggcattagagtggagggatgcaaaaggaaaaacattctcatcaaagacaacatcccttgaaatatacactctaccagctgctacatctagacacttgaaccccttgtgtaaattactataacccaagaacacacactgtttggaacggaattgaagctttcttgcattatatggacgaagattgggccaacatgcacaaccgaagacccgaagggatgtatagctgggtttttgatgaaataaatgctctagaggcgtttcatattgaatgactttacttggtgtgcgatttataagataggtggcagcaatgaaagcttcatcccaaaatttcaaaggcatggatgcatgagcaaggagagataacccaacctctacaatgtgtctatgcttgcgttctgcagaaccattttgttgatgtgtatgaggacatgaaacatgatgactaatgccaatcttagtaaagaaatcatgtaacttttcatattctcctccccagtctgtttgcatggcaatgattttgcgataaaaaattctctcaacaagctgttgaaactcatggaatttatggaatacttcagatttttgcttaagaagatatatccaagtaaatttgctaaaatcatcgatgaaactgacatagtattttctgcccccaacagagtcaggagcaggaccccatacatcagaaaacacaagctctaaaggaaaatttgacgcacttgtagatttgagaaagggaagttgatgactttttcccttttgacatgcatcacacacacctaactcttttgactctcctagacatgggagattattatgactcacgaccttttgaacaatttgccatgagggatgccctagacgactatgccatattgagacagtgggcttgatagctcctaagacttgcttggatgaagacgtggaggctggtagaggatagagtccattacaacagggtcctctaagaagagtgttcttcgtgatttgatccttgatagcaaaaaaccgagggtgaacttcaacaaaggcatgattatcaacggcaagacgatgtgcagatataagattctttttggttctaggaacatgaagaatatttctcaaatatagattgcgtgtaggggtacgaatagtagattgacctatatgcttaatatccatacctgaaccactcgccgtgtggatttgttccttgccgttgtatctgtcacgggttgtaagcttctcaagctcattagtgatatgatctgtggcaccggtatccacgtaccagttcgaatctacaccatacgaggcagccgctgcaacccttgcgtccggcacaaaggagtcatcgtagcaatg

SEQ ID NO: 19695 - DNA, 2922 bp, Oryza sativa
acagaaggccgacgatcatcttccatgcatgagccgctgtgtcgacgtttgcgacttggatgagaatctccttggagatgcttgatagaaggaaaccgaggacctgttggtccgcagcaatccatgcctcatatgccggattggaaactttcttggttatttcacccttttctccttccttgacttctatttccgccgatggaacttgtgttgcaccggtcagataaccttccatacgtgcgccgcaaatcactgggagaatatgcgtcttccatagcgagaaattgttcttcgtcagcttttctgaaatagcttggccgaagagaggattcacggcagcgccggaggaggatgccatcgctagtttgatctagtcgtggcgagaaggctctgataccatgtaaaagtgcgtaaccattctcacctcgtctcgaagcagcgtatgtatatttatatgttgttgagaagaaccctcaacgtggcttacaagattgaatcagtttggatccgattacaagagataaaacattgtttcatgtgagaaacaaactctagacttatctctaagcctatgcaaatctaaaccatattatatctctaataaacacctcgtccgagaactcgtcaggtggctcaatcttctcctccgcctccgacgacatgcccgccatcatcgccccccgagacgcttgatctctctgctaacttgaatgcaaaaaatcgtgcgctggatcaagaactgaagatctggcagatcgatgagaaaccccaactccttgcctgtcacgcccagaaattcccgaatagaattccaagcagaatgtgcattaaaatccccgtccaggaccggccggggtacacaaacgacaatgttaacattcagatccatgtcttacaaacatcataaaagtcttacataaatacagcggaaaaatgaaagataattggagctaagccttgacttgatctgcagcgggaacacaactccacaggcatcctcgacggcacggacgaagcctactcctcggagaaaccaccatctgacacatactcgtactctggggttggggaaaatagagcaagactgagtactacccactgtactcagcaagtcataccggaataggggtatgatgcagggaattatcaaaggagagctagagtggttcatttgcataaaggttcatttgcattaaagcgagcatttataaacagaagttaaaagaattaaacagtcctgataattaatcaatattattcatccactatccaacgctataccacgttgcgacaggcccaaccatccacctatactatccaatttcattagactaaactagggtgagactaatcacggtgaatctggttgaccgcccataaccgcgggcacggctattcgaatagttttactctgatcagaggtgtacaactgtacccacaagacacagccccacgacacgtttccgtgcgccaacatgccaccacgacataccggaaagaggccgtgacaggacccttcgcataaccccctctaaccaagcacaccacacctcaagtttcacccccactccttgcaaggcagtgggcagtcccctctcatgcttaggtgaatccggaagagacagaggccgtcgtagggcccgccccgctccatcacgcccacccttgcctggatgcgtcagctagaggaaagctacactataagcccagccgttgcccacgctagtttgtggtaagtacgataagttcttccagggcatcccgcgaaccggtccttaactgccatgggtgcgaccagcaaaaccatgcacccacagcccaccatgtgattcattttaattaaccaacaccaaagcagtggcactaatccaacaataccattagaactaacagtctaaacattaataggatttttcccattgtgtactagttgaactaagcatggctaagcaacccctagtccaatctctagtcatgttataacccaagctaacaaaggaacatggtacaacaatagcatggctataacaataggtaaacaccccatagtaacattataaaacgatgcagtatttgaagaaaaataatagagcatttgcaatataggatcaacatgttcaagtgacaagtatgacttgccttgctctgttgttggaggaacctcggcgactatttcgaagtacaccggagcgtcagaagaaccggaatctaagcgacatacaaagcaaacaatacaaacaggctataagactactgaaacagagaacaaaaccatttttaatggatgctacacatttttcttgatttactgagacttgaatgggcttaaacggagcacggatgaattagttatgaattttggaagattcactgtatttattactataacaaaagtccttaaatcatttattgcgcaataaatcccagggctgacgtcatcaggggggcggcgccgacaggcggggcccgcatgtcagtggcgcacgggggccggtctaccgtggaccgggaccacgcgggtggtccaccgccggtccacgggatcgacggcccggatcggcccggggccgatcggacggtgcggcggcggcctggcttggctcggctcggcacaaagccggccggccggccatggcaagggcggcggcgcgcgcgcgtgttgctggcgacggcaaccggcggcgggaggcggcggcgcaaaggcggcggtgcacgaccggggcggctaggagggagagggaggggaatagaggaggagggatgcctcactgagagtggccggcgcggaggagaacgacggcgaacggcgacggcgagccacgggaggacaacggcggcgggcggacgagctccgggaggccctaagagaggaaaagagagagattagggggagggagatggaccacggcgatcagaaaccat

SEQ ID NO: 19696 - DNA, 2180 bp, Oryza sativa
ggaaaaagaaggaaaaaggatttttcctgggattaaaattgcatgtgcttaattttaattggttaaaattatttcaagagctctaaaaattccactaaaaatcttgttagcgtatttcggcatgtaaaactcaagaaaaattccacatgccaattccgattattatttgcattaatttattaaggtttactcttgcttgacacaggtattttcttgagaccatttaaaactccaatttaggcttgggaaagaacttcggggtgtgacattgcctctccaatataaatggcaaaacttcttgttctattcggtcaaaaatctaataacagaaacagagtcagcaactgaagaataaccctcgttctaaccggattctaaacctttgcacacaattctttttcgtaatcggtgtgatctctatcaagattacaagataaactaatctactcctagcttggtgcatggcttgaagatgatcgatcgtgtgacgcaccgcggctcaccgtggtaaactgcaacggcttccaagttccaactaacctcgaaccggaaactgtattttcatattaagagttcttaaaagttatcaactcaaagcccaaccgtcaaagaccgaaaaccaaaaggggagttggttaagcgcgtgccgatttcgagtcgggtccatggggcccacgcaccttcgcgtcgccgactccgtcggcggcggacgcagagcttaattcattttttctcttcaaattcctgggtatgcacttgaacgaatttttcaacaaattttaaatcacatttggaaaacccaacattctactaaaacattaaaaccttggactaaaagtttaaaaagaaacaattctaatatcgaaactttcaactcaaactagaagtttcagcttaaattaaaaaatatatacttaaaaactaaactcaaaatttgaaatttaaatttttcaactgatttttaaaaatctttcatatgttaatttgaaattttcaactcaacttatttatttataattttctagtagaaagttatcaaatgctagaaaggagaaccacacggtgcaggaggggttgcgcgaggaatgaaaaccgttcacggttagcctagggcgttcacgttgcaggatacatagagttatgtggcagcataccatgtagttacatgatgaggttatactataagaacactagctgtaacatcataaaaattaatttaaagcacacaaaaaaaaagaataatttaaacctttttttcccccaaattgcatcatgtatggggatgtttactgtgaagagtgcatatatagcttggaatctatctcggaaaggtcttgtccaggcatcttcgggcaccgcaacatctcgtaaaagggaggtatggaatagtgtgtggaatgccaaagtgaagggcactgtaaagattttcatttggaagctggtctaggacaaattgccaacgtgagagaataaagagagaagaaaaatcgaaaggcaagggatgtacccactctgtggagcaaaagaaaagaatagctaccatgcaacagttgaatgtacaaaagctaaggtgctaagggaggcttttagagcagtctggcaccttcgtgaagaggacaaatttgcatagacaggaccggattggttactgatattgttggatgctgtaaataaagaggaaagagtgcacattatgtatatgctatgacgggcttggtacctacgaaacgagttgattcatggtgatggatgaaggccaatagcagtatcagtgagcttccttgctagctatgaggaggtgctgcttcgcatctgacagcagctggacgacacataaggaaaaaagccaatgtatagcgaagcccagaccgaatctcataaggtggaaaagcaaacaaacaaatgcacggctccacctgaaggctcggctaagatcaatgttgatgctagattcagggcagaaacaagggacgcaagtgtaggagtaataatcagtgattgcagaggtctgatcctacttgatgcatgcaagacgctacaccgatgcagttcagtagcataggcagaagcgctggcgtgcttggaaggcatccgactggcgattgaatgggtgcatatgcctgctattctagaatctgacaacgtggaagttgtggctagcttgacaatgaaaagctcat

SEQ ID NO: 19697 - DNA, 3062 bp, Oryza sativa
tgccggcactatcccggccgtcatctggatcctcatgccgacgaagcagatgacgacgctgagcaccaccgccacggccatggcccgtggcgtcaccagctccctgaattccggcgatggctgcttctcgaacaccgcctccaccgatgtcgctgacatgggatcgccgatcatcgcatccatggcgattaaagctccaggtcaatggaggcaacctcctggagggtttttgggttgtgttgtgatggcacaagtgggtggtctcctgggttggctctcctaggaacaatgcatgggttggtctgaattgggaggtggtgagggaatgtagtgtcgctgtggagcaaaaatagcgtctgtttgttgaaccgatttctctgattctgttccttatttctatattgatgaaacagatgctgctgagggcaacatacctaatgtttacagggtggaaacggttacaatgagtgtccagaaagtagttttaaccatttgctttaagatttgtacgaggtctatcaaaactatgctaggggttaaaatagaatagaaatttgaattagaattagaattgatggatgtgacatgtagaataccaataatttcgcactcttttgcacacacttcaaccattgatcaactcatatatgcttaagaacacatttgttaacgaggtttatagccaaagcataaatcttgacactctaattatggatgctactcctcaatcaatagtacacctaactgctataggcctatgacaatgctgccatcctcctcgtgagtgcctacattgcattttcgtcaccatgcatagttacattgtggtgtcctctatatttaaagagttgatacgttacaagagtcaaaagctaaccctaccctatcacctgtattaatacaacactttgcatagaaaaatatgctgagaaactcctgttgagtaccacaagcttttaagattttgtactgcattatgttagaaaacagtgaacatttgtggaatagtagtataattcatatttcaactacaactttattctgtggcacttaactataacaagcatctcttacatgttgcaaccaaagctggctcacatgtctacttatgtcaattacatgacatatctatatgtaaaatacgatacgtgcatcattatttacaatgatcaataatgattcatagaccacttaatttccaccgagatgtggtaaccaattaaggagtactaacagtcaatcttaatttgatgagtgcatatattaacttgatctcaacatcgatcggtcatgtcttgggtactgttcctcccgagctgttcaggaatgagtccaccacctcaacctcttgtccactgggcaagaacttcatgcacatcggcggtagcaccttgaacatgttgagcaacgccgatggcagcgtgaagagcccctcgccgcagatcaagcccgctgcgacggcggccgacaggatctcggcgctcatggtgtcgatcttcttccagaggagcagcagcaggccgcccaggcacatgtcgagggtgaagtacgacccggcgaagaacggcagcgcgatcaccgtcatgctcgggatgtagaggtggagcctccaccccttgagctgcgagaccagcaccagggcgtcgatggcgatggtcaccaggacggcgatgacgcagagctcgacgcagtactttgggaggcccttcacccctcccatgccgatgatgcagatggcgcggtacagcccggcgtaggggcacgggtagacggagtccttggaccccagcggcgccccgggcttcgccgccttctcgaacgcgcggaagatgcaggggctgaccacggagctgagcgccacgccgaacacctgcccggcgatcatggcgcgcggcgacgtcagcgtcatgtgcgccgacttgaggtcctgcatcgcctgcgacgagacgtgcagcgacgccatggtgatcccgctgacgaggaggctggcgacgatggcgcccggcctggcgatccacgccgcgaagatgaagggggagaacttggcgtaggtgttcgacaccgaccagtcggtgagccccgtcgcgtaggtgttgcagaagccgaccacgggtatggcgaggtagagcacgccgacgtggtagtacttgatctggtcgaacatggccggcatcgcgaccatgctgatggccgtccatgcgacgtaggccgccaccggcacgaacattgggatcttgctggacaagaacatctcgatccttttgcgttcgtcgtagttcatgctagggttcttgctgatgtagctggccagccctgacgtttgctgttgctgttgccttatatggtagaagttaattgcagctgaagtcacgagtatcagaaagtttatcaggccgtcagtgacgatcagtgtcacgctgatgaacacctgccatgtaagtttatatccattggagaaaaaaaaacaagaagtttagaatagttcgtgtcactagtgaaaaactaccaaaattaatatggctttcatccaccgcatgcatatatctggaaattatatcagaaggtttgttcaagttataaattggatacatggatcatgacaaaaattctaatatactaggtattactatacttgataccttcatatgcatttcaattagtactactcccccgtttcataatgtaagtttttctagcattgcgcatattcatatagatatgagcaatgctagaaagacttacattatgaaacggaggaagtagctattaatttgggggacaaaattctttccgtgcattggttagtacgtaccacaaaatgagtgagataaaatcttattagatgatccaacaattgatatgatcttattatttacgtatatatatctttattgtttctctgagttcctcagttttgaggcttggagtttaagaactctcgtaactttcggctatctgtggataaagaggtaggtcggatttttatccattatattaagaaaagaaatgtaccttgtatccattgagtccgtctaagtttgaagggctagggctgcaggaat

SEQ ID NO: 19698 - DNA, 977 bp, Oryza sativa
tttgtgttgattaatgatgattgcttgattggggttcgctgctacagtaaatcgggttttgctagaggatttggaagaacataggacgagtgtgattcttgatcactccactttgttgttgattatagttcttgtctgaatttcttgtcatataagttctgcaggaattttgttctatccagtcacttcttaattcagttcttgtttacctccttactatccatgaattctcatacccagttagaatttatatatgttgtttctgaatttatatatgcaaacattgtgctttgcagtttcttgatagcataacacgaggccaatcgatacgccatgttttctatgctcctgaaaattgcaatcagaaacaagcgtcatttgtatcagtagtaacatgcttattgtcatcttagcagatgcaattgacaaacctgaaggatcttttgtgatgttcctgacattaaaatgctaaggataggcttttctgttactcttctgactacatagcattccctgataagaactcttgttgaattttcacagagcaaggaagtgaagaacaaggaaagaaagatatggaagccttaaccaaagtcatggacaaggtcaaggaagtgaagagtaacccagaagtggtggagaagctggacaaggtcaaggaagacatcagcagccttgctcatgctttacatctgggaaaacatggtaaatctttcttttgagatgtcttatttcctaggataggataatcatatttctgacaactatatggttgcatgataagtaggcatttcattatttacgcgtattcccgaaaaaggaagcacatctcattgtcacaaatagaactatagaagcacttgcattgtgtatagtccgaacatccaaaacctgaatattaacttttcttacatcttttcccataattttacacatgatcaaaagataaggaacatgaatctgaggagaaggcaaag

SEQ ID NO: 19699 - DNA, 13030 bp, Oryza sativa
tttctacaaaggagatagttgatgtgctcaagaaaatgcttgtggataaggcccagggccagatggtttcaatggatgtttttataaatcttgttgggagattattgcacaagatttctacagactttgtgctgacttttggggtggctctgttgatcttgctgccatcaactattcttacatcaccctggttccaaagatgtctgcgcctcaaactcctaatgattataggcctatctctttgatgaacttttcggtgaaaattctttgcaaaattttcgctgataggttgcaggtgttgatgttaagattggtgcattagaaccagtatggtttcataaaaggcaaatcgatctaggactgtttagcttgggcctttgaatacattcatcaatgtaagcattcaaaaagggaaatagtgctgttgaagcttgattttgaaaaggcctttgacacagttgagtatgaggaaatcctcaatgtgatggctgcaatgggtttcccatcccaatggaatgcctggatgaaagtgatcttctccttagcttcttcggctgttcttcttaatggtgttcctggcaagtttttaaatgcaaacgtggagtcaggcagggggttcccttatctcccctcttgcttgctttgggagcagatctgttgcaatccataatcaacaaggcacatcaaagggggatcttgtccatgcctatcccgatccctggtgatgataacttccccgtgattcagtatgcagatgacaccctcatctttatgcaggcctcggcccctcaacttcatgctcttaaagccttgttgaactcttttgctctctcttcaggcttgaaggttaattattccaagtcttgcatgattccattgaaactcacagaggataaagctcagatgtttgcttaaacttttggatgttctattggaactctgccatttacttacttggggctgcctcttggaaccaccaagccaaaagttatagactttgctccacttacagatagaattgagagaagactgacgctagttcagcttttctatcttatggtgatagactcacattggtgaattcggtcctctcattgctcccaacttattacatgtgttctctgtcattgccagtctcggtcattgattccatagatagagctagacgtcattgtctttggaggggaaatgaccttaattcatccaagaaatctcttgctgcttggtccaaagtttgtaggccaaaagacaaaggtggtctagaagttattgacctcaaagttcaaaaatagggctcttcttatgaagcatctgcataaattttataacagagcaaacattccttgggtcaacttgatctggttatcttattatggcaatgtgataccccaggttgctagaagctgtggctccttttggtgaaaaaaatggatataaaggatggttcaaagtgaaattttggtaataaaacatagcccaaagtggaatgaactcttttttttaaatagatctatagtttagaggcacatcaacttctcaaccacaccctagctagagtacacaatttggaatttacattgtgtaaccttgaatatattttatcatattatataatataattatgcaaaattaaatgtctgcttttaaagatcaatgcttttgatattttttatcggctttcgatcgatatcgacacgtttatgtccgtataatccgtttccgggtttccgatattttcaatatttttttgaaaggatcgatattttcaatattgtttccatctccaactttaccattttccaaaaaaaatatagttatggagatggttaagacgtttcacgaccgttttcacccctattctaaaaaggcaaattttggtataggacactgcttatatgtggttttagccttagcacactgcctaaactcacttttagggggaaacactccataaatgtgataatttgccagtggataccgcgccgattaaaataataatttccggttaaagaggagagagaaatcgtgtgaaatgtcaaaaatgccccttgggctcacatttcagctctatctcctatatctcttctcctcttcctgcccgcatgtcgcttcccgccggccgccggccatgcccgcacagacggcggcggaggcagcggcaagcagcagcagcaccccggccctccggcggcctaccagctacagtgcacggtggagcagctgcagccgctccttctccccgctgcctcgccacccccaccccctgcccctgcacttcctcccgccgtcggtcgacgcgagcgagccgtagctcccgcaccgcatccccaacgtctacgccgagccactcattgccaccgccgtagccgccgccgcccttctctcatcccaatcaccgaatcacaacaccgctgcggggcggtggctggcgcagcatgcaggccggcgaggcgatggctcgcagatccggcggcgcggagcggggcggtggcggatgacgacgacgatggtgacgagttcgaggaggaggaggacgcgtgaagctcatgcgcagcttctgccctcgccgcccgtgcaccgcttctcccccgccgttcggccccaaccgcaccgtcgcatccatggcagatgctgggtggcacaagattgtggcaacaacggtccctcctgccgtgcgatcacccgccgccggcgctctactccgcctgccacacgctcggccgacatcgccgctccgcctgcttcagccgccagctccgctccgccacagccgacgccctgctccactctgccggccgccatccttgccatctcctccgccgcgacgagctcaagccccggcgaccgacaccgccccatgcgcctcagagagagaacatatatagagagagagaggagaagagagacaggagatagagctgacatatgtgtccaagggcatttttgatatttcacgcgatttctctctcatcttcaaccagaaattattattttaattgacgcggtgtccactggcaaattaccacgtttatagagtgttttcccccaaaagtgagtttgggcagtgtcgtaggactaaaaccatacataagcagtattctgtagcaaaaattgccttctaaaaaatatcaaataaaataagttgttaactatagtaatcaagatctatcatttttttaattttgtagttgccaaaaaaaaaccaaaaagtattctgaattttaataagcatctatacactctgcgcacccaagttgcaagccaaactatttttttcatgaaatacgcacgcatgtgccgtgtataagatttgaacttgagacttcttagtctacacacatcatcactatcaactactatcagatacttgtgatgaggctcctctaacgtaccatagagggacatacgtttctgatgtgtgggtccatgaggttggtcccaccggttagggactcatatccctcggattttaagtcagaggagctgtgttttaaatacttattgtttagaattaagatgctattattttaacttcatatctcaaaatcttattgtgcttatttagtcacctaaataatcttgagtaaagaagtcatcaattacaaagttgatgtagctagccagagtttttgaacatgtaaaacaaggattcagaatatatatatctccttgcgaacccagccgcggccgcacggccgcacagagaggttattcgattacgcaaacatatcgatcttatcctcaaagatgatcttcccaagtcaaacgactcgatctcatgaaaacaaccagcaagactcgacccataatttttacatatatactccgtattactgtaattaacttgctgcatgccccctgcatgagaagccgataatatttttgtaaaagccatagggcaccgatcgatcagccgaggggcatgaaatttcttgcgcgaatcgtttactctagttattttaggtcctcgaccgagaacaaacgcgttgtcttgtaacatagaagaaattgacattggcacgccacttctcaaaacttgcatgcatgctactgtgcctatatatatggcccagcaaagcgaaagcaataccattaaaccaaaacactagctagcaacagcatagcactactgatgcatatataatagctaatcaaacactagtccgaagacgtagtatattctctccactgccaaatgcaacccctcctcctcctcttcctctctccggtggtcgtcctctcgtcgtcggcatggacggcccgtggtgaagatgaggcggtggcagtggcctcgccggaggtgaacccgctatactacaactgcagcctgtccggtggccgctacggtcaaaacaccacgtacgaggacaacctcaaggcgctggccgcgcggctcgtcggtgtggccagggtctccaacttcgcctcgcacaccgtcggcagcgcgccggacgcggcgtacggcatcgcgctctgccgcggcgactacaccggcgacgagtgcgccaacggcctccgcaaggcgttcgagaatgccgtcgagaaccgcctcttctgcgacaggttcagggacgccacgatctactacgaccagtacatgctccggttctccggcgaggacttccgggccaacctaacgaacgcgccggcgtgggtcgcgtggaacatgaacaacgtgaccggcgccggtggcgccgccaagttcggcggccgcgtcatggagctgatcaacaagaccgctgactacgcggcgtggcactcctccctgcagcgcgggtactgttgaatttataagcatataataatttaatttattccataaataaatcatgatattgtagatgtaaactagtataaatccatcattagatctacatatgtatactaggcagtaaagcatcaacagatcaaatatgcgtaatatattgaacacgtatcgagggtaccggaagactagttgctcagcaggaattactcacggttgcaggcgttgacgacggcgcgtagcacgtgagcaaagaggaagatgagtcgtcgtgaacgaacagggagtattcgtgcgaagcgcttcccaaaaaacttattgccgccttctccttgtgcaggatgtcgaaggtagagggtctcggcgcgcagcacgcgagtgaaaagaaagacgagtcgtcgtgaacgaataaggagcagttgcgtgaagcgcttcccaaaaaccttatttccgccttctcccagcggaggacatcgaagctctcccgatcgccgatgcacgccagtaagcgggatggagtagactacgagcgacagcgcgacacataggatgaggacgtcgaagctctcccgattgccggtgcacgccagcgagctggatggagtagactacaagaaacggcgcagtgcagaggaggaggcaaaccgccttctcccaatcgacggcgtagtacagaggaggcaaaccgccttctcccggtgcaggacgttattaagctggatggagtagactacgagcgacgacacagtatagaggaggaggccaaccgccttctcccggtgtaggacgttattatagagaggcctgctctcccgatcgccggtgcatgccggcgagctggatggagtagactacgagcgacgacgtagtacagaggaggaggcaaactgccttgagtgacgatgcagaggaggaggcaaaccgtcttctcccggtgcaggacgttattatagagaggagacctgctctcccgatcgccggtgcacgccggcgagctggatggagtagactacgagcgacggcgcagtacagaggaggaggcaaaccaccttctcccggtgcagcacgttattatagagatatcaggacagtgcagcacgttattatagagatatcaggacgccaaccggactccacgacggcgcagaggcaaaccgccttctcccggtgcaggacgttattatagagaggagacctgctctcctgatcgccggtacacactggcgagctggatggagtagactacgagcgacgacgcagtacagaggaggaggcaaaccaccttctcccgctgcagcatgttattatagagatatcaggacgccaaccgaactccacgacggcgcagaggaggaggcaaactgccttctcccggtgcagcacgttgttatagagatatcaggacgcctgagggatggcgcagaggagggtgcagtattatagagatatcaggacaccaaccgggcaatggtttcacgtcgtgcgcgcgccgccatgccatgccaggtgagcgagcgtgcgtgttccccctcttctctccacctcacacgcttcaagtgagtaggagggcatcatccccctttaaggaggtccccctctgctagaataagcaaatgtggtaactcccccatgcatgacatctaataaaggtggccttttgtgatttttcaaagatttaatttttgagtaggctaaaggccatctattaattcctacaggtacgcgacgggggaggccggttttggggagctggacgtgggtgaaaccagcgtcggcatggtggagcagcagtgcagcagtagccccgtcatgtacgcgctggtgcagtgcacgcctgacctcttgccggccgactgccggagctgcctggccggcatcgcctcgcagatgcccaggtggttcagtagcaacaccagttaccgcctcggcgggaggattctcggtgtccggtgcaacctgaggtacgaggtcgatcgcttcttcctagaaagcaacgagaccatcaagattcatatgccaaaaccgaaaggtactactacgcgcgtacgcgcgcccgccctttctatgcttgtctaatggcctctttttttttaaaaaaaaaactgccacaagtttttttttaatctaacttatagtataattgtaatataatttcactgtacctataatataatataatataacttgcatataagtattaaaataatatatttaactttatatctaacttatatagagattacaatgtggttacagtacaataacaacattttaattacaatgtaactatagtgtaattacattgtagttacactacaactataatatatatatatagttacatttgaaagtttttttaccaaaaatacttgcgacaattttttagcaattcttttttttaaacgcagtacaaacacataagctcgatcataacacgcgcataatcactcctataaacacacccatatgcaataacggagccaaaaaattctcaaatgtagggctcaatctatccatttattctatactaaaagtccattaaatttactacaaacactcataaatcactatgtgacgctcttacaaacggtcctacgccgccacgagacgctctaataaattagagaaaaccttataaatttcgagaaaaaaaaagaaaacccttgatttttatttaaatgaatgaacccattattttaaagcattagattacatttattaaaaaaatgcatcccacctaacctctccggaataaaaaaaaatcccatgtgatagtatgtataaatacgtaactacttactactcacggaaaaaacaacaaaaaaaatacgtgattacgattgaaaaaaagaagtattagtcctttcacctaattgctacgagagaaacatattcatacgcacttcaacaaaaaaaaaaactgaaaaagaatctcacgtgtacatataaatatgtactactattcacctaattgagaaaaaaacaaaaaaaaaatctcccgtgcacgtaaatagtacacaccgtcctaccctcctcaaatctttatacgtacaagaaaacatccaccgtataaaagtataaacttatctaaattagttgtatataggaaaagtattacaactacatttatattaactatcttataattatactgtctttctctcttttttaataattaatagtggtaactatactaatttatgaaccttggcactcctctttcccgtagaaaatttatagatatattaattatattttgattaaacaaatatcacatgaaaccaaattgtatcctcttcatgttattctcatccaaatagtcttataagtagtaaaaaaaaagtaaatttgacaacataggttattctatcattcgttaccccacaaacatttataactaatataactaatacaagagaaatatcacaacatgtattagctcatatgtgtctgaaggattagtgctcgagcaaatacttttttcacgtggttctcgccactaagtctgcagtattagattttttaagtggtagattgtaattaatacaagtaatgtgataatgtgattgaataaagtgccaaatttcccttaaaatcatatcaactgctatgttttgatttagaaaatactagtatgtttagtatcttattctagccctttaatttatatgttgtccaaatagctataaacaagttgtagattatgcaatcatacatatatttcctcagagatatacatgactgagttataataattgaatagtaatagtccatgctaacaaatatttcgaaacgaggttgtatttgacgacatatatcattccatcacatatatttccccacaaaatccatgaacatagctaagttagatctatagcatacagaagaaatatcaatacccacatcgactcatttgttcctgagagattgttggttgagcgaatattgttccacatagttctcggtaccatctaggctgattgattatttaggcaaattattggggatgactcccggtcgggcgcccgatcgggaaggggtaaaatcgggcgctgacgtcagcgttcgatttacgtgcaaaattattttaaactgatttatctcttaaattatttatccaaatcatgatctgattgcaccattaaattcgttgcaattaaatcttcaaaacaagaccacacatggatatattctgacaaaaattttttttagcttattattgacttatttttaaatgttgcatgatgttccaccagatatatcggaattgtttcactaagtagataaaaaatgtttcactcgtttaaatcgggtgttgtttcaccttatataaaaacaatgtttcagcaaatagcgaaagaatgtttcagttcactgcaacattagatctatacatatacatagtgaaacattgtgagtacactagatgaaacatttttcggtagaagaaaaaataaaccaaattcctttaatagaggtttccaaaatatgtaggtttttttgttgcaatggaatgtttcgttcatagcaacattagatctatatatagtgaaacattgtgagtacaataggtgaaacattttgggtggaacaaaaaatgaaccaaattctcttaatagagagtttccaaaatatgtgggttttttgttgtaaaagagtattttaattcactgcaacattagatctataaatagtgaaacattataaatacactaggtgaaacatcttttatagaaaaaaggggagcagaagtgggtaggcccaagtaagcacgtgggggagggggcgcggggggagcgcccgatccggctccccctgcgccgggcgaccggcaaagagcatttccgaaattattgggcaatatggttgaataaatttaagtaccgtccgtacacttttaactcttttactcttttaattagacttttctttatttgggccgttggggtctattaggctcatccacgctaatgaattaatggcttattttcattccgttaatgatcaagtagtttaaaccaatatgaggccttcatccaggtgaccctatgtccccttcttcgttgacaaaccttatggtattatattcatcctttgagttcttcaatttgtgatctacatataaaaactacaatttgtaagagctaaaagggtgaaaacacgtctcaaaaaaatgtttcaatgtacatggatgaatataacatactatataaatatataaatgtaggatcgaaacacaagaactaagccaaccagaggagggtgaatggtaggtatacccaaaaaccgaaaacttttagcggaaataaaagttaccctcaaattcgacggatcgtggtctaaccgaagttgtcctgtcagtctgatcgcctggttgccatcggtttgaccgagattagatctccggtctgaccgccgagatcagctgccgctcgctgtcgccgccgccagtctgaccgcccgtatgccgccggtctgaccgccagtgagtcgtcggttagaccgctgaaacccggtgaaacacaaatcgaagaactcttaaagtagatgacaactttattgattctctctgtgtttacaaagtgcaacaacagcactccttacaaaatctcgactaaactcgaaaccctaactaaactagcaactcaattgctcttaaaagcgataccaggaagcctcacgctccccctctatttatacatgaggtaggcagcctaaagccacgaaccaaactcatactagaagtcctaatccccataggaaaccctctagtacaagaaacaaactttatataaccaatcataccaaatttggactccttccaaattcgactccacatcccatacgcacacaatacctccatcgtatgccatatggaatcttcaccaaccacgtgcatcaactctagcctaagtatcccgcatgatatctgaccaccacggacatcgtcttaccaccaagccgattcccggtccatcaccgcaaatactctctcgaggcatcgagtcacctacacatgaaacaaacaaagaaaccatattccgagaccaagctatccccaacttgactcattgttagcaaacaacagtattacatacgtatagtatccatctagaagccataaccatgaaacaatcacggatatccaaagaaacaacccgaaaccgaaaccgacacagtgtcggccggtcagaccgcgggccggcctgtctgaccgctcaacacaagccggtctgaccagcaaccgcggcctggtctgaccggtcccgacaaaacaacaaaccctgttcaaattatatccaaaatcactttgacagtattctccaaatatcaaaaccaataatcacagatgccaattgttcatcacagaataagaaccaaaacacacattgatcttacaataaattacttcccccattttatattataggtcattttgactattattctagtcaaatttctttagatttgaacaaatttatagaaaaattaatagaaaaacatttacaacaaataatatatttgttttgtagtgaaaatattactatatttattttataaaactgggaaaacttgactgggaaaaaagttaaaattgcttgtaatataaaatagagagggtgattaatttgcacctacatgctataattctatcacattgcttgcatttgcaggttcattgagcgcagggaagatcgtcggaatcgtccttggagtagtagccttcgttattctaattttctccttgattatacttgcattgctcaaaagactaagagaaggtgtgattaagttgttgcgatggccttaattataataccgatctaattcttaagcaggttctgattttttacgtttaattaatatttccctgtgatttcgacctgtacatgtagtaattcaagagtcagaacggcaaaagaaactagcaaaacttgagactgagatcatagacgagattggaccgctcttttcacgctatactttacaacagataaaagaagctacacgtgatttctcaaatgaaatcggaaaaggaggttttggccatgtttacaaggtaatttgattagatgtaacgacatgtcttatctataaacatccaattgacctattatatactcccttttctgaatcttttgcagtaaatagctagcactgatccctccattcgacaatatgttcttttttacccgaatccactcaacaatatttgacattgggtggcattaagtttatttagtactcccagcatcaaatattgtcataatatcataaacttaccatattttatatacttactgtatataacttgtgaacaaagttgtataatttgaaggtgtgaaaagaattatgttaaattaatgttatatatttatatgacagcagggagtacaaattatcatgtggtcaaatgctaaactgtccggatatagtctcatctatactcttcttaggctgtgtttagtttctgaaattggggagaagtttgtggaaagttggtagtttgaaaaaaaaagttgagaatttatgtgtgtaggaaagttttggatatgatgtgatgtgatggaaagttgggagttaggggaaagtttggtgtgaactaaacacacccttaaaataaggcaatggtggtggcctcaccaagtatagtatttttttatttaccatctacccatcatgctttctactagctacccatgtacttttatgttataaaataacacatctacatatatatgattctatcatatttcacctgtacaatataacatctataggtacaaaattgtccaaaaaacctcactattaatttgttttaatccgtagtaaagcacgggcatttggctagcatgggtaaatagaatacgcttacgacgcagatgactagtaactgtgctaatcgcaaggatctgattattattgtttagacttaaatttggactgatgtactaaatttatgtgttttgccatcatatatttttagggtaaactaccaagcggaactgatgtagcagtaaaaagactcgcggtatcttcatctggccaaggttttgaccaatttatgaacgagattaaacttatggcaactcttcaacacaggaacctagttaggcttctaggtttctgcatccaaaacgaagaaaacatactcatctatgagtacatggagaacggaagcttggatgatgtgttttctggtatatatatcccaagttcccaacccttatattacgaaaagaaaaatccttataagatcatgtg

SEQ ID NO: 19700 - DNA, 6438 bp, Oryza sativa
agttttagacttggtacggatgctcgtatttaaggccaatttattgtgtttctcaaaaggaaaataatttagtctcgttggtacgcacgatagaaaaaacacacaagaacagaaaaaacgcaagaatgaaagtagtatgtgttttttttttcaattctacagggatcataaacatagagaagttgaagagcagcctttgattgaaaccaagataaaaaaaaattgaacaaacaaagttcccaaagagatatgatctcttgcttcttttttacatggaattggaccataggaatacaatcacatgaatatttcctaccttttcttaagaaccaaaggagcatataggaaaaacaatccttagaaaattaaatctcaaaaaatactttgccaatcctccatttcaaagggcccttgaagtttttcctctacaaagaaagtcaacaaagatatatttgggagcctatttggtcacagtcatcaatagtaggcttcaggacttttgaaaacgataaattctagtactgaacagcatcttacgcacgcagatacctggaattggggcgcaggattggaatttcagaaatatcatgcaatcatgctctaatgatcaaatgcaactagaacaagttaatacttgaaaatcctcatgatattcaagtatatcttgatatcccccctttggaaaagtcaaatacagctcaacatcatctcctcgctgcagtgtttctattcaagaagtaaaagggtcaactactgaaaaagaaagcaaggaaaaggtaagaaacttgcaaacttggcgtccatttctcctgcgcgtccaagattttcagctggcacaatagaaattgacctgcaagaattggccttttctcctttttgttatatgagttcattcataatttctcatcttgaacttcagtgcaacccattgtgttagtttgagactaaaatttatattcacgcaaagatgctgaaaatttgttgtgttagtattggcgaactggcgctctcattcatacagcatcatggcatattggcatgcatagtttgaacacaatatttacttcacagacgaatctgagcaaaataatctctttaatttcaaaaaaatccagtcacattctgtacttgaaagtttgcgaatccaggctatacagctcgttgtttacaccgtgccctggattcacctcaggtcaaagaggatgaacatactaaagaatggcagcacacttatgaacaaacaaaacaaacgacaaaaatggtgtcatctctgatctaagctacaactaactaaaaatttttgctgttatagcttccataacagcagtattgatatcatgagaccgctgcatgaacaatgccatggcatgatcacttgattcacttcccaagctttgggagtgtgagagacactgacggtgtctgaaaccccatgaactgatcccttggtgacctcctgatctccgggctcgggatcgggagcttgcaaccggtaggcgtcgggagacccatgtagtgcagcctaggtgacagcctgatcttcgggcttggccgaggagacggtatcggcagcctgtttgtagtaggagagggcaccactcttggtgaaagattgacatgctcaagagccatgctctgtagatcagccgggtagtcccggacacagccaatgcgagcaccattcgcggttgcccatttgaaggatgggcggctggccatgatcggtgccaccttggtgtcctcgctgttttcgacaaccgcttccttcactatgtctacctcaggcagctcaatttgtgagctgtccatgatctcatcatgtgtgggttcagtaggcttctcagcttcctctggtttctcctctgtcttcttgaatgacgggaattcatcgtcatcgaccgaacatctctgcaaaatcgcattggaaatgtttcatcagatatcatccctgaagaccttttgttttgagacaagcaaaagttgtttggtgctgaatttaccttgacatcggcaagatcaacactgttctcctccaagaagctgatgaactctctgaagttctcttctgttgggaggtagtgaccgctgtatggccatatcgcctgaagaacaccatctttggcaaccaatcttccagcagccgttgtagctgccccagctaggaaacttgagtgctgaaatttacccttcttcttctgcacagaggattaaattaaacacagttagaatcgattcatcgtaacacaagaatgcgctatgcagaacccgcaaaataaaacaaaacggatactacattccaattattacctgtccaacatacaatgatcttgttgtgctcaacacaaatatccacttggaatcttcagtggtgttcacaagaactccactcttcctgtacatcagcttcccaccctccacaacaacttcaaaagcttccctctcgttctgaaacagaaacaatatattcagatttgtcaggcaactgcaaaaggtttcagattcggagatcttcagagaaggaaaaggatgctgaaggcacgtactggtccaaggtacatgatcagctgtgaataaagcttgcttctcgggcacttttggtgatgcatgtctctcccagctcctacatccagcctgaaaaacccaaagaaaacaacattaacctctgactacaaccaatgtgaacctttgtcagatgaactgaacattagtttcagatgtctactactcctaactacttaccagtaaaagaatggctcagtgctcgagctcgcagaccagatgtcgtagtacagatgcaagttgtggccgtagcggtggcgcgggtcgatctgaagtagccgcaaaaaagattttgagcagattagtgatgagttcttcatgatttcaaacaagagcaaagaggtgagatcgataattccaggaagaggggcttacagcttcgagccagtgctggagcgcgagcttctgggctttctcgttcttggagaggcccttgccgaccttggcgatgcgcttgccggccctggaccagcgggacgccgcggtctcctgcttggcctcgtcgaagaaggagatggacttgatgtttaggcaggcggagtcgtaggccttccaccacagctcctccacgacaatggcgcagtcggcgaggttccgccgggtgcggtgccccttgaacagcttctgcaccttggtcgccgcctggtccagctccgaccgcggcttcggcgagatgaactcgatcagcgcggcctgcgccggcgacgtcgcggcgtcgccctgcttggctttggggctctgctgcagcagcaggatccccggccgcgcgccgttgatgcaccggctggccgcctcatcgtgcggcggcggagcggcgacggcggcctcctcggcggcagtgggctcccagttcttgaagctgagagacctctcgaggacgccggcgccggtggccatgggcttggaggaggaggggagcttcctgcaggcgaggagcctggtggaggagggcgacctcaccggcggcgagcaggcatccctggggctgtgtggcttcggggaggagaggaggaagcttctctctgtgttgagtggccgcagagtcatcggcttctccttgaagaagacgaagacgacgtctacttgttgttcccttcccaactgctctgcaaaatcatggaccaaaaataagataagctttggaagttggaacgaaatccatctcagaatcagatttgtactggcagatagcaaccatttggttgaactgactagatatcaatatatatataaaaaccgatttttattcatggggagtcaacaggtagacggtagaccattggtggcctatcccaagaaaacattttgttttccttgaaacaattatcgagaggaagtaaaaacggcaggcctaatttgaaccttgatgcagagagttgaagaagaagaagaagaagaagaagaagaagaagaagaagaaagaagaagggagcaacgagctactgctgtactagtgcataccggctgagctcggcggcggcgatgaatagaggaagatgatgaaggagaaggcggtgagcttgttgggtgaggaatggagctgggcagttggtgattgggaggcactgtggttggctcgcccatatataggaggaggaaggatagatggatggatggatggatggatggatggatggatcactcggttgttgtgcggcgactaccagtgatgactgactgcatcagcgtaggagcaggggcgagggagagcacaagtccaaaatggggaggcaagagtggggaaggaaggagacggactgaccggtcgtcgctcgcgcgcgcggaggggagcttgacgagacgatgcttccttccgcgtatacgtcgacgcggctggctggccatgcctatgcctatgcctcggttttcctgtctcgctctcgcgcggtttcgtttgtacccttccggcgaggtgacgactgacgactaaaattttcctttcacgagttttcttttcttttcgcctcttcttttctttctctttttttttttgtttaaaggagaattgaattgcaattcggtccttctcgtgtcaccattaatcaattattactattacgcaacagactcactgggcgagctagtacagctagggggtgcccaggaacccattaaaaatttttttacctataatttatctattttcaccatatatacaccccatcagtataaatttaggcatccgtatcaagctaaatttgattcaaaccagagtaaaacaaacgagtggaaccctcctttattttattctagctccgccccagttttaacaaatctcttcgttcttcttctgtcgctaaatgtagttgtgtttatattcatagaaaatgtaactatatttaaaactgaggattgtatagtaccttagtaaaagggtttttgaaaatattaattatatactttgaacaagccgatctcaagcgagcttcactgttggctcgagctcaacaaaaactcgagcaatctcaaacggagcatgcgtaacctctgagctttcacgcgtgttcggctcgagcttgattattgagctggccttgtaagttgtaatcagtgtaacacaagaacaaggataaggacatctcttgcaaaaactggataatctcattgacaaaagagaagaacaagaataacatgctaaaacaaaggatgatgtcaacacatgttaatttatcatgtggatacatataaatgacatatttcatccactaattaattaaataaaaatttatatgtattctggcttgtttggagctcaagctgccgtgagcctcaagctcttttttacaccctagtagtattatgtaactctatttgtccagtagctactagcaccatatacacttctcattaaaagagagagagagagagagagagagagagacagtcctaactatgaaagctaggatttgatttttattttttgacgaagagagcgttttggaatatactacgtgtaaagagggtcagtatgcaataagggtatctaagcagggtcctgagtgaaacaaatgctctttctttaattagatatatccgtactaaaggacaggaaggcagggacaattggagcagacagggacaaataaacgattcatttgcctttactaaacgcggtagaattttctatagttactcctacctcttgttttctaccgcctgatgtgcttgctgctgccgctgactcccttcttccacttgtggtagatggcttctggtaaacgagttgatactactactactgctgcggctgcatggaaaagctctaatactgtttgctggggctcagtaattccaaactgtacttgggtgtgtttaattcatgttaaaattggaagtttggttgaaattgaaacgatgttataaaaaaattagaagtttatgtgtgtaggaaagttttgatgcgatgaaaaagttgaaagtttgaagaaaaagtttgtaactaaacaaggccgaagtgccttgtaaattcaggattttgcttttcatgcgcttttttaaaattcctgtggtaggttttggtttttaaggttcaatgggaaaattgttttgcttggatttattttcgtaaaagctttcaaattcaagataagccatacatgcaaggacttgtggaacgaaacgaaaacaatggcacctattagttgtaatcattatacactagatgtgtcttttgatttcacaaattgttggtcaaaatccacaaaaattgactcttttaaaattgaaaatacactctataaaaatctaatgcaatgaacaacactagatataatgggctcaaaattcatttgtcaaccaagcaaactcaaaagctcaacaaaaagtcccaagtgctctttgtactaccaaaatccacattcactaaaaaaaatatgtata

SEQ ID NO: 19701 - DNA, 9513 bp, Oryza sativa
tcttgcattcctagactgagtacccgataatttgagaaaattcaccgttgcttgaatcacccgaagaaattaccaccatagcactcgctcttcctcttcagtgacgcagattccatatatccccatcatgcaaaccccgcagattctggatatatcctgtactgccaaacagacacgttgacaccctcaacgattttcccccgcttttcccccgctattgccaaggaccccacgcactgctgtacacctctgcctgagcctccaccttctccgatcaatccattgcgaacgcctaaacctagttctcaattactgttgttaattcacgatcccctttttcggcttagctagataacctgagtctaaattgactctgtcatctcttctgccacccggcctccaacgagttcatcgactctgagttgagaacaactcctcaatcacaccgtaaccagcgacaaacaaaaaaccgcactgttccgtctaccatccgacctcctcgcctttggctcacgtactgtgccatgcctctacttagacggaccaacacagtttcgactaccaattctggcgcttgattggattcggtttccgtgcctgcccagccaccagccaccatgtagttgcctccaagacaacaaaaatattcagatatccctgctttgcattaatggccaccatgattctcatgcatgtgcgcacaccacgtccatgcatagcttcctatgacagcccacaatccaatgctcaagcaatctcatatttttgtcttccttactgctacgtgccattggatggtacttgcacatcttgctcagaacccctgtgtgcagccctcctgcgtgatgcgcataactgctccctcggacaccatccttgtacgagctaccgccgcctccgttgaccagagctggcctgcgttgaatcccgccggcacctacacgacgaccacaccaagccgtgttcctaccactagagttcgtcgaaaacaaaaccgctccgacctccaattgaccgcctgtcaatctagccatgagccgaagccgacaaatcaccatgctgtcttctcagccgccaaacgacccgaatgctatgtctagccatctccatgtcgaacgcagctcatcgaaaggcccgggccatctccatgtcgaacgtagctcatcgaaaagcccgggccacctcgcctggagtgttcgattccaccaacctagaacgccgatcgcgtctagcttcaatcaaccccgagcatgaggccttacatctccctgttgaaagtagctcaccggaaagttcgagccacccgcccgaagtgtccgatccaccgattggatcgccaatcgcttccgccgccatcaacccaagcactatgtctggtcatctccctgttgaaaatagccatcgaacggttcagactgccgcctaaagtgtccgattccaccgatcaaattccgtttatcgccgccgtgctccaccttgcgtctatgtctgtccctagacaccttgtgtagtcgtcacggcgtggagcacctcccttgtacctctaccatggatctcccgcaggctctgataccacttgttataaaaccggccccgaaatcacatcggaaaccaaatgtggaagaaacgccataggagatccaaacacgataacgacactgaggcatgatatttgataacggagttcagccgaagccttcatctccggggcactgattatgggcgctcctccccgatccagcatattacagcgtatccgagttacaacgactcacggccggatgccgctggcagccgctccctctcgctatgctaagtcgccgtgcggttacaacaagcacgcccctttatttatgagagatcctaggatagagtccaactcttactctagtcctacacctagtacaactccaagtcctaaactataaccgactttgtacacatattcgagacaaactctaacaatcaaggcagcgatcttcagcggacaccgctgctaggtggcaacccaacggtggtaggggggcggttaggtgcgagggggaggcgcggacgcggggtagcccgacgcacagggaggggtggcgagcggaggcgcagatgccatgtggagcacggggtagggggtagcggggagaagttttgcatcgacggggattttgtgaggacagggaagaggctgtagccatggcgatggagggagatggaggcatatggtctcgacggcggcggtggatcatgatggaggcaggacaatggagcggtggagatggaggacggcgcggtggagggagacgccggcagtgggtcacgtggaggcagcgtcggacgcggttgccatgattcggcaatatccgcccgcacgaagatggtggacggtgatgcggtggcgaaggggaagagtggagaagcggccaacggcgaccccgcctctccggcatatcatgccagcgtcgcgagcgcacgaggaggcggcgacaaagggtagggcgagcggtgaagagggagaagatggcagcggtggaggccgtcgacggcggcagagacgtagtagaggtgtcgttgggagcagtcggggttagatgcacgttctttttgtttttttttttgcattcttttttccttttttggcgttctttttttttccacgtttctttttttccgtgcgtgacatgcatggtccgccgatggtgtggtttctttgggccggatgacaggtgggtcccacgtgatatgtggatccaagattaaaggattgaagatgaaactcatattttttatattagtacagaagaaatcaaaagaatagcatattaattctaaaaaacaagaatgacatagagatgataaggatgatgggtgtagactaactaggaagtctcgagttcaaatcctatacaacacacagatgcatctttcgtgtagaaaaaagatggtgtggggagttcaaatcctacaaaacacacggatgcgtatttcgtgcaaaaaaaaatggtgtgggttgcaaccaggggcggatccagaacaaaataatagttggggctaaacaaactaggagaaccttcagcccccatatcatatggatctatacaaataatttttagtgagggcttagagcgatctccatggttccagtggtcccagtggccgtagtggggtctcaagacccccacgttaaatccgccactggttgcaacttggatgtgtgagtgtgtatagatgcccactaaaattcaaaatacttttttgttttgttttggagcctaataaaatgaaaatatagaaaaccattttcacaagtagatattaaggcatccacctttgagaattttttaggcgggcggcttaagtcgaatatatgtgaaaatcgatttttatatatgaaccaaccaacctcctataaaaattttggagtttaaactttctaagtaaccagaaattgtaagaactaagagctttaaatcactaccacagaaaatgtcattggtgccggttgagaaccccacaaaggtgccggtttttctaaccaacaccatgaagatgacactgattagaacactgcacctttgaggtatacgatttgcaaaaatcaaagcaacccaaaaaaaacatctaaaaatctaccaaaaaggacaactacacatcagcatcacacaatcaacaactgcacatgggagcccgccggatctggcggaggggaacccgctgtgtaacaccctaaaaattcgacgacaaaagctaaactctaaaaatacggatcttcaaaaactttttaaataaagttgcatcatgccaattttgttcgattattttattgaatttttatttcggagtttataaatcgcgaataatggataattagttaggaataaaccctgaaaagtaaattgactaagtaaataattaaagtacaatttaaaataatatttagtgaggatagaaatgagtaaaatattattacgactatatttgtatcaattaaattgaaaagtgtcggaataagaattaactctaattaaattcaagaaaattatataaaaataaaatatgggtaaaattaatcaaggatggacccattggttggaataacacaaatattgagtgaacttcatttgtacaaaaattaaggtttatagaatcaattttaaataaataaataggcttaaatcgggtaaatagaaaacggcactattcatcggccgctaggtgttcgacgaggtcccctagcctaaccctgccccgctgccgcgccgacaccgcgcccgcgccccacgcctcgcgccgcgcaccgccgctaccgccgtcgccgtcgccgctcgcccgtcacatcgccttgcgccccgtgccgccgctgccgcgctgtcgccatcgccgtcgcgacccgcctcgcgccgcgcgccaccgctgccgccctgtcaccacccgtcccgtcacgcgcgcgtcccatcgcccgccgctgcgccgcgcaccgtcgccgtcgccgtcgccgtcgccgtcgccacgtgccgttgccgtcgccgcctcgagccctacaccgccgtcgccatcgccgtcgcgccgcgccgtcccatcgccgcgcgcgtcccatcgctgcctcgcgccccgcgctgccgcgccgccgtcgcctcaccctccttcaccgccccctctctctcctctctctcacaccctataaaacccccagcccttctcttctcccccacacccattcccgtccatcacctccctttttaccgcggcgccgccgtagtgccgccgtaccgccgccttcatgctgccgcgccgccgttcccgtgccgtcgttcccgtgccgccgcgccgccgttctcgtgccgccgtgccgccactcccgcgccgccgtgcgccaccgtcgctgccgccgtcgtcgccgctgctgccgccggtgagccgccctccgttcccctcgcgtccaccgccgccactgctcgggtgggagagagagccgagagaaagagggagaggaaaagagaggctggcagagagagagaaagaaagagaggaaaagaaaaagagaaaaaaaaggaaattagagggagattagggaagtttagaaaatttaaaataattggaattttataggttaattatagtcatagaattgcaaaatttaatataaattatggattattcttggcaatttctataaggaatcaattcgcgataataatttagatgtagttaataactaaacaaatagatgaattcttatggattattatagattatttttttgggtaatccctataagtaatcaattcacggtagaaattcggatttaattcctagggattttagccgtgtattatatttaatcatctagtcatagactaaattaaatcatataatatttctaggatttcgtccgatatttagctcgcgataaaaatctctaacctattatatggatataatgctcgggtagattaaattaaaaacttatgacaacaaaacatttatacccgcaaaatagtttgaatcgaaattgggtttgccttagttcgcgaatagtaaagttaaaataaaggaatcaactttcgcattcgactttcatttggatttatttggattttgtttgaattctaatcgaattcaaattgttctttcgcacataattatagagaccgagggagccgcggatccgggtgaaggccaagacccgcaagaccttgagcaaggcaagtcatcactattccttgaacatgttgatcccaattgcgaagttgttttgtttacaaataaaattgcatgcaattatgaacatcctacttgtaattatgccatgccttgattattgtttaccccttattccttcgtaaccatgtttacgtatgagtctctagtcaattatgacaattgcttagaaatgctattctagaatcatgcatactcatatttatcaaatgctatatgcttgggcaattacctttgggaaggtaattgagatgcggtatgtggagacatgagcgccacattgccatgatattgatgacatgatttgtgaaaggaaaataaagttaaacaactgttttcgactggggcggctggaggatttgggtggtgtccggaaaaggctagtgccgtccctggtcaattaaggaccgagccatgaagttaagcatgaaacgaccccccgtacaaccgcacttctcgtatgggtatagacctagcggagtagatagctgagcggaggcagtatccatgcgtagtggtcttcttttaggtgtgtgatgtggcagcagtctgctggcagatgcccggttcggatggccaggtgaatggcggatgcccgttccggatggtcagaggctggcttggcaatactacatgaggatacccataagagaacaatcatgatggactgggttcaacgacaagaagcaacgtaggagtgtgtgtttttcccttcccgggagcgccagaactcctctcactgctagaaacgtatgacgcctagagtgcatgaggatgtaaagttcatggagcgggtactgccaatgcaaggttatcaaaaagctttgccgtgacgcgtctcatgtgttgggatgaggctcatgtgttgggcagtcgcggagtgcgggtaaagtgtacatccactgcagtgtgagtaaaccaaatctattcgaatagccgagctcgcggttaatgagcaccgggacatgtattacacttggctagactctaaattctttaacttgagtgggatggaatattgcatgataatttttatgctgatagagccacttcctgagaggcgggaatgtggacgtccttagaaaatcataacgactcaatggcgggaagctatccttgggatcacaatggatggtggacagaaccgtcattgtttattatgaacaatggtattaaaacttgattagtctttgctaggtcttaggcttgtgaaaagaattacaaaacttgctttgcgcaaatgaaccatagccatcctttgaaatcctctatcatgtgcatcattgctgtggtggcttgctgagtacggttggtactcacccttgcaaatataaaatttattagaagcgggagatgaagcttcggaggatccctatgcctactaccaggagggagatgaagacgaaggcgcccagtaggtcttagtacggtcgttgcctgtggcaatggcatgccgctgcttaaattctgctgccttacctatttctgcttttggatgtattccggaccgcttggtccgatgatttaagactatgcctgcaggcttatgatgtaataattcgtactacacattcgtgtatgtgtatttggtatttcagctatgaattcgtatgtaccagactacttgatccagggaaatggtactgtttacacgattgattcctgttataaaaacgggggtccacacgctgctaccgccacctcccgccgtcgcccatgggagcccactgccactgcctcccctcttgccggatctggcggaggggagcccgtcgctgccgctgcctcccccgctggatctggcggaggggagggcaccgcctgccgctgccgcctctcctcccgtcgtcgcccgctactgctgccgccgccgctgcctcccctcgcgccgaatctagtagaggggagggcgccgcccaccactgccgcctctccgcccacctcgctcggctcgtttgatagggtgtcggttttattaaaaaaccggcacctataatataatatattataggtatcggtttttaattaaccgacatctataatatatataatatattaaagataccttttttttaaaaaaaaggcacctagaagaaccgacacctatagtgtattaaaggtgccttttttttcatattttgaagggagaaaagtactatagataccgattttagctattccggcacctataatgccgacttgtatgtgcctttttttaagtagtgaataaatatttaggtacataaacaatctcaaatgtaaaactttcatctacaaagttataggtctcgttgatctctaccgttttgatatagattgtatctccatctaagatctttttttttaactctccatctatgatcttttttttatctctccatctaagatcttttgaaactcacaacactcggcgaggccagtgttgagctgtgcccgtgccctggccacgccgcttcacggccatccgatcagccctggccgatccggaccatcgatccccgcggactagccgtgtggaccgctgtggtttccttggtctagggtggaccgacccgctactattctaacaccagctaattgcagcttcaaaaatatcttacactgccgattttgtacacatgctttacacaaacttctaataagattgatacatcccacatgattcattacaaaaggataccaaacacagatttattgaaacaaaagcaagtaaatccttgtcaccttagacaaaaacttaagcaaacaaccagctgtaacattgctaggagatgttaacaaacaaacaagtgctgtgctgacgcacaaaaagagaggacatatatatatatatatatacatagtaaatttgtttggtgctccatggtgcccgggcaccattgttgaaattgagtatatacctaattcaaatgagtatgaaactttttcaattacttagatattaacattagctactttactaactagttcaaagcaagtttgaactgaatttgaacttatttttgttagattttgattctaggtatatagcatccatacatataattagttaggtatgtaatcatggattgtgaaataaagttaaatttgagttgttttgttgataggtataggtatgaatcgagttattataactaggtatatactcacaatttgaaaattttgaaaaatttgagtgattttttgtatttgataccatggtgcccgggcaccatggtgccccatatgagtgtcctatatacatatatgtatatatatatatatatacatatgtatatatgtatatgcatatatacatatatgtatatatacatatacatatatatgcatatacatatatatgtatatgcatatatgcatatacatatatatatatatatacatatatgtatatatacatatacatatatatgcatatacatatatatgtatatgcatatatgcatatacatatatatatatatacatatacatatacatgtacatgtatatgtatatacatgtacgtatatgtatatatgtacatatacatgtatatgtatatgtatatatacatatacatatacatatacatatacatatatatacatatacatatatatagggtaagactattctacacccgtattctatacccccttcctcatgttcccccttctttctctcgcttcccctcccccccttcctcctgttcccccttctctctcgcttcccctccccctcccgatctctctctctttccctcctcccgaccactctcccgtcactccccctccctcctcccgatcgggctgcaggaat

SEQ ID NO: 19702 - DNA, 1132 bp, Oryza sativa
ccagcctgataaatcattgcaaataagcaattaacccatcagtattagataacaaatataggaacttttaacaaaacatacggtatttgatgatatagcttgataaggcagacttgtttatttgaatcacaaaaatgttaataattgtaaaaaccaaaaagtggagacaaatgaagcagaaacaaacctctcgaagggcaaatgaagcatggcaacaacaataatcaaactcaataccctggcctatccgattgggcccgccacccaaaatcaacacctttttcttattagttggaacagactcacattcatactcatacgaggaatacatgtaaggtgtattggcttcaaactcagccgcacaagtatcaacccgcttgtatgttggagcaacttctagtgccaggcgccttaatctcacatcagtttctgaagaagatgtcgcaaaggcaatctgcgtgtcactaaaacccctccgcttcacttgatagaagtcatcttttgacagctgatctaggccccttgaaataaggaattgctcaacatccactagctccttgagctcagtaaggaaccatttatcaataaagctaatttcatggatatcctgaatcctcatgcctttcttaaaagctgcataaatagcatgaatccgatctgggttaggtacccgtaaactatattttaacttttcccagtcccagtcaagttccttgatgggtgcacaaccccatcctgcaaagccagtctccaatgaacggacagccttctggaaagactcctggaaggtccgtcctagagccatggcctcaccaacagacttcatctgtgtggttaatactggctcagacccagggaacttttcaaatgcaaaccgtggaatctgcatcgtaaatatatggtaagtcaggaaagaaggttaacagccctgcattaacttacaggtacaaattctgtatgatgaacaatgtgaagaacatgtctgagtcatcaactttgagtttgtactataaccaacaaacatgcaggtttagcaccattattgctatacgggcatgggtagttttgtgggtacacattggcccatctatatcaactaaaatgcagtttttctagttcatgttgggtattt

SEQ ID NO: 19703 - DNA, 1553 bp, Oryza sativa
atctgtgtccatccctaagcatcattgcgagtaattgcatcattatttgctggtagagcatattccaatttgtggatgtttaaatgcattaaagtagttgattactatgctgtgaagtttggacagcaggatagtatttctgagaaggtaggtatcacatcttacatgtacagaatatgcacttcatataaattctcaatttttgcattacagactggatacccaagggaggttggaagtactactggaacaattatcattgtataagcagcgctccaagatatgtggataatgtagctcaattgattgtgatattttggatctttatttgactaatatttagcaaagttttacagttgcatgggtaagatgataacaaagcaattgggagcacaccatgcaaaatggataaaagcatataccaaaacaaagctagtcagtactgagttaaataaacactactaggttagtgacaggtaaatgctagcacagtaatgcacagtttctttgacctaccaaactattaaatacaaagatggaatgaagcacatcaggagtaattgaagttatcattttaagtgatacaagtgtgcttgcaaaatcaataaccacccattgccaagcaaagggaaaggcctgccaggccgaattagtttggtactgtggtcatgtccgcattgcagaccctaactattgcaagcatttttagcacaactaaaggcaagatagcttctaaaataaggatgaaaaatgcaacaattgcacagtgcaccaaatatcattgcccaagaaatcttagaaacagagggaaaaagcaaaccttagtgaccacgtagtcaatggaaggctcaaagctagcaggagtcttcttcgtaatatcatttggaatctggtccaaagtataacctacagagagctttgcagccatcttggcaatcggaaaccctgtcgcctttgatgcaagagctgatgacctcgacaccctggggttcatctcaatcaccatcacctccccatcggcagggttcaccgcgaactgcacattggaacccccacactccacgccaatctcccggatgatcgccacggagtagtccctgagcctctggtactccttgtcggtgagcgtctgcgcgggcgcgaccgtgatggaatcccccgtatgcacgcccattggatcaatattctcaattgaacaaatgatgaccacattgtcagccatatcgcgcatcacctccagctcgtactccttccacccgagcagcgacttctccacaagcacctgctgcgtgtgcgacgccgccagcccggcacggcaaatgtcctcgaactcggcccgattgtacgcgatgcctcccccggtgccaccaagcgtgaaggccgggcgaacaatgagcgggaactccccgatgtcctcggcgatggagatgcactcctcgagcgtggtgccgatgccggagggcggcgtcttgaggccgatgcggtccatggcctgcttgaagagctggcggtcctctgcggcgcggatggccgggagggaggcgccgatgagg

SEQ ID NO: 19704 - DNA, 8235 bp, Oryza sativa
gggacggggaggggcggagctgggtcggggcggaggagagggaggtggccatagcggcggcggcggcggcggcggcggcggcgggtgaggaggaggagtggggcggaggcgtggtgggtggtggggaggtagggttttttgtggagatgagagtgggggggtacccgtgttaagggtttaacccttctactaatttaatttttttattgtgagctttgcttacttaaaattggacacctatacggtttctggtgtccacgtttcatgttcgaattataaacgcgctcaaacttaacgttctccctccgttttataattttcgtttcatattataattcgttttaatcttttatttcgttataaattcttttagtttaactaaacttataaaaaatatagtactccctccatcccataatataagtgattttgagcttttgcttacactgtttgaccactcgtcttattcaaaaaatttgtgcaaatataaaaaacgaaaagttgtggataaagtactttggataataaagtaagtcaaaaaataaataaataataattctaaaattttttgaataagacaaatggtcaaaaagtgcaagcaaaaactcaaaatctcttatattatgatatggagggagtaatattttcaacgcaatataagcatattatagtaatatattaaaagttagttttaataaaacaaatttggtgatgtaaatattactattatttttataaatttgattaaacttttaaaaaattaaaacgacttataatatgaaacggagagagtaggagcatacttctatcatatttgttttcgatgtctgaaatttaattactgaaaccgccttttgtcgtgaccttttcttttattttgggaaatttgatcccggagacacaaactggctgtctaatttgacttcgatacggatttgcagggtgtaaatcagtgatttaataatagcccggaacgtaatttgggatgtaacctaggtgtaacagtatataagaggataatgtgtttttttagaacagataatgtgtgttcacatcatcggcttaaaccataggaagaagaagagagggaaaaagaaaaggatgcggacaagttaaaaacgaacagaacagacaaaacttttgtgttttatgttccctgtaatagcatagaactagatagatgatgactagactgagaatatcttttttatacgatgctaatagcatcgcctcaatgggctgataatcagtttcattgtcatgctatcggggtgatgcagggtgtaattaacgtaaatcatttaatatcacctggttattgcgtcactgcttgcttggtgccccatcagtggcagagccagagacgccatcaagcccaaacgattaataacatttttggataatcgattaatttatataggtattaacagctatcgataatagagacggtagctaacaaaatccgggtagtcgtccgagttgttcgagaggtgccctccatagattaatttcctgtttagcttggttttttttttctctgctcttggttcagatatctcaacataagaggcacagtgaaccaaacaacagggcagaactaaagcaaattcagtcacactcgagtgcaggataaaagttcaggtacaatctctctgataacacagttctactcctacgattgatatacaaatttaatctatctaacaatgataaagcataaggatgtgaataatctcagtactaatgccggttttttgtgtccatatagatacacttaataattgcatgaggtcgatgtttctgatgacgatgagtcacgatttgtggatggttttggtttaaagaaaaaaatgagcacgcgattggcgccaatcaacggtggacccggcgagagctcatgccataaagcaaagcttgacggcccagataagatggccgctggtccctcttatggataagccaaaacaatgtatgcaaggggcaacttggacctaatcgtgatatttcgtagagaaaaacttggctctaataatgtcacactccaattaccgagcaaacaagccaatcaggagttgacagaaatgcaaggcctacctttgctcatgacccaattgacaagagagaagagtcccctacttttgtcttgccctgtggtatttaatactccttctattttaaattatttatcgtcctatgtctttaaagtcaaatatatttatatctgactgcaatttagagatccatataatatagcattacaagatttatatttttagattctctatgagaaatatttgcatgttgttgaactatacggatctctcgaaattgattgtcaaagttataaacgtttaacttatgacaaagctaaaacgataaataatttgtgaaggagaaagtattgaatctttaagtggataggctcaccacgacatgaatatggtgttgtctattgagacgaacaagttggatcacaacgtggttggtgggatgagaagggaaaggatatgggttgaagggagagatcgatgcaacgggagagatgcctcatacccgcactcccctcctccaaccttgctgccacgtcctctcttcccctcctagcccagcgccgtgttgagggcggctaccgggttgatggcggcgtcgacggtgttggggttggtagttgggttaattgtggcgtcgatggcgtttgtgtcctagtcgagggcatctccgtcggctgggttgatggcggcgttggcggcggctagtgggtggaggaggagaggtgagagcgttgggtgtaagcggcgaggtggtggctgcctcacctctcttggttagtatacattggacacactttacactgacatgtggggccagtgtgctgactcaaccagtcaacagagtcaaagatgcaatgctggacgaaaccgcctcctaaaccgcccaaggagtcgatttggaacggttttgtgagttggaggatgagatatacccaattttgcggttgaagtatgcgattcaaccatgcgcatgagttgaggaaggtaatgtagagttattctgaaacatttctcatcggaaataagttcactttgtgaccctcaaaagtgattgaaatctaatccgtgaccctaaaccacaaaactggatatcttgacctccaactcttaaaaccggtacaatctgactctcttgatggttttggagggcggtttcgctaacatggcgcctacatgatgatgttgactcagttttcggtccatgtggagttgacgtggtgtttgtgttctagaattaaagaaatatgtgctgggcccatttgtcattcgcactaaaataatgtgggacccactgacatgtatggcccacatgtcattcctgtttccttcttcctcttcctttttctccattctctctctttctctttctcccatttctcttcgtcttgtctgcagggagaaaatcggcggcgggcgctcgagggtccaagaggccgcggtggcgagcgggaagggaggcggtggctcggcggcagcagcggcgtgtgacccactgggagaatttctgcattccacaaccaaattccaatgagaaaccaattatggcacaagatatggattaccaatgaaagctacttaaggagattgagcatcgcgtcgttgattctaagtacctcgagtccaagaatatggaaatcaactcttccaggctcaccggcgacgcccgccatgaatcaacctgcgaacacgcgaaatcttctcatttcacggcgtgccgaaaatggcaaggcgcagcacgagccatagcgccgtaactcgagcttggcctcagactggagcgtcgtgagcgcgcatgggaagctactggactcgaggaatgcggcgaccgcggccaccacagtgggcctcgtcgtcgcgtcggggacggcggcagcggcgagcccttggaggacgaattggtcatgctcttctccttcctcgagtccttcatggctccctcttccgtctacgccgctgctgccgccgagccgccgccgggttgctgcctcccctcccgctcgccgccgcggccgcttggaccctcgagcgcccgccgctgcctgcagacgaagacgaagagagatgggagagagagagaagggagaggaagggaggaggaagaggaagaaggaaacgggaatgacatgtgggcccacatgtcagtgggtcccacattatattggtgtgaatgacaaatgggtcctgcacatatttttttaaattctagaacacataagcgtcacgttaactccatgtggaccgaagactgagtcaacatcgccacgtaggcgccatgtcagtgaaaccgtcctccaaaaccgccgagagagtcaaattgtaccggttttaagagttggggggtcaatatatccggttttgtggtttagggccacggattagattttgatcacttgtgagggtcacaaagtgaacttattccttctcttcgtgttgttataaatttggtccaaccctcactgggctggtcaggggcttggcccaaatctgggtccccgcggcaatcactgcaacctcaaggatttgacaactacttggaagttggaacttggaagaccagtcgcgcgtgggtacggttgggctcttgccacgtcctgccacacactgccgccccggtcctatcgatcgaagcgcgcgcgcgttccaaactgcgacatagggtagtacgcatgccgcgagcgatcgagcggttgcagcatgaattgggcaaaccaacccatgcacgcacgtagccacgtactccaacgtgcgcctccgtcgatcgccacctttcccggatcaagtacgagcccacgcacgaacgcacgcacaccactaggacagtccactcccactgcccttctccccctatatcgatcgcgcgccaagccgcccccgcccatgaacgcacgcgcagacacacctgcggcgctctctctctctctctctctctctctctctcgataccaatgatggcgacgacgacggtaacgcaccctgccgccgccgccgcgctcaaccacgagcgccacctcctccgccggctcgccgtctcttctcccacgatcctccacgccgcgtgggtcacggccctcgtcgccgtctgcctcgcgctctgcatcacccactcccgcaagccgctgccctcctcctcgtcgtcgtccaaggctgccaggcgcgagcgcggcgcctcgtcctcgacacggcgccgttccgcgccaggggatgagggcagcagtggcggcgtgggaggctcctccgccaaggccgccgccaccgccgccgccgccgccgccgccactgccacgacggcagccgaggtgtccccgacgccgagcgacgtcgctgccaaggccaacggccgtgtcggcgagactcaggcggcggcggcggcggcggagggagcggctgtccccgtcacggtcatcgacgtcgggacgcacggcccgatcgcgccggcgttcccggcgcccgacccgctcccgccgcggcggagcctgtcggcgaagcacatgcgcctcgcggagcggctcgggtcgcggatatggtcgacgcggtgggggcgggacgaccacgatgacgatgacgacgaggacgcaggcggtgacccggccgccgccgccgacgagggaggcaccacgctgtggacgaagacgatcatcctcggcgagcgttgccgcgtcggggacgacgaggacgaggacggcggcggcggcgcggtggtccggtggaggagctaccggccgaggcagccgcggtcgctgccgatgacgcggagcaactcgttcgccggcgtgggtagccgtagcctgcagctgcaaggcggcggcggcgcatccaggccaccacctgccgccgacgtgcccttccatctaggtcggacagctagccttcctgccaaggatgaactgtgacgtcgtctcacgaagtcacgaggctagactgctatagagttctcaaattaatgttcttccattttgatttcttttatatgtgacaccaccatgtttcagtgaaaatgtatgcagtatgcgtagttgaaaactttggcacagttgaaaaggtagaacttctattttattttctaaatcctataagtacataatctaagcgagaatctagattatcctttcttaataagcttcgtgcatctttataaatcttactagattatttagagtaggtggggattctggataaaagctaccaaaaatttgaaaaaataaccattttagaaaacttatatgaagattgaatcgtggtaaaaaactaatttcataaatgaatcttttgtccaagcgctaatcccgataacactgagctaagcctataacatctcagcgccattaatattggtgctgagattctattgaggtgacgaggatttgccaaatcaagcttagcttggcgctgaatccttcacaggatagaattatgtccatgcattcatttttagaaaactcagcgcgactcagcggtggaggtagccctattccggcccccctatatagctcctttgttcgttttctctcattatcccctatttcttttttctttttatctctttatccactattattttctcttttttctcctatctagtttcctttttcgttctctctttatctgtaaatttatttgttatgaatatagaaaaatatgaaagaagtatatatatggtaaatttaggaacttaaattatataatataatgtttgcattaatacttataaatcgacacccttatttttaggattttttttgttttctctcattatttgtaaatttatttgttttctaatttgaaaaaaacgaaagaagtaatttttttaaaaaaaaatatatggcgtttgtaaacttctttcattctaaattttaaaagtttgaaaaaatatactataagtcttttccatataaatattaggagagtgttctttccatgtgaatattaggatattaagagaaaaggttaaaagattaatgttttttcatacaaatataaagagggtattgggaaagtacagttcttttcatatgagagtaagagaaaataataaaaaaagaattaacagagtaaagttctttctaatttaatgagaaaaaaaataattaagagagttacgttctttcgaattttcacgggagagtaaaataaacaaaatgagaaaaagaagattgagattgaggagaaaaaataataagaaaaataactagagtggggagaaaaaataactaaaataagtagtatggcgctgagctcagatgatttggcaaattctcgccatatcgggcataatctcattgtcaatattagtggcgttaagatgttataggtcagcaccatcagggttgacgttgagcaaaatgttcatttttgcaattagtttttaccacgatttaattttcaaataaattttctgaaagtgtcattttatcaatatttcggtaaacctataagcctccaaacaagaccttttaccagctgctacacatagaagatatatgtaaaatgaggttagctattaacgtatgattaattaaatattaattattttaaatttaaaaataaattaatatgatctttaaaacaacttttatgtagatttttttttaagaaaacataccttttaagtggtttgggaagaaagtttttctcgctgctgccgaatgcacgtacatgctctccagtctccagacgcacataatattaattgggaagttttcatcttaattttcaattaaaacaaatgattgtgttcttacgtaaaatgttccaacctctccttactattcccgcacacactctttccgaactgctaaacaatatttttttaaaagaaaatcctataagaaagtggctttaaaaaatcgtaataatccagtttttaagtttacttagctcatgcttaattaattatgcctaatctatcgttctgttttttttggcaatttagtccttttagaaaacttatttcgaaactaaccctcaccaaaaaacttcaacaaaaaaataggccatggactcagcaccaatccgttggcgcaaaggtccaacgtctcagcgccaaatagtacggcgctaaaatttgccacgctagcagagttgattgtggacgtggctgtttggcgctgaccccatgtatgtaataagtagacattgtgctattctttgtcatgatttattgatagtgcagcggttgaaccacttg

SEQ ID NO: 19705 - DNA, 3955 bp, Oryza sativa
tacatcttgatctttacattgattgtggatgacatgtttattacttcctttattttataataaaatcatttttagcccattttattactagtttctagcgatccttatatatcagaatttgtgaaagtaaaagataaatatattgggaatagataaatagaggaataattgcattggaatttgataaagtgggggttaatctttttagttttgtatcagtatttttcatctcctgttcactgatgatagtctccctttagtccaatcgcagcgatcggcagctattgggaaacctaaacccagaattttgaggaaaagtatcttacgctgctagtcctagaaggaagaatgatcaagggaaaattcaaaagcataaaagaaagattcagcaagagagtcaattactgatcagtgcctcagagaaatatctgtcaaatggggagaggttcttgttaagttggttttgcatagcctccccaccccacctatgctatgatcatgttcaaattctcgtatttgtgatgatcttaagcaaatgttaaggaatttctgatgggataatgaatttgaaagaagaaagttcattggcttgcatatgacaaaggctttatatcaaaattgggaggagaaattgggtttagaggtcttgagatattcgaccaagcattaccggtcattagtatttgtcatgctttataaaataattttggaatggcaccgaattaccctctccacctcggtgtattcctaggcatcatatttatatttccaagaaacacaacgctagtatgaaatgttttcttttttaccttaagatcggataaaagttattgatattaatttatagttgacatacactagcccaacctatctagtttaggagttagttcggaggtgattatggggtgacgtatattttagcacgaggatatctcggcacaaaactattttttttacaagtttctttaagaaattccaaatccatttttgttttcaaaactatagaatccgcataagtttgtgaaatcatgaagcgataagctatcaaaattaaacaatatacaaaccgggctcccttaaaatgcaaaccgcggaggccgaaacagctactcctgatcaactgcgacgaggtgcaacgttaattgttacttttccactctggcccctccacttcccatcaattcccgcttttaatccgaacgagaagaaggggggggggtgggtcgcgctcgccgaaaacaaagcgccaccgccgcaccacaaggaggaaaaaaaaaagaaaggaaaaaggaaaaaaaaatccccaatccaaaacacactccgcccctccgatccccccctctctcaaaccctagctccccccctccccaccaccaatcccccacgcgattcgccggatgcgcccgcccgacgcggcctaggcccctgcggttcaccggcggtggtggggtgagagagcgcgcgccggcgaccggcgaagaggagggggggggtcgatggagccgcgcgtgggcaacaagtaccgcctcgggcggaagctcgggagcggctcgttcggggagatctacctcggttcgtgccgccgctccccgccttgtggggggatttccgtttttttggttttttttttggtggattgtgttctcttctggtgtcgctgaatctgttgggtgtggatttgcgcctgcaggtactaacgtgcagaccaacgaggaggtcgcgattaagctggtgagttgatgcgataatactcatgttttcgcatattctacaattttcctttccctttttttttggggggggggggggcgtcggggtagtcaattagtggattggggaggaagtgatggataattgttctgaatcaaaataacctatgaattcaccctagcacatttggactggtaatttgtgtaatagaaaggccaataagcactggaacaaatgtcgcctgccatacggcttgggaatattttgatatgggttgggctgtgtaagctcttctgtctctttcacccagctcgtctgtctctttcactctcagtagtttagattagtaaccgtgaattgattttacagtgtattttaaagggatgtggcagctggacccttttcatctgtttacatccatcagcaaaaaatacgtatttgtttacttcgcttctaactgtaaccctgtcatttacaatctttttttttttgaaatgtatgtcacattatcagtgtgagaatgatgtttgttattatgtctcactcagtcaatgtctcctgattgtccatttaaacaactgcaggctttgccctatatggttgataagcccctctttggactgatatgcatttctttttctttgcgtttgtccaggagaatgtgaaaacaaagcatccacaattgctgtacgagtcaaagctgtacaggatacttcagggtggaagtaatgcactttcttttatttactttttttttccttttgcattccattttttttccctgggagataataacctgcattctgtttttgtcctgcagctgggattccaaatgtcaagtggtttggtgttgagggtgattacaatgttttggttatggacttattgggcccaagccttgaggatctctttagcttttgcaacagaaaattgtctctaaaaactgttctaatgcttgctgatcaaatggtacagtatgaaattaaggccaagtgttgttgctctttgtgttattattacatagtagtcctatctggttaaatgcatttgattgtttctaatttctccatatttttattagataaatcgagttgaatttgtacactcaaagtctttcttgcatcgagatattaagccagacaattttctcatgggccttggaaagagggcaaaccaggtaagtgatttaggtgctgtttttgtgcttatagttctaggtcttaattgtaacattaggtggctgtagttacattttctcccttatccgttgtaggtatacatgattgattttggactggcaaagaaataccgggacacttcaacacaccagcacattccatacaggtaatatattgtaatccatctatctatgaggttcatatttattaatcttttatgtttgcatcaaattatcatttttttcacttatgcattactttattaaaattgccttcgcattgcctactgtcacctcactggtcactataactatattgtgtttattcataaaatttggtcatcgatgaaagttttttcttaccaagtgccattcttcttctgagtgagacttctacccgtcttaagaaaccatatgacaattgtctactgaagtgcagagagaacaaaaatttgactgggacagctcgatatgctagtgtaaacacccatcttggaatcggtaagtctggtgcaacttgaattttgatcccatgcctatgttaaatgcacaattgtatgcatttcttcaattattttgtcttgctggtagatctagtttgacaaatgaactttggtatttttttttcaacagaacaaagcagaagggatgaccttgaatctcttggatatgtactcatgtacttcttaagaggaaggttagttatgttagctttatttgattatctgcttatatggtctgttgtgctctaaacaacacatttgctcttcttggtaccagtcttccatggcagggtctaaaagctgggaccaaaaaacagaagtacgagaaaattagcgaacggaagattgctacatcaattgaggtcattcttcccctctgaagatttaattatggctatggaccaacatattcttaccagcattttctttttcatctgcaggctctctgtcgcggatacccttgtgagtttcaatcctacttccattactgccgttcactacgttttgaagatttgccagactatcaatacctgaagagattgttcagagaccttgggctgcagga

SEQ ID NO: 19706 - DNA, 6113 bp, Oryza sativa
gtcacggggaatgtcaccggagcaatgtcaccgaatcccaatccatatctaagataccaaattctttagtataaaactttggtatattttcttatggaccgtaaaatttcttcaataagggtacctaccttgacggtgatccattaatactagatgatagaacattatgagccagaaaaatgtatatgtgtacaaattgtttttttaatttgttctaaagataactagatgaattatattatcatgatctacgtattttacatcacgggccacattaaaactaaccgattagtataggagtatgaatttaggaactatcaaatcatgaaaagctgcaggtaagactccaccatattgagtaaattttgcaattattgattctgaattttataaaatagtgaaaacatgaaaaatattataattgagaccccaaattaaccggatacaactcgttattattaattaagaattttgaaatttattaaatcatgtcaaatctaccaattcgaatagaacttagtttttattgattttgaatcttaaccttataaattaatacatgaaaaagctagcactaagactcaaccctaatacaactcgatattattaatttcaaatgtaccatatcagaaaaatccctttaattatcctaaaaaaaagacttagtatataaatattaatataatagctttgcagtgcgcggtttagagactagtttgttgataatccaacatggattgtattctttagttatctctctgttttttattacttgattgaaaattttctaaaaaaaatatgttggattttctttttccacttagttttgaaatagagaggaaaacaaacaatacagaatagttagttgaatggattcaaaaagaaaggagtttcatagctaagaaaatagatgttagaaccgaggttattttgcaaccacgtttatacgaaaaggtgccaaatgcaacgatgattgagtgttgagctccagttttcttttggtttcagccagaacattgtggaaactttgggggggaaaaccgtgcttcttgaatgagagcttcccaaagtttgattggaaattactgaaagattgttcacaaatatcctcggtcggtttgagacccccctatttgaactcctacttcatatttcaagcttttggacctgtttggcatagctccagctccagctccaccccttctgaagctggagcacagccaaacagtttcagctccactaaaactaggagtggagttgggtggagctctctcacaaaatgtactagagttgtggagctgggtttaggtagctccacaactccactccaaactcaatttctgaagttatatttagaagctagagctataccaaacaggccctttgagcattttcaaaaatgcatagcttatacaagtgcatttggttcaacattgttttttttcaataaaatgggaacgcgcactcgagttatactaatatgtacttcctccgttttttaatagattacgccgttgactttttctcacatatttgaccattcgtctttttcaaaaaattacgtaattataatttattttgttatgagttgttttatcacttatagtactttaagtgtgatttatatcttatacatttgcataaaatttttaaataagatgaatggtcaaacatgtgagaaaaagttaatgacgtcatctattaaaagaggtagtatttagctgttacacgcatacacacacgtacacaaacacgtgcgacgctagactttgacttaccgagcttacccttttttttttggcagcgactagctaactgtagctatatactccctccatccaaaatgtttaacgccgttgattttttaaaaatatttgaccgttcgtcttatttaaaaaatttaagtaattattaattttttttatcatttgatttattgttaaatatacttttatgtatacatatagttttacacatttcacaaaagttttagaataagacgaacggtcaaacatgtttaaaaaaatcaacggtgtcaaacatttagagatggagggagtatgtctttcgctagatctttacctgtgctacacttacgtgtttaataattaatcagtcgattgatgcatgtcatctagatgagccaggtgtcgatatatccttaattaacgtgttacgcattctggagtagtatgtttgaatattcaagggctctaccacatgcgtgccaatatatatgttcatttacatgtttaaataagaattatgttgtgccatcttgaccaagtcttgcacgctacacgtacaacgtgtgttaagtcaaactagctaagaaatagcagagaaagctagatgttgtgcacgtgcgaagctagttagcagattaatcatgctgattatctgggaacaatcgatttcagaaaaaaatatttcaatagatcactagtattagtaagtggcataaaaaagaattgaaaaaaagattgaatttacgtgtagatttggacctaaacagaaagaaagaaatgttttgtgagaaaagggaaatagctgagtgggcttaaaagtccatcaagattcagcccatccagctcattttaggaggacaaatggggaagatgtttttatagatgcctttcctcgtgttcactctactcgtctattcgccacagtatcaaccttttttaattttctgttagcatgttttttaactattaaatgatgtgcttttaaaataaatttattttttaaagtttataatagttaatatttaactaaacatgtgctaatgaattctcttattccacttgtcctgaaaaatctccaatagaagagaaacgaacgggtgggacctataaatattttgtattttagccccttctattgcactagtactccgaaacattgcactcaacaccctcaaaactacaaaataatataaaatattactcctcttaccatcaccatcctccacccgtagttggcgccggcaccatgccaccatctcggtgcggaagaagccaataaggatggtggtcaatgagctccccataatatggggtagattgggtcatcacctctccgtcattcccttctggcccctactcccgtcatcgatgacgacaccacccgccgccaccaccccttcctaccccgctttgaccacacgctccccgtcaccaagttgtggtcttctcagccactgcgatctccttacccatccatcgtggcatgacagagttgtctcggtgacaacgcacctcgagctgacgatgatatgcttatggcagttgatgtatggtagtcctctatggcttggttgcgcgagcatatcacatattttggggatggtgatggatggggatgtcctgaaatttctcagccgcgtgaacgttgccctacgctaggacacttcactagcagcatggcatccatgccttcgccaagatacaagtggcttcgtgggagcacgatagtggcttacgtagacgagaatcttctagctggatggacactcgtttctatgcatcctcgtcatctatccgtgaacagtgtaatcacacgctagcacagtgacataaaacccacctgatgatgttctcaatacatccctctcgctgcatgtgattcctatgaggaaaagggattaccgttgcttcaacaattttacccgccgtatttgtagacaatgtagattgtaacggttgcctggcaggctgccaccatgtaaaaaaggattattattcttatttatttagagtgtcagttctacggtaagagatggtttgctatttgctaagacttgatactactacttgtaatatactccctccatccctaaatatttgacgccgttgacttttttaaatatgtttgaccgttcatcttattcaaaaacttttgtgacatgtgtaaaattatatgtatacataaaagcatatttaacaataaattaaatgataggaaaagaattaataattacttaattttttttaataagacgaacagtcaaacatttttaaaaaaagtcaatggcgtcaaacattttgggatggagggagtaatacacagtagaacctatacttcaataaaaagattatctttagtaccctctactttaattcacacattttagatcctctctcattttacatcgctgtcgctgctgcctgtgattcctgcgaggaaagggtgggggacagggggagtgactagcgtggttgctacagcgctacacgttcgcgttttgcacgcggaaccgcccccacctttctccctttccccttcctccatcagcagcagcagcacgggcctgaccgtgaccgtcccccacgtcgtcctccccacacacgcgacgccagtacgccactgccagcgcgaaacaagcaacacacgcattcctcctcccgattcgctcgcggccgcaccgcaccgcagctctcctcctcctcctcccccacccaaacccacggcggcagattcgatctcgaattctcgaactctctcgatcgaaccctgtgccctctgctccccgcaaaatcctccgcatttgatgagtagtcctatcactcttcttcctccccgcgcaaatcctcgccgccacttggatgccagggagctccacctcgccgccgaccaccaccaccacccttctctcctccgctccccgccgcggcgcctaggccgctgccgccgccgatgggctaggagaggagagggatcgccgcctccctgcgatcgccaccgggggagccggaccctctccgcgagatctggttaattgatttgcctactaccagtattccgctagattctggaccgattcctctctgttgatgcaaccactgtacagttgttgctttccttgatgatcagaaggagctggcgatttcggaggtgaatgcgttgtttcatatgggtttgcagcttatgctacaacagctatctccgatttagtttattacctttggggagcgtagagattggattccgctttgcgttttcctctttcctgcgagattctagcttatccttcgattaaacctattcgcgcggctattagcgcaagtggttaggacggacgcagactaaaaaaggttaggttattagggatttggttttccatttggattgccgattgcgggagcatatcctattgggagattccggcactgtaaagatatccttggcaactgagttgatttaatgttaatgttagtggtggtggggagggcagataatacgcattctgatctgcctgtcaagttgggggagaagagatgggttcctcacaggaatccactttttcctccgcctcaacggccgcgcaggtgaatgcctgcgcgctggacttgctcccggtatacgccaaggagcttatcgccgggggtgcagccggtgcattcgcaaagactgcggtagcgccgctggagagggtcaagatcttactgcaggtttgaactgctcagagttccatttcattattatgtggtagctgaatgacatctcagcttatgccaatttctgagtgtacgtatgctgttgctttctagaccagaactcatgggtttcaatcccttggtatcctccaatcattgaggaagctgtggcagtatgagggaattcgaggcttctacaagtaagttacatggagaaaataccttacctcaggctctggctgctcaatttagtatcttaatttttatttcgtgttacttactgttcatgaagggggaatggcgccagtgtgcttcggattgttccatatgcggcattgcattacatgacttatgagcagtatcggtgctggatattgaataattttgctccatcagtgggtacagggcctgtggttgatctattggctggctcagccgcaggtgggactgcagttctatgtacctacccattagaccttgctaggacaaagctggcatatcaggtattgcatgcccatcctaatgctttgttgattgtcatctttagtagtcaagaatctctctcagtagaactatcactgaaattattcgacaatcagcattagtagttcgctagtattttccagcaaatattagtagtttctgtgatgccatccttgctaagggctgcaggaa

SEQ ID NO: 19707 - DNA, 658 bp, Oryza sativa
ttgttgtagacgcttatatttatcataaatactgcaaatctcgtatttgtttgtggcactaatcttgcagagcaatgtccctaaggtcgagcttgtgacaataaacaaagcactgctaggagataccccggattatcatggtaagctttctgtcacaccccaatccggcaccgccgtacaacagcacctgactggagcgtgtcgtaggaaaaacggcgcgaaccgcttcctacgaaaccgcgatctcagtaccagtcccaggacatagcgctggtacccacggtgacaaatatgaatcattgcaatccttaaaataaatagaggacttatttaccttaacataggttgcagctcaaaacagcctgataatgcaactgacgacccggacgaggaaacaccaacaatagcagcagcagaggaaccaatggtctaacacccaacaccacaggcgacggctgggaaccaggacgaaaccctaatcttcacttcacttcaacttcagggcggaggaactatatatatttatatagagcaagggtgagtacttccgtactcagcaagtcacggaaatttaggtgtttaatgcaagcttggaagagtggcaagattgttttgcaaatcttttgtctgagatcattatgaaatcactaagttattt

SEQ ID NO: 19708 - DNA, 7621 bp, Oryza sativa
ttcctgcagccccgggccgaaaagagacttgagtctcgattcgactttaagagatgcttttcaacaactcaaatggtaatgtaccgacctcccgggttagatcattacttatcggctcccagagccatttcacttgattaggtggctcccagagcctttttcatttttgcggactcccagagtccagctgccaagcagcaagcaatccgcttccactcgggaagcctagtctatgatgcccacagacatcccgaatcacacagattcgtttctgaccactcaggtcatccatctgccacataggttgattctggttacgattcccattccacaacaacttttcgcaaagcacaggcaatcaaatctacgcaacgggaaccacctcacatccgcccatgaccgtgggcacggctgttcgaacagttagttaacctctgcagaggggtacactttacccacaagacacgaacttactctagacactggccggtgtgagaggtttgtgacaaagcctttctcaagccgacttagggtcacctcatgccacatagaagaatcaaatcctcacataaatataggccattttagttttcacaaatcaaactccaaccacctcgatcggtaattctgcaagcttctctttcttgcttaccaggaacccagtttggctccaaccgaccctgccccggtgttcccaactattggcatgcgaggtttccctgaaccgactagttacttagccagggtgtcccattccaccttgtggttgcactgtgattatgctcgatgagtttcccataggaatcggtccttatatgcgaatacgggacagcgccacgtagacacggctcccacatcgtgagttttcacaattcattttattttcaaacacaccgacaccacatgtcgggttttcaaggcttcacaaacccatttcccaagttttcgacaaacaacggtgtatgtgggatatttggtatacacgctcagagagcacggatactgaagtaccacaagggtggagcgacaaggaatcagggtagtacagcctacatgaatttgtgcaactactaggtaggtccgtcggtttggcacacaaaccgaggccaagcatgttaagtgtgtgattctaataatgcaaattgcaaacaaaataataatgattttccaattataggagcaattgatcaaagggtgacttgcgttgctcaaggtcttcacgaagcttcacgaatctttgagaggcccaagactgatgataatccggcaaccgcgactaaacgcaaacaataaaaacctaaacaaaagaccaaataaagatcctatttagactaataattagtgccattaaatagatctgaattttacggaattattggaagtggaacggagtcaatcggagctacggattggaagatatgatttttggaagattaaaggattttctgtctaaaggaaaaaggatttattaaatccttctgaaaagaaataaaggagagacgtgaatcagacttccttgggcggcttagggcgcggcccgatggcttgcgcggctcggccgagcctttttgggcctggcgagcgcgggggtcggcccattagggcacgggagaggggggggggggtccggtggaccgagtgcaccgagcggggtcccaggtggggcccgcttgtcggtgacacggcccacggtttgatgggcgcacgcgagggcggcgctagggttcggtggggatggcgcacgggcggtgcgctggatggaccgagacgcgtcgggcccacgcgcagcctcacggctcgcggtggaccgcacgcgcgagcgggagacggagggagcggctgaccggggtcagcttgactcggtccggtcgagctggcgccgacgtggtgccttcgtggcagccacgcgggccggctggcggaggaagaagggggatgccgagatagacggcggacggcggcggtttcaccgggacaccttgcgacggtgagaggcaacagggagcacaccggaatgacgaggaagacaagagagagtgagccaacggctcggatttctttgggagaggtcaatggcgatggattgcgatggcggcggctggcggcgagcaaaaggggaaaatccaccggagcaatgggagttcgattcggcggagtgggagcatctctaggactcaggggacccgtttctagcgtcggatgggatggggaggtgccgtggaggtccggcgacgagaggcggcctccgggagcgagcgccgatggcagcaaggctatggcgagcggcggcggggcttggggcggcgcctaagaaccaccggaaggctaaccgagctaccaagcgagttaaaggagggggagagcaagcgaggaagaggaacggagggctaccgcatgtaggatcgagatgtcgactagagggggtgtgaataggcgatttaaaactaaatgacacctaatcaaaactaacctaaattgctaggcttggtgagggtcaactctaactaagcaactaagttatgtttttcaaacctagggtgatagtggctcaattatatctctaggaaagtaaatcacactcctatgtcaatgtttagcaatcctagggtgatatgatctcaagtttgtctctagaaatgtaaattgcacaaatataaatacgacaatcaaatgagacaaggagacaagagattttgcaccgaggttcggaaactcgccggtttcctactcctcgttgaggcgagcccaactctaccgctcaaccacgaagccaccgcatgcccccttcgtcaaggggtgggcaaggcgggagccggcccacggagaggactacccaagcctcgatcactagggtagttcttccttcactccgaaggtggtgaactccaaaccactcacaaaccggcgccgggcctcctccacaatcttctcggagaggtcaccgggcaactcctccacaagccgtctaggaggcggcaacctccaagagtaacaagcaatgacccggcgtggagatgatcaatcaagtgccacactagctctacaatggaagcaatgcacttgactcttggctagatcaaacctctaacacactaaatggatgaacacaaagctcaagtgggtgtgagagaggtgcaaggggtgtatgcaattgaattgggtgccaagagagctcccttgctgctggagggggagtatttatactcccaccaaccaaaactagccgttgggggcgaaatccccaaactttgtgctctgccggtctgaccggaggtatgcggccggtcagaccgtgctactctacaacggctagaaaactagccattgtagcgctgtcagagggccccatcggcttggcctgtcagaccggtgttgagtgggtggttagaccggcctcggctcggtctgaccgaatacggctccatcggctctgtatcggccaccccgagcagcaccatcccggcctttagggggccggtctgactgcgcatgtgccgccggtcagaccggccttatgcgccggtcagaccgcagttgtggcgccggtcagactggccatgccgcgccggtcagaccgccacaatgtggccggtctgaccacccctggtcaggccgagcccagtaaaagggcaaatgattgtgtgtgtgtgtgatgaaaaagagagcaaagtgaaaatgcaatgacctaatgtggcaatttaatcatctctttgctaggtcattaccccccttgatagtacggtgaaactaacaaataaactagcaaatttgatcgccctacacctcgatcagttctaaattaaagcactagttttaccgtcttctttctctttgctttgcgccgtcaattttaatccatcgataatcatccatgcgcacatatgacttggtcctaacttaaaatatatagctcaaagacaatagttagtccacaattagtgcttgtcattaattaccaaaattaataacgggggcctagatgcttcaccgcgtcgggacagggcgccgtgacgagcggcggcggcgcgggagcaagctctctaggagcggctggggaaggggaagaagaggtgcccggagctcctcgtcgcacgtccacgcacgcaccggcctccccggtgcttgacgacgaacgacgacggtgcaagcagagcagggcgacaatgcgcggcaggcgaaaacgagagggatagagaggaggaggagctcggcttgggttttataggcggatggggcttcgaggggaaggaaccgacattggggcggtcaaggggagtgagctggcagtcgcgctagctcggctggcatcggtccaagcggccaagcggcggcagaggaggtgcggtggctgaggttgggaaaaagagaaaaagaagggggaaaaggagctcgcttctttgccgatttggggagggagagggatgggagtgggagctcgacctcatggttttggcaggacgcgcgtggagcggcttgggcacgcgcgcggggccgagcggctgcgtggcgcagcgcggcagggcagcggggccaggcggctgcgcggcgcaggagcgacagggctgacggtggcggcgaccggccagtcggccaccacgacgcgcggtcacgggccaaaatcgaacagcggcggaggtttggatggtggcggcgggatttcaaaggcggtggcgaaaatcgaatcacggcgacggcgcatagcgcggcgagaggagagagagaaaggaaacggagggagcgtctctcgctcagcgcacgggcgacacacgtgaggagagaaacgaccgggggagaagataggccgagagagaatcggtccacaaggatttgagggaggcaaagtagactcttgtccaggaaatcggtttggagggaaaggagatttggaatttgaatttgggtttcgaacttgatacttggtcttaggaaaacagggaggagtcaaggaatggattcaaagtggactcggataattttggaatcgggacaagtatttggcgaggattcaatggagacaattaagtttcggagacttgaatcggaattgaaatcttgaggtgggggattttgatatcaacgagatggaacaacgggagattgaattgagatccatggcacaacttagactcgcacacaaagaacgaaattttcgcatataagattttgccgaattagtttttaacgtctcatgaaaagcggagcgttacactttctttccaataaaagcaagaaccggtttttaggataatatgcaccttcgggtattcttggtcactaaccattgcaggttgagattaagaacgagggtcatgcgatgtctaagaacactagctacatcaactgtacactttggtgatccttggtattggaacacactctataggagaatccgacatcacacacttggtttttgatgtcttgcgacacaaaagtccaagtgtggggggaaggtcgacgagcttttcatgatgagttccatcaaccaaggccatcttgggttgaagttggtgttagtcctagcttgctgaaaaaagaaaaaaaagaagataaaaaagaggagaaaagagagatagaagaaaaggagaaaaaaatgggagaagaagaaaagagcaagagagctgacgagctatatttagatcaaagactgcattatgtgcgtgtctttgaaatgtggctatacacctcgctagtagcaatcatgctgcccggcaacacctagtgcctctctcgagctcatgtgccgccttggctcagcctttatctacttctagctgtgcacaacttatcgctcccgtagcacctacgcgcatacaagcaagaggagttgccctcttcatttctaagtgttggctactccactccagttgacacttgcacatttgctcgaaaagagatgcatcctacgtattgtgccaacggatcacgccttcaaggcacaaggatcttgcacctgaggtgtgtgcatgaccaacttgcttgcctgagttagcatggtcaaagcgccttcctccggtacaatctgcataaagatggaggagaaatcgacaaccatatgtgaccataccactgccccagagatttcaaaatatacatcatgctggcggtaagtacactcaggtatgcgaaagataaaacaaggttcaccattccttttactcatacttattttcatttgaatgagacttgatcttacatggttatgtttcttgtgtctatttgcatatgctttgttttgggtgttcgcgcaagacatctataggctttttaaattaagcatggtgcttaggttaaaatagtctattttaatcaaattggacatggagtttagtttgattaatgaatttcagagttaatatgttcatagacattggatatatatcttatgtggactaacccctgcaggaaaattttcaaattgacgggtgagtcctcaagttcaattcacaatggaggtaggccagggccaggaacaaatcaattgctaacatgaaaaggagaaacatatcacctatgaaggtgcacggtgcgtatattactaattgctcctttagcatgttcatgcaaatttacctcatcactgtataagttgtgcttaaacgaaaatctggtgaataataaaaatttgaaaaaaaatgtttcagaataaaaggactgtctctcgaaaaataaaataaaatattagcaaacttatgggatccacgcttctcatgttttgaatccaatttcattttggcgtggatgtgaacaactaatttcaaggctacgataaaatcttttcaaatctttatagtcccttgggtatttgttgtccactaaccttttgcaggaaataaaaagacaatcaaggagcagtgtacaataacttcaaacacttatatcatgctccttggtccatgggaaagagatgcacaaggaatcaagcagaacaaatgcaaaactttgttacattcgatccagttctaagcctggtaagatctatctggtaagaatctcatacaccatgtgcatcctcatctcatttctccattctgccaggatacccaccatatccattgttgccataaaataaaaagaaaaaaagattcaataaaataaaataaaataaaataaagttggctccttggtcttccaaccaagtgagttctttttgcttcacttttgtctttatttttctttttgtgtccaataaagcctcccagatacaaagacaagtgtgggggtgatcttgcacatcaacgccataaccaaagtaagatcacccagaagtgatgagccatgacgaaccacacgaggaaaattgatgcagccagacccaatgaggggtcagtcgaacctccagtttgactgaaccacctctaccatgaatcgtcctctgttttatacagagcgtaggtttgcacaatttttactttggacatccattctatcttgagtttaatttgactatcaattctaaaatatcgaagataattgaacccaagctagggatggtacaattagagtctatggtctccctgaaaatgacatgcatgcctattattctttgctcattacttgttacttgtggtgatatatccaatagggaccccatgctatctaggtaattgatgaatgagttata

SEQ ID NO: 19709 - DNA, 671 bp, Oryza sativa
atctacaatgttgtcctccttaggattttcctcaggcgtttgatcattgtgttttatcggtgcaaagtgctcatggggcatgacagtttctttactagaagtgctaggtgtatgtttcataggaaattcattctcaaataatgtagcatctctggactcaagaattgtaccaacatgcatgtcgggtactctagagtttactattaagaatctataactcacactgtggatagcataaccaaggaacacacaatcaacagtatttggtccaagtttccgctttttggctataggtacatttaccttggccaaacagccccatgttcgtaggtatgagagatttaatttcttcctttcccattcctcgaatggtgttactttcttatgcttcattggaattttattcaggacatgacacgcagtcaaaactgcctcaccccaccattccttggaaagccccgcagtgtctaacaaggcattcaccatctcagttagagtacggttctttctttcggccaccccatttgattggggtgaatagggaggcatcctctcatgaataattccaaactcttcgcaaaagaatgcaaactcattggaaaaatactccccacctctatcagacctcaaccgtttgattttcctttcaagttggttctctacctcagctt

SEQ ID NO: 19710 - DNA, 582 bp, Oryza sativa
ccctgcttgattctttgtcatgtttgttgttcctggaaataagctcaaaattgttgttccttaggaaaaggctttgatgaaatccgatcctccgactgctctacgtcgttctcctcggcgacaacaaagccaggctgccgggggcccaaaaatccagctcgatgcctgaggaagcactgccggcccgactggtcaaacaggttctcgaaagaggaagatgatcttaagcgatgatgatgacagtgaccatgagtcagccggcaaacaacctaaaagggctgctcccgcgaagaagaagaagacatccagcgcccaatgccaaagatccgaaggtctttcaggtataaacttgtcataatattcataatcatgtttactgaaatcaattaataatatcatcttgtacctcaggaaaccatcgtacattgatccgaccggtaagggcactgacccagctgctaattcagaaacggctggggaagaaaagactggctctactgatgctaccaaggctgatacctccaaggaaaaacctccaactggcagtcagtcggctactggtgaagctgatgctgacaacga

SEQ ID NO: 19711 - DNA, 1566 bp, Oryza sativa
agctccttagatgtagtagaaatctttaataagttaagaactgctccagatgtgtacttcaagaatatcaaagaggctaggaatatgggagcaagcatggcattggctatgaccaagtctctgtaccccaaaattgatgttgacgccattgacggctttgcagcaaggacaagtgaagaagatgcactttatctgattaatgatgcctagaaaactgcggagaaaattgctgtagatgtgctggataggtttcagagtactagccttagtcctgctgcgtgaattgcgagactgtagacggtgagccacgattcggggtttgtctttccatcatacttctcgataccagtcggtttaaagccggccggccaatccactcgacgcaggttgcttgtgacagctgccactccatcttcatcatcgtcgtagcggtccggtgtacggtgtcatcgattgcctctttctgctcggcggtgattgattgtgtcacgtaggtcgacgggctgtcggtgacgtggcgatcgaggctgttcagcgcggcgctctctgttcatgcgttcttcatgatccctgccctcgcgattagatcttgatcccgctatgctaaggctcggttggtgataatcttgagatcggagaggtggaactcagctgccagttggcgtccggatgctctccgagttgacaggaactgacgctgcaatcattgtctttgtctggttgattatgttaagaacatggttgggtggatcttctatgaggaggatatccaagagtgtgatcgtcgcaactgcgttttgttgtggagtgcgaaaaactgacgtggcttcaacatcttgctgtccaattagatctcgtgctcgacgtcctgatgccaaggcgcactgtcgtcgctcctcaacttcccatgccaatcgctcgcgctcctactgctcacgctgcagtcgggcttgctcttgggcttgtcgctcttgctccagccgaaggcgctcggcttcctgtcgtgcacgctgctcagcagcttctcgttatcggccataaaaacaccgaaaaagagaggagtgtagttgtcttcatagtcttcatcaaggtcgtcaaaatcgtcgaggttgttgaagtcatagtagtagccgaagtcgtcgtagtcgaggatctcggtgggttgacgagagtcgacaccgagagagctaaggtagccatctaattcttccgtggaaactatcctaagtggttgaagtatcacgccgacttccctagagccagattgaattgaggtcgaggccggattcaatctggacctatggggagaagacgctcttgtagtaaagacagcagccaaatcgtcgggcagcttcattaggatcgatggataagtcgccttgtcttgatctggttgtgaagaagtagatgagatctcgtccgagtggtttgaatccaactcggacaagatagtcttggagtagatctcggccgagtccaggaggccgaacggggcggagatggcatctactcccgactagtttaaatccaagtcgagaagagaaatcttgccgaagttgtcggtga

SEQ ID NO: 19712 - DNA, 6984 bp, Oryza sativa
gcagtatggcacacttttataagtctagtgaacggaatctgcattttgcaagtttgtcgacctagacgactcatgcttatacttacaaatttaaagactgctagtttattttgctctacggaaaacataaatttagtgaagcaaccaaaatatataaaatttgtttttcgaagcttacattgcccaatagtacttgcaactttgctcttggctgaataacccaatgacatgcactgccgcattttgtctgggtccattccaccaccatcatctatataaaacaatataacaagaaaaagaattataagtatttgagaaattctaccactgtggttccatttataaggtaagatctaaaagttccatcatagtttcataaacatgctgcactatctgatagcacttaaatgtgttaaccactccagaggcctcagtaaaagacctataatatttctgaggttgtccaaccttaaaccaatcttccattttgctttgtgcatccctaaactcctaaattttctttatgccaaattgaatctgtacatcaattaattgcgtataacataaaacagggacaagcttaaaagatcttgaatattccatgtaccacatcatgttaatactataagtcaagtcgaaacctatcaggttccagagtgaaatatatgttcactacttcacttagtttgctataacagatagaaaggggcatgttttatgttgttaatttgctatggacacagaagtttcttgtcatcaaagaaacttttgataatataaacagaaatagaggtaccaattcaagtcactataaaaaatgaattttaccaaagatttttgccaacaattaaaggtaaaaggtaaaaaggttgtgcaccttcaacaaggagcattcttgttttgtctttattattctccaacatatcaatgttcacataggtagctccatttatgaccttcggagaaaacagagctcagtaaacatacaaggattcaatgctacaaactagtgcacttaatatttcacaatacttacttcatcaagagagttatccagcagctcagccaatgctgtaacgtggataaaaatatgttagccaactggtgtgaccaaacattgattgagttgtgtgagcaaataacatggcaccgttgttgtgtctgctatagcattcatgggaagaaatggtagtgcaaaggtaaaatgaagatgaagaccataccccccagagcccacttgtggcttgttgcatttgagtgcaaaaatttaggatgtacacgaacatgatccaatccggatactgaaaagagaaagtgaatgtgaaattagaatacagaaagaaaatcacagatacttgtgtatctaatccagaccgattaagaaagaaatattacacacatacagacttccataaagaacatgtctgttgacaaattcgttgtatgagtgaaaaagagaacttccaatggaagagacggaaatacatcttcctaaatctctaccacttcatttagtttcattcctattcaacattgtacaaaggcacaaccctacttacattggcagctattttcctaaaaagtgtaatcaggtctaaaacataaaataaatagaaagaagggactaaaacaactaagggcatgtacaaagatatgtacaaagatagagtcaggtatgagctctacgctatctagagactagcatcctacaatagttggagacaatatggtctctaatcattaatgtatcgaaatattttttcttactattctttcctttctttcaccaccattcaacaaaatctgctctaataaatgctaaaatctgctctaataaatgctaagagtcgactctgagaagttgtcatgcataacaaccatatttctctttcctcctttctctttcttccatgtcatcaaatttacttgcattgcaatagagagagaccactaataaagaccattgtacatgccctaacaagcacccaagtccaagtggcacccattcctaacatataacctttcttgtttgttcatatcaatgttccaatcctcaagctctgcagttcacaggtgaagtattaactattttactctatctccagaaactccccccattgaatgctactagtcacattttcagtgctgcaaaaccttaaatgccgcatggcatgaatcgtctaaggaaagaaccaaaacatctcaactccatcaaatgacaacgagcatagagatattaaaacgatatttatgatatgacaacaagaacaggattacagaagggttacgcgaccagaaaaaaaaaataaggttacctgacgactgcggcgctccatccccaagcggcttcccgtcgtagtccccggccttccagaactgcttcgtcgcgctcttcgacggccccgccgatgcctccgcccccgccgccgccgacgccgcatgtggtagaggatcaaggaaacccgggggcagatccacggccacgcccgccgcggaaaccctagcgcgcttccccgccgatccacccgccctcacaccccgcgacctcttcgcgctgccgtccccgacgcccttcccggcggaatttgagtcgctgctactcagctcgatgaaatcctcctcgacggggcgcccccttctgccgccgccgccggcggccgccatcgccaacggcggcggccgctccaccgccgcagccgccgccgcctcggttttcaccgcccgaggattcctgcgcgaaatcgagaaattccggggatcaatctgtaaaatccaaccctatttttctcttctactatctgcgaaatatttccttatctcgccgagggatcaccttatatatagcctcggcaaaatgcccacgagagctttcctaaccggcatgtactcagacccaatgacatgtgggcccacgtaacccctgctcccacttgggcccacctgtcagtgggtagagggtagccgtgtggggagaggggctttgagggcggttattacggggagctggaaattttttcggttgcctttctttgggctctcgagcgcgtcgctcggcctttttccgcgtgtaacgcctgtgggcccggcgtgtcatagagacatcatctgaggtggatcgaggacggacgcgtgtgacagttcattagtgtatgccagtgtggcacgtactcctagcttgggtggactggtgttgccatgtggcgtgcacactaggagcagtaggagcgccactttgcagttgcatgacacgtggctcccatgcacatggatcacacaagtagcaataaatatgctacaactacaaaacaactactcaatcattattactccctccatcgcattaaagcatatacaataatactccctccattctataatataaggcacaaccacttttcttaaatattccataatataaggcatgcatgcaagcatgcaattaactatgacatcttcttcattaaattattaattttttaaattctctactctcatgttatctaatcctattggatgcttgcatatttattaggatgatccaaactacaagatgataataattatttcttggtctttgagtcgagggtggctgtgccttatattttggaatggagagagtaggtggtaagagatccacgtaggattttttttactgagctggatgagagaggggaggagagagaacaagagggcgactaatcagtcacccggctcgaggttgtagggcccgtagcgatgggcgatgagaaggaataagcgctagtcgtcctcttcctccacggctgtcgctgtcacccgcgttcatctcgtcgtcctcactcgcatccgctgcagccgccatcctcgtcctccacggcggccgccgtcgcccacatccgtcttgtcgtccacgttccccatagcattccccactgcccgtgtttgaccatttggcttatcctacagtcgagatggctctgataccaacttgtcacgcccagaaattcactaataatttccgaactaatttgtgcattaaatcctcgtccaggaatcagccgaggtacacaaactgacaatttaatatacagattcatcaatataataacgttacatacattcaaaagaaaagaaaacttcagcggaattacggtctagcgaagctccggctccactcccacaggcagctcaactggggtataagccaaacgtcttctccttcgcaacttgtcttcaactgaggtttgattgattattgcaaggtgagcatatgacatactcagcaagccacacagcaaatatgcaagtgcacaaggataccaaaggatggcataatatagggctcatttgcaaaagcagcacatagcaaacatttaaaagtagtaaaacagtagagtaattaatcatcaatattaatcaatcactgaacagcacatccatgctgcacaagctcaaccatcctgaacaaccatacccggctgtacagatctatctccaaaccaggaatgtaccattccaaaccaggagctaatcaaattatttccagttatagcatcatttattatggtgagaagtgtgagactaatcatgaaagacattgttagacccgcccataaccgcgggcacggctattcgaatagttttatctggtcagagatgtaccactgtacccacaagacacaactccacaatatgtcaccatatcatcatgtgcccatgctgaacatgtcaccatttgtgtagttgtgacaagaccccttgcataactcaacccaaagcagtgcaccgttcctggatcgtagtcaccccctcaaaaccagaggcatggactccctagcgacccccgtgggcttatctccgccacttctcagtctggtgctccacaatgagccttgctatacaaagtgtccagccgttgctcattctggcttgtggttggcacgattaatgtttcacaaccgaaactcgtgaactggtccttaattgtcatgagcacgaccatcaaaaccatatgctcacaacccaccattatcaagttttagtaggcacattaattaattaaccaatcacgatagaccatcgtgagctttcattaaatatccatcattaagtaatagtgaaacattagttatcccaattgtgtgctaatgtttctaagcatggctaagcaattatgtctaacatctagctgaaccaatatataaagctcaactagtcaaattataatagccaaggtatcaaggaatagagtaatcgatgcaaacaggcaataacaaaggaataagttcacaccacccagtgacattcgaaaataaatgcacagttgaaataaatagagaatttaaatataggatcaacatgctcaaaggaattgtgtttgggatctgtgtgacttgccttgcaatattaggtcttcaattaatcttcttgaatacttccgatgcacttacgatccttcgaaacgacggaaacgccaagctaacacgtaaaacgaggaaaaagactagtaaaaaccaaataaacagcacatgtagagtaaacaaacatgtagatcatgattttagatgaatttagagacttgaacgtcctcattccgatttcatatgaattaattacgaattttacaagatttaattccaattaaacctattaaagaaaaagactattccacattaattaaaccgtttacaaatgatttataactgagagaaaagattaaagcaaagtacagaaaagattagattatattggtagatgacatatgataaaaagaaccaatatgccattggaaagagaggaaaggatttatattgattttgggtggttgagattaatctcgaccaagagttgaccaagatcggatggcttagattgatctggtaagcgggcctcacgagataccgactcaacgagtcaattctacgtgacacgggatcacccaaataatcaaccgaaaccggcgaacggaaccggcggctctgaactaaaggacgactcaacacggacgaacgaacgaagcacggggaacatctcattcgaacgaatgagcgaacgactcaacaatggctgtgactaaaccagtgagctagacacgattcacggtaaagccccggtacggcaaagataggccggtaggaacctagggatgcacctacggctagacaacttggctaccgagcaacggctaaaacggcggctagattaaagcggcacacggctgcgacacggcggcactagggcgacttggctcggctaggtggcggcggctcggcggagacacgcggctagggttagggtgacggcacagccgatagcgatgcacgacagcggcgcggcgactgcagtacgtgcactagggcagcggctacgcggcggctagcagcggacaacagcgggtgcggtgcatagcaatgaccggctcgacgctagggcggcgacgcagcggtagcaagcggctgtggcaaagcgacggcaacgctgcacggcgtgcaggcgcagcagtggtgacgcagcaaaggcgacgcagcagcagcggcaacagcaagcgacacggccgacgtggcagcatgcagcagtgacacggcacgcggtatagcagcagcttggcagagccagcgcagcaagcagcggcgtgatggcagcaagcgacggcgcaaggcggcggcttggacagcagcggcgatgcaactagggcagcgatggcgcatgggtcgactgcggtggctaggcacacacggctacgcacgggctaaggctgcacaacagcgactacacgaagacacgattgcagctacacaaagattaaacctaaggaacggaaaggaggcctcaccggggaagaccgaagaggaagaggcaacggcgacgccagcgacaacacacggagatgacgacgacgctagggccaaacaagattagattaaattaaggccctagggaaaaacctacgccggtgaacggcatgggagcggcggttgccggcgaaccacggcacaaatatgcaaa

SEQ ID NO: 19713 - DNA, 1544 bp, Oryza sativa
ctaaccacatttattgcggtttggacgagcgcgtcacgccgcatgtagcgcagtgcagcgcgctcgtttatccggtctgtgactggtcacagaccgatcagatcgtgggttaggtggcgacaggcggtctgacgcacgcctcgccccatcccgtcaggatgagagcctccgagcactcgtccctagccgaagccggcgtgttagctcctggagatggcacgttggtcccggtcagatatatgccaggcttcatcccaaccattacaagcaagatattgtatgaagaagggcgaacatgcagattgctagactgacacgtggtggacaagaatgaccgatttgtgaccggtctgacactggtcatgtcgtcggcagacaaccatgttcccacgttgcacctgcttccggcggagtggaggtaggtatgggtcatcccatcagaaggtcattcggacagcagccattgcaagtctccgcccatttatgaagagatgacagggtgatccccgaggtcagacgagtgaggacgcgtggccacactcaaaaacaagcagtgtttttagctttctagagaaggcaagccaagtttgagtaaagataggataaagtccccaccaaaaagagagataggtagaggtggtgcatgtggtatccccttgagatataaaaggaggaccttgcccactaggaaaggggggaggatctgaggagaagatcccacgagaggaaaaaagggagaagagggtttctagagtaagagctctctggctctccagctctttgtagcttcttcagacacagatccaccagaacacaggagtagggtattacgcttctcagcggcccgaacctgtatacatcgcccgtgtcttgtgctttttccattgtcgcgaaccttccacagactaggagcttagaacctcaccctgagcccccggccgaaccggcaaaggggggcctgcgcggtctcccggtgaggagccccacgctccgtcaccaaggtaatcaagaaatagggtaatcaatgcaaactagccataacaaaggaataggttcacaccacccggtgacattcaaaaataaatgcacagttgaaataaatagagaatttaaatataggatcaacatgctcaaaggaattgtgtttgggatctgtgtgacttgccttgcaataacaggtcttcaattaatcttcttgaatacttccgatgcacttacgatccttcgaaacgacggaaacgccaagctaacacgtaaaacgaggaaaaagactagtaaaaaccaaataaacagcacatgtagagtaaacaaacatgtagatcatgattttagatgaatttagagacttgaacgtcctcattccgatttcatatgaattaattacgaattttacaagatttaattccaattaaacctattaaagaaaaagactattccacattaattaaaccgtttacaaatgatttataactgagagaaaagattaaagcaaagtacagaaaagattagattatattggtagatgacatatgataaaaagaacc

SEQ ID NO: 19714 - DNA, 7764 bp, Oryza sativa
ggggaagtggaggccggtcttcttctcctcctcgcgaacccaacggcggcagcggcgaccgaaggcgacgaccacagcgactgcgcggggctgctggagcggcggccggaggtagagagagaaggagctcgcggggagagcgtttccggcgacggcagcggacgggacttgaggggatgggtagaggacgactagggggtcctttatataggcacgggagctcggttccgggcccaaatcgacggcaaaaactcgggaaagtctagtgctctcgccggagtaaggaaatattaaaccgcgaaattggaaaggatttccatagaaacttttggggatttcttggggaaaaggaagaggagattgagaggattccattcccgcaactaattttgaaataggagcaacgggaaagccggatttgggaggagaggcggcggcaactgtgcacgagcacggctggctcgggctctgactgctcaggaagatgaacagtagcgcagggagaatatttagactttttgctgggcctcaaaaacacagcctaaggaggaatgcaaattggacttcgggaaagagaggcagagggctgcaggccgaaaagaaggaagaatgggccgagaattaaaggtgaacttttcctgtttcggcccgaaaaggaaaaggggattttaattacttttcccaattaaattaatcactgaaatgatctttgaattgttaaaaatacttccaatgctcaaataatttcaagaaaaatcatgaaaatacttggacacccaaagtacttaacaagattataataagaccatttaatgattaatttaatatgtggataattactgaaatgttctttgtattattaaaattaagaattgagctccgaaaaatccgagaaaatttcagagagtataattaatcatggagaatttaataaaaattaaatccagccatgctttaaattaatgaaattttatttcccacatttaacttcacttgtaaattaatgaacagttaatataaattcgattaataatttattaaataatttataaatcctgaaacgaaattcaggctgtgacagtttcccaattatacagtatgctgatgataccttgatccttttgaaagcttctcggtttgagcttttttctttaaggctctcctgaattcttttggtcagtccactggcctaaaagtgaactatcacaaattaagtctctatcccatcaatgtagctgaagataaggtagagttaattgctggactacttggttgcaaggttggatctatgccattcaattatttgggtttacctatggggacaaccatacctaaggtaattcattttgctcctttagtggatagagttgagagaaggctaacaataagctcagcctttttaccccagggtggtaggctgacacttatcaactatgttctttctataatcctcacatactatatgtgttctcttgaactgtctttaactgtcatcaaagccattgatacagcaagaaagaacggtttgtagagaggaaataacccaaattccaccagaaaatatttagcttcctgggagctagtgtgcaggctaaaggacaagggtggtttaggggtgataaatctaagaaaccagaatgttgttcttttattgaaacacttagataagttctatagaaatgttgatcttccttgggtggatctcatatggaaatcttattgcacttcaaagtctcttcacttagtttcaaatagaggctccttttggtggaaaaatattgtttccctggtagatgtttttagagggatgctcattgcacagtgcaaacaggaacctcactgctcttttggggatctgtgtaatggggaactaagtttcctaatcttttttgggcagcttataacaaagatgaatttgttaagatggcttgctccaagcctttggaagatgctttatgctaccaatgaatgctgaagcttatggggaatttttagttttgcaatctgaacttgacaatgtccatttaagtgaggggttgggtgatcattggagctatatttggaatgttgataagtattctgctcaaagattttaaaaaatgaattattcatgcttacagcctccaaggccgcttgtttggatctggaagacaaagcgtgtgatgaaaatcaaagtgtttgcttggctcctctctttagacagaattaatacaagggacatggtggattgcaggcactatgctaaggaaaatgatgatctcacctgtgttctttgctctgggggtataagagagataaggctacatctcttctttacctacccttttagtctccgatgttgacagtatttgggttttgattggtctccttatttaaatttcttccagatgattgttctagtgagaattcgttttggtacgaaggtttcctggagatcttctttacaactcctggtatatttggaagcaaagaaatggcttgatttttcataatgtacctccaacttttcatggatggaaagttcagttcaggaaagagcttcttctacatatgtgtagaatgaaggagcctctcaagcaattagtttttgattagttacaaattttgtaattattttgtgggtttctgtttttcctagtaagatgtaaatatttctttttatacaagctatactggtaggcaaatgcctggcagtaatttgtcaaaaaaaaatgaactttgtatttatcgtattatgttgttaatctagtatttaagtatcaaatgcaaattgcagttggggtgtcaaggatatgtgtgttagtgtgtgtattagtgtgctaaggacattttagtcttttcccatatctttgtatacaatatattcccctctagggcaaaatcaatggatcaacgatttatccccaaatccccaaaattataacatctgacatgtgaaccgtatgcacctacacttatccgctactacggtctgttaatattcaggcacaacacaacttacacgatatacaaaatgcatcaagaaaatcatcgtaagatcgattattattatgcatcaagaaaatcatcgtaagatcgattattattattaactgtttatagttaacaacagctactacgatcctctccatttctaccagcattcgaagattcacactctttgcaagccaaaaggccatgacccaaccaaacctcacctacaccccactagtcatggtaacacacaagaaccgtgtcatcctcgccacgaccaccaccaccaccatgtcgtcgccttcctctcgccacccctcgtcaccacgctctctacaaatgccagagctccggccacccccaccaccacccaagaagcctgcgccgccgaccggcatcgcgacatgggcgacgccgcggtacccgccatggtggtggaggaggaggaacaggagcacgtgttccggagcaggttcccgccggtggccgtgccggacggcgtcaccgtgccggagttcgtgctggacggcgccgaggcctacgccgacagggtggcgctcgtggaggccgcggcgggcgggcggtcgtacacgtacggcgaggtggcgcgcgacacggcgcggttcgccagggcgctccggtcggtgggcgtccggaaggggcacgtcgtcgtcgtcgcgctcccaaacctcgccgtgtaccccgtcgtgtcgctcgggatcatgtcggcgggggccgtgttctccggcgtgaacccgcgcgcgctcgccgcggagatcaagaagcaggtggaggactccgaggcgaagctggtcgttgccaacgaggtcgcgttcgacaaggtgaaggacgccggcgtgccggtgatcggcgtcggcgacagggagcggatgcctggggcgatcagctgggacgggctcctcgccgcggcggaccgcaccggcgccggggtggtgccggtggacgcggcgcagcagtccgacctgtgcgcgctcccctactcctccggcaccaccggcgtgtccaagggcgtgatgctgagccaccgcaacctggtgtccaacctctgctcgtccatgttcgccgtggcgccggagacggccgggcaggtggtgacgctggggctcatgccgttcttccacatctacggcatcaccggcatctgctgcgccacgctccggcacaagggcacggtggtggtgatggaccgcttcgacctccgcacgttcctccgtgcgctcgtcgaccaccgcgtcatgttcgcgccgctggttccccccgtgatgctcgccatggtcaagagccccgtcgccgacgagttcgacctctccgacctcgccctcaagtccgtcatgaccgccgccgcgccgctcgcccccgacctcctcgccgcgttccagcgcaagttccccggcgtgcaggtggaggaagcctacggcctcaccgagcacagctgcatcaccctcacgcacgccgccggcgacggccacggccacgtcgccaagaagagctcggtggggttcatcctgccgaacctggaggtgaagttcgtggacccggacaccgggaggtcgctgccggcgaacacgccgggggagctgtgcgtgcggagccagagcgtgatgcaggggtactacaagaggaaggaggagacggagcgcacggtggacggcaaggggtggctgcacaccggcgacgttgggtacatcgacggcgacggcgacgtgttcatcgtggacaggatcaaggagctgatcaagtacaaggggtttcaggtcgcccccgccgagctcgaggccgtcctcctctcccacccctccgttgaggacgccgccgtcttcgggtaacacccttcttcttcttcttctctgaccgtcgaaacttcaagagttgattctggagtaaagttatggagcaatcaaaaccaagctttatatttctagtttattttgtgagatcatttcagccagcttcattctaattttgtatggagtttaaactttttagttggattttaattttaaaaagatggaattgtagatggagcttttgccatgtcctaaagccatgcatgcatggatatgcagggtgccggacgaggaggccggcgaggtgccggtggcgtgcgtggtgcggcggcacggtgcggaggagggggaggaggagatagtggcgtacgtggcggagagggtggcgtcgtacaagcgggtccgggtgctgcacatcgtcgacgccatccccaagtcggtgtccgggaagatcctgaggaggcagcttagggacgagttcatcaagaggatgaaaccgtcagcttgattaattaacagacataaatcattgtgattgatatcaagaaccgaaagcatgcaaggtgttaaattgcataaaaatggagttggataagtgtttcatcatcaccgagtatatgtacgtacatgttagtgattatcgtgtgaaattaccatggaaatgaattctaagtctttaatttaagtacatttatcttcgtttcttttttacaaatagccatgcttatttttttttaaaaaaaactaggaagatagtccgcgcatatgcgcgagcatcttatttaatattgtttgaatttttattatggaagcttatatgtgggtgattttttctttaaatattctgactctattctaaatctatttccgtcgataatttatttaagattgcttatgatttttttctaattacccttgcaacgtataaatcacttttattaggtcaattcttacgataaagtatattttcattacatggattctcatatatatataagtttaacatggtatgcttctcctagttaaccgaatttatagtggaatatccatgtaccaattatatttaatactggatggataccccacgtattgctgcggaatttttatatccttcggagcattcccctattgtcatgcataaagcaatattcctcattcgagtataaaaagataacatgaaaaattatatgaaaaattataggaaccaaaaactgaaaacaaataaccaagtatctgtaattctgagctggaattgcatagcatgaaaaaaaattatgcgaggttaacgtcaagaagattaaatataacacgtaatatgggacaaaataaaatggattactcttgaagtataaaattggatgcaaaagcatatacctaacaaaaaaaactaataaatttaatttggcattcagtttagagggttaaaaatgtacgatgcaaaatatttttcagcatgaggtcccaacgaactgaaatatgagcgggtgactgataactcgtacttcagatccacatgattgttttttcctcatagtccatcttaatacccatttgcagctaagtgtagagtattgaatgggagattctgatattccagagaaaaatataaaccatcagtgcacggtaatatgagaaaacaaaagtacaaactgacatgaagatgccacattaacggtaatatgagcaaacaaaagtacaaactgacacggagatgccgcaggaatttagagaggaatgggagggagaagagatcaagtaattacatgtgcttgtcggagtgattaaataattacacaatgatgttttaaccttttttattctagtaggattggaccatgacccttatagcagattttaccaatagtcgacgaatggatggaactatttatatacatgaggaggctatgcagcatgaacaccgatgaaatgatgagggaaccgttggtttttaggcgatatgggaggtgattggacgaatcgatcgataaacgtgcagacggacacgtgcgcaatattgaagtgaacttttacgtggtgtcgcatggcatccatcagggatggcaaaccgatcatatgggttgggccagttggctatgccctatgctgggctaggattaaatatcaatcgacatggatgaacagtcagatgagaagcaaagaagcggatagataaaaatcgaacagctatgctgctattagtaatgatgtggctcactctcaagatagcaaattagtattaattatactaagtgcgatcaattatatagttatactaaaaaatcggcatgcttagtcagcctatatatacttattatcactaaaaaatattacatggtaaaattggtgtgctcactaatatttaaaatatgtatatacttcattttcttatttgaatttttagagttttcataaaatattttaaaaagaaaattgtgaaccactcttttagttttaacaaatgaatatatgatattaaaaacatttatggacgtatatataaatgatttatttattatgtataagtgaaaaacatatgtgtcataaaaaatatagaactttatatcatgtcaaccaaaagtataaaatttaatgtgtcattttatacataaattttgatgaaatccaaaaaatttaatgtgtcattttatacataaattttgataaaatccaaacaagtaaagttatttttaagatttatcaaaattaattggttaaaatatatgatttgaatatttgaaagatcaattatttagtatattcagagttataggagtagtaccgagtaggcgtagtatatttaaagaaggaaaatgaatgtaaattcgttgttttagatttgtttttttcttaataatgttgggtttactatatattctagagttataggagtagtaccgagtgtggtatatttatagaaggcaaagaagtaaaagtttttgtgattgaaaaagggagatagttttggaagcctctggaatccata

SEQ ID NO: 19715 - DNA, 2407 bp, Oryza sativa
cctaaaactccaacaaaacaaacctagctacctccatcttcttcaactccggtcgtcggcccccgaggaaacccacctccgtcgacttcttcttcaactccggttgccggccctcttcttcttcaactccggccgccaccccccgacacctacatcttcttcttcagctccggctgccatcccctgacatctccatcttcttcttcaacttcggtaagccgtgcctccgcctctccgatggacggcgccatggtgcgacctcaccgctgtcgtcctctgcctcgtccacgaacgcctcccatgcctcgtcgattggcgccgcatggcccgcgtatgccacacctggcgcactgccgtcaagggggagcagagcagaaactgccggagcgctggctcccatggattctcatatcgtcttgccctccgtcgctgccgttgtgtggccaacactggtgaaatagcaagagagaagaaattaaagagagagaaaagaaggaatgtgtggtggagatgtagctgtgtgtgtggataaggacgacgttcgtccgtccggaagcatttttcagataaatatctttacaccaccatgaattgtatgggacaatcgggcgataaattaagatggtgaaaggaaaatactctgtttgcttacagaccaaaccctaatgaccccacaatcgtcccacaccaagctcacaagtcccaaccgtcgcttggcgatcggacggcgtggatccaatccaacgagaccctcccccaacccttgtccgccgcgtctctcgccgtcggtcgcatcgcacccccgcgaatccccccccacaggccaacagcaaagcagaggcgaagggaagaagaagaagaagaagcggcggcggcggcggccatggcgtggcgtgcgaacctctcccggggcgtgaaggagatccgcttcctcttctgccaatcctcccccgccagcgcccccgcgaggtaccgtccgctcccccgtctcccctttctctctctagggtcctagacccgatctgaagaagaaccgcggcgattccttcctttcgcagggagttcgtgaagaagaactacggcgacatcaaggcgcgcaacccgtccctccccgtcctcatccgcgagtgctccggcgtcgagccccagctgtgggcgcgctacggtacgcgttctttttttttttcctctcttctccatggaatccgagatcctctgagccggttcttgaactttttgttcttatatcttttgcggcgtgaaatgttaggttaggataccggatcgtgttgtcttttagagttgggcatcataggttacattgcttatgtaaaatactagaatgtgtgaatgcttgagaaggaatggcacattaggttgattgcgatctgaatgctttctttaaggaaaaatatttatagagaagcattaggtttgtccaatgatataatgctaacacaatgttgttaaaaaatggccaagatttggagaaggagaaaaacaggggacgacaatgtggactagctgtagagttattgttgtgatagtaagatcatctgttcaagtccacactttcctgtgggttctactaattaaaaacctaagatacatggtttctctcatatgttcttggtatttttagacaagaaaaacattccatgacaattgtgagtgttacttctattctgcttgatctgccacagacagccaaatggtattgtgcgtgcagatgttcaaatgaactactacatgcactggatctggatttggtataacttactacaaattacagacatagtgacaacttctaactcaaggcataaacacaaaaaaaaactgaatagtctacatgactgtgaagaaaatctagagaagcttaggggatgtttggccaactttgggttaagaccagctcacaggattgacggcttaaaagcccaaagctcgctttattttgaaaatcacacacacacacacaaactctttgttgggacttgggatcttacttatggtccatatggattcttccaatattattacgatgatactctgggtatattaaggttccctcttaaacaccggcatttgtttggatgaatataaataaaagattgggatagatggaagagtacccatatggagttgtctatgtgagcaggttgaattggttgaacataatgtgacaatacctagggaactaggaaacactcagttgtaggcacctacaggtggtggaggtgaggagaggtaagatagggaggttgccttatagtttatagcccaaagctagtctaacctagcaaacaaggagaaaataaatattttctgtgaggataaatttccttttacgcattgggatcgctaagatggttaggattataaacttatcatccatcttacccaacca

SEQ ID NO: 19716 - DNA, 3073 bp, Oryza sativa
cccaaaatatgttgcaaagcgaataatagtaataaaagtacaagatctcaatattgaaataatgcagtgttcatctagtcgctaaacgctagtcggacggccacctactgactagcgactaggctgattaggcggcgactagacggattaggcaaattaggcgaattagacgttttttctatttctttcacacaaaaatacttattctagacattcggtactcggtaaatataggcatttaggcaaatagcataaatcatagttaagttcagaaatcatcaagtccatacaacgcactgacactgcacatgaagcattgggtttagtacaaatctatagggatagcgaacacatcagtatagctactgtacatgtacatcataattcataaatcataactttatagatctgaggggctggagctaggagagaggaagaaaaatttatctggaactggaagaacagaggaggtgaggtggtggaggggagcctgatcccctgatggcctgatttagggttggcgtaggctgcttgggtggtttcatgcttgactgcttcaatcggcgtgtttgccaccttccattgacagcaaggatgaaggatgagagggagagcaggagcagcagaggagggggatgaacgtggagcagcagaggaggagaggtaagaacgtagcggcacgatggaagatcgatgggtgcggcaacgaagtcgtcgctcgtgtcggtgtgaaaaagaggtaggcagggattgcgctctctctccatgctctcaaataaggcaacctaaatccctttctataccgagtcggtcccacgtggtgcttctaaattttatcatgcccaaattttgatttctatcacctagtcgccgcctagacgcactgtcccgttgtctaattgcgcccaggcaccgtcctgtctaggccgtctaggccgtctaggaccgactaggaccgtctaggcggtaaatcgactaattcactgcctagggtgtaaactggacaaattgtcgctgactagcgattaatcaccgtctagacgggctaggcggttgtttaggcgaacattgaaataatgtcacgatcacatgaatctaaacttccaagaaacgagttcgagatcattactacagacataacccagaaataatgcattactacatagattgtgaaatgaggaacattattggaaagtctaatcaaatcatttagcgtggtagctcagctgaagcaatgaactcatgctctaggctatagcatctttggctcagctgatccgatgcattagcacggtgaacagccgttgtctgtgtaacattgcgcaaggactgtaatgtcatctctacttgcttcatggtaggtctttcttcgcctcggggactcaagcacatctccgcaagcaaggtaacattgttaatctcttcctctgttgcttcttcgtatatcttagtggtaacaatctcacttaatggccttaccttcacctcctcaagaaaataaccggccaaattcaactttaagccattctcacttgtaaaaatcggctctttcatgagaagtagctccaatagtaccacaccaaaactatacacatcgcttttttcgtttagacactcagtttgacaatactctggatctaaataaccaaatgggccttgcacctttgtgacaatatgggtttgatcgatagaaaccaatcttgacgtaccaaaatctgaaactttggtagtgtaatttgcatctaacagtatattagaggacttcacatcacgatgaaaaactgatactgaagctgcagagtggagataatagagggctccagcaacttctgtagcaatccttaaggtgtcttcccaagacagcaagctaccattactcgaattgtaacgcaagagttcaaataatgatccgttggaaataaaatcatacaccaatagtgggacctcagtttcaagacaacacccaaaaagtttaacgatattccgatggttgatccgtaaaagaatagcgacttcatttatgaagtgagtgatctcaccttgtttgatcgtcatagactttttaatggccacgacacgttggtctgataagatgcctttgtaaactgtaccgtgtcctccttggccaagtattcttgtgtgatcaaagttgtttttctagctcttctaaagtgaagatactcattctatcagtagtggtttcatcacacgatattagttgttctaggagaagtccttcgttcttacgaaaattcttcctacgtagccgcttctggatacctttcttccatttatggaagagcatttttgcgcttaagccaggcagtagaattccaaagccagcactaagtccaatgacgatacctaaataatgaggcagccgatggttatgcatgctttgctagtacattatttactttttttttaattttctttttctgcatggtgaaattgaatggagtacataactcaccaaaaagaagatttttttgctttttcactgaagtgcaccgctttgttttgtcattgtactctgatttagcagggcacttgatgcaagtgtagttaccgacagtattattgcatatttctggacagatgcctggtgcagtggagcattcgtcaacatcggcaaccacgtacatgttgcagtaattaagacgtgagggattttagcagtctaagacaagagagaaaatatatttgtaataaggggagagtataacaatatactacctccgtcccaaaaaaattgtatttctagctgtaaggttttgttccataaaaattgtatttctagacatgtggggtccaacaaattgattcatctagataagtttccttaagttctcttaacttgtaatttaattatgctaattatatgggttaattatcttaaacttccttttaatcatttgtatatatcgaatgtgtgcatgcaatggattcattaaataaggtcatcgtggttattttctaatcctactgatttgtcctaaattagctagaaatgtaatttttatgcgacggagagagtaccaatatatatgttggctgtgtccaagtgcgttaa

SEQ ID NO: 19717 - DNA, 3048 bp, Oryza sativa
atgcttgcacttgcacctataaccaatatacccatcacctgtgttgacggccaaacacgtactgttaacgctgacacatgcatatccggtggtattctgctgcgcctctttgcaggtttggtttgtgatggcaaaatgcagattcttaaccacaaagtcctttgctgaaccatcggagactctagcactagccgtaccatccatggcaaggaactcctcgtagtgctcaccggccaagataatgagcccttcgctgatatctatgcgaacaagcttggtcggtgttgacggctcgtcggtgtatcttgttgcccaccacaagaggtcagggtttgtactcttgttgtctttgtagtaggtgcatctgagcaggaaatgctgatttgcagagcagcctttttctaggccaaatggatatggaacgctgatatttccacatgacgggctacaattgttcttactcggaaaccgatcatatcttgcgtccggcaatcctgcattgagaaaaccatgatatgtcaacagcaataatttaaaattgatgctaattacgtactgtacatatactattgatgctttgaacattaacatatatatgttaatttatcgttcccaccgtatattttcgtaagacctacgtactttgatttcgaaaggtcagattttataaatcttgaccaacaggcagtcaaattacaaaaacatttagtgtataaattcatgtttataccaacatatttcaatttcaaaatacttttacaaaatgttggtattatagatatgagggattttactgttctcgaaaagttaccgcgagagttaccgtatttcccaacgtaaaatttaataactctcgatgccttttgtactagaagacaacaaatttatactaaaaaattagtacttttttttatctctcaaggactataaaattactctacagacatatacagaatatatatatttttcataaatcaatagaaacattattttccttagaagatttttgagagacatagatatagatagaggtgtaaaaaattataagcatgcatatacctacatcacgccggcagccattgggtgcatacgggttcccttgatacccatcggtgcacttgcataagtaaccagcacgggaagctgtaaagctcaagttatcatcgcaccggctgtgcttgctggcacaggcatagctgctcttgtcacgcttggcttcagcgcacgtcgaatgatccacaatggcccacccaagtcgcacgccgtcgttctcgattctgacgctgtcgacactggttcgctggccttcgccgtgttcatgccgatggacaaactggagttgaaaaccacggacgatgggaatattccgttggcactcaccctcgtcactggtgtcatcaatattggtaggctgggtaagcgaacacaagattatcctcttcgaactgtaggcatcgagcaagtatacatcaaagttgccatgtccgatggttacccttgcactgtcacgtacggagaaagaatcgccaggtaccgtccatgacacattgtacagatcgacaccagatctcatagggatgtcaagtgaaaagttcacatagactgcttattataaaaaaaaaacaagttagatgactaagacataatgatgataagaaaaccaatttagttctgattgaaagttattttatggctgtggcttacatacgccaaaggcatattgggatggataacgagccatctcggctcgtttgtgctgattatcttaacgagccagctactgtgtcacttgaacattcttaagcaagtgtgaccagcttgttgctcctagtggttgccaccaagcttatagaagagctttatgccagtggtctctcggagacggttgtagggatcaagataagacaaccctaggaggggattgtgaaggggtttggagatcgcctacacgcaatttagttagggaagactaaggtaaaaaaaaaaaaacttgtgtaaaatattgcctgtgtgtgtcacacatctatctacatgaaaccattaccacatgattaattgagtactaactattttaaatttcaaaaatagattaacataatttttaaaagtaactttcctatagaaatttttttttaaaaaaaacaggaagcatacgcgcggaaaacgatgtgctttctcttgaaccaccccacgaactaacgcagagcagataattcctcccaccactctaattgattatcataaacttcttttgacacacatagacgaccacacttaccccccaaccccacaacccccacatagagctacgcacagtggcacacaatagaaacatagtacgtacgtacatacgtaccatagccggcggccccgatgctgttgatgacttgggtaaagccatcgctgaggaagagcgttgggggctgcgtggtggtgttgcaaacgagctggaagtcatggccccgggcgcagccggcgccgatgccgaaagggtaatcgaaggtcaggtcaccgcagctcttggcacagccagcgccatagccacctccggcgccagcgctggtctgtgcagctgccaccgttggtgccccagctgcacatgacgaagctggtaggagcagcgctagacatgccagtagcacatcaacgacgacggcagccatcgtcgtccagcctataacacccagttagcttacgcctgtggccttgaaattaactccgaagctctagctcgtcagtatatatatctatcttctgcatataataggaactttcctagtaggttgaggtataatcctggatcttcctaatatgttggatgtatgccctctttatgggaggaaaatatttactacaaataaaatatatagtgaaaacctgaaaataatcgttgaatttagaaatagtaaaagtttttactcttgattacgcggataaatttcaaacgtccatttttatattcaacggttgtttttaggtttccatcacatatgtgatttgaataattttcctgctttgtggtcgcgtggacctgtagttgtcggtaca

SEQ ID NO: 19718 - DNA, 3221 bp, Oryza sativa
aactttgcttccgacatggttggttccattccaccaagtttcgacgtcaggggaatgggacgaggttaaaggagtcaggttttggaactgacagattagactccaagtttgtctagtaaaaacgcattcactgaacagatgattcgtgtcttcaaaggcgcaagtgcacaggcagcaaatctaattacatggccaatgtcttcgaagtaaattttgtgcagtgagagttttttgatgaaggactagccatccgaagaatctcattttgggttctgccggggccttccaaagtgaaaggtagtcgaactaagcaaaggaccctacaaactggtaaagatacgcacttttggctgtgtaggtacctgaatcagtccaattccaggtaatgttatccggttcttgggaaagcgtaaccagatgaagtaaactggtaaagatacgcacttttggctcctagctgcaataactcgtgaatttcctccactgaagtaaattgtctgaaagaggttagccatttattatttgtgagttcaacttgcaccgatctttgttttctgtttgccagactaaaacatcttggtgcaatgtcttttggacagcgattttgaagccagttgtcatgccaaaatcttgtttttgcgccatttccaaccgaaatagtcgttgcagcttggaaaagtctatggtcagattcatcacaaggcaggctcatgcccacccatggcttttcttcctccttccaattaaaccataaccaacgaaggcgcaatgccctggaaaaacgctctagttccaggacaccagcacctcccaaggcctttggtttacagacggtttaccagttgatcagactatctcccgggtttgaatggtcgggatcttcacccttccataggaaagatcttctgaaacgatcgattcttttgaaaacccactttggagcttgtaggacagtaagatgatgagttggcatagcacttagaacagatgatactagggcttgacgtcccgcagaagtgaaaaaacgccctttccaacctggtagcctagacccaatcttgtctattaaaggaaggaagtcaattttccttagttttctgaaatgaagaggtagtccaagatatttgcaggggaaatattttgtttggcccggccatccagcaagaagattttgcagatcgatgccttcgcatctgatggggtagatttcagttttgttgatatttgtgtgtagcccagaagcttgtgcaaagcatgccagtatatgagaaagagctgtcaactcttcttgtttcgggtttgcaaaaaccgcaacatcgtcagcatatagcgagcacctgaatctcccatttcttaccccaaggggagcaaggacattgacattttctgcttcttttaggattcgatgaaaaggcttcatagccaggatgaaaagcattggggatagtggatcaccttgtcgtaggcccctagcatggttgattttttgccccggggacccatttaagagcacctgggatgaggaggtggagaaaagattagtgatccaatttaaccatcggtttccaaaaccaaattgtcgaagaatctctaggaggtaggaccaattcacggtgtcaaagccttcgcaatgtctatcttgatgaacaggctttgtttttttgtcctgtggagcagctttaccatgttttgcacataaaggaagttgtcgtgaattgcccttttgcggacaaaagcgctttgattttgagaaatgtaattgcaaatttgcctatttacaaaattaccattacaattcatctattcgtagccgtgtcattgtaattttacaaaattagaatcgtgccattgccgtcatgtttaacattcatctccttccttttccgtcttcttctttctttctcccatcttcttctcgaagggcttacatagtgccgaaaggcttacatagcaaatatgtacatttttataagttggcgatttgggtgccacccgtttagacatagaaacgcttgagggaagcagcgttccaggagtggtcgaactcttcgccttccagcgttgctaggctaaccactacaatcaagcatcagttggcgcagcgtgcacttcgtggcgttggctatgacctatggtgtatatgctagaaaataaacagcaagcaaggacatttgattctacacgtcaacacaaggatgaaagatcctttctttctctctccttgcttgaacagtgcaagagagctctccagttctttctttcctttgctcatcggaccctttgtcctctctgtctccgaagtcaccatcaccagttaggggatgggggtccgacgagtggtcgggcttgtcccactgtcaagttttacccacagtttgtgcaattcagtagaagaagttgtgtcatgctccttcgtcctagaggtgcttagccatggatggagttgctgaaacctgtttcagtactccctattccaccagtactcatcaggtaagtactagacaccctactcaagtttcagtactccctattccaccagtactcatcgggaaagtactagacgccctactctttagtgtgtttagcttccaattctccaaatttgcatgcgaagaggttgtgccggcttgtccaactcttcttgggcaactacattcagaatgatgcgaacccgctagggtttgtggcccgatctttcgatgagaggtaagggataactcaattagatgaagtcgacgttcacggcccgactacaactgtccaaagacgctgcgccttagcaaccgatacaccgtctccaatggtcgccgcgaatttgtggtgcgcgtcaacccggccacgagggcactcgtcctgcaagcaatcgaagaacaagcaagaacaagtaggacaagcactgaaattgctagataaagatgaaagtttcactatcaaacacaatatggtggggttccgattacaggcagacgggcggtttagccaacacgcgcgctgcgagccggtagcaagaagctatctctatcatcaaaacccgcctgttcttggcggcgactagaggtataagaagaggggaagaacgaccatagggtcgtgctccaaccctaagacgcgcccctaatgggcccaacttggatacacagcccattgggccaaaagaggtgacgcagcaccatggacagaatatagtcgggagtaaaatgacaattgcggccgctccagaa

SEQ ID NO: 19719 - DNA, 2248 bp, Oryza sativa
ttaacatcaactcagcacgttgcttagcatcaaaattcagtttttcagaagatggtaaaggcatcaaatcaattggagcacgaggcaacaaaccatacacaatctgaaatgggcacatttttgtagtagaatgcaaggaacgattataagcaaattcaatatgaggcaagcattcttcccacatcttgatatttttcttcaaaacagccctaagcatagtagacaaggttctattcaccacttcagtttgtccatcagtttggggatgacaagtagtagaaaacaaaagtttagtccccaatttagcccacaaagttctccaaaaatggctaagaaattttgtgtcacgatcagaaacaattgtggttggcacaccatgcaagcgaacaatttctcgaaagaacaaatcagcgatatgagaagcatcatcagttttatgacatggtatgaaatgtgccattttagaaaatctatccacaaccacaaaaatgctatcacgccccctcttggtcctaggcaatcctaacacaaaatccattgaaatatcttcccaaggaacagtaggaacaggaagaggcatatacaaaccatgtggatgtaagcgtgacttagccttttgacatgtagcgcagcgagcaacgaacctgccaacatctcttcgcatctgtggccaaaagaaatgactagcaaggatgtcatgtgtcttcttggcaccaaaatgtcccatcaaaccgcctccatgcgcttcctgcaacaacaacaagcgaacggagctagctggaatgcatagcttgttagctctgaaaacaaacccatcattgatgacgaatttgttctatgttcttccatccttacaatgcagcaacacatcattaaaatcagcatcatgcacatattggtctttgattgtttccaggccaaaaatcttatagtcaagttgtgtcaacaaagtgtatcttctagacaaagcatcagcaatgatgttctccttccctttcttgtgtttgataacataaggaaaagattcaataaattcaacccatttagcatgtctacggttcagcttcccttgactatgaatatgcttcaaagactcatgatcagaatgtatgacaaattccttgggccacaaataatgctgccatgtttctaaagttcgcacaagagcatacaattccttatcataagtagaataattcagaacaggcccactcaacttttcactaaaatatgcaacaggttttccttcttgtagcaaaacaccacccaatccaatcccactagcatcacattcaagttcaaaagtcttattaaaatcgggaagttgaaggagaggtgcatgggtcaacttatctttcaacatgtggaaggcgttctcttgtgatgtgccccaagtgaaaggcactcccttctttgtaagcgcattcaatggtgcagcaatggtgctgaaatcctgcacaaagcggcgatagaaccccgcgagtcctagaaagctccgcacttgtgagaccgttttaggagtcggccaactctgaattgcctcaaccttggcttgatcaacctcaatcccctgcggagttacaacatagccaagaaaagaaactctatctgtgcaaaaggtgcacttctcaaggttaccaaataaacgtgcatcacgaagagcattaaaaacagcacgtaaatgattaaaatgttcacccatagacttgctgtaaatcaagatatcatcaaagtagaccaccacaaattttccaatgaaaggacgcaaaacctcattcatcaacctcatgaaagtggtgggtgcattagttaaaccaaaaggcatcactaaccactcatacaacccaaacttcgttttaaatgctgttttccattcatcacctaagttcatacgaatctggtggtaaccactacgcaaatcaactttggagaacacaatagagccactcaattcatcaagcatatcatctaacctaggaataggatgacgatatcgaatggtaatgttattaatagctctacaatcaacacacatacgccatgaaccatctttctttggtaccaaaattaccagaaccgcacatggactaagagactcgcgtacataccctttatcaagcaactcatgaacttgacgctgaatctccttggtttcctcagggttggttcggtatggcgcacggttcggtagggaagcacctgggatcaagtcgatttgatgctcaatgccgcgcaccggtggcagccc

SEQ ID NO: 19720 - DNA, 1622 bp, Oryza sativa
ctgcacccctgtgctcttccggtggctcattatctgcatggtcagccgcaagcaaagcaagtgtatcatcatcgaaatcaatagcagaggagtactcaccatcgtttttgactaccaaaactcgcttgctagggcagtcacgctgcacatgcccaaagcccttgcaacggtggcactgaacatctctcattcggcctgtggatgccattgaagaagcactcggtgctggctgagcagcctttgtcgctgacttgtcactagatggaggaggtgctgctcgactggttgtgggtgtggaagatggagaaacagtacggccggccggaggagtggtgcgtgtctgccatgatgaagttttacctgcagaaaaattagccttggcactagcacgtcgtccctgcacttccctttcagccttacaagcaagatgaaacaatcgggtcatattagtgtaatctttatagtctacgatgtcataaatctcgcggtttaacccacccaaaaatctagccatggcagtgtcctcagtttcctctaaattacaacgaagcaagcccatttgtaactcctaataatattcctctacacttttcgcaccctgtctcaattgttgcaacctattcagcaagtcacgtgcatagtaagaaggaacaaatctagcccgcatgacccgtttcaaagcatcccaagtttgtggcatgttattaggatttttcttgccatgttctatccaccataccgaagcaaaatcggtgaactcactcgtagcagctctaactctagtgctctcaggaaactcatggcatgcaaatttttggtcaacagcaatctcccaagagaggtacgcatcaggatcatattttccatcaaaaggaggaatcttaaatttaattttagaaaaagcatcatcattattgcgtacctcgcgtcggcggcgaccacccatacctcgtcgattgttgtgtagccgtcgacgatctcgagcatctcgatcatcttgttcagtgtcagcaatatattcatcctccaaattatcctcgacgtactctccgtcaatgtcatcgtcattacccccaccattgcctccagcattgagagcatcaaaatgcctcacaagagcagcaaggctagtgtcaatgcgggcgaccgctgtctccagccctgtaagcttagtgttggtggagatctgcgtggactccaattgtccaatcttctcatttgtcacctgcaaatctgtatcaagtccttctgtgtgctgcttcacttgccttgtaaagtattggatgatgcctttggtgcgtggggaatgagatgcaccctcctcatctttatcctctggacctgccatggtttagaaatgaaggacaacaaaacaatggaggatgtaatgtaagccctacacaactattgggatgtagcttttgcaagacgctcactctcacttcactcgcagcttgtctcacaagctcttaccagttcttaccttgcccacaggagggggacagcaacccacaagttagcaaccgtggaacgaggtgtatcggtgctgtagcaacaagacctgtcaagctgtagtcgggtttgtggtggagctgttggtgggctgaaagcaatgctcaaga

SEQ ID NO: 19721 - DNA, 4045 bp, Oryza sativa
ccccaattcggcttcaacccgatggagctctcttcaaaacatatctttcggcgttagtctttctgtttgtttggaggttgtaaagaagataaattgactcaggctatttcttcagcttagaactataaactttgaggtacccagttttgaactaccgcagacttgtttcatagctttcaactaagcggcagacccgacgcgactgacggataatccaacgttaatagcaggtctaattccgcgataaaagagctctgtttccaaacagatttgtccatctgtaatggagatcacattggtggggatataggtcgcctcggggaataccaccagtagagtctgcagaaggtgtcgttcaggccatcggctgtggttcagaagtgggctcgacctgctttgggatggatgaaactgaacactgatggagcactgaacttgcaggatggagttgcgggtgcaggaattgttgcacgttcgtttgtcgttggggattcattgctcgttctgcggttataagtaacgtagccagccaaatttctaggacctatatcattaccaactccagacatcacagtttttccaaaaatatggacctgaagactggcttctccgaccttccacccgatcctgggcgatcccttatcgccactagaaatttgaaaattttgaaccgtgccactccatcacgttttccgtcaccctcctggacgtgggacccacatgtcagttctatcttcctccattattcctcttctttcttccccatctcttccttcatccccgcgatgggagcaccggtggtggtgaatgcagaggagctcgcgggggcgccggtgggagcgccggtcggtgcagactgcagaggcggtgggggtgaccgcagacaaggcaagggcggagggagcattggtgtctagggcatcagtgggcggagtcggaggagactgctgccatttctgtacattcaatgtactctactgatagaggaatacataaagttgaacataataaaataagaaattgaaagatttcgttgaaattgttcgtttggaaatttcccgaaaagctaattataggttcttctctccatcggaacaatagggccgttatgcttattactaaacttgttgaagagatgaaatagaaccaaggtctatctttttgatcagagattaaatcgatcatcagaattaggccaaaaattaggatacattctgggaaaatgaaacttccctggaagagaagcaatccttcttttttttttgtctgaatattcagttaagaccattccaaggctccttttcgccatgcataaactaaaccaacaactaggataagcacaaaaatgaaagcttcgataaaaacggatatacccaatacgtcgaaactcattgcccaagggtagagaaagaccgtttccacatcaaaaacaacaaaaactagcgcaaacatgtaatagcgtattcagaattgtaaccaagcccccccccatgggttctatacccgattcataactagaaagcttctctggtccttcacgaaccggagcttaaaagtgctgaaatccaaaatgctaaaataggaataaggcttgctattattagaaatgcccaaaaaatattatattcgtgaagcagaaacataaatgtactcccattaatgtggaataggcggaactgaattagtcaattcaagtcagcattgtcaatttatacagaatttctctcttttcctcggtgaaacaaggatcggtttttctcaaaccaaagggcttagtttagcccaccatgccgacgaggtccccggtcgttattgtgactgctgcttgtccaccatgccgactgatgcagtgctgcttgtcccatcaagccaaaaatgacgatggactgagacctcgccactatcacgatgagcttttgccaccgccaccgaaattgctcgtgccgcgactactgttgcttgctctgccattgttgtgactgttgcaccatggactcttgtcctttgccgggatggaggaagcggtggccggggacctcgtcgggggagcaggcagcggggccatcttgggtgccgggatgggggccactcccggggcctgcacagcggccgtgacggcgaggagggtgacgatgatggcgacgacggcgaagcgagccatcagagcagcgtactagcgatggattaattgaggagagggtccttgctgatagcgcacccctctagctgccgctgccttagccgcgcatcatggaggtcctcggcaacggtggcaaggatgggtactcagtcgtcggtgatgcctcctccaccaccacctcctcctcccttgaacggtgacagagaccgcgtggctcaccggctccgagacgaggtgctcgacaacaacgacgacgcaggcgcagcctggcccgacctctctaagacaatgatggagacgacggagacgacacctcctgccgcatctacggtggtggagagagaggaagaggaaagagaagagagggaagggaggtggggcccacgtgcagctgggggctaataaagatttttgacggaaaacgtgatggagtggcatggatccaatttccacaattttcagtgccacgtagccgatatactgaatagtagtgacatttttttgaattgacatatttgcagtggcatgaatccaattaacccagtaagtaaagataccgatatagttgaactgcctcctttttccttcccgcacatctgatccaaatctctacaaaacaagaaaacagacaaaaacgtgatttgcaatcaaatatacaagctattacaagaacaacggatatacaagctattaccagaacaaaggatgtaccttcacgagcatgagagcgtcgaacacctcgcgatctagcgacgcagccctgagaaacaagaatcacatactaggtgccctccaacgaagtactaccaagaatcggatgtgaaggtaggctggataggcacctgaggatgcgcttgatctggggaggggagaacttagcgaggtccataccccactgcacggcgcgacgagcctcccgtttcaggtcgttgcggctcttcctgagggcctcgccggcgccgtctccggcattcgaatcgtccgagtcttcgacatcggagggcaaagggcccgcggggcggagggcgcgcggtagagataggcggtgcgaggaggacgcgagggaggagaagagacagctcgggttgagggagggaaggagcgaacgccgcagcggcgcggccgcggcggcaacggcggcggacgccatagggtggtgaggactgctgattttctgcggttttggacgggttggtagtgggcttatctacttggtagaaggcctacgacgggggaaataagttcatccgaggtccctcaacttgtcaacaaatccgactttcgtccttcaaccaaaaaaccagatacaacaggtccctcaactatcaaaaccagtgcaaaccaagtccattggcggtttggaaggcggttttggctgacgtgacgccaacgtggctagtttaacttagtctttgtcccacgtggcatttgacgtggagcttatgtggcaatttgaatccaaaaataataaacccgtggccccacatatcagcaacaaacacaaaataattaaaaatggtggggctcacgtgggccccatatgtcagcctcacctcccttcttccctatcccctctctctttcctctctcttcttccctctcccttctcttcaacttcccttcccggcttcccgcaggcgagcgaggaggcgccctcggcgacctcgcgcgccaccgtcgcactccaccttcaagccgccgcgttcctccggtggtcaatccccatcggcgaggtccccgtcgtgcagtgactcatcaaggcggcaagcaacgtcgtcacaggtcctcgtcgtcgccggtcacctaccagccgctcgacccctggctccaatcctccgccgccccatcatcacctccctctcccgcatcctccccacctccaccttcctcctgggctgcaggaat

SEQ ID NO: 19722 - DNA, 3015 bp, Oryza sativa
gcgtctggcgccaacttccataagcggacggtgagcacgccgttgtcgagggaggcggcaatggagtcgaggtcggccgccgcccacatgacaaaaagggaagggagagaggacaaaggagtagagagcggttgccgccgctccacccgtcccgctccgcaccgccggcctactctgcccgccgtcgctgcttcggcctcacgccccgctccgctgccagccgtccagccccgccgctccgtccttcgccgcccacatgccgaaaaggggaagggagcgatgagtcgggagcggtcgccggtcgccgccgctcaacccgtcgcccgctccggccaccccgctccgctttgtagcttgctctggcggtcggagctgccgtccgctcagctccggtcgccgcctgcctttgctgtgagcctctgactccagcgagaggagaaagagagatattgaggatgacgtatggggccaatgggccccaccatttattattattgttgtgcgtagctgacatgtgggccgtatgagctttttctagatctaattgccacgtaagcgccacgtcaatgccacgtcagtcaaaaccagagaccaatactgccgagggatctcatttgcatggttttgtaagttgagggatgttttgtatctggttttgcggactgaggacgaaaatcagattgggcgacaaattgagggacctagagtgaacttattccacgacggggcactggtagttccgaccgtttagcaaaaagttcactttgtgtccttcgacgggttgggttttgtccacgtacctcaaccgtaaaaccaaatatacaaatcccaacttgatgcacatgcacgtggagtgggtcggggtcgacccatctaccaattgacccagctcatataacatatggggccaaaacaggactgcttaggaatcttcacaggaaccgtacagtaacaaatgatcatcgtgtaataacaggatcaattccttgcagtaacgtcattagaatatagtgataacgaatttagttttgtaaagttcttttttaaaagcattatgatgcgtatggttcgaaaatttaatatgtgatgtgagagatatcattatttaaatatttgaattccaaacggatctacttagcttgctaccatgtatatttgtgtgtgcaaagagaagtacttttagcacttgtgtcaatttgtggccatgcatctctaatagtactataatatcacaagtacatgattaccatttttaaaatttaattcttgacaaacgatagttttatagcagtaccgttactaataatactacgatttcacgacgatgttactgccaaaaatatgttctgcagtaacatgacatgttaccgcacttctatgatgttaataaatattgtaacgacgttaaaatatattcatgatagatctagttttgttatatttttttttacgaacattgtggtgcgaatggtcaagaaaaacaatatataatgatagttttctcttaagattgcaaatttcaaatttttagctctccataagcagaagtacaatagcagtattatttccaccatatgttgtctgctactgccatttctatcctgatgttactaaaaaactgcagtaagaacgtattttctatagttactacacttccgtgatatatatgttctcagtgttactgcactccctcatcgccatccttcatatccgtcggacctgcatattctcagtgtcctcgtcgccgccgtccagccctcatgtagccggaggagcttgtggtcgctttctcccgtagcctcaccaatttatgccggaaatctcctcgattattgatgctactgcgcatccggaaaaaactgagtaaggaagagaggaatggtgggatacggtcagacgaatgcttatggacggtataaacactcacaccaaggctctgttcacaagtttaggttcccaatccaatcagcatttacggaaaatggatagtgctcgtatagcagtaaaaaaaaaagttactacagtagcacgctggactatagatgctacttaactaggtgacatgcagggtgtcatgtaacaattatatatataacttaaccgctcccctcatgtaacctcctccccccaccccatcccacccccaagtttttccttttttttcttcaaccgtccgtgctccttccgttccctcttttttttttttctcgtgcactcgtgttgtcttgcttccctcacataaccattgataaaacaaatatattaacagtttactttcgtgttgttttgcttcgctcacataaccattgataaaaaaattattaacagattacttctgcacccaaccaaccttcatttagtaaatgaattattggattttagttacgttggaggctctgtcagaaaatcagttacttgcaaatatatcatttgattagttccttaatattagtaatgattttactatttagttaaataaacccttctactattagtaatatttttattacctagtcacctgtaataatatctttatttttttaagttattttcagtagctcggtgccttatttgtcgtagtactaccaagtgttctttttatttttaatgctatgtatcgatctattagtatttttttcacgaacgcttattagcgcatagtaaatgttttattggacgatgacatgagaagagtatttttctttttccaaattagcctccacagcatgaatacaatattacagtgtgagtaaacattttactccatgaaaattgtaggctggttatatcacatgaccaataaaatttggcaaattttgctacaggacactgctattgtgtggttttagccctaggatattgcccaaacttatttttaagggaaaacactccataaacatggtaatttgccagtggagaccgtgtcgattaaaataataattttcggttgaagaggagagagaaatcatataaaagttctaaaggcccttgggcccacatatcatatcttccatc

SEQ ID NO: 19723 - DNA, 4204 bp, Oryza sativa
ggtccatcttttattccgctgaggacgcagaaatcaagtgggtgcgtacctctcgtcaccgtcaggtattgtagatcgtatctgtcccgcaccttgtgctcaagtgtatccgcttccttgctgcgaccatgtcggcgagaaggtgctgcagagaggcgtgagtcgtgacacagggcacaacagggtattttgcgcatttcaccatcgtacagtaaaaatattagaaaaagacaatcacaaataaaaagacaatggaaaaaaatctactgatatgagcccagccccttgcacaggctaattacataattgctgttagttcctttaactaactagagtgcatcgccactggaaaagcatctgaatcagaccgcctacctacagttcagttcatgcatttcaggccagattaaggacggcgaacaagacagcattcctgtggcgccatcaccactggcatccattaggacctcgatcacttaactgtatgcaatatatcctcctgttccttttcccagcttcctgaacataataaagtgaattcacgaatcaaaagaaaattcagatgggagcaaagaagggggtgctgattgcatcgtgaaaacaacactatcaatagacctgatcatgcaaccatggttttgatcactgcgaaaaccatgggcgtgaaagaagtgtagaaaagaaagaagaacaggagaaagggagcagaacatatcgaagctggaggtgatgctgggcgaatggaatcgctcatggtgttgtttgtctagaacctgcacacaagcaactacacagcaccaacaagcgttatcaaaatgaggaaaaagggcttgagcaaggtgaccttgtcctcggtgaacatggaacggggaaggagtatcttgaaggattcggcatccaccaagaaccgacatggcgctgcatcaataaaacgagaacctcccaggcggccattagttcagatctgaggaaggaaggaggtgcaagctgaccacatgattaagatctagtccaccaccatcgataccaagaacgcctcgctgcctcgaccatgccggcggcgacgcctggatccggcggcgggggatcacaggcacgcgatgaggtggtcgcccccctgccgcgccgccgcctaggctgccgcctcctgttcgacgaagctgatgccgaaggtggacggccgggcggacgatggagaggcctcctgatccagttgttgccgctatcgcttagagaggagctgcattgatgtgcgctcgatccgccgccgaggatgtagcccaatccacgttgccgtcgaggtcgatgccgccgctcgatctgttgaggcagacctccgcgtcggcactgccgaggtcctcgtcacatccggcgatgaggacaggaagggggcaagggtggcgcctgatggttggatggcggccaccgtcctattgccaactcacaactggacgacgcgccgccacacctccaacgccgacaaccagcccggatctcgcccgccattcgccgatcctaaaaaaaaggggtggacagcgacgggagtagggggcgatggtggcggcgctgcgtggacgggggaggtggcggcacaagggggacgccgatgtggacggggagggtcatctcggcggcgtcgaagccagctctacctcaaacccccgccgctggatccaggcggaggacgaccgccgtcgccggatcgggcgagggacagccccgccgagcccgtcgcccgccgttggcgcaggccatcgtcgtcgctcgctgctggcgcaggccgtcgccgtcgcccgtcgttggaggaagctggagggaccccgccgcctgccgcccggcacaccgaggaggcccaagccggcgaccgcccgccgccgacctgcaatcgccgctcaaccgcctgtcgcacccgcaggccttcatcgtcgctgccgatccgtaaaaagtggagatggaggggaaagtgggtgaacggtttctacgagggagagggagggagtaaatataggcctgtttggatactccggctattaactaatccataattagcggctccgggctattaactaatccataattaacggctgattactatagaatcactgtagcaaatcatggattaatatacctcgttagattcgtctcataaaatagcctagaagttatggaataggttttatcagtaattatgtttaatactcttaaatagcaagattccggagcgctatttaatagccctccgaaaccaaacatggccatagttagcagatagagttgatagtaaaaaatttactccgttaagcgtgggaggaggggatgcggggggatgggtgcacgggagggggggtggggtgtatgggggtgggtgtgagggggagcattttagctattacacaacctaagtctatgtgagtttagtatgtatgtgtatgtatatatatatagagagagaagagagagagagagagagtatatagaggtgtatatactccccccgattatccattagcatctgatagggccacggtgagtcagatttttttaaagaatgtattttccttgttttttgttttagttttgttttagtacacatctgacggagtgcatgtgtttcaaattttaaatgcacgtaactgatcgatctaaacacgtggaggcggtggagcgcacgcttctctggttcaaaatgattataccatatacttatttttcttcttcagaaagtagtactagtactagtatgtacttactttttgaatatcacgtcctttgctagggaatggtatatgcttctttatcttgtagaagtatatactatttcttaagaatggtatctctccttttttttacacgggtatttactgccttttctctaattgtatatactaaatccatagttgaaggagtatgtactgttttttaagtatccgataggtaaggattttttagtattcagtatattagtcgatatactatttttcatccggtatatatatactaaatctcatctctagccgtatatactaaatccatcgttgaaggagtatgtactgttttttaagtatccgataggtaaggattttttagtattcagtatattagtcgatatactatttttcatccggtatatatatatatatactaaatctcatctctagccatatatactaaatccatcgttgaaggagtatgtactggtttggttttttaagcatccggtatgtaaggatttttttagtattcggtatattagtcgatatactatttttcatccagtatatactaaatatcatctatagccgtatatactaaattcatcgttaaaggagtatgtactgtttttttaagtatccggtatgtaaggattttttagtattcagtatattagtcgatatactatttttcatccgagaactgctacaaaacgggatctcgttgcaacgggatagacatattaactgttctcttgcacgagtatcacaggtatcaggtcctaggtatcacagataccaggtaacaggtatcacaagtatcatagaagggtatcccgttccaacggaatcgattggttaaggaatatgtactgaattttcaagtaccagtatatattaattctctcggttaggtagtatttactgcatttttcaagtatatcgatccagtatactgaatcacttgttgaagcagtatatactacttttcttatgggattcggtatgtagtatagccataattgatattcaagctatctcagaggtcgcccaagtccccagagccatcgtcctatccaaattttacattggttttccaattttgttaacaacgcataatcgtactaagtcaaaagatactacatcgtcctcagggaccttgctccgtccagtccagtgcaaaaagaaaagctatagttttcaaggaattcaaagggtagggaacacaggtagctcaagctagctaggtcacattattttccgaaaaaaaaagttgcaagttcacgaagggtggaagaaaggaatcttacagtggtatgatggtgttcatgcctttcttgccttccatgtttcttaagcataacttctccctggcaaatgttctttctcctctattttccatctccaactatgtcagcaaaagaaatctttgtccgtggaggcaagcttatgttctcatctataaattcatgttcatcaacacccagccaggg

SEQ ID NO: 19724 - DNA, 721 bp, Oryza sativa
taggcaggacaaggttggtacacatgttcctcttgtatatggccttgtagaccctttttaaaacactggtttgaatatcttgcacatgattctcaagtctaggataaaaatgttctaggtacgtatcaaagggtaagaggctcttgaagaaccagcagctcatggaagagctggaaaagtcactagatgacaaagttgagaaggagaagcttgtcgaaggctttctcggttacatcatttgttcgacacaggtgatttcactttaaaatcataatctgttttcagacaaagtaaacggtgataaactggagctcattacattaagcaacgattttgtttgcaggaagcagtagtactcccaccgtttgtggcattcgctgtcagaatgaatcctggtatctgggagtacgtcaaagttcactctgatgatctttctgtcgaaggaatcacaccgtcggagtatctcaagttcaaggagaccttatacgatgaaaaatggtatgcatatccatgatccactaatccagtacgtagtagctaatgcgaacatttccatatacagattgaagaagaacaggagcctgaaacttgaaaaaaaaatggtcgatctgaccatgtgcatttcagggccaaggatgacaactcactggaagttgatttcggtgcccttgacctctcaacaccccatttgacactgccctcgtcaatagggaatgggggg

SEQ ID NO: 19725 - DNA, 1292 bp, Oryza sativa
agagcgtgtgcaattgttccctgtcatcaagatcatgcatttttcatgtcataccaaatcatggtaacgttggtcctaaaaagggataaccaccgtacgtgcagccatttgacaagccggtttcacctgagtgacacatagtttgttagacaagagggatgccaccaagttgccatcggtgtagttgccaattatcaagtccggtttgccctccaaaatgtcgagaattttggcacaagagtcctgaaattacgttggatggaaacttactataaagatcacaggcccgcgcaaagggtatcagtaactcatagtaattcatagctgacaaacctgcgcatatctctctagataaggatagatgtcaaaccgggacacccactggcgcaaatccttgccatcttcagtcttgaatggcacacgtagtatatgtgagtattttgtattttcaactggttcaagctccacattgcattttgtgcctttggcatctggtatcagtcttgtaagctgcaggaatatatatagtgcccactggtttagctaatctattcgtcattcatatcatctcatttatatatatatacctattcgtcattcactatatttcattgtacaggaatatatatatcgtgaaatcaatgaaatttaccacaagaattttcggtgttacgtgcagaccctgctgcttgattctttgaagcagctcctcttccatggctctgacttgatccaatatgtagacaacctatatatttcacgaaaccattctttagagttttgttaaccgataattaagttgtgaccatatttttaagagttataatgattatgcgcgagagattccagaaaaccggtaagttgggtacctgaccaccggtatccggcaatccaagaaccttttcttggccgaagtaaccatgaatagagaagatgacaatgttgaatatggatggaaccctgctgaagaacttctccatgtttgtaggatctggtgcctgtagcacttcagacagacaatttagtgtttctttgcacctctccgcagtgtcaccccatcccctctctaacccccactcctgaaatctgcaagaacacataatagagaaaacttaagcatgattacaattttttttgtctatctacaacttcagattaaagtacttcacctttgttcaaacttcaagtaaggcgtgtattttggcagcccactaacgaaaacctctgcaagtagcagtgctgtctgaagcttgctcacagtgtcgatggtgtcattaatcatcaacttctac

SEQ ID NO: 19726 - DNA, 1408 bp, Oryza sativa
gttgccctagtttcccgttttgtttagtcgttgcttggtagatttttgtgttcaagtttgtttgcttgtggggtttagctcacggtcgataccatgtgccgatggtatgacggtctatttaaggatctttaagtgtgtttttaagtgtgttttaagcaagagcagaacaattacagttgattaataaaagcaagagtaaagaggttccttagtaactgtttttctccttccctatttctcctcccgtcttctacttcaaatggtgacaacgaggactacccgttctggaagcaatgtcaattaggaacaaccgtcaggaaatggttcaggagatttgccagagaatggacttgccatgcaatgaaaaagacattcggctcttccaagcatgtactgaaattcaagtcagaaatggaaaaaaaaaacattcttttggaaggacaactggctctatgggttttgctcaaaggacatagcaccaaacctcttcaagctggcaaagagaaagaaccgaaatgctggaactgagctcacaaatgatgaatggttacactctctaagacaaattacaagcttcgaagagatccaggagctcattcaactaggaggactcttgagccgggtcacgttgctaaatgaaatagaagacatagtcttatggaaaaggagcaatgtgaccacatattcggcaaagagtgcctatctctttcaattcatcggctctcagcaagacaaggtttttctgttgaattggaaggcgttggcacttccaaagcaaaaattcttaggatggctcattctgcaccaaaagattctaacagccgaaaacatgttgattcaacactgggagtgcaactggatttgccccttatgtagaggagtcttcaaggatactgatcacttatttcgacaatgtgatttctgtaaagaaacatggaatcgtgtctctgctgtacaaggtattcaaaataaccagactttctcctctctgaaagattgtatgacatacatcatgcagaacgaaagcaaaacggaagtgaggagaaaggcgggtgttcttgtcaaaacttggtggcatatttggctacaaaggaacgcaaagatctttagaggagaagaaccggatgtgcaaaggacttcacaccagatcatccaagatatccaagaaagtagctttcaatttcaaccgccaagagtgtatcccttctcttacaaaatcaagatgtatggtcctggaacgtttctaagttgttttttacattgattcgtgtaatcctaatcatgtaaaccgtactttttccctccctctaatatattcggcaatgctcttaccgctttccttttcaaaaaaaaaaagatttgccagagaatcctacgcttgccaggcaatagcaagacagactcaggg

SEQ ID NO: 19727 - DNA, 785 bp, Oryza sativa
aagaaagaatcggtctttggttgagatggctagaatgatgttggatgattatcacactcctagaaaattttgggctgaagcggttaacactgcatgctatatttcaaattgggttttcttgagatcaaaacttggaaaaacttcctatgagcttcgatttggacgccaacccaaagtttcacatttgtgttttttttttgttgcaagtgctttgtcttgaaatttggaaatttagataagtttgaagcacgctctaccgatggaatgtttcttggttaccccgcacattctcgtggctatcgcgtacttgttttggaaactaacaaaattattgagacttgtgaagttacttttgatgaggctagtccaggtactagaccagaaactgcaggtacattgtcacaggttcaaggggaggatggtcgtattttcgaagatgagagcgacgacgaggtcggcttggccggtcagaccgggcgccaggccgatcagaccaccgacacacctccggtcagatcagcacaggatgtctggttagaccggccagggtcgtcgggttacgattatgttcatgctgatcgggatggtcctccagaggctacaacttcgaccagtgagggtacaaaacgtgaaacaactttagaagtcgccactcctttgcatattcaacgacaacgttcgccgaaacaaatcattggtaatataggtgaggggactacaaggtctatggtaatgactcatgatgtttgtacaaattctgcatttgttgcttctattgaacccaa

SEQ ID NO: 19728 - DNA, 2087 bp, Oryza sativa
cgggtgactcacatttctattcggtcaatgtacttggcattaatttttaatgggcatatggagagaaataaattgttacggaaattaaatatgcctattaaaataaagatttacgtggtatttacttaaaggggtgttagctagccaaagataatttagcaaaaaaagaattagaatggtagtaccaagtgctgattttatttgcatgaagagactatccaacatctattctttgaatgccatgttgctattagttttttggagaatcgtctttatttcatttttgttgcaaacaccagataattttcctcaagtgttaggggattggctagtagctatgaattctaaagccatggaatatattttgataggagaatctgctttatattaggctttatggctaagtaagaatgatatggtttttgacaagactccaactaatatgcatgtattattcagagcaatttattggctttggttctggggccagcttcaaaggtgtgacgagaaaaagaaaatcatatttgttgcatgccataatttaaagtccatagttatgcagtttttcactcgctttggatagacatttagccatagactttaactttgaataagttgctatttttctttggttggtgcggttgagtcggttttttatctacctttgtttatttctcgtgtgtttaggttttgtaataagtggtatagcttcaattgaagcaaatgttgggtggtattacccattactatttttttaaaaaaaaaacgtaaaagaaactagctagtggtggttcatcatctgtcatttgtcactcctagacacgcggggtccaccaacagagtagtcaccccttccccttgactgctaggccttgtttagttgggaaagaaatttaggtttggttgtcacatcggatatatggatacacatttgaagtattaaacgttgttgtcacatcctgcttttcgtttcaggatttataaattatttaataaattattaatagattttatattaaatgttcattaatttacgagtgaagttaaatgtgggaaatccaatttcctaaatataaagcatggttggatttaatatttattaaattctccatgattaattatactctctgaaattttcttggatttttcagagctcaattcctaaatgatacaaagaacaattcagtaattagttaatcaattaatgatctaattataattatgttaagtacttttcttgtttaaaaatccttaaattataaattgttgtttaaaaggatttttagaaatgattttaaaagcctaaaagagaagatctaattttaatttgttaattctcaatataaaattgggctagataaaattttgttaaatacttctcttgattctttagttcctagatttttctgggatttatttgagccaaggaagtatttttaataaatggaattacatttcatgaataatttaaattgaaaaaggttttaaaatttccccttttggctttgggccgaaagtcggcccaagtctctctctctttctctcctcggcccaagttggcccgcagccgggcgcagccgcccgcgcgcgctctccctcccgctgacaggtggggcccacctgtcagacccgtcgtctacctcgtgctgtcgcccggccgaaccctagccgagcggcgccgccgatctccttccaaattcgcctgcccctttcctcctccagccgaattgtttgaggggaaatgatcctcgagatctcttccttttctcttttggaaacatcggctaatttcgtttggaaatcatcggattcgatctcgaatcggattcgtctgtctcccccgaaccctaaactttccttctcgccgccggtcgccgtgggcctccatcgccgctcctagcctctataaaagcacccccgagacctcctctctccgccgccaccctcgccttagcccgctgccgtctgtagcgccgcctccacgtgagaccttgcgccgctgtcgccgccgtttgtctagctgtgcgccgccgtcgctccgttcgtcgtcgtcgctcgggaaggccgccgttgtgatcaccaagtcg

SEQ ID NO: 19729 - DNA, 3129 bp, Oryza sativa
atctccacatatattttatgtatgaattttttgaaaaaaattgatcgaataaaaaccttccattttgtacattacatgtttatttattttctgaaaatataatatctgatcgatattcttcttggtactagtagctggtacagtggagtagtggacagaacattatatattcattgatgtgagacacgcttatttatttcgagcaggatgacagggaacaaagccagcgcaccgacgtgagaaaaatagccaacaaaagaacagtaacaattgaaataaaatatatcctatatatctataaagttcatcctctaagtgtaattaatgttatttcttttttctctcattaatccacatcaccttaattattttagttcttgatcattaatctatggtccaaattaactctatccttttcttctcttaatggagtcatattaccttagttttgcctttggataattatctatattatctgttttcttttccttctctcattgagcacaatcaccttagttttgctttcgaatgagcactgtaagtatgatttaaattgttataaactaaatcatcttaatttgtttatagccttcttttcctctatggtcgattaaggatgaaagttatataaaacatataaagttatataaagcatataaagttatgttgttaagctattttacatgttatttctattattatcacatattttttttcagtaatgtaggggtttcatctagtatataataattggtaaagcctttaagtggtgttacttactgaaatataggtaagcggtaaaaacttctggctgagtacttcaccgtatatctatcatctctaacatatcactgcaacaaatatggcattatatatattgattcatttccttgtgacgactatgcaaaacgtcattgatctataaagtttccttagaaaagcatcataaagattagttggtttattttagtaatgaatcgaaggcagggaaaagttatttaaaaacatatataattaatgtcttacaaaattaagctttctaacaactaataatctcatgtattttaatttatagagttcatgaccgtaaggcatagttggagtcctgaaacctgcctatcaacgatataatttaaaagtacattttacgtgtaaggtaccgttgatcgagtgtccatccatcaagaagactataacagaaggcacaacagtgaggattgctaattaggacagtattttcgatatgtgcaagagaaaatgagatggagggagcatttgggggatttgagtgtcattgtagctaaagggggcatatgcgacacgctgcgatgtagaggggctgagcgccatgttggctgtcagccatgaacaaagggtgattggactagttcactgatcttaaacatgtaattttcaagtgtactaagctaagtgataccacaccacaagtttagagatcatccatgtatttcactctaaaaccaataaggtattttatctgatttgataattaaggtggtgcaaaatctgatttatagatgtgagtaattgatttctcgatttaaacatttagtaatgggggcaaaggataatctttatgtggtatttgctcaagggagtcgtcttaacaaaggataatcttgcatgacggaattggaatgggggtttaacatgttgtttttgcatgaaaaatgagacaatccaacacttatttatggattgtcattatgcaaagtttatttggagagctgttcaattttcttttggattacatcttcctagaagcatacctcatatgtttaatggttggcttcagggtgtggacaaggacaagagaaagttgatacttgttggtgcctctgctttatgttgggccctgtggttgtttagaaatgatagggattttgacaaatcatcatctgtttcctatatgcaggtaattttcagggcaacatattagcttcggctgtgggctcaactacaaaagtgtgaggaaaatagagttttcctgaatgttgcatgtcgtactcttgagtcaactgttatgcaactttttgccaaccatggatagagattttctactaggctggaataacgttttccttgtcatgttaggtctttcttttaattttggttggtttgatagttttatcttgaattaagattttataagtctattacttttttaataattggctgtatctcttcggagtaaaggccgagatgtttcattccattatctaaaaaaagtaatgggggcaaaatgaaaattccacttttggttgccggtgattcatcgcacaaacagctaattaatggcaagatcgacagggatatactctttgtatattggctaatcttaccaggtgaaaagagaatttgatcactggagcaagaagagccacgccatctgctgcataatggtcctccgattgaaaagcaaacaaaaatagtaaacactactataaaaaacatttttcccgacgtggggtcttattttcgtaggcggacatgacccttagagccaaataaccgtctataaaaatataaatcagggtgaattttgatgtccgcctgcgaaaatagacttgaatataaatagacttgcgggcgctaattttttttctaagtctcacacctttcctccctccacacctctcctcttctcccctcccctcacctctcctcatcggcctctcccgtcccctcacctctactctccccggccaccaaccgaaggcggcggcggctcccgggggtggcggcgtgtgctcccgacggcgacggcgggcggtggcggtggcggcggagggccgcagcggcaaggaggcgaggcggcgcgtgacaagggggtttgaggcggcggcggcggctcccagcccccccctcccagatctggctggaggggagcgggggaagcacggctaccggcggctcccggcccgtccctcccagatctggctggaagggggaggggggagcgcggcggtggcggcaggcggtggggacggagtgtggcattggcgaggaggcgaggcagcgcggctcccgacaacggtggcggcagctcctggcccctccctcccatatctggccagaggggggcggggggagcgcggcgacagtggc

SEQ ID NO: 19730 - DNA, 5797 bp, Oryza sativa
  unsure (1)..(5797): unsure at all n locations
ccgaaattcaacccattgtactgacaaacccaagatgccgcttctgctgacaaatcacccattgtaccaaaatttcacgaatgccacgacacacttgagctcgcacaatcgcagccggctgaggcaccacacgcccatgatctaagagtggcagtgggggtgtcgaatagggcggatcaccatgaaatggtttcatcagactgacgtgaaaaacattattcaatcgagcaccagcaggcagccgcagcttgtaagcaacatcgccgatccgctcaagcacttgataaggcccataaaacttagaattaagcttagaacgggaaggcactcccaaagagaccgcagaacgccgaagcaatcgcagccacaccgaatctctagtatggaaggccaagtcacggtgcttggcgtcatagtatttcttataaacctgttgagcctataccaatcgatcacgaatataagccaaaaaatcatcccgattacgcaaaagctgatctacggccgccaccttggccgtacctggctcatatgattgaattgttgggggattcctgccatacgacactttgaaaggtgtctccttcagcgacgactgaaaagaagtattgtaagccactgaagccatttgcgaggacgatcaccaactagacaatggagatacatagcaattgtcttgtttaatgcctctgtttgcccgtctgactgtggatgaaaagctgaactcatgtgcagctgcacatttgctagacaaaaaagttcttgccaaaagtggcctgtaaaaaccggatctcggtcactgacaatggataccggaatgccatgcagacggacgatatcatcaaagaaagcggcagctactgaaaaagcagaataagggtgcccaagcgcgatgaaatgcacgtaccaccgacaaaatcactgacttgccatgaaacttgggaaatccttccacgaaatccgtagagatgtccgccagactttgcacggaatcggcaaaggttgtaacaaaccagcggtgtgcaaatgttccactttgttcttctagcaaaccgtgcaggcttgcacaaactcctggaccaccgcgcgcaagcgaggtgtatgaaaatatgtgccttcacccgatgcagtgtcttctgtatcccttcatggccggcattgtgggctgctgcaacgacagtgtggaggtgcgccgaatctggcggcaagtatatcttcccaccgaatgtcaggagaccatcaatctccccccaaggcccctccactgtacaagcatgtagttgctgccggagcgcctggagtgctggatgtgctgcattctccgctcggagcaggtcaaacaactcaaatgaggggggcggaaagcgccatagcctgcggcacaatatcggcatcacggcgggacagggcatcagcgacagtgttttaacagcctggcctgtactccacccggaaatcaaatcccagaagcttgctcacccatgcgtgttgtggaattgttggcaagcgctggtccagcaaaaatttcaggctataatggtcagtatgtaccacaaatgagagaccccagacgtatggcctccaatgccggactgcttgaaccaacccgatgagctcccttttgtaagcagcgaggcgagcatggcgtgacgctatcggccgactgaaaaacgccctggtcgagcaccttgatgcaggacggcaccaaaccctgcacccgacgcgtcacactcgatgatgaagggctgcgcgaaatctggaagttgcagtgttggggcagacgtgagagcgtgttggagcgcccggaacgtgcgctccgcatcatcggaccaagcgaacgctgccttcttgaggaggcgtatgagggttgccgcgatgacgccaaacccttggatgaaacgccgatagtatccggcgaggctgaggaaaccgcgcaacgctcgcaccgaacgaggggtcggccaatccaataccgcctagactttctgtttgtccacagacaagccttcgccggagatggtgtggcccaagtaggccaccgacgtgaanccaaaaaacacttgaggaagaggcggtgctgctgcaacaaggagaacacagcccggatgtggcaaaggtgctccacccaggaaggactatagatgaggatattaaaaagagtaaattgtattggtagtacacaaacttgttaggtgggtgcaatttagtacgtaaacttgtaaaatgctcgtttaggtacacgaacttgtctagttcatgcgaacgaggaccaaaatagcatcgcaatgttaattttacaaagctgatgttgattaggatgtgacgtgcatacgtgtagtgagtatgcattagacatataatatttataaatttgatatgtactttatccttcatcatggaagtgatgaatttcatatatttctaacccttatatcattgctcgtttttttatcattttctacgatcactatatcccattctatttttattgaagaggtgtttatctaatagcaaccttcttagatatatgtttacatagtatcctgatgagcccctaaatcagtaagattagtcacgttgtttccttttctccttcctccgcacacaccagacaagttcatgtgccaaaatcagcattttataagttcgtgcactagattgcacccacttgacaagttcgtatatcggcgatgcaatttactcttatcaaaaaatacaggtacgaaccggcggaggaacgggtgcaggacttcgttcatcaatgcttggaacgtggccagtgcattggtgaggccgaatggcatgacgaggaacacgaacaggtcttgatgcgtgcaaaatgctgtcttctcaatgtctgccggccacatacggtgtgatagccggaatgcaaatccagcttagtgaagtaggaggcgccttgcagctcatcgaggagctcctccaccactgagataaaaaatttctccttgacggtccgatcgttgagagcatgatagttgacgcagaagcgccagctaccatcctgtttcttgacgaggagcaaatgcacggagaatgccgaggagctgggtcaaatgatgccttgggagagcatgtcggcgcactggcgttccaactcgtccttctgatgttgcgcgtatcgatacagccggaccgccactggcctagaatctgggaggagatggatgtgatggtcgtgattgcattgtgacggcagtccccgaggctcgacgaagatggtggcgaactcctccagtagaccagctagcacgtcggggccagagcacgcgaacgcgtgttcacacggcttgtcgatgggggcgccgatgctaagccaagtgatctggcagccagcgcgcgtgagagtcagttgcaacttggtgaagtcccatataatctgaccaagagattacagccactgaatcccgaggactgcatcaaatgtgtctagtggaatcacaaagaaatcagagaagaatgcttcattgccaacgaggaacatcacattgcgcgcgacgccagaacactcgaggcgatcgccgttggcgatgcatacccgaagaccatggcatggactgaggagcatgctggggtcggtagcgacatcggcgttgatgaagttgtgcgtggacccggagtccaggagcgccaccagtcgctttccgttgatggtgatgtggagctgcattgtctcgctcccaggaagacggacgcccgccatggcatacagggagattccagggtccccatcctcagcattcggtgggttggtttcattgtcgtccgccgaaggagcgtagagccagaacaagcgcttgcaacgatgccccggcgtgaatttttcgtcgcagttgaaacaaaggcccgcctcacactgggattgcatctcttctggcgtcaaagtgcgccgagctacgcgtgcagcccggacaggcgcagcggcacgcgctgctgctgctggagcggctggagcagatgctactgctgctattggggcaacgtgtggcgctgctggtgacgcggctgggcgagttgctggtgcgcgtgcgggtggcttggccggttcgattgggaccgggtcttctatctgcaccctcaactcatatgcacgtgccaaactcattgctgtgtccagcaatgcgggtgcctccagctcaacgtcgatgcgaagcttgccctgcagccctgcggtgaataactctattttttgtacctccataagtgggccagcacggctgagaagcgacatgaatttctcctggtagtcagcaacggaaccagtgcggcggagttcggcgagggtccccaacttgttgtggcgaagagggggcccgaagcgcagttccaccatctccttgaagcgtctccacaacggcgtgccgtaggcttcttcagcatgcgtgtaacactcctgtgcctcgtctgtgagatggaacgctgcgatccaaatcttctcatcctcaacggtgtgctgtccatggaaaaattgctcacaacgacttagccaagtcattgggtcccctttaccattgaagatcgggaaatctcacttgtggtagcgtggaacccgactgtctgttgtgccgtcatgctgatgctggtttgaggccgagggtttggtgcccacgatccccttcgtgtcgacttcagcgatcttgttgtctaggcggctgatggcgatggtgtgatcagccatcgttgcctccatccgcttaagttggtccataatggcggtcagctgcgacgctgtcacctctatgtttgacggtagtccagacatggccataggcggacgaacgtgctctgataccaagttatcacgcccgggcaacggtcgaagattatactgatggaacgaaggaggccgcggtctccgctgacgtagttggcgaggtatggtgatgaactggtatagaagaaagaaagaaactggcaaggaggaagaagagaattgagggagaaaacacatataggagattagagattgatttaacttttccttaattcctccttaacgattacatctctttaaataaactctaactctaactcttatccaaacaaaccaaaaccaaaaagattcaagaagtctctccttcgacaccgtgcgcctgctgccgagatcgtcgatgatacggaatatccccccacatgacagacaccctatataatattcgatgtgacacatcaaatctttacacccctggatctaaacacccccttaggcctcgttcggcaacaagggggaatttccccagggagattcacccaagtgggggatttggtgaataccctcccgccacccaatcccctcatcaatcccttccaccatgggattagcattagatttgttcggacaggtaggggattggtttgtttggactagggacgaaggtttcaccattacaaaagattttaatatgcggcgcataaagttgcagaaattcaaaacaccacccagaaaaatctaaaaaggaaagaaaaaattacgaaaatggtaaactaactaagattggttgcacaatagtctagaaagcatgtcaattcagactataagattagtgcacattgagattatagatacaaatgtagatagctattacagtaacaagtagcagggattaaattgtacaaaacaaaatgacataaactgaagctaaatcattaatatctaaaagctaatcttggttgctagaaattccccaaattaattgcacatttctcaggtacatcacaataatagaagcgcgttattgcaagggtattagtacctcctccgttagggctgcaggaa

SEQ ID NO: 19731 - DNA, 2324 bp, Oryza sativa
ccgagcgtgtatatagtcctaagttaatttcccgaggagggtacttctccgtatttagccccggttggatggtcatgacggattgtcgtaagaaactcggcaattggggatggcttctcaaagcaccatgagggcatcgaaaagagggtattagctaagtaattatataaataggatgtatgtataatatgtatgtatactagaagtataggaataggctctttctattttcttcccacttgcctagataattacgaatgagagtatagatgcttctgcttagtgtcactctacccttgatttatattaacccctgcctagactttggttattacaagtcatatataaattattagtacggttctttctattataatcttcccacgggattaaacaaatacgatatccttgaaatactctcgggtgaaatgctacaatagtatatctctgcgcttacggatgaactctgtatatttctgcaccattgctgggaattatatttgtagtaatgtcgttaaaaaatattaacactacatcatgatgttgatgttagtgaactgagcataagcattcagttgccattcctgcgtctgtgctatgtgtccttcgaggttgtattggatctctcccgtttgtatatcacgggtgtccatcctccttgtgatttctcccaagtcccaacgagaggaacttgagcgccactcgttgggggacggaggcataccgcttgatctgggggaataagtgttcatgttcccctagtgtatgccatgaggcgcccgccatcagctctcgctggcactttcccagaccgagcctccgatgctgtggtgtggagcttgggtccatccgagtgcatccccagttggcttccaaccagcctcgtacatctgcacagatgttgaggatgttgaaccttcttgattcatttcttgccatgttgcgtgtgtccctgtactgatgatacggatcgaaattgttagaattggtatcaaatatactagtcctatttggttatttggttacagttggacttggagtagtaatatgtgttagggggtggagtcagagtcaaactctgtaacccggcatttctcttaaatagagagggggcaccacaatgtaaccgtggcgactacaatgtagcgtagacatgtagaaagaggatgacggcatggccatggactcgtatgaatatcaccattatttttttttgaaaggagtcaccattattaattttgatagataaatgtcccttttatttgctggaaactaattgttacatccataactaagaaaccaaagtctcttaataaatagatgttctatgcacacgtacgcgtgcgcatgcacgaattattaagagataataaaaaaaaagatacttgatcgatcatacacagaattcttgaaagttaacaatattatcgtgactccatgcatgcagacgatgattattattatatttctatttcccttgtcactcctctgggagagggccaaacttgtgctgcagaaccgcgatgaattcgctggaggtgcagccaccaacgctgacggttgatgcacagttcttgtcggtttggtctgtgcagattttgccggccttttccagtttctcttctttgatgtaaccccagtaatttgggaagtgatctttctcacgtacctcggtgtaagcctgcgacaagaaaaaaaagctttaattcaattctcttttaagatttagattattggtctatataaaataaaaccccctctttattaagctcggttgaccttatttagttagttaattactccctcaggttaaaagtaattgttattttggacatattaatatttgattagaacaagattttacaagtgttttattacaatatcaacaattattaatgttggcatcttgcgacgatgagtggtcatatttgctggtcgttttcttacagagttctgcgtggcgctccaaggaagggaccatgcgaccatgaagtcccggacctggccgtcgacgtcgcggccgcggaagacgcgcgccgcctcgcagccgatcgactgcgccgtcgggtgggcgtggaggaacgccagccactggccgttctggaacgacgccggcggctgctcgtggtagacgtagccgtaccagtccatcgacccgccctccccgtcgacgagctccagcgcggcgccggtggcgttgtagacgagcaccatggcggagacgccgtcgccgtaggaggccttgagccccagcgcgtgctgcagcgcgtccaggttcttgccctcggcgtggatgaggcgcatcgcctcccgcgcgcggtcca

SEQ ID NO: 19732 - DNA, 16320 bp, Oryza sativa
taggtaagtctcagcttacatgaatcacgtgatcatagataggatctcacagacctgctgatactacaagataacataaattatagtgagcctgttattgtttaatctatattgcttatcacgccacaactaatttaacacgaacaatcaacctagattttcccgttaatgtgggagttcctagctagtatagacactagctagacagagatcgtcctcttggggatagagtactactagtactatataagaggggggagttgagttggatcatgtaagctaatagatcgagctggattagctagatcgaccgtataagctaatagatcgatcgatcgagagatggcgaactgcttcggcgatgttgtggacaactacaagctggacgagatggagaggtacgtggggaaggccaagaggcaggaggaccgtgcacgggaggccatgaacctggtgaacgaggacggcaaggacaagaaggcggccagctacgtgcagggcgtcaaggactggtacggcaacggcgagtcgacgctgtgcctcgtctacaacgccaccggcgccaccctccgccacgtcgccgaccacgactggtggggcttcatcggccgcaccccgtaccccaccgagatcggcaacggccagtgggcggcgttccaccacgtccacaagtccggcgactcctccggatccgaggccgccgtcgtgtaccgcggcaccaacgccgacggcgtcgagcgcgacctgctcgtcgcctggagcacgccatggagctctttctaccggaacaaggtatattcatatcaaattattcttcggcgccattgctaattaaaattgtgtcgccatttcgcagtcgatttttcctcggtattttccaattatctccaagattcatgctagtattcttcctgttcatctacatcgtatcagatgtagaggtcggatttaatatccattatctggtttcggctgtcgcggtagaaaacgagaatattaattaataaatatataaacgtatatatgtttctctttgttaatggcaggcctactgcgctgttggaggtgtggacagcttccaaggtgactgggagcaattgtacgacaaggtgaataacgcagcttacacatgcaatgccgactcggatgggttcaagatagatgccagtactgctaccggtgacagccccgtcttcacggcgaccatcaaaatccatttcagtcaatgaaaagaaaaacaagatcgaccacatacttgcatggcattcgctcatgttgcacggggcaggcccgctacattctattgctgtatcagccagtcaatgaatgtaatgttcttctctttcgcgaaataatgtagctgttactatcgatcgtgtgaatcgatcatgtacaccagctctcgttttattacatattataataaatgcgttcagccatgtaatttgcagcattaaagcaaaaatatcagtatttacatccttatctttactacttaaagaaccttttttttttaaaaaaaggtttaaagcaaggtgatcctttatcttcaatttcttctttctataaagctaatgctcactaaacacctaaagcacaacatgcaagcatagtatttattagtactcctaaaacctacatacaagcatgccacattaacccaagcacataaagcttaacatgcaagcatatagtaattatttctacaatttatttcattctaaaactaaacagacatatgctaaatcatcattctcaaatcattttcataatatttcaatccaaatcattttatcatttctccaatatctaacatatatcccgtagaaaagcatggggcatcatctagtttttaatattatcatagacatgttagctatcctaatcaagcgttcaaaggaggatgaacaaattgctggagtagtgccacatttgattgatgatggtttatctattctgcaacatctagatgatacattgttttttatggatcatgactttgagaaaactaagaatatgaacctaatactttgtgtttttgaagagctctcttttcagaaaaatgaaatattctgctaaggtcaagcttaagataatgaagaacaatattctattttgtttgggtattgttagggatatatcttttctggttaattatcttggttttccaatacatttaggaagctgactaacaagaattggaaattgttacgggaaagaattgagaaaagcctaagtagctggaaaggtaaacatatgtatgtgggtagaagattggtttatttaactttgtattaataagtctaattatgtttatgattttttttgtttgatattcttagaggagtgcttcaaaagattcattattatagatcaattttcttttggcaacggataaacttaagaaaaaaaatatagacttacaagatgagatgtcatctgtcaaccaaaagaatagggtggacttgggttttataacatagatattcaaaaccaatgtcttctaagtaaatggttgtttaagttaaaatacgaagatggagtatgacgagaaatgcctaggaggaagtaccttaataataagtcaataagtcaagtagtgaagaaaacgagtgacccacatttctattcaatcaatgcactcaacattaatttttaatgggcatgagagaaataaattgttgtgaaaattaagatgcctatcaaataaagatttatgtggtatttacttaaaggggtagtgttagccaaagctaatttagcaaaaaggaattggaatggtggtacaaagtgatgcatttgtttgcatgaagagactatccaatatctattctttgaatgccatgctgctaaatttctctggagaaccgtttttatttcctttgggttgcaaacaccacataattttcctcaaatgtttggaaattggctggtaaccatgaattctaaggccaagaaatatattttgtacaagcatctgctttatattgggctgcatggctaagtaaaatgatatgttttttttgttaagactccaactaaatgttttatgcagatattattcagagcaattttttggcttcggatatagggccaacttcaaatgtgtgaagaggaaataaaagtcatatgtgctacatgccataatttagattcagtagttatgcaagttttcgataactttggatagagaattagcaatagacttaaactttgaataagtttttattttcgcttggttggtgtagttttatcagctttttatttatctttgtttatttatagtgtatttgagtttcgtgccaataactttgtaataagtggctatagcttcaattgaagcaaaggctaggtttattatccattaccaaaaaaaaaacttttaaaagcctagtacgtggtggttcatcatctgtcatttgtcactcctaaacatgcgggccggggcctaccagcagagtcgtcgcccctctccactcccccttgactgctaaatctccaccaatacaaaccactgcaccatctcgagcatggcttcctcacatggcaagcaggcatgcctgcaggctaccctgaacagcacatattatctcaactaatggtctagaacaatatgttaaatatctaatggttcaagaacaatagatgccacgaattgaacttaagacctctcactttcaagtgagagaccatttatcatacaaccttttatgcatgtctaaatgacttggccgggctttctatttgaatatttaatctccactttcgttctcagaagttaccatttttcataatcttctacattacatttttacatgtctcgttgtataagaccattgaaattattttgcccaataatagtaataaatgtttcagttccagaagcaattgaggatttaaataacaatctacaagtcccttttagatggagataacaattccaatggcatggagcacatctctgcatcatgcgaaacaacgagattttcatgaacatcaaccctcgcttttcaagttgacgagatcgttttagatttgagtttgccatggttattcatagggcataacgaaagttacttttctcacattacacaatggtttgaaaacatgtaataatatatcattacacattgtaagtgtatatattttagtaatatattcactataagagcatttcctactgcatgtaagtttagcctcatctccacatatattttatataagtgtccatacaagtcatatccggcctctatgaattttttgactatgataatagaatatagaaaaaccttatattttgtacatatggatctcatcaatattcttcttcgtattagtagctggtacttcatcagtccaaaaaaaaaaaccaatcttgtattaagatgtgacacatcctactacagtaaatctggacatactctatgttgtttagatttgttgtactaggatatatcataccctagtacaagattggcttttttggatggagggagtacagtagagtagttgatgtgagagatatgtttatttatttacagcaggatgacagggaaaagggccagcgctgcgacgttgcctctccatcaagactactaattaaagcttcatttctagagatttgtatatacataatgccagtgagaaaaataatcaacaaaataacgggtgaaatccaatatatcctatatatttataaagctcattctctaagtgtaattaatgctatttctcttttatttcattaagccacgtcaacttaattagttttagcccttggatgattaatctatggtacaaattaattacctccttgtcttctcttatggagtcataccaccttatttttgcctttggataattatctatattatctcttttcttttccttctctcactgagcacaatcaccttagtttgcttttgaatgagcattgtatgtacaatttaaattgttataaacaaaatcatccaaatttgtttatacctttttttcctcaatggtcgattaaagatgaaagttatataaagtatataaagttatgtagttaaaaagctattttacatgtgttatttctattattatcatataaaattcttgtagcaatgtgtggggtttcatctagtatataatattggtaaagccttttaagtgttcttacttgctgtaatgtaggtaagtggtaaaaacttctggctcagtacgatcactgtatgtctatcctctctaacatatcactgcaacaaatatgacattatattgattaatttccttgtgatgacgatgcaaaacgtcattggtccataaattttttttagaaaagcttcataaagattagttggtcgattttagtgacgaatcgaaagaagggaaaagttgcaaacacatatataattaatgtcttgcaaaattaagctgtctaacaactaatactctcataaattttaatttatagagttcaccaccgtaaggcataactcgagccctgaaacctgcccatcaatgatatataattcaaagaacgttttacacccatcaactatgcgtgcaaggtaccattaatcaagtgtctatcctacaaagaaaagaccatcatagagcgtacaactatgacaattgctaattaggattgtattttctatacatgcaagagaagaatgagattgagggagcatttgggggatttgggtgtcattgtagctaaagggggaacatgtgacgcgctgtgatgcggaggggttgagcgcaagagtgttgcatgcgtggtgcgccatgttggcggtcagccatgctcaaagggcgattggacctaattcacgggtctatacatgtaattttcaaattcacggatctaagtgataccacaccaaatgtctaggaaccagccatgtatttcactctgaaatcaataaggtattttaggtttggtaattaagggggtgcaagttctgattcatatatagctgtgattcactgcaataaatataaagcatagtgatgattggagatctcgatatgcaatggttgcataggctgacggtgatgatcgaattattttagcatgaaaaatatcatctgatacgttaattgtcagtattcctggcacgtgtactaaacaatcttacgttgtcagtgttgatttaatgattaactgatcagataatatgctcgatcgattaaacttaatttattacatgcctgaaccgcgtgtttgagtaatttcaccaataattagtactattaaattgaggaagcatgatacgtagcgatagcatttttgcctcgattctcatgcatggcttaaaattgctctactattacttatttttttcaacgtacgttaaacacgatgagctgtctgtccaaaaagttcgcttgtaattttcaatacgaaaaattggcagttgtacagtgcgtgttacgcacgagttgtttatcttatacccagctagatttgaatcttatagttttgaatgatgaagatagctagctggcctgcagtcttggttctgccagtgtgtatacgttggaagtgcatgcagatcagggcatggaaataaacgttaaagaataaagatgctccaggaacgtctaaattaacaaagataaatactccctccgtttcgaaatgtttgacgccgttgacattttagcacatgtttaaccgttcgtcttattcaaaaaatttaagtaattattaattctttttctatcatttgatttattgttaaatatatttttatataggcatataattttacatatttcacaaaagtttttgaataaaacgaacggtcaaacatgtgctaaaaagtcaatggtgtcaaatatttcgaaacggaggaagtatgatgttaatgtcgatgtggaactatttggaccaacgtagtacgtcttgcattctcactctgattaagcacgtcgttcgatcttatcaactcgtatcgtacacaatcatggtgatcggaggttcacgtgtttgcgtaatatcaccacactatatcggaggttcacgtgatcgaatatgctcgaacgattaaactttacatgcctgaagccgcgtgttttagtaatatcaccaacaattaattagtactattaatttgtcgttttgaggcaccatgatatgtagaagatacttatgcctcaatcatggctttaaaaattgttctatagtattaaataactttttcaacggttaactggattcatgccattgcaaatttatccattcagaaaaatatcattacgattagtctattcgtagcagtgtcatttcaattttacaaaattagaaccgtaccattattgtcacgttgtgcatccatctccttccttttccgtcttcttctttctttctctcccatgttcttctcgaagtcaagccggcgaaccaatcctcggaatccttggagctcagaggagagtgagtttgccggcgaggttaccgaacccaaccatagtaggcagcgatgaggggaaggtggcatgctcggtgtggatccagatagttcgctctgatccgcgtactaaaatattttttaatacaaatattttgctgtcctacattacttggttgtaattgtttatattatcaacccaaactcgaatcttatctgccagtgtgtacgcgcctaaaaaactattgtactatttaacaatcgaattaaggggtgtaaattctgatttctagattcaaactattataatgggggcaaaatggacttttcagtttggcttgccagtgatcaattgcacaaacatctcataaatggtaaactagatcaagagggatatagtcttgtatattggctttttatttttggctgaggatgtatttccctaagaaaatcaataaaagacaaaagttatataaagtttataaagttatacaaagtatataaagttatgttgctaagctatttcacgtgtcatctctattactatcatataaaatttttcagcaacgtgcagggttttatctagtatataataatggtaaaacctttaagtggtgttacttactgaaatttaggtaagcggtaaaaacttctggctcagtacttcactatattgattaatttccttgtgacggctatgcaaaacgccattgatctataaagctttttttaaaaaagtatcataaagattagttggtcaattttagtgatcaatcgaaagaagggaaaagttgcaaaagcatatataattaatgtcttacaaaattaagcttctaacaactaataatctcatgaattttaatttatagagttcaccaccataaggcataatttgagttctgaaaacctgctgtcgacgggggatacccgtagaccagattacgaggatattggggtacgttggtacgaggatcttctcgatacgacaacaagcacaaaaaagacaagaattatactggttcatggccctcgtaaggtaataacccaaatccagcttataaaaaaagtgattattttagtgcttagctaatactatagtagtaattaattgcatagacatggtgtctaggtagttagtctatgtagttaattgcctgtgtttgttgtgtatcccataatatgttagaggttggtgtagaggtggtaatagccctcgaaatcaccatagttctccctgtccgggtacgaagtagagcatgttcttttaccagcgagcatgctagtgcctgaagcatagcgataggattaaaattaagctttctaaacatgccagtgtcctaggatgaagctgaagaagagctaaacacacacattccctatggaaattcgatacattggaatacttccgggtgaattgctatagcagtatatccgtgcgcttgctgattttatgtgaacgcaagaaataccaacaatattctaaacgatacttccaggggaggatacgatgtcgagagagccggcgtccctgtccaagggaaccaggacgtggctttcacctaaagaaatcaatgggaagattagtgaaaaagcaacaaagcccaaggggaatgtggggtccgcaggcatcgctgttgctggcacgaaggttaggctttcgcccgaagtttttctaccctcccgcataattgagtgcctgctaggttcagcagcctccaccggctaaatcccttcaacacgtagccaccacgccaacgccttggcgtcagccaacaatcattaatctcgacctccagagcgctctagatccatccacatgggtggattggagagggagagggtgacacagaatgatggatcctctctcccccacgtgaccatcttgtggtggcgagatgccactgcaagagggctgatgcccaccaaatggcgctaccatcatcgccgccttggccaggctgcccgtgtcatctatgcaatgggccacctagccacttcatcatcgccttgtcgtcctcccataacggcaaccttgctgccacaacgctccagccttcgagacagcctcgtcgcctccgtgtcgtacttgccagtaaaatggggttaatggaggataaggaagaagatgacacgcctggttcgggcataggctctcaccagagaaactttcgtggcgttgtcagctcgtcggcctcgtcatgggcgtgcatgttcctagcaacccaacagagtttagcccgtgcaactgggcactatagaacgaggggcgagcaagaggtttttgtggaaaaatgggaggttaaatggtgggctcttgtgcgtggtccatggacggggtgcagggccttgtgttgtctctgtcttctcgagcagcccagcgatggaacgggacggcagggcatttcaggggctttgcttccttttcagaaaaaataatggaggaggagatttggtcggggcatgataattttggagaatggtgtgaggtggatgatgggtaggcccacttgcaatggctgctaagggctagtcttcacggagaaggctcgacttggcctgggaatagtcgtgcagggttgttctctactccaaaagaagatgcgcaccacatgttttacaggggggggggggggggagaggggaaaggtgtggacgctggttggtttttcctgggtggatagatcgattatgtgtagagcaagccatgatgaacagtctgatagaaaggcagaagcagaagagttatgatttcactgtggtgaattttgaaagagggctaagtgataagaatatattccacattttcagcagtttgactgatctacttgggacatcaaattagttgataaaataatgccaatttaattaactcacagtttttcaaaatgtgtacagtaattttgtgaatttttccaggagttttgtacaaacaaacaaattattaaaattcttccaacctatttttagtgcatatgaatgcaatgatgaatgtctgcaaaatccaaaaagaaggaaaataatattaaaagacagaggaagtcatttcactgattataacatgtatttaaacttttaaaatttttgggtctattacattctgagttgcgattcatgaaaaactagatgtagatttattagttcatctggtaactccaatttgtatgcgacttttcctcgtcgatcttggatcttatatgggtcgttatatgttggtgctaacatagccttcatctgaaatatatgcactcctttcattagtgacatgagatatacaatctccaatttcaaaactcacgtcctgtcttatattaaccgaatattccttatgttcactctcagcatagtcctgagttgtttctcgccaactttggtccaactttaaggcgtcttagctacacatttttccatataaatctttataaggtgccattcctaaattgatagctattattataggtgaactcggcgaatggcaaacaaatctcctatgctgatccatacataaatgtgcaagctctgagcataagatctgatttactctttcaatatgtcctctagcatgtggatgataggctgatttgaataccaattgagcacctttatagacatggataccaaatcttgccttgtcgatcggcatttattcattttattataagtccattacccgacattatttagccggttgcgcacgctgacagttgacaggaactacatactcatgcaatttttaaagaaaattaaatgattaacttgcaacgatttgcctagcccctgtgagaaatgatgtaggcaagctgcatgccatcgggcatggtggcagtatggaacttgagatcagtcaccggaggcgccacattgcccccggttcccatgatgaggtccaccagcacgccggcgacggcgacgaacaggaggccggcgacggcgccggcgacgagcccggccatcgacacgacaaagacgccgagctcgaggtccgcgaccgcctccgtcaccgcgccctccaccaccacctgcaccgcgaaggcgcccacctccgccagcgcgttcaggctgttgcggagcaccgcctcgacggtgtgctccgccgtgaagatgtcccacaccatgaggcccgccgtcgccaggagcaccgccacccccgccgccgtcgagaccatctccgtcaccggcatcttggccctgccggactcctcgatgatgctgttgtacacctctagcttctgcgcgtccgtcagatgctcgaactcgccctcgaatcccaacttgttcttgtgtcttcacatcgatccgatcacatccgataatcaaagattacaactaattcaagaagaagaggagatcgaactgctatatatatgtatggtaattaattagcaataacttcttaccgtttgacaaggtcggggaacttgatgccctcctgcttgagcatcatggagaacgcctttgacatggcgcgggcggagccgctccggagcctgttgcagtgctcgaacatgcactccttgaacatggccgtgtccttggccagccgccggaggttggcgacgtcgtcggcgtggaggccggcgaggtcggcgacgagggagtcgtagtgcgccctgatctttccgatgcagtccacgcgcaggcagcagttgcggacgttctgcatgctcatgttcaggccgtacttgacgtactccaggacgtcctccgcgatgctggccttggcctcgccgccgccgcccgccgcggcggcggcgtacttgtccctggtggccgagccgtcgtcgaggaggtcgacggcgtggttgtacgcgtggttgacgctgtggaggtacttgacgcgctcgttctgggacttgaccgcctgcgtgatctgggcctcctcgttgttcctcagcaggagggccagcttcttcagctgggatacctccatcagcatcaccaggtcgcctccgtcccccattggtgccgccatcttcgagcttggatcaacgattcagaggacctgcaccaaattaagaaattcatgttattactgctactaataatgattatccataaatgctagctttggatcgttggccatgtcagtcttacacttccaacaactgttcaagggaggtgagagcccgaaactatttgagtcgatctacatcaagatgctcccaggcgacgtctatttatggttttaggctgctgtgttcgtgagtcgcataaaacgaatcgtgagtgggagttgggaaactctctccccaaacacataaaacggatcaataagatttttctaaagcaacttaattttgtatagaaattttttgtaagactgaagatcatctcctgtcacacttggagttttcccttcccttaggtttcaaatcattaataaatgacttcaagaatttactttggttaaccaggagaaaaccccagttaacaatgtatttaataatcggaattgtcagggagaatttttttacgaattctctttgctctagaaaatcactaacaggacttaaagagtaaatatcagatcactggaggcaatgttgctaagttaaaagtgtcaagttaatctccttccttcgcctttggtcatgaattgtgcccaattcactcccctctcagtccgcggttttgttttgcatgacgaaccgtacccgtgtcagtttgcaggaccgttttctttccattcctaaagctgcaccgcattgttttcctttttgggaagtcctagttccctagttttccttttccctccctctctccccagccggccgcgccctccccctcccctcgcgcgcgtgcccctcttccccctggagtccgactccctcccctccctcctagttctactccttctaggactcctcctttcctaatcctgtccacccctttagaagtgttcctcccctagttttttacgttttccccgagtcctagctatcatcgtccccgccgtcgtcaccgtcacgtcgccggtaatctgttttccctcttaaatgaattggttaatccaatgtcaattatctcccgtctaacctggccgttgtgtcctctctagtgctgccgtcgttgtcgatcttgccggaccgccgctgccgtcgtcgtgttccctcgccggttatgcttcccggtgagaacctccctcctgttttagggttttgtttccgttgttagccgtgtcgtcgtcgtagcccgtgccgtcctagaagctgctatgctgccgcgtggccgccgccgttgccgcgccgctgctcgccgccacgccattgctgccgctgcttgctgccgagccacgccgccgcttgccgagccgtgccgccgcttgccgatccgctgtcgtgcgcgccgctgcttgccaagctgctgtcgtgcgccgccaccgcttaccgagccgatgccgtgtgccgctgcttgctgccgagcctagccgccgctttgtgtcgccgtgtcgcagccgtgtgccacttaaacctactcgagttgtctagccgtaggtgcaaccctaggttcctaccggcctatcgtttgtcgtaccggggctttacaatgaactgtgtctagcctgctggtttagtagcagccattgttgagttgttcgaacaaggtgctcccctatggtttgttcgttcgtccgtcccgagtcgtcctttggtttagagccgttcagagccgctagttccgttcgccggtttcggttgatcatttgggtgatcccatgtgacgttaaattgactcgttgagtcggtatcttgtgaggctcgcttgccagtcaatccgtcctttgatcctatgttccttttgggcttaaatccctgtcaattgattaaggttttttccgtcaatagtaattaacacagagcaccttgtaaaattcataactaaataatctgagctccattttaacccattcaaattgcagtaaatttgttagaatgccaagaatccattaaaattggtttcttttgctgcttcagtagctttttagcttgtatttattgtgtgccttgtctgtcgttagactccagcagttctgtcgctccagtttattttgaagtggttgccgaggtcccgtcagctgaagagcaaggcaagtcatacaaatatcattgatcatattgagcctatttgcaaaaccctttctttttctctcaaaattgcattattttataatgtcatgtgagatggaatttacctgtaaactcagcctttgtttaccctgcttcattgatagcctgggttaataatttgactagatgattggtctaggattgcttagccatgcttagatcaactagctcacaatgggattcacaattttatagtccttatttttatgatgatgctatgccatcttggcatatggttaattaattaaaatatgatttacttggtgggtcctgagcacatgcatgatgatttatttggtggtcgtgcccatgataattaaggaccggttctcgggaatccctggaagatatacttaattatcgtgcccatgatttatttggtggtcgtgcccaaatgggctccatgctgtactcgtagtaaccaagccagatgggctccaggctgaatcttaagtataatcttttctaactagcgcaccattgggaagggtaagcgtgatggagtatggatggaccgggaggcactctatgctgcttccggatttacctaggcatgagtgagggctgcctgctcctggattttggagtgggagcgaaaccggaggtgggtgtgctggttagggatggttatatggagggttttgtcacgatttcctcctttgcagtatcgtggcagttgatgtgcactagggttcccgatcttccgaaaggttctgataaacaacgatttggacgcagtcgcgacacaaatcgatccggcttcttgaacgcgcacgctattgagccccgcaatcgcagcactacgtctcctctggttatcacccgtgtcgaaacgcggatgacctcgccgagaaggctaatccctgtttgccaatcgaagaacacaaacaagaacgagatagaaaaacaaccaaaattgcagatgaatgattaagctcacgagttggggtcttacaaaccgatctagcggcgaaactgttctcgacagattaatctaagcaaaacccgactctaaacgatgacggctactgaataaatgtgattagcgacatcctagggttgccctagggcgcacacccccttgggctaagcccatgacacaattacaaggcccaaaacccaaattagattcggactggatgaggtacgtggcttgttttgcagattcccgacagctcggtaggaattttgactgggaccaaaaccatctgaaagtagactccataagctttccaacaagtactcatgggccccgaaattccttctaaatcagcggctaggtacgtttgattttgatgctgtcaggaggcccgaatctgaatccaaaacgtgtacaacttgatctcttgtcttctatgggccaaaagtgatatggtgagctagaagtatacttggagaaggtcttggtttggtccccaatcaacttcttcaatcatccatgcattacttacgctcggtctcttttctttcacccaagcaagtacctctgcgaacgaaaacacacaaaactcaatgtgtagcaatgtttgttcaaatatataacaagtaaatctaatatagaacatatgcacctttggttgatcaatacataaggtggtcatggttatatctgaactagttgtatcctcatcatcatccctttcttgattggaaaccatcctcggtttcaccttgtaatggagcatactgtacttatctttgtctatcacaacatcctgtacggaacatttcttgatggccatatgattggatcctaaaatctttgtagtcgaaaaaccacaacattccccttcttg

SEQ ID NO: 19733 - DNA, 733 bp, Oryza sativa
ccgttctgtagtagaacaagctcatgagattcagatgctggctaaggaacttgagaacaacaactgtgagttgccggacaagtttgtggcgggtggcattattaccaaactaccaccttcttggtcggactttgccacttctctaaagcacaagagacaagagttcagtatttctgatctcattggctctttgggtgttgaggagaaggcgagggcaaaggacgtccggggcaaaaaggttgagggaggttctagtgccaatatggtacagaagaagaaccctcatgcatcccacaacaacaagaaagtcaagcctgatgtcaaacccaaggctgcaaccaattttaagaagaaaggcaagggaaaggcaaaggtagactgctttgtgtgtggcaagtctgggcattgggccaaggactgtcctgagcgcaaagacaggaagtctgccaacatggtcattagcgagggcggaggaacatcggggtacggtaaaatattacctatagttctctctgtttttcattcacctgattggtgggtggacactggtgctaatattcatgtatgtgctgacatttctctgttttcttcttatcaggtcgggagaggtttctccttgttgatgggaaacgggtcgcttgcggctgttcatggtgttggtacggtcgatctgaagtttacttcgggaaagaccgtgcagctgaagaacgtgcagcatgtcccttcaataggg

SEQ ID NO: 19734 - DNA, 792 bp, Oryza sativa
ccttgtgtttgtgatctgtgtgacttgccttgcaatattgggtctccaattaatcttcttgaacacttggggcgcacttgcgaaccttcgaaacgacggaaacgacaagctaaaacgcaaaacgaggaaaaagactaagaaactacaaataaacattacatataaagtaaacaaacatgtagatcataattttagatgaattatgagacttgaacagtctcattctgacttcatatgaattaattacgaattttacaagatttaatataattaaagcctatttaaaaaggactaaataaatttaattcaatttatggataattttaatatgtagatctttattttatacaacttttgcaacttgaaccacattaaaccgagttacaatgaattagttatgaatttttaaagattaaaccggattaaaacatttatatagattttaattgaattatgacgcaataatgaattatttttgaaaaggaaaagggaattattgcgtcagcgggctcggctcacggtggaccgggtgcacggggcggtctaaggaaacgaacggccgggatctaatcgattcaaaacgaacggccgagatcgatctaacccaacgcggtccatgggaaacggcgtcgatgacgtcagcggtgacgtcatcaccggcggcggctcggcctcgcatgctcgccggcgaacgacggcgaagcggctcaaacggagggtaccaacgcgtagagcttggctcggcgaactcaccagcggcttggacgacggcaaacgacgacggatgacgat

SEQ ID NO: 19735 - DNA, 656 bp, Oryza sativa
ttgttcacatagtgggattgcacaagtgtaatcccaccctcatctcctctttgtagtttgatgttaagaataacatcagcctctcccaaatccttcatttcaaaactcttggacaaatagtccttgacctctcaatcacattaaggctggtcccaaagatcaatatgtcatcgacatataagcacaagatcaccccttctcccccaccatagtgatagtatacacatttgtcagcttcgttcacaacaaagcctgcagatgtatgcgtggtgtcaaacttctcatgccattgcttaggtgcttgcttgaggccatacaaggatttcaacagtttacacaccattccctcctgaccttctagtacatacccgtctggttgatccatatagatctcctcctccagctctccgtttaggaaagctgtcttaacgtccatctgatggacgagaagaccatgagaggctgccagagcaagtagtactcgaatcgtggtcaaaagagcaactggtgagtatgtgtcgaagaagtcctcgccttccttttgggtataacccttggccacaagccttgccttgtacttttcgattgtaccatcaggcctaagctttttcttgaaaacccatttgcatcctacgggcttgcacccatatggacgc

SEQ ID NO: 19736 - DNA, 1146 bp, Oryza sativa
ttcctgcagccctttactcagccggatctgaacatgagacaaaggagatggttggaattaattaaggattatgacatgggaattcattatcacccgggaaaggctaatgttgtagcagacgcccttagcaggaaaggctattgcaatgctacagaaggacgacagttgccattggaattatgcaaggaatttgaaagattaaatttgggaattgtcagtagaggtttcgttgcagctttagaagcgaagcccactctaattgatcaagttagagaagcccaaattaatgatcctgatattcaagagatcaagaagaatatgagaagaggaaaagctattggtttcttggaggatgagcaaggaactgtatggttaggtgagagaagctgtgtccccgacaacaaagatttaaaggatgcaattctgaaagaagctcatgatactttatactccattcaccctggtagtactaagatgtaccaggatctcaaggaaagattttggtgggcaagtatgaagcgtgaaatcgcagaatacgtagcagtatgtgatgtttgtcagcgagtcaaggcagaacatcagaaacctgccggtttgttgcagcctttgaagattcctgaatggaaatgggaagaaattggtatggattttattactggtttacccagaacgtcatcaggccatgactctatttgggtgatagtcgacagacttaccaaagtggctcatttcattccggtaaagacaacctattctggaagtcgattggcggaattgtatatggcaaggattgtgtgtttgcatggcgtccctaagaagatagtgtctgatcgaggcagtcagtttacttcaaatttttggaagaaacttcaggaagagatgggttctaagctgaactttagcactgcttatcatccgcagacagacggacaaaccgaaagggtgaatcagattttggaagacatgttgagagcttgtgctttagacttcggtggaagttgggataagaatctaccctatgcagaattttcgtacaacaacagttatcaagctagtctacagatggctccgtacgaagcactgtatggtcggaagtgccgcactccgcttttgtgggatcaaacgggagaacgtcaggttttcgga

SEQ ID NO: 19737 - DNA, 3812 bp, Oryza sativa
ttgagttttgaagaaagagattatgtgtatattcgtgagcacggcttttcgaggagttcatcgttttcacaccaaaggaaaattggcaccgcgttttgtgggaccttataagattgtcagtagaagaggagaggttgcttatcagttggagttacctcaatctttggcaggagtccataatgtgttccatgtgtcgcaattgaagaagtgtttaagggtacctaccgaagaagctaatcttgaccagatagaagtccaagaggatctgacctatgttgagaaaccaatccgtatcttggaaacaaatgagagaagaaccaggaatcgagttatccgtttttgcaaagtccagtggagtaatcactcggaagaagaatcaacttgggaacgagaagatgaattgaagtcagctcatccgcatctgttcgccagttcttccgaatctcgaggacgagattctgtttaaggggggtaggtttgtcacaccctgaaaatcataaatatataaattgttgtttacatggaatttttagaaataattttaaaagtcttgaaaagaaaatctatttttaattaataaattccaatataaaatgggcccagataaaatttcattaaatactttgcttaattctataattcctagatttttctgggatttatttgagctaagaaagtatttttaataaatggaattgcatttaagaaataatttaaattgaaaaaggttttaaaaagtcttcttttggctttgggccgaaagtcggcccaaaacctctcttctctctcctcggcccagccggcccagtcagccgcgcgagcgcgccctcgcccgctgacaggtggggtccacctgtcagggtcgtcgtctacctccggccgccgccgccgaaaccctagtttcgcgccgccgccgtttccttccaaatccggccgctcctttccttctccggccgaattgatagaggggaaacaatctccgggatctcctctaccttttctcctttggaatcttcggctaattcgttttggaagtccgtggaatcgagttcgattcggatcggcctttttccttcaagccgcgaatttccttcgccgttgccgtcgccgtgggccttcgccgccgcctccgagcccctttaaaaggacccccggtgtctcctttacccgtcgccaccctcgccttcgcctctcgtcgccggaatcgctctagcgccgtgtgccctagtttcgccgtcgccgccgccgctccagccgtgcgccgccgtcgtttcagccgtcgccgttgctcgggaaggacgtcatcgtggtcgccaagtcgtcgccgtcctcgtccgtcccttcgccgtcgccggagatcgccggagcatcgtcgccgtcgtcaacccgaaggtttccgccgtttcctcctcgtcgccgtcgtcgtccgttgttcttccgccgccgttttggtcaccggtgtgttcgccgcgtcgtcctctacgtgctggtgtcctccgtttgcgtccttgtgccgccgttcgccggcgagcgtgcgccgcccgagccgttcgctctgccgagccgccgccgctgtcggtgacgtcaccgctgaagtcatcggggtcgtccgccgtgagccggtcgtggaccgttcgatctcggccgtccgttttggattggatcgatctcggccgtccgttcgtgtgaaccgccgcccgtgcgcccggtccaccgaaaccctagcccgctgacgcaataaatcccttttccttttcaaaaataattcattattgcgtcataattcaatttaaaccgatataagtgttttaatccgatttaatcttcaaaaattcataactaattcatcttagctccgatttagttggttcaagtctctaaatttttctaaaattgagatctacacattaaaaatatccacatgtactgttcatgcttgtttacgtgctgttttggtgatttggttcttttctgcttagattccgtcgtttccggagagtccgttttcgccggagaaaagtttgaagagttccaaggccagcaaggcaagtcacacagatcccaaacaaccctttgagcatgttgatcctaattaaagctattgtttcttttcaactattgcatttattttcgaatgtcattgggtggaattaacctattctttgttatagcccttttgttcttgattaccttattccttgataccttgggttattataatttgactagttgagctttatttatattggttcaactagatattagatataattgcttagccctgcttagaaacattagctcacttatgagataactaatgattcactattatttcatgatggcttaatgatagttcacgatggtcgatcgtgattagttaattaattaatgtgccaactaaaacctgataatggtgggttgtgagcacatggttttgatggtcgtgctcacgacaattaaggaccggttcacgagtttcggttgtgaaacatttatcgtgccaaccacaagccagcatgggcaacggctttatcttttatatagcatggttcattgcggggcaccagactgagaagtggcggagataagcccacgggggtcgctggggagtccatgccttgtttataagggggcgattacgatccaggaaggtgcgctgcagtggattgtgttatgcgaggggtattgtcacaactcctttccgaggtaccgtggtggtattgaggcacatggtgacatgatgtggggttgtgtcttgtgggtacagtggtacacctctgatcagagtaaaactattcgaatagccgtgcccgcggttatgggcgggtctaacaatgtctttcgtgattagtttcacacttctcaccatagtaaaagatgcttaaattggtaataatttgattagctcctggtttggaatggtacattcctggtttggagatagaactgtgcagccgagatggttgttcagaatggatgggcctatacaacagggtatgttgtatagtgttggattaatactgcctaattaatacttaactgttttattaaattctcaaatgtttgttaaatgctgcttttgcaaatgaaaccctattatgccatcctttgttatcctgtgcacttgcatatttgctgcgtggcttgctgagtatgtcatatactcaccttgcaatcattcatcagaggaagagttctacaatgaggctgatggtgtggaggattaggtgtagccttggtcaagctgcctgtggagtggagccgtctgcgccgtttattttattttccgctgcttagatctttattgattgagaggaactatctacctctgtaatgacattttattcgcttattaattagagtaataattgtactctattatcaatttgttattgtgtgtctcggctgattcctggacgagggttcacacacatgtaagcgtttggaattttggatagaaattccgggcgtgacaattactttattccttgataccttgggttattataatttgactagttgagctttatgtatattggttcaactagatattagatataattgcttagccctgcttagaacattagctcactattgggataacttatgactcactgttatttaatgatggcttaatgatagttcacgatggtcaatcgtgattagttatttaattaatgtgccaactaaaacctggtaatggtgggttgtgagcacatggttttgagagtcgtgctcatgacaattaaggaccggttcacgagtttcggttgtgaaacattaaccgtgcccaccacaagccagcgtgggca

SEQ ID NO: 19738 - DNA, 3785 bp, Oryza sativa
ctatctacctttgtaatgacattttatacgcttattaattagagtaataattgtactctattatcaatttgttattgtgtgcctcggctgattcctggacgagggttcacacacatataagcgtttggaattttggatagaaattccgggcgtgacactcggcgtctcctgcggctaccttctttctcacgcgcgtgctgcagcaggtagagcacggggcggcgcggggatggccgggctagagcacggggcggtgcgccaccactaggagtcctccctgaggctccgcttcggatggggctgcggtgaagtgggcggcgcggccatcggccaaaattctctctccttgcatgaccggccgccacctacgaccaaccgatctcctcctccgttgctccccttcctattccctttcaccatcggctctgcctcaccgaggagagttcatttttcccctttcccctctccctccacctcttagtcaggccaccaccgccgccaccatagccggccggagctgagctctttgtgttgtcgttccagccatctccctctccccctttgcttgacaccaccctccccggatgcgcgtcgcccgggaacatcatccgccaccagcgtcgccgatccccggccaccggagcatcgacgccctactctctccctctcctctgttactcggctggaaggaggagaagagaaatagtgtccagtggcattttggtacttacactactctttctctctccattttagccgaaaataataaaataatgtgagtagtgtccagtagctaattaccacttttttacagtgttctcgaaaagattcacgatttttgggtgtctcacagcaaaggccacaatatttcagtgtcctgttgcaaattttgcctttttttaattttagaaattgaatctatcacctttaatttcagttgaaagtttttaattaagttaaaagttttgaatttggagatgaaagttttcaaatgtaagttgaaaattttcaaatcttaagataaaaataaaaaattgaaaactatcgtgtcaaaatatgaaactttcaactcaaaattcaaaagtttttaactcaaattttgaaactttcaagtcaaaatttaattcaactcaaaattttgaaacttttcaacttgaatttcaaaactttcaattcaaaatttcaaaacttccatcacaaatttaaaagctttcaactcaaaattttaaaattttcaactaaaatttaaaactttcaaatgtatttttaaaactattaactaaataaattatttatatacttttttaaattagtggctaggacgacacggacgtcggggtgccgcgtgcgtgctacgggggaagctagctggcacgtgtgcgcccgcaacacgcacttccgcgcgtaactaactcccttagttaacactaatgatagtaattagaaaaaaagtgaagattttttttactagtagattgaaaaaattttcagttagatttgaaaactttcaacttaagatttaaatttttaaagtcaaaatttgaaaactttcaactcgagatttgaaaactttcaagtccagatttgaaaattttgaaaactttcatcttgaaatttgaaaattttcaactcgagtgtcaaaaactttcaagtccagatttgaaaatttcgaaaactttcaacttgagatttgaaaatttttaactcaagatttgaaaactttcaactcaatattcgaaaactttcaaatctagatttaaaaactttcaactcgagatttgaaaacattcaactcgagatttgaaaactttcaagtccaaatttaaaaatttttaagttcaaatttaaaaattactagtaaaaataggaaactaatcaatggtaaaactaattacgattgttctcctacccatacggcatcaaactgcgaaaaaagcaaaaaagaaaaaaaacggcggtaggaaagcgaaaaaagaaaaatcgtgcgcgcgcaccgcgtgggccgtgtgggccgggagtgcgggctgtcggaccgcacgtgtattaggattctcggcgggggacgctagctggcgcgtgcgcgccagcgacgccacttctgcgcgtaactaactcattagttaacgctatgacagtaattagaaaaaaatgtgaagacttttttgaagattttatttactaatagattggaaattttttcatttagatttgaaaacttgctacttattgagctggcgcgtgagcgtgcagtaggatccctgtaggcccggccacctcaatgaaatattttactaattaatcaaataattatattaaccacttgattaatttggccccttcaaggcttcaactccgatcgcatgcaagtcgtctagctttcttggcccttcgactggacgggaccagcacatggctgagattcgttgctgacattaggcaattaagatgcagctatcacacatacaacaatttgggcaatatgccaactaaattatcgagagtccgtggtttaatcaggtggctgtgttttaattggtgacatggcttaatttagagaaacttttgcactctcattaatatcacggacagagaatattagtggaataccttttgaaatgttaaaagaaaagaagagcggaccgaaatcatagaattttcaaaccaagttttcagacggtttaaacttttgatccatttccacatatccagcacgaaattctacctaatttcgtaattttcagctagctagtgcagtagtgtacttcctagcaggatccactgataaatccaaaattttgtgtgcttttagcagctcgttggcttataaagttacgaccaattttcaacttagaatattaatattaatatgtgttattctgattattttctatttttcagccttaacatctatctatctatctatctatctatctattatatactaaaagaccattaaactttctacaaacgcctctaaacgtggcatggtacgctactacaaacgctcctaaatagccacatggcactttaataaatcgggggacccactattctaaattatttgattatcttttaaaatagagaccccacaacccagcccaccatctcctctcaccggcccacaacccaacattgcacgcacgtacttacgtacctggtacgaacgtatgcctccctcctttaatccgatctcacaccttgctaatatttatttcgagggtagcaaataatttaaatatagaaaaaaatattataaagaaaaataaaaaacatcttaccatctgttttctcttaaattagtggaccttaaccattagaaataaacgtatagataattcaaacagcaaacctattaaatcaagaaaacataccctcctaattttagacttaactttagactgttgtcgtttgcacgacaacttaaataggaacaaaacattaaaaaaataatatctattatgtcacctttgaatcattttatataataaaagtcgattaaattctccaaagcgcttttaagtcaccatgtgtgacgttttaaatttagaaagaacttagaaattcaaagaaaagaaataaaatataattattggtttccacctaaatgaatataccattatttttaaccatcatatcttttttaagaaatcttaagccgcaacatgtcatgttttagaatcacagaaatatgagaaaataaacaaaccatcagttgcacttagcagttagaaagaatagaaataggggctgtttgattcatatgataaggttgtatgggtgcagga

SEQ ID NO: 19739 - DNA, 5598 bp, Oryza sativa
catgtcaccccttcctatctctcatacgagctctatgctattaatatctctccagtctcctcttcgtattatcagctatcaaactaaacagagaaacaaccaataattttatatatatactaaaagtacaaaaactttaagcgacacacatgatttctattctaactgttgctctatttataattaaactaacaatttaagatccatatgtctatattttgctatttaaaaaatacgggcacactcaacccgtgtgctttgcatatcgtatagcaacataatatcataaagaatcgtcaatatatttgttttcatcaacatcatctgcaaacatgcatgattaaatttaatcaataatattgaataagtataaaaattcatatttcaatcaaatttattatcgataggacactcctaccattttacatgtcaccctaattgcgattaaaaactatgaaacaattcaacaacgcatgtcgcacaatcacatattgttttgcaaacctatataaaaataacttgggggcacaaacacaccactgcctttttacctgttatccaaatttctataaaaaaatatcaactaattcaacaaacacatgttgcatcatcatacatcgttgcaaatagacagctaaattagatacatactgtacaagaaaaaaaacaatcgaacgtgaagagtttaggctattgtataaagaaaactggtgcgtttagttagagaaaaaaaatctgattatttcataaatgttttttttctaaattatatgctcaataatccaaacaagccaaacaatattttacgtaagtgctttgaatatatgttatgtaccatctaatcgacttcagacgatggtaccttttatataaagccaccacatgttactcttgcaaatgctcctaggccaccacatgacactctaataaattatagaaaaccctaaattttttgcaaaagtaaaacatctcgctatgcttatcatttaagctaatggactaattatttttaaccattagatctaaacaatgacagcctctatcggtaattcaattaaaaaaataaaaacgacttacttttattctagaacattatttggtagatgtgctctaaacaaaataagtctaccttgataaagaagattataaatagttatttattacgattagttaagtagcaatgctgatggaaaaaatgtggagaaatcatacatttgaagtgtggcaaatgttatccggtttatattccgttttgaagcacaacacgatgcatgcccgcgcgaatgcgcgggctaccttcctagttcatttaaaccgctaagagtggaagtacatatgttatactttttttttcatcggttatgcgtcacggattaattataagtgtcagccgaaagaaagaagatctcagccaagcagatttttcaagccaccttgcttgacactttggtcagctttgtcaaaaatgtatcggtcttcacattgttgcacggcatatgaaagaaacttggcggacttttaagcgcccgttacccaagttctacaatataagtccacatatatacagttaatcactcgaccgatcatgaccagcgccatgactgtgccgacgatgttgtggtccaccctagtaccattggtgctgcttgctcctctcttctccatcccccgccattgccgcgctcaggtgctcatgaactactcctgcaacaacggtagctcctacgccgagaactccacctacgactccaacgtccgcgccgtgctcgccacgctgtccgccagcacgcccaacgccaccacaggcttcgccaccgcgtcggcagggcgcggcgcggacacggtctggggccttgcgctctgccggggtgacaccgaccatgccgtgtgcgcgtcctgcgtcgccgccgtgccggctatcgccttccaccagtgccgcggcgtcagggacgtgaccgtcttctacgaccgctgcatcgcgcggttctcgtacggggacttcacggcgaggcccgacaatacggaggtgctcatggtaagccccagcaagtaccaagccaccgtcaacgcaggccacttcgacgcgctcgtgacacgcctcgctggtgcgctggcggactgggcggcgtacaactcgacgttgaggtacgccgcaggggtgatggcctcgagcgacgggttcccgtcaacaacggggtacatggtgcacaacatctatgggctggtgcagtgtgcaccagacctggcgccgccggcgtgccgcgcgtgtctccaggcgctcatcgtcgacatgccccaggcttttggtggaaggattggggggcagttcaatgctgtgtggtgcaaccttaggtatgagacatcggtcttctacgacggtgacccagcggtgaggctcgtcgcgtcgccatcactcgagggtcccaacattaatggttcaacaactctgattataggtgagttgttcaacactacaaggccggataaccaaatttctagcatacctgtcgtcctgtcctctgattattctgaaataacggcacatttgcattttactgcaggaaacaggagaaggcgcccaaatgccgcaactgttgttgtatctgtccttgctgctgtaataattgcacttctgtctgtgctctccatttacctctggagaaaattgcaagcaaaacaatgtgagtgtgtcttcttaattatccgctccattttctgttccaaattaacgactaatgaaattgcaaatggtcgtccacttactctatgccttacaatgaactattttgtgacacgctagctgagagctaaacagaaccgactgaaccgagagccacccatagatttcggagcaaattaaaacaactaggctatgaggcatgagacaataatgctgttatatttgttccagcaagtacttaaggggagtgctattgggcggctgatcgttgtgggcgatcgggcatcccccgtccctccgccttacgcgcacactcctccccttttttcccttcctaccgcaccataatttttttaagaaaaacaagttagaaaaaaataaaagaaaatagaaaaaaaatctattacccttaaaaatatattcatgtgcatatgttttatacttataaatatatacagtaaactttataagtataaactttatgtactatacaaaaaatatttaaatccgaatttaaatttgaattgggtatataaatttttgacatatgaattttaggtgcgtaaactttaggtatataaatttatccggaaagaaaaactatatggtgccaaaagaaaagaaagtgatgaaaaaaaaatcgccccaggcgattgaccgctaattactaattagcaatctagagtacttaacggtcggtccgaaccaactcatcattatcagttcctatacagttctctatagaactgacaacgattatactattactactggttcatctatttttcttgcccaaacattaattagcctagagaaaaccgcaaaaaaatactcattattattaagggtgtagtatgtctaggggaattttaaatatttcccatctctctcttgtacaaatatattttttctctttgagcctaattcttcaagagcaaaatcctcaatttctcccataaagtgacatggtatcagaacctatatcctagccaccagccaccgaacctccgtcgttgcgagtggcaggctcgccgctggcggccaccgctcaacagctcatcgtcaagcaagcagcaagcaaacagatcaagcagcaaagcacatacaaatcaaaacaagcaagtaagatctagcagcaagaagaacgtccaaatccaacaagcaagtgcacgagcagcagtagcaagtcgtcaccttcgtcttctggctgcagcagccacaagtttatccatcgtgcttccagatctcgtctcggccgtgcctccgcgccgccagtttcatctgcccctcctgtcaagcagctagcagcaccagccgcccaaggtcgatctgtgaagcaacatctagcaggggaaagtgaattcatctctggaggatatcccctcgtttcgtacatatcatctaaatagtcacaaaaaatatataaaaaattagcaatataaattaatatgaaatatatcacttcacaaacatgcaattttaaattcaacttagttgtaacaaaaataacaaatatagttgtgaatgtgcgataactattttcagtttaatttgttatttttgttgcaacttatagaagttgaatttgatcttgcatatttgtggagtgatatgtttcgtactaatctatgttgtcattttttttaaatttttgataactatttaaataacatgcaagcaatgagagaatgttccctcgagggatgaaaatccacatcccatctagcggaaacaaacctcatgtcatcctggagctcattcgtcttcgagcatcagcagcagcagcccagccctcgttgtcaatgccgccggctcccatctctgccggatgcaccatcatcccggctgaatttctcatcaactagtagtagcagcaaacaaacaacaaacaagcatatctgctcctttcatcctcttcttcgttccaactagatctcgtaaatttgttgtcctcgagctagatcagataagcctctggtcgctgtcctcgagctccattattcctcgtcttcaagtagcagcagcatgccagcatccgctcatcgtcatcttcgatttgcaaatccaccattatcttcaagaatcttgttttcctatgcagtttctgttccatcacatatgcaatccgttgtcgttcttatcggtcgccatcatctattactatttttcatcactactactatgttatgctattgcttgttgtggctatatcctcggtagagatggcaatggggggccgtcctcgtttgcccacggagaattctcctattagagggaagggatggttagaataattggttctccttgagatattaaatgggaggaatcatatccctctcaagttttgcgggagcagggatgatccttcattcctcacccccccccgaccctcttaggagtgaaagttcattgtttttttacttatcttacgtaattatcttacttatgtttctttataaatgataatcttgtgttttatcatgtgaattagtggatatatattgatgtattaatataaaacatgatatatgtgttgtattgcatgtatgatttggtacatatatattgttttacgtgggacggagaccccacggggactaattccccatgtggggacaggaatgagaagaaagtatcctcattgtatttcgtgggtacggggacagggaaagttttggctcacccattgtcatctctattctatggtgtcttttactagttcatcctactgctagtttaagtcatttggcaatccattcagtccaccaatgtcattatatatccttcaattaatcgaagtcgtgctattcaagtctatctctatcttcaccagagttaaccatcatcgtagcttcctgtcgaagccgaatcatcagtttgcgaaggtctgtcatcttcttcatcatcatctctgaatc

SEQ ID NO: 19740 - DNA, 4275 bp, Oryza sativa
  unsure (1)..(4275): unsure at all n locations
tcctgcagcccaggagaatgcctcatgctgccaaaattgtagaatagagttgagagtgggtgaggaagaagttcataggagacagggaagtgagctcctcgtctgacttgttcctcaaagatgcggctccacgggagtaaacttttagtctttttgatcggatagcatgttattagtaacttgcttgcttgttggttcctagtctattttacctaaagtatccattctttgtttgtgttggttgcattgcttatgattgcaaataagttgaatagtaattccatgtatggttgtggtgatcggcatagttttgtctaggaaggcaggttagagcaacaaaggacgtagccagccaggtggtgacaaccatggctatccattgaggtctaccacattagccctagtaacattcatataaattgggtgataagtgttcaccccattctttgatgaatactcttatgccttaagcaagcacaacaaagtatttgtactgaatagttagctcatttaggcgtagtgacatgaagcccaagtaagtcatttaggctagaggatcctctcaaattaaaactacactcttggcttagtcctggaaacataagtatacattttatttctcgttgattcgataccgtggaatactctaggttgaaaacttgagcggttctcattcacttgtggactatttttcctgagcataaagagtgccaacacacattcatgtgatgtccagagctggcagcctgtccccgcctcaactgccaccgcttgagcctccaagcgcccaccaatccactccaggagacaccattcttactgtcggcttcccctatgatattgggcattggaaaaagtacaccgaaggtccctcaacttgtcatcaagttacaaaatcgtcccccacctattaaaccaaatatatgtcatccctcaacttacgaaactgggtcactttgcgtcctcaggcagttttgacctcggttttgtctgacgtggtggctgagacggcgtcggacccacgtgggccccacatgtcagggtgtccacgtcagcaccctctttctctttctcttctctccgttcctcctctctcacttttatcctcatgtggagcaggccggtcggtgggtggggaggaggccagctagctgaggcgggagagaaggaggtccaacgttcggcgaccgacgacgagcgacgcggcggtggcagcgtcggcgatgacaacgcgggagcaggtggacctcctcccatggcgacgggtgacacggcgacagcggtgtcctcgctctcctgtcgcactccccctccccgctgctcatcgccgtggcatccctaggccaccttgctgtcggcataccaatcccaaggcctggttcctccggcggcagcggggatgagctgggggaagggaggagagggcctccccacatggcgacgggcgacacgatgatggcggtgtcctcactctatcatccccactgctcgtcgtcgcggcgccctcaagccacctcgtcgtcgccatccccatatgaggcttggctcctccagtgatggcggggatgaggtgggggaagggaggagagggcctccccctatggcgatgggcgacacaacgacaacggtatcctctctctccccatccctgctgcttgtcgtcacggcgccctcgagccacctcgccgtcgccatcaccatctgaggcttggctcctccggggaggcggcagcgaggcggaaacgacgcgggcatgcagcgggcgtcgtgggtgagtgctgggaggtggagcttgaggatggcgaagacgagtgcgcgctcacgtgggtcatcgacagcaggcgcaatgccgtcgaggtcgcttacctcgctgccacagggatattcagcctctagctcgcccgcgcggtgacaccatccccttctcccgcgtcgcagccgccaccaccgccgacacctcccgggcctctcctatggttcgacaccgaggtcgcacacgcgatgacgctctcccttctcccgtgtcgtcgccaccaccgccgccgattcgccggccgctgccgcgagtcgcctcccttccccaacgtcacagccgccgccgccgccgcatcgccagtcaacagatctcctctcctgcctcgcctcggcgacctccccacccaccggccggcctgccccaaattaggataaaagtgagagagagagagagagagagtggagaggaggaagggagagaagaggggaaagagagagggtgttgacatggacaccctgacatgtggggctcacgtgggtcccacactgacttagccgccacgtcaaataaaaccagggtcaaaaccactaaaggacttaaagtgaacaattttataagttgagggatcttctctatatgtgattttgtggtttagggataattttgtaactcgatgacaggttgaggcaccttcggtgtactttttccttgggtattctactgctgctatgtgcttgctcgatgcccatcggccgttgcaatggatcagggtagattgcgactatttttttttagtgatgtttgtcatgcctgacaagtaggaatgtaaactaacgagcaggctagcttgtgatctaattactctttccgtaaactagttaattcaggtcttttttttttgtcattttcagaacatttggattgaccacgctttaccatcaatcagtaaggtgtaagtgtacgtaaatgtgaagttaagactccctgcttatgaagactacaggaacatacgtagcaacaagtttgatttgcttctttgcttttgtgtagtataggacgttttgtagctgccgtactgttgacacttgttacttaattatcttccgattttcaatttgcaataataacccttgtacggtaattatctttaccgtacaatgaagctgcgatatcattcagatcaacaacatttcaatcaaagcctagcttgcggcatgcagaacgacaatcctcaaggcatagatgctagaaacttccatactcaaaatataggtttttttgctgaggtcacaaaaaaaaaagttgagagcctaattaagctagagccaacttggtgagacgactcatactacatttcaattaaaatggatagatgactacagagaactctaaaattatcttccttcttagagcatcaccaacagtcctcgtataatctccttcaaaaaaaaaatgtttttggtttcctaaactgaaaataggaagttgaaaaactgatcttttcaacacaacacctaaatctaattcctaaaacttaaaaagtggacccttctgttgaaccaccaacatattttttttcgtttttcgtttatacggcactcgtgatcgcgattccccttggcggtacccaagcagcgccgcttcctctcgcccctctccccaccgccaatcgccctccccgtgacagcacacagcagcagctgctgcccttgcaaaatttcagcagcaccagcaatttcagcagcatctcacagctgcagcagcaatttcagcagctgttggggtgacagaccgattcaggctgaaccgaggcggcggccggaattgagacggcgctcacgcttgggaaacccgtgacagcgttgttgtcctctgcctagcaccgccatagcaatcagatagcatgtgtcgcccccggaaagaaagctgacgccaaagaagcttgggggagcgatgacggcattccagtcgccttcaaggaagaggacgctggcagtggaacagaggaacgacctcacggcgaacgagggcgcaaagatgatgccgcgaacgagggcgcgaagatgatgagctggatgggaacatttcgcctcctctgcgcgaatgtgctggattaggcgattggaagccaaatcaattctctagatgtggagagcgaaaaatctggagtagggaattcgtagatcggcacatgcgagtagggaatctgttggattgtggttttagcaaaaatccgccaaaacctgagattaggggccatgtacgtatgctgttggtgattcttattatattactcttttgaactttttgaactgggtatataggaattttttttataggaatctattttaatagtgaaatagcagaaataactaccttacaaaattataaacccccaaaaaantattctttaaattccgacgaanacaaagtaaagacaataattttttcactccaaaaatactatatagatgcaacttgtcccaatatcacacaatctaagattacttgatcacact

SEQ ID NO: 19741 - DNA, 739 bp, Oryza sativa
cctgcagccaaaactacaaaacttcaactcaagtatatacctttaattacatagggataacacaaccgatcaaactgcactaacaccaagagggaaagctactttctcattaaaattacagggtagactactctcactttattctattagcgaagaaaacatctgattgtgaaattttcaaatatcttctattggtcagcttagtaggctagttgcatttttctaatccagtcatagaatgtttgctacgaagttatactgaaagccatcaaatcagaaacttacattcaaccgtcaaaaaaaaaaaagaaacttacattcagcaatgcaggggatccattaaggccaaccagcagatgtggatgactcctttcaattttttgccgatactccaactccctcttaagagcttcttcacatgtgatagtaggacatgatgatgtattagatttgtgcatgcctgaaggtaacaaatagcacctatttggaagtgccagttgtatgtcagctaacaaagtatccccttccatgccatagaatcgtcaaaaaatgtgctgactttcaacatttataaccaaaggtatttcaccactttctgaaggtgtgcttatatggtccaaagctgcattttgtggaatcatcgatctgccataatataataacacgatgaaatcaataccgtatttggactcagaccaaaaaaaaaggaaaacgtatattatcaagcatccatgagata

SEQ ID NO: 19742 - DNA, 2883 bp, Oryza sativa
ttcctgcagccctcaaaattttgtttaagttctatcaaaatactgaaattttgtcaaaattccatcaaattcagaatctgtccaaattgttatattagtcaatgtgcgtcatctaattttaaatatacttccaaaaataaagttccaaagctacgtgtataaaatggggacaaaaacataattaatgtatatacatgagagggtataaatatcattttatcaattacttaacactattaacttcaccatccaaagtaggggaaaaacaagcattcagttaaaaaaagtgagggtaaaaatgaaaactctaaaaaataggggtaaaatcaatattagacatcaaagtaggataaaaacgaaattgcccctaccataaatgcataagggcccatatgtcatagattgagtggcaaagccttacttgcaacatcttaaatgtggcaataagtcaaactacctagaaaaactgtcgcaagtttttttggtaaaactttcaaatctaactatagtataattgtaatataattccactataactattatataacttgtatataagtattaaaataatatatgcaactttatatctaacttatatagagtttgtagttacactacgactatactatagttacatttgaaagttttttccccaaaaaaacatgcgacggttttaagcaattccgaaagttgaatgtccctacattataagccaatgactagcctcatcccattgagaagaagttgaatcttccgcagtgtaatgaccaggagaagattgccttcgctacccaccagctctagggcctcgcttttgcttggtgggacaactacatgtttacccgcccagcaggaagagaagtcacttgagcagagttccggtgcagtttcaggaaggcgcaagttctcgatggaatagtggtgcaaaagaagaggaagtcccgtgcacaaaagaagaggaagtttcgtgcactgcatcaaggagacatgacagatacatagtatctgcatgagttcaaccgccttgcgcactacgtccctaacgacctgcacaccaatgctgagaggtaggagaagttcatgtctagttttgatgatgaactgaccgatcagctgatctctgcagactatactgattttgagaaactagttcacaaggcgattcgtcaggatccaacttctcgtcccacaaccaccatccgcgtgctatcctatgtccttgcctcgccaccagtttgcctaggtcatgcccacaacatcatgcactctagccgctagctcctgataggcggggcccatcgacttgctctctatgtgaccaacatgtgggtctgcttgtacaaaataccttatgagcagggtcattttgtcttttcaaaatatttttcttacaaaattggcaagagataataaaataatggtgcggtgtgttgtacttctctgtttcatattataacattgttggcggatggcatgaggcccttcgaccaaatctgccgaaacccatggcgaaggctatggagcaagaacggcgtgaggcgaagagtcgtgcgaagtgccttgccaggccagaggcgtctcaggcaaagggtgcaaggcgaagactatctgccgaaggaagacgacttcgccttggcaagttcgcccccacgagggccaaagaagcctttccggcccatcaagcctaggggcaatagggccggcgatcgccagacggcccatcaggggcccatgagcccctatatcatcatgtacccctgtaaatgtccctttcataagggtaatcatgtaaattcccctgtataacctaaaccctagtagtaagaacctgtaatggggatataaatagccccctaggaccatgtaacgggggaagatcccaagggaaattcaaaatttaatacacttcgtttttctaaccactgttgagtaaccacgtctttcgacgtatgcggttgtcgtttcgacaacagctggcgccgaccgtggggacctccgagcgaaaccactgagagtgaatgccaccgaagaaggtcgtgaaggagaaggttgcaaggcggaaggaaagcaacgccgcaccggacatggccgccgaggagggagcagagcattcggcgccagtggccgaagatggaggaggaccatctgcttccacatctgcgccatctcaaacgccttcggcccctgccgcctctgtgcaagtgccgaacgcggccgacgtggcgaaggcggctgctgtggcaagggcactccagaccagggcggagatcctttcgacaagccaactagtggtgccccaagccactccatcgcagccggcggcagccccgactgcgctcgccgctatgcaggcccatgtcagccctgaccctgagacacaagccgaagccgacatggaagccatgcgacagaacatgacacggctccaagacatgcttcgccaaatgcaagaacaacaacaagcatacgaggcggcaaggcggaccaaggtcacgtcggctccaatccttcagtattcggcaggttatgtcccgcctcaagtccatccgcaagtgacgacctagccctatccgcctcaagtcgcacaagcgccaatgtacttcgccgggcagcaatcggccgcagtcgctgcccaagtacaccatcaaccacccggccaagcgccaaaaatagtggcggaaggggcttcggctctgcaggcgcaactccaagcttttcttcagcaactcaaccaaccccactgtatttcaagtacaaccccatcggcccacccggaggggaatacaagtcaaggtgcgcctaattggttgccaccgattcagccgggcctgggagtttcgctgtggaatcaaggaccgcagttcgacttcgggggtgcaggaa

SEQ ID NO: 19743 - DNA, 1531 bp, Oryza sativa
cagttcaagttcccacccgtcccgtgctattcaggcgaaaatgacccgaagaagttcctctccatctacgagtcagcgatcgaagtggctcatggtgatgaaaataccaaagcgaaggtaatacatctcgctgtagccggcatcgcccgttcttggtatttcaatttaccagccaatagcatttactcatgggagcaattgcgcgatgtttttgtccttaactttcgaggcacctatgaggagccgaagacgcaacaacacctactcggcattagccaaaggcagggggagtcgataagggagtacatgcgtcgcttctcacaagcccggtgccaagttcaagacataaccgaggcgtcggttataaacgccgcttcggccggtctgctcgagggcgaactcacatgaaaaatcgccaacaaggagcctcagacgctcgagcacctacttcgcatcattgacgggttcgcaaggggcgaggaggattccaagcgacggcaagctatacaagctgagtacgacaaagcctccgtcgccgctgctcaagctcaagcacaagttcaagttgccgaacaacctcccctcttcgttcgccagtctcagccggcgatccaaggacagccgccgagacaaggccaagcccccataacttggagaaagttcagaacagaccgtgcgggcaaagctgtgatggcggtcgaagaagtgcaagccctccgcaaggagttcgatgcccagcaagtgagcaaccatcagcagccagcccgcaagaaggtccgaaaagacctctactgcgcctttcacggacgctcttcgcacaccacggaacaatgccgaaacattaggcaatgtggcaacgcgcaagactcaaggcctcagcagggaacaactgtcgaagcaccccgcgaagcagttcaagagcaaacacccccagccgaacaacgccaagatgtacagcgaagggtaatctaagtgattacaagggctgacccgccaagccagttgtcgaaatggcagaagaagatgcagatccgtatggtccatagcatcacttcggcgggtgaaggggcgccgcaatatctgaaccagctaatttcttttgggccggaagacgcagaatgagttatgttcccgcatcaagatcccttggtaatctcagctgagatagctggtttcaaagtccgacgaatcctggtcgacggagggagttcggccgatgttatctttgccgaagcatatgccaaaatggggttgcctacccaagcccttaccccagcaccagcatcgctccgcggtttcggcggagaagcagttcaagttctcggcggaaaagcgtacatgaagtacaaaagcttgcaagccgaattgcggcactcagacgattcctctcaaaggcaggcgaaagaggttgccctttttcaaaaccctccggggcgcatgaaagtttaattggacaccaaagtgccaagcagcattcgacgagctaaagcaatacttgcaaagcccgccagctctgataagcccaccccca

SEQ ID NO: 19744 - DNA, 2452 bp, Oryza sativa
tcctgcagcccataagcaatagcaaactagagcaaaatgtatgagcctccgaccatagtgcaatatggtatatgctggacttgtgtgataccaactaactctttgttccttctatgaaatgcacagtgctgatactggatcatctgaacacaagtgatgaataaagatacttgaagcttatggttgaaccggtaagtcctgttttatgtaattcagattcaccagtcattttcttttaatcgattgtaaactggtcacgagtcctgcatgcttggagcgtaaaatgttatagtttagtttttcagatgagtgtagtattatatgtccatatgccttataggcttaaatcatcataattttgctggtgtattgctttgcctttacagtcagggttctgttgaatgattctatttctatatctgtttgttaggctgtgcgtggctttaccatttagcatccttagaggaagggtcgtgttaactctaagcttattcgttttgcaaggttatagcatacttcaggaacatcttcccagttgtccccatgtgtgtgtcatgccacaagtgcagccaaggatttgagcaccacactttgggcaaagaaacgggaggtactgcagctgaactgtggcgtgctgtcattcagtaaagaaacaaacttggctggaaccaaacaggtctttaacctgctgatgtacatagttttctctttacactagttgtcttattttttgttgcaaatcatgtagaaataaaaaaaaatccttgcttggatgatggtatcttgcatgctttagcttgaattgctctggaaattttatctggtcagtaagacagtttctggttatcactcttctgtcttctccagttttctttggtcataattttgcttttagtttgtatagttcaaatatcataatttattgcaatgtacctttgatatttgtttgtctgttcaaccaacaattcttcattttgagacatgaatcctctaaggattgcagacataagggaattctgctgcttatatgatgtccgcagttctgattttctctccaaagttttcgtggctggagttatgtagaattgtagatacaatatctcaaatcttcatggctagtactagaatctatcttgacatgttctctcttaactacgccttggacgcctttttccctgtcggaatgataggtccgtcataacctaatctgatgtttggttgtatagttatttgactagttagtggctgtcttaagacaccaattgttatgaagatttggaggtcttgtttcagtaatccagttatccctctagtcacatgcattgccatgggcttccaagcttaaatattttgattactcgtcgggaatacacatctaagagaatgatattttagataatggatttgaaaaaaacccggcctctacaccctgcaggatatttgcagccacaaagttatgtagtctgagcatttaaactcgcaatacaggtttcaagcaacaaaacataaaccccaggcactaggcttccgaacggtatctagcagcaacaaaacagagaaaacaaagttcgaaacttccaaccttcctctccaatgatgtttgctttattttttaaggactgttttaccaatctgaaatgttacggtgaactgaatatggctaaatattccagacgtgtagaacttgtagcccagaatgaacgaacggtcccaatcaatcatagcgtggaaataaggtgcacgttttgccatcacaatcaacttcttatctcgaccgttgatcattcaattcgatgtctgctcttagctttttctctcacttggaaaccgaccgttccttgcctgattagatcattcgaacggttgattgcttatttggtgttagctgatcgccgtccatgtgaccactgatcacaaaagcttcttgccaatatgacagtaacatagctctgaagaattctcttgatccagaactgccagctgaaaattagcacactccaattctccaaatgctcagcaaccacaagttcacaactgcaatggttagtcgacgcagctaagctccaaacaccattggtccctgtagccaccatgctccaagttgctgtccattgtgtccgtattctcctaatccattctagccaagaattctctctcttctcatcaagccaagaattctctcttctcaccaagccatgtactttgagcagagcagccgctgctcagccacaagctccgctgcggtccacgtgtcgctattgtgttacgacacatcgcgcgccgccattggtccggaacagagccccaaaaagcgagctatatccaatcttggatcgatggctagagagatttgtggcgcagctgcttccggttcctcctatttacttagcttgtcaaaacacattactcactagtagcgtacactaccacagctagcaatggagacctcgtg

SEQ ID NO: 19745 - DNA, 3104 bp, Oryza sativa
tacgcgaagagcgtgaacccggcggtggcggcggtgagggcgacggcgacgacgccggagccggtgaagatcggcgacaagtgggcgcacccgctagtggagccggagaaggggtgcctgctgatcgcgacggagaagctggacgggtcgcacatcttcgagcgcacggtggtcctcctcctgtccgccggcgtgctgggccccgtgggcgtgatcctgaaccggccgtcgctgatgtcgatcaaggaggcgcaggcggtgttcgcggagacggacatcgcgggggcgttctcggggcggccgctcttcttcggtggcccgctggaggagtgcttcttcctgctggggccgcgggcggcggcggcgggggacgtggtggggaggacggggctgttcgacgaagtgatgcccggggtgcactacgggacgcgggagagcgtggggtgcgcggcggagctggtgaagcgcggcgtggtcggggtgagggacttccgcttcttcgacggcttctgcgggtgggagagggagcagctgcgcgacgaggtgcgcgcgggcttgtggcgcgtggcggcgtgcagccccgccgtgctgggcctcgccaccgtcgtcaagggcggactctgggaggaggtgcagggcctcgtcggagagaggagggtgtggtgactgattacttctcaagggtgaccattatgtaattaattaattaattaatctcttaattaactcgcaagtaaagtatttactcctttcagattaatgattttaggcttttagtcatcacggtaggtttaaagagggttgtatttgtatactctgtatcttgtactcttatcgttttgcccaccactacgcgaacacacctcgatgcccttctcgtctccaacgcatacactacttcatactttataattaaagccttaactttcaaatcaaaattctttcaattttagaaatttcagcttagaatgtcaaattttcaatacattctaccactcattttaaaatttctacataaatattggcaagtttgtaccgataaactcaaatgtttaattcacgtaacaaaacaccattgagcaacttggagcctcaaacaccattcaaaagcctcaaacttccaactgaatggtgctcgctttgccaaacaccattgagcaacttggagctcacctgcatctagatccaagagtaagaagaatttgtgtgaagtgacttgctatccttggagataagaggctcgtccatgacccgggggggggggggggggggttgtatagaaacaaacacgtcttatgagaggttcatctgctccgccactatgctaggaacttaattgggctgcacatgggctatatattttacccataatccaaggccgggactacgagcctcagaaagaggatacaaaaacaaacaacattggatgtactatctatctactctctccgtcccataatataagagattttgaatttttgcttgtagtgtttgaccactcgttttattcaaaaaatttatgtaaatataaaaaacgaaaagttgtgcttaaagtacttacgataataaagtaagtcaaagaaataaataataattccaaatttttttaataagacgagtggtcgaacactacaagtaaaaactcaaaatcccttatattatgagacggagggagtatctatctatctattatatactaaaagtccattaaacttcctatgaacgctcctaagccaccacgtggcacctctacaaactctcctacgtcgccacatggcactctaataaattagaagaattaagcaaatgtgaactagttggttttcatttaatctggtggatccattatttttaaccgttagatatatagcatagaaaatgtcaaatagatttattatctttaaaaatccacacatgcgccgtacgtgtacgtgcatgtacgtacatattttgtacgtgggccccacgcccccttttcttttttttctttttcactaacacatgagaaaaaacaaaattcatattccagcccatatagttcggagtatgtacttgcatgtagggccccacgtccccacatttcttttcattttccttttttcactcacataagataaaaaccacattaataattccaacccatagttgtacaaatatatttatttttgagttgtattgtactatacgcacatcattgaaatattcataaaatatctaaataaatgaataatatacattatataattatataattgtatgtcacttaatgacatgtattgttaaattagaattgcattttgaaaaataaaaacaactccagttgtgagtaacattgcaaaaatgattcgctccctactataagaaaatactgttatatcggaataatattattaaattatcataattacactctaccaatcatatacctaataattaaaaaattactaaaaaagataaaaataacttgacaaatattagtgcactaccacattattcataaaaaataaggaaagctattttttattaactatactattaataattttaatgttatgatttaataagtaatattattatttatttgttaactttttttataccgtttagctgttcgagaaacgtgctcgctacaaataagggagtatctaatcctataagctctttagaacacactcttaaatttattacttagatacaaacacaatatatactatacaatatatttggtcaatcctggcctaaaatatcaatcgtaaatcctcactgatcctcatgtatgtaagttttatatataagccattatccactaatcatcaagccatattgcttacgaggcatgtgtgcacagtgcatataacgattagttggcccttgatttacttggggttggcaatgagcaaagataaggtgactaagagggagttgttaccaatcatgcaaaaagttgagaaaaggatggatagctggcaaagtggacactgttggtattttttaacgataatactagaaatctaattcccagcaatggcgcagaaatactcgtagtatattatggttacagatttcatccgcaaacgcacggatattctattgtagcattttat

SEQ ID NO: 19746 - DNA, 1154 bp, Oryza sativa
atcattatagcaggtgttattggaacatcaatataaattcatggttgctgatggtgaagaaatgcgtgtgtactatatatgcagatactgctgaccaagatgtcgaagcaggttcacttctatttgacctggcaacattaaggaaggcaacagctaattttgcagaagttaacaagctcgggcatggtggttttggagctgtatacaaggtatatgcaccttgatactatctgaaaataccaatgagaaccctgctgatatgatctgaaacttatttcagggattcttgcgagatggagaggagatagctgtcaaaaggctcgacaaggcctcgggacaaggcattgagcagctgagaaatgaactcctattggttgccaaactccggcacaacaatcttgcaaaacttctaggtgtttgcatcaagggggaggagaagctgctcgtgtatgagtaccttcctaatcgaagcctcgacacctttctttttggtaacagcatttatagttctacgcttcatttttgttatgaaacacccagtagtctggaatcattctcagctgtagtaatcatcaatatgctgacaactagtagtataattgcgtagtaaatagcatccgagcatggtttgcaagcacatgatcagtttggtacttggcagatccggagaagagaggccagttaatctgggaaacgagataccatatcatacatgggacagcacgaggcttagtctaccttcatgaagattcacacataaaaataatacatcgtgacctcaaggccagcaatgtactgctagactctagcatgaacccaaaaatctctgactttggcttggcaaggcttttcgatggcaacaagactgctagtgtcacaagccatgtcgtcgggacactgtaagacactgataattaaattccttcattaattctttacacgttgccttcatctagttatatataaatctgttttacttaattacaattggcatacaaaactataaatgttagttacatttggcatacaaaactataaaggttatatatgtatctaaatataactagctagatttcttaatttatttctagtctggattacttacgtgcagaggatatatggcgcctgagtatgcagttcttgggctcctatca

SEQ ID NO: 19747 - DNA, 1192 bp, Oryza sativa
caatggataaagatatactccctccttcccaaaataaacgtagccataagttttcgtgtccaactttaatcgtttgtcttatttaattttttttaaaaagattaaaaaacataagtcacgcgtaaagtactactccctccattccataatataaggtgcgtacatatttcaagattcaacctttaaatcatttgacaaacacttagtataatatgaaatgaattttattgttaaaaattatatcaatagattgagatttaaatttactttgatatggttataattttgttgctacaaaccgtatatgaaaaattgtaagctaaagattagttttagagaccgtgccaactttaatcgcgtcttatattatgggatagagggagttttcatgttttataatctagcaacaataaaaatataatcataaaataatttcaaataagacgaatgatcaaagttgaaaacaaaaactcatggctacgcttattttgggatggagggaatagataggttaggaccactcagaagtgtaatattcatgtgttttttctttggaatggggctttgttgacgaaaaatctatactcggccgatggtgccggaactgtgttggcgcgaactaagttgacgaacacaacggcatagaagatcttcttagctccagtgcaggtccaaaggttgatgagatacaggcatgctagtcagtagattatgacacttgatataaataacaatataaaagcaatcggctgatgatgataaataacaatataataattcagtagaaaacaattggctaacaatatgatagaataaacactaattcgatgcttaaagcatacatcggctgaagatccaatttcataaaatccaaatgattagataaacagtaaaacatttgttgtcatcggcgaaatctaacttgtatgctatccttataagccgatgcaacatccagatacctcatcggctgaaaccccgatgaaacccttattggcaattaagagcagggtagagaatatgattctaagcacgacttagtaaatcaaacctaactgatacagcactaagtatgaaaaaaacataatatctaaacaatcaaacctttgactgattttcagggtggtggatatcttagctaatataatctggtaaagcgatttagccgataccggcataaactctaaagcaa

SEQ ID NO: 19748 - DNA, 8576 bp, Oryza sativa
ttcctgcagccctaagcaccagcgcgtgaaaaaatatatataaaatctaataagtttatgatattattatcatactagtattattaagacaaatctagatgataacatcttcttgtttaaattaggtgcggagtatgtttgaagttattgatggccaagtaaataaatagttatccgagatatctactcatagagttataattaacaaatggtttatagaaaaaaaattatccatgcagcgtacatggcatataatctagagtaagttaatttggcattagctcaaaatttggagataagcgcgcagtgatcaaatttttggaaggagtgaaattggtttggcgggctttagctgcggcaaagagctgtatagatacgcaaaatcctttgaccgccccttcgtctcccttcaccgactcccaatccccaatgtctgcctaccagcccccttccctcatcgtccttgccgccggttctctcacagacgcgcgcggcaacgcctctacctccccgacgaacacctcggccagatcctcgtgacgctctcccagtcccttgcccatggcgtggacgaaccgacgacgcctctgtcgctctcaccgcgcgtctcagcgtcaccatgcccacgagcatcctaccccatcccggtgccaaccatgacaagcacccctacatcctcgcggctgaccaagttggcctcctcatcagtggtggtgctcccatcgatccacagtatctcccctttatcccgaggtcttctcccctctctctaatccccaacccaatctctttaattatagaactaatgcgagcagttttttttttcgtgtgtgcgttataggtttggcctatggttgcaagcagagggaatgtaagttcgaagctatcagaagaggtgtgaagttattctctttatctcactgtcctgtatgtagtatcttttacgcaaaatttgccataggacactcaaaaaacatgtaattggctgggagacaccgtaaaaacatgacacggctgatggacactataaaaattatgtaattagctgtaggacaccggaggcaatagtttataattttcaggtcagaaggggtgagaaatttttcgaaatgacgagattgcccctggcgctgctcctctccagctcgctcatctccgccgcgtgagatctcgttgctgctcatgccgtccacaaccacgacctccttcttctgcgtcgccagtggggacacacaccaccgtcccggcctcttcgccgacgcccgcatcgcgagattctacggctccttcccgggcggctggctcgccgccgagctccccgagtcgcgcggccacgcgctgctcaacctctgcaccggctcgcgtatcgccctctcgacatgactccgctacagcgtcaacgcccgcaggagcaacaagtactccatcatcatccacatccacgccgtcactctctccgccgccctgtccgacgatcacccgtactacgccgccgccgtaatgtccagccagtcgaacatcgatattgtgttctggcgccccagcatggactactgaacggtgaacgccaccgacggagaattggggcgcgaagttagaagattggcagaagctgacatgcaatggtccaatcgaggacgtcacatactacatcggtccgcttggcgagggcttctatgtcctcaccaacaaggaggacctcctgctgtacacgccgaacaccaacaacaaccccggcgagctcaccatgtcgtccatggagatgtacagcgtctgtgatgtttgcgtcggccatgtttgcgcatgtactgcaagatgcggcggggtgacttctgctgtccgacgtgggtgacgacggacgcccggaagctcatcaagatgctgctcgaccccaacccgggcacccgcatcaccgtcgtcggcctcctcgagacatgtggttccagaagaatgcgcccgtcccgtgccccatcactgacctcgggctggcgccggtggacacgcttggcaaggccgacgacgacaaaagacgaacctcccgaggtgctgaacgcgggcggcatcgctgggacgcatggcagcgccatgcccatgcacgggacgcagggggcggctcgccgtggcgccaggggcaatcccgctatttcaaaaaatttctcaactcttttgacctggaaattataaaatattgtctctgatgtcctacagccaattacataattttgttagtgtctatcagccatgtcacgtttttacggtatctctcagcaaattaaatgtttttttagtgtccggaagcaaattttgcctatcttttatgatcaatcataatatcgttcatttacactgtcacactgccaactatcgagcaatagaagcattgaactctagttctgtctttgactgcttcggacatttcacaagccaagccagtttcatgcattaggtggattggcccaaactcatattgaacttagctgtttgctgatctattaaagataacttttgaaggttgtcaaactaatgtttggcagttgatgcgaatatggcatctagtcacagttatgatcaggacttctattgatgaatagtgattacctcaactggctctgctgtttctaatcttcattgtcatagaaggaagctgtgatttggtaaagcagcaatatctatactctgtatgacaaatatatgcttacaagagaatatctagagaatatctagagtacttgccctctggagttgtttatattgctggaaaaactgagacttctagatgttgagtgtgatattaacttctgaatttggctattacttttttggctaaattggaatatgctgaaatgtatcagattttttaactgaggaaatgaaccaatcttttatggaacttgcttttatgaaatgatagtgattgaccacaatgatggtacaaacagaattggcaagtgcttgtgttttcttaagtgatatctggttttgtagtactttcttcggttccatttattttcttgactaatggttgtattttttttttcagagcgctgttatttcttcaggttctaattcagaggttcagataaagtaaacatttatgtttgtaatgcaaattatatacagatatatggaaaacatgcatcaaggtatagttacggcctgtatactctaatcatgaaatagttttaattcaattttgtgtacatcatataactagtaactagttcaatgctttgcattacaaattagaaatactctgctatgatcttaaatctctacttcatgaagtcaatgttgataaaaataaacccctaattctcattccaaggaaatcaatggtcttgttgctgagaccactagaatttatttttaagcttttcttttctttgttcaatcaggcttcttgattgttttctagactatactcttgagattttgtgagaaacagagcatccgtgatattttaaccaaaacaatgtttaaaactgtagctatacatgccttagatattatcatttgattcaacaggatgtgcactgaatgcttttgttcatttatctgcttaatatttataatgcacattaatttctaatggctaatagctaaatatcgtgtttctcaactacaggtacttgcatagcatgcgaggtgtgtgtgcacacttaaaagtagatgacaagttgaactcaataagaaatggttgttcagctgattgcctcatcaagtcaccatgggacaagcggcatgcaaagatgcatgaagaatatagaaatagttatatattttgatttgagcactagaatttggtttttgtattgtgcatgttccctgtagatgtatataacagtatacttcaatgtaagcaataagtcaacaaacgtatggtgcataataaagatttctaataattattttaatatatagcagcaacaagcaatgatttcttaaactatattgctaatcatgctattaatgtgctgctacaattaaaaatggttttactactttcttgagaacttgtatttgtacttgtgttactagtgccaaaattttgttttactcgactatgtagcaacacagggcgttgtgttacaggagataaacaaaggtgttcctagctaaaaacttgtaacacctattcttatcaattggaacacttatatgtgctacaaggatccatgtgtagtaacacggccaacaagaacacatatcagttgtgttactagaatcctcagtaacacgtttctggagatatagtagcacaaagacgtgttactataaccctgtcctgcagtagtgtgatacagtggcgacgcttcttttctcggctggcaccatggcttccaagacctcattccctcttgaaaactaatcaaccaaccaatccacccatccaactagacctcaaattgatgacacgaaacaacgaaacaaccaaaccaataatccattatcggtggagaaggtcacacgaaaagaacgagtccagggtgctactaggggcggtggcagcggcagatgaggggaggcggtggcggcagcggcagatgaagtagacggaggagccaatcgagccgcgttggcacttggcagaggcggattcaacctggatgcaggggggactatacccaccgtacacatggatacccccctgagttcccccttcaattttttcaccatggatgataaggtagggtgctgaaggtctccggatggctagaggttggagaaaccgcgtattgggccaacgatccgcataattgtgccaggcagccaagggcataaaaattgcctattgcctattgggctttgaactcactcacatagacccacatctagctctctatgctccgcccaacccccaatccccattcccaatggcaaaccctagcttccaaatccaactaatcgaggtagcttaggcaggcaggcagcgagcggcgccgacaagttaacggcgccgtgcacggaatgtgtgacggcgctaccgcacgagcgcgggctggctagcagcaccgcggcgcacagtgccagcgagcgatggcgcattggcgcaaggctgcgagcggcactgcggcagccggcagccaagccgcggagcgtcggagcacgcgacgacacgactgcgcgagcagcaggctgacggcggcgcgatgccgcgagagcacgctagcgggactgcaagaggagcagtgtagcaggctggcggtgccacgggagcgagcagcagcagccagcaggctggtggaggggccggagcgagtagggagcagaatgtcataaaaaacattgttctgttaaacaacatgcatgtattaatgtatatcttgcctaactgatctagctgagatttagattgttagtttagataagatgtatatcctttagatcaaatctgggctagattagaggctatataatcctgtaatctcagcgccgattggtacgccaatataacacgcagccgtcgcaccgaaacaaagggcgacgttcaacccatctcactttcgctgttttacatggtatcagagcgagagaaaaccaattcaatctagatggccagctcctcctctaccgcagtttccaatccgctattcggggttcaagtctccgagaaattgagcaagcagaatcatgcgctctggagagcgcaggttctcacggtgattcgtggcgcacgcctggagggtcacatcaccggcgaaacggcagtacctgccgcacaactcagcaagacggtggaaggaaaggaggtcaaattctccaatccagcgcatgacgaatggattgccgcggatcagcagttcctcgggttcctgttttcctccatgacgagggaaacgctagcgcaagtcgctactgccgcaacggcggccgaagcctggaagacgatccaacggatgttcacagcaaaaacgcatgctcaaaccatgaacgtgcggctggccctcatcactatgaagaagggtaatctttcagtttctgattatgttggtaaaatgaaattgtttgcagatgagatagcaacagtaggcaagtccatggatagcgatgaactgatcgcatatatcctcaatggactggacgaatgcagccagcagaaaccgtgggggcttctcctcgtgtggtggcgcaggaagaggccggaacaccaacagcaaccgcggccgtggctccggccgtgggcgtggtcaagtcaacagcgcggcaacgacggccgccccttatgccatgtgtgctacaaacgtggccacgttgctgcaaattgctggcatcgctatgacgaagactacgtcccagatgacaaactcgtcgccgcagctacatacagccatggcgctgactcgaactggtatgttgatacgggtgctaccgatcacatcactagtcaactggagaaactcaacacgcgggaggtgtacaagggacatgatcagattcacaccgctagcggtgcaggtatgaaaatcaagcacattggtcatgctatagttcataccccaactcgtcctttacatcttaataatgttcttcatgtgccacaggccgctaaaaatcttatatcagcaactaaacttgcctctgataactctgtttttgtggaaattcactctaagtattttttgattaaggatcgaaccacgaggagcacggttcttaaggggccacgccgccatggtctctatccgcttccgtccacatcatccaccaagcaggcctttgcagttgctccatcgcttgagcggtggcacagtcggctcgggcatccttccattcccattgttatgaaggtcattagttcaaataagttaccgtgtcttagagaatctaataaagagtcagtgtgtgatgcttgtcaaaaggccaagagccatcaattaccgtattccaattctatgagtgtgtccaataaacctctagaacttatttattcagatgtatgggggccggcctccacctcttttggaggaaagaaattttatgttagcttcatcgatagctatcgcaagttttcttggatatatttcctcaagcataaatctgatgtctttgaaaagtttcatgactttcagcagcttgttgagcggctttttgatcgcaaaattatagctatgcaaaccgattggggaggagaatatcaaaaattaaactccttctttgaaaaaatcggaatctctcatcatgtgtcatgtcctcacactcaccaacaaaatggttcagctgaaaggaagcatcgactcatagttgaagttggtctagctcttcttgcatatgcatctatgccacttaaatattgggatgaagcctttcttgctgccactcatattattaatcgcattccctccagaattcttcaatatgacacacctctagaatgcctatttaaccataaacttgactattcttctttccgtatttttggttgtgcttgttggccaaatcttcgcccttataatgctcataaattgcaattccgctccatgcaatgtgtttttcttggcccaagccacacccacaatggatataagtgccttgacatagccacgggaagaatctatatttgtagagatgtcgtctttgatgaaaatgtttttcctttatctaaatttcactccaatgcgggttcaagactacgcagtgaaattgcccttctaccctcacatcttttatctcacacttctcatcaagggggagaacataacaaccatatgcttgatttttataatgtttcatctgatcagactgatgagaatgcagatatagatggaggaaatacgacagatacaactaatgatgatctgggtacgtcagggaatgtggatgtagcagcagactcgggttcggcttcgaaaattgggtagcagactgacccaacagaccaacctgcgcatgacacgtccgccaccggcgccagcactcgccgctcatcatcgccgtgccaaccaggaggcgaaacgcggctgcacaacagtgggtctccggtgcatagcactggtagtcaatccacacatggagacagatatctacattggcaggtaatcaattgcatgaattgagatcctctgtgatgcaggacatgcactttggaggagaagcagccactcatgccacagaagatcaatcaatggtcgcagcaaagcccagaacaaggttacaaagtggtatccgcaaggaaaaggtatatactgatggaacagttaaatactcatgttttacttcatctggtgaaccacaaaaccttcatgaggctttaaatgataagaactggaaacatgctatggactctgaatacacagccttaatgaagaataaaacttggcaccttgttccagcaaaatcagatagaaatgttatagattgtaaatgggtatacaagattaaaagataagctgatggaagtctagacaggtataaagctagactagttgctaagggctttaaacaaagatatggcatagactatgaagatacattcagtcctgttgttaaagctgctacaataagagttattctgtctattgctgtatctagaggatggagccttcgtcagcttgatgtaagcaatgcttttctgcatg

SEQ ID NO: 19749 - DNA, 1656 bp, Oryza sativa
tggcgcccccaaaaagaccatttcagtggtctatttgcgaaataagtttttcaaaaggacctattaagagtgaaatttggtaagccccgaagacatcatcgacctagagccagtattgtcttcagaatcccggaatcggccgatgagaattatcacgtcgccaatagtcggattccttctatattcggttaaggaaattcatctattaaaggaagcttatccagaagtcaccgagttcaaggaggatgcggcatagcaagctatctattaattaggaatagttttttagtttcctttatctttcagaaagtgtgtttagtgtcttataaatactctaagttttccttttatcttttaggaaagcttctttattttcctacaagtactagtatctccccatggatataaatatgtacacctggggtcattgtaaactatctcgacgatcagtacaatttaagcgcatcgccaccctttttacttttctactttttatcatccgacagaacttggcacctaacgcggggctacatcggctttcgatctccggcgaaggggtaagtcctacgttccgcaggctcaggcaattatatcatctacattggtgtcattcaaggctgcatcagtacatttgacctcttggattgttccggtttggaagacatatttgcttgcctatttatcatataagttaatctagtttggcaactcgatttacttgtatcggctgagattcgctttagggtttatgccggtatcggctaaatcgctttaccaggttagattagctaaggtattcaccactctgaaaattaatcaaaggcttaattttctagactttatgtttcttttcatacttagtgctgcatcagttaagtttgatctaatcagtcatgcttagaatcataaagtctagcctatctttgattataataagggtttcattgggatttcagctgatgagttatctggacattgcatcggtttacaaggattacatataagttggattcaaccgatgataacaaaggtttcattgtttatctaatcttgtggattcaatgtatgctttaaccttcgaatcagtgcttattctatcatattgttagctgattggtttctactggattatactattgttatatcatattattatcagtcgattgtctttgtttacctcaagtgtcagattctatatcaaatatatagctgatagcttaaaaccctatcgttatcggctggtatcgtcatcggctggactactccatcgccttatcagccgatcggctcattaatctgctatttatatatcttgtcaattgcaggaccaaactgactggtacgtccgcatctcaccaaccttgggaactgcactggagctaagtagatctcttaggccgttgtgttcatcaacttagttcgcgccaacacagacttgacaccattcgtcaagcacggatttttcgtcaacaggaccaaattgtaaaaaaattcagcaatgtgattgtgtgaatctgaccatagttcctcctgccgcaacaccgcacgagcacaacacaagtacacaactagtaaaggcagcgcccaagcgtccttattttgatcggaaaagctaaatggcgcaaacgtggccaccctgcaccagctcgcttgcta

SEQ ID NO: 19750 - DNA, 4901 bp, Oryza sativa
agaggggagggaaccagaccatacggacgaaaaaaaagtgacgaaaggaaaaatacgaatcttttaataagttaagattaagataagatatattattattaggtaggtatatatgtactatggggtgttcttgtggtgtacgtattagggcgtgatctgagcgtagtggacctgaacgtgacatgggctttttttttttgggaaacatgacatggggctattaaggaggaatcggacagaaaaaatcgtaaactacacgcggagggaatcggattaaaaaatcgcaacaatcacgctatatacgggagggaatcggactaaaaaatcactcgggacgatgtacgaaaattcatgggcaaaaacatcttaaacttttataataggaaaagatttaatgataaaacaaatcacagtaaaataattaatacttatgtacttatactacatttattgataaaataaatcacaaaataattgaatcctaacgttcacaggcctctcatttaagcatcaaagatttccaaataattaagaatttttggggaaaaaaagtggcatgaatcgaacaatccccgccttgcatctcttatttacctccaagcagctagccaagtctagtttttctccctcttatcttgccccaacacctccccttcctccctctcccgtgggcctcttggcccgagaggcccagcccgcccgtctgtttttgtccctccctcgttgccaagtggccctcgctacagtgtcgtcttcaagctcgcgacaagaccggactctgccatggccgccatctcctcctctaaaaccgacgcagccattgccccctaattaaatccgagcccaaaaaggaatcccctcaaacacctcttccttttggactcggaatagacgcaagagagcgaactgggagttttttttttctccaagtcgttgatgaatcagacttttttttctttttatatgtttgaatcggactaaaaaattgggacgacgtacgaaaatctaagggcaaaaatatcttaaacttttataataggtaaagatttccagccaaaacggaaagagaaatattggttaaagacaagtttgcccatgggcccacttgtcaatccctctttctctctctctttctctgctcatcttcctcccgcgtccccggggtgtggcgctgcgacgaggcgtggaagctgtacgaggctgaggacgagaacgacccgttcgacgtcatacactcggagagcgtgccgtgttccaccgctgggtgcgtggcgtgcccgacctggtcgtgtcgtggcacggcatctccctcgtggcgctgcactcagggatataccaggacctcacccggcccgcggcgacgacgagcgcatgtcgccggcgtccaaccacaacctggcccagtcggtgaactggtgctgtctgaggtgcgcttcttccggagctatgcgcaccacgtggccatcagcgacgtcgcgagggagatgttgcgcgacatgtaccagatccccaaccgcgtgcacgtcatcctcaacagcgtcgacgaggcgcagttcgagcccgacggcgctgggccgcgcgttccgggaggacctcacgctgctcaagggcgccaacctggtgctcggtgtcacaccctgaaaaattcaaaatatataaatggttgtttaattggaatttttagaaatgattttaaaagccttgaaaagaagatctaatttttaattaataaattccaatataaaatggggccagataaaatttcattaaatactttgcttaactctataattcctagatttttctgggatttatttgagctaaggaagtatttttaataaatggaattgcatttcatgaataattttaattgaaaaaggttttagaagtcttcttttggctttgggccgaaagtcggcccaaaaccgctctctctctctctcctcggcccagtccggcccaatccgcagccgcctgcgcccgcgcgttcgctcgctgacaggtgggtcccgcttgtcggagtcgtcgtcttctttcgcccgccgccaccttcgccttcgcctctcgtcgtccgtagcgccctagcgtcgtgtgcccttgcgccgccgtcgccgccgtcgctccagccgtgcgccgccgccgttccagacgtcgccgtcgctcgggaagaccgtcgtcgtggtcgccaagtcgtcgccgtcctcgtccgccccttcgccgtcgctgtagaccgccggagcaccgtcgccgtcgtcaagccgaagagcgccgccgcttcttcttcgtcgccgtcgccgttcgttcctcttccgccgtcgctttggtcgccggtgagttcgccgtgccgtccgctacccgttggtgccctccgttcgtgccgaagcgccgccgttcgccggcgagcgtgcgccgtccgagccgccgagccgccgccgctggtggtgacgtcatcgtcgacgtcatcgtcgccctctcccgtgagccggtcgtggaccgttcgatctcggtcgtccgttttggatcaagtcgatctcggccgtccgttcgcgtgaaccgccgccgtgcgcccggtccaccgaaaccctagtccgctgacgcaataaatccctttttccttttcaaaaataattcattattgcgtcataattcaattaaaatcaatataagtgttttaatccgaattaatcttcaaaaattcataactaattcatcttagctcggatttagttggttcaagtctctaaatttttctaaaattgagatctacatgttaaaaatatccacatgtactgttcatgcttgtttatgtgctgttttggtgttttttctcttttctgtttagattccgtcgtttccggagagtccgttttcgtcggagaagaatttgaagagttccaaggccagcaaggcaagtcacacagatcccaaacaaccctttgagcatgttgatcccgtttaaagctattgtttcttttcaactactgcatttattttcgaatgtcattgggtggaattaacctattgtttgttatagcccttttgttcttgattactttattccttgataccttgggttattataatttgactagttgagctttatgtatattggttcaactagatattagatataattgcttagccctgcttagaaacattagctcactattgggataacttatgactcactgttatttaatgatggcttaatgatagttcacgatggtcaatcgtgattagttaattaattaatgtgccaactaaaacctggtaatggtgggttgtgagcacatggttttgagagtcgtgctcatgacaattaaggaccggttcacgagtttcggttgtgaaacattaaccgtgctagccacaagccagcgtgggcaacggctttatcttttgtatagcatggttcattgcggggcaccagactgagaagtggcggagataagcccacgggggtcgctggggagtccatgccttgtttataagggggtgattatgatccaggaatggtgcgctgcggtggattgtgttatgcaaggggtattgtcacaactcctttccgaggtaccgtggtggtattgaggcacatggtgacatgatgtggggttgtgtcttgtgggtacagtggtacacctctgatcagagtaaaactattcgaatagccgtgcccgcggttatgggcgggtctaacaatgtctttcgtgattagtctcaccctctcatcataataaatgctttaattggtaataattttattagctcctggtttggaatggaatattcctggtttggagatagaactgtacagccgggatggttgttcagaatggttgggcctatgcaacagggtatgttgtatagcgttggatcaatattgtttaattacttaactgttttattacatactcaaatgtttgctaaatgctgcttttgcaaatgaaaccctactatgccatcctttgttatcctgtgcacttgcatatttgctgcgtggcttgctgagtatgtcatatactcaccttgcaatcattcatcagaggaatagttctacagtgaagctgatggtgtggaggattaggtgtagccttggtcaagctgcctgtggagtggagccgtctgcgccgtttatcttattttccgctgcttagatctttattgattgagaggaactatctacctctgtaatgacattttatacgcttattaattagagtaataattgtactctattatcaatttgttattgtgtgcctcggctgattcctggacgagggttcacacacatgtaagcgtttggaattttggatagaaattccgggcgtgacaagttggtatcagagccaggttgaccctaggttatgccaaatggttatccatagaagccctctaaaaatattggaaaagtagaactgttctcctccctttctcttttaattaaactaaactaatggcacatgcacttcataatctcttttaatggttctcattcaaaatttattccagtgttattagtactgtacatctattaccgtactaatggctcattttaccagcaaaagttttacaatattgctttatttaatcttgctgcaacaaaataaatttagcatgttgattttataactttctttcatttcttttgaaatctgttattcaaaagtacaaaacttgtgaccttgtttccaactgtttcaacttatcttgcaagcttggtttactttatttacttacctttttactttgatttctaaactttattcaaattaatccaaaaacttgtgctattaattggataaatgtcttaactccctcctttcacttgtctttagatgcggcgttacaagcctgagtacttgtttggtgttgagggatttatccaggagttgcgtacgatg

SEQ ID NO: 19751 - DNA, 682 bp, Oryza sativa
aagaatccaagcgcaaccattccaagattgagtgggtagctacccaagatgatgaagacgagccgaacgagccttcaatcgacctccgatgctcggaagaactagagtgacttgttaagtcattgtcttagatcgttgtgttagtttgcttgttttaagtttgcttgtgtgtgtctcgcatgtgatttacatcaggggtgggatgtaagtgcatgcgtttgtttgctttcgagtgttaggtagttggtgagtttagtggtgtgagagtcttcagtttgtaataatgaaactcagttaagatcaataaaagttaaagtaattctctgtcctaagtagtttcccccggtttctcttcttgtgccctgcccatgccagatggtgaacactcgcagcaacgggaatggccccaataacaataataacaacaacaatggagagaatcccacacttgcccaagtcctggctcaacaagcacaacttatgaacatgatgatgcagcaactccagaaccagagaacagggaaataaccatgcacctccccagaacaagttagcagaatttcttcgtgtaagaccacctattttttctagtaccacaaatcctgttgaagctggtgattggctgcatgccatagagaagaagttggatttgcttcagtgcactgatcaagagaatgtctca

SEQ ID NO: 19752 - DNA, 1109 bp, Oryza sativa
ggcaatcctaattaagcaattggtctctctgggctgccattaattaatctcatcctgaagcctatgttctattcttatattcttagtagtatcttgaacacaaaattcagatagaacttcactaatttctttttgttctatagctactagagttgactggttgagataggagctttaagtgaataggttccttctcagttcttacgatatgtacgtagttaattagtatctctacatcacaatcttcttggttgagtcattcctcttgcagtcttaacactaacagatgacgtgctctttaatttataggggacatataagatattataaacttaaatagtttcaatatttgatgtattccttgtatagcgtttatactattcaattatcaccaaacgttactttgtgcttaatgatgtcttaaagttcaacattttttcctatttaaaataaaaaaaatattttacatatatatttactagctactagtattgtagggccctttatttttgtctcgtactaggcctcaaaatttcatgactagccaatgatacacgtatatttatcatgtttccctctggtgcagatgtggcctgatctgattaagaaagcaaaggaaggtggccttgacgcgatcgagacctacgtcttctggaacggccatgagccccatcgccgccaggttagttctgtctccgataaaatatgtatactgctttagctgttactgctatttatttagtaagtaatcgaatatgtaaatccacagtaaatattttacgatttaaaactaagcttatgtaattcaaagcaaggctgttccccatgtatataccccatgtatatacggaggagtactatttatttagtaagtaatcgaatatgtaaatctacagtaaatattgattaaaactaagcttatgtaattcaaaacaaggctgttccccatgtatattatttagatgaattaagcttagtttatacatccttatattccaggctgttccccatgtatattatttagatgaattaagcttagtttatacatccttatattccttgcgtatagatcgcagtatcgctacttgtagcttattttgcaaacccga

SEQ ID NO: 19753 - DNA, 694 bp, Oryza sativa
actttttttaatcgttttcctcatatgcagaggacttcctgcttggctacgtgatattccacaaatgcagttcagaatgcataatgcgccatttgaggtaatgggttataataataaattaattcaaacatgtatatattcatatattatgtatagcaattgaaattttgagcaattgttttgtttcctactgaatagaatgagatggaaaacttcacgactctcattatcaacaagatgaaggatgccaacatgtttgctggtcaaggtggcccaatcatcctggcacaggtgtgatgcatgctagcaccctcgatctgttgccaataatacaagttattcaattacaaatgcattgcttgtatctttatatatatatagtaccgctctattgccaataatttaagttatttaatacaaatgcattgcttgtatctttatattatagatcgaaaacgagtacggaaatgtcatgggccaactgaacaataatcagtctgcgtctgaatacatccattggtgtgcggacatggccaacaagcagaatgtcggtgtcccatggatcatgtgtcagcaagacagtgatgtgccgcacaatgtggtgagcatgactttcaatttgtttaaaataatgtataatgtttgtatgtgtttaaattcttttattgattgtttgaaattcatgccgttgttt

SEQ ID NO: 19754 - DNA, 4734 bp, Oryza sativa
cctatacagccaggtcaagctataactaggcgtcgagactaagccgatggtcaaatcaatggccttagccgattcgacatagcccttggtgccaggttatagcagggcttgcctgtataggtagcagatacacatgcaacgatttaagaaacaagcatatcagataagatcggtgaaaccccgatactacccctagaactgaccaaaaacaggctatacccctatggttctaatcacgacttagcagatcaaacctaactgatgtagcactaagtatgaaaagaaacacaagatatagacaatcaagctgtcggtcagtagtcagggttgtagataccctggctaatctaatatggtaggacgatttagccgataccagcatcaaccctaaagcgaatatcagccgatacgggtaaattgggctaccaagctagattagacaggatataagataaaaccaagcaagcatgtaaaccaaaccagtgtgatccaagagatctagtgtaatgatgcagccttgaacaacgccgatgtagtcgacatgattgcttgggccggcggaacgtaggacttacctcttcgccggagatcgaagccaatgcagccccgcgtcaggtgccaagttctgccggaacgtaaaacgaaagtaaaagtaaaagggtgacgatgcaccgaagttgtattggactgtctcccctattacagtgctagggggttaacatttataccctgggtacaagaaaagtccattatggacacgacccaaaaccttccaaattctagatacaaacaagaccggccatttacgacggtttcttaccaaaactaatcaaaccgacgtaactaacctatttaacctatttaatagatacaattgccttcaaatgagctctatctctatttggtaatgacggttattccaaattgggcctacccgagcccgagtcgcactgtgctggctggcccaatcatcggccgactcagtcagtcctggtcgttggcctttgttctcagccgatatggttcctggccaatgcatagttcaattcggatcccagcatacttcgacatcaaatctatcctgatttccttctttcttcctgagttctgctgccagattacaccgttaacagatactccctccgggctgataatacttgtcgttttagacaagggtgaggtcaaactttagaatctttgattatgaatcattttttaaatatttgtctttcaaatatggtgactacatgtatagattactcttaaaaaatactttaataaaatcatatatttgttaacacttttatacatattataatataaaataatggtcaaagttgtttttaaaagaccgtgtacttttccaaaacgacaagtattattaacccggagggagtatatatacatgtattctataacattgatatatatatatatatatatatatatatatatatatatatatatatatatatgtattggagattatcttgtttacaaatgaaaaaggtttgacacagatagctatcataaattaattaaagaagagagttacccgtgccattagagtattagactctgccgacagtccatgaaggggtcaccaggtaaccatcacttggtacccacaggtcacaggaaagttggacaaatgtgtgcccaccctgctgccaacatgcttcttgtttaaattcacttgcaattatggcccagaaatcatcaactgattcccatatcttctcctttatgacctagctagcttgaaaaaaaaaatctccaaagtaaactccacccaagtttccatcaatcaatcaatgagatttaatttatgcaccattatttctttttgtacaacccaaattgcaccactgaattaaacaagaaccacataaatttccctcatctcattagtgctaacataagatactagtttaatcttagatattttgttccttcatatccaaatccatccacacaaggggcagctttgcctcatgtccaaatcacgtctccatcttcttctatctcatccatctataaggatggctcgtatcatcctcactctctctgcacactgcttctcgctcccgctctgaacttaacgctgcaaaaaaaatcttggagtgtataactgtgtaagctttgctcaatggcggaggagaacaagtccggctccggcgacctgatggcgagcggcaaggtggtcgcggaggcgaccatgtcggtgttccagcagaagagcgtggagggcgtcgacaagaaggaggtcgccggcgccgccgcggacctgctgcactcggcgtccacctacggcaagctcgacgacaagccggtcgggcagtacatcgacaaggcggaggggtacctcaaggacttcagctccggcagtggcggcgccgcaccgccaccgccggcagccggagacgccgcagcgccgaagccagcggcggaggagccgcccaaggagcctgcgccggctgagaaggaggaaggcaagccaccgtcgtcgtcggaagggttcggtctcgacgacgtcatgaagggggccgagtcgctgatggagaagaagggcggcggggaggagagcgccggcagcggcggcgccgccggtgggctgttcaagatggcgcagggtttcatgaagtaggagagctctttggctggatatatagctgcatgcatgcttgtctctggattgtggctctgctttaatttgcttgttaattaactgatgatctgtatgatgttttgtaaatgtctctcagctctgttgttaattttgtgtggtgaataataagaagacagctactttgtgtgtataaagcctgtttttctccgtgaataaactaattctaatctactaattaattcattcactacttaatattcttatgatagttcaagacttatggggagacgagatggataaattatgtggctatgtttttgtttgggctgttgccaatgtcaaacttgtcaaacatatcggtatactagagatttagtagtacctcaaaatagagaaaaaaaattgttatggtacatccaaaatttacaatctttaataatggactagaattgaaacctccaataaaatactaatttttttctcccaaaaagtcgatagcttcgagcttcaatccctctactatttatacccacaacgtggctgcccctagccacgaatccaactagaactaggactcctaatcacataggaaacctaccaaaccagggaaacaacatccccatacaattccacgttccaatcttttcaaacttggactccaatccaaatttgactactctttccatacgcacacaacacaacatgtatgtcatatggaaaccttcacctccacgtgcattgttctctaatccgagcatcatgtgtgacatcctagcctagggtttaatatgattaatagaatacccataacaataagttacgacttctttttcagaagccaatcaccaaagaactttgaggttaagcgtgcttggcgcaattttgggatgtgtgaccgcttaataggattaatagaatacccatactaacaagttgaaaatttttcccgggtgcgcacgagtaaagacaaagtgggtgaccgcttaataggattaatagaacactcataccaacaggctgaaaattcttcccgggtgcgcatgagtgaggacaaagtatgtgagggcagtctatatcctagaaaaactatcagatgtaagtgggcctggcctgggagaggttctacgaaaacaacgcgaaactttttccctggtgcgcacgagtgaggacaaagtgtgtgagggcagtctatatcctggaaaagctatcagatgtaagtgggcccggcctgggagacattctacgaaaacaacgcgaaactgatgtgagaaattctacgaaaacaacacgaaactgactcacatcaggagtttgccggtctgaccattgggctacccggtcaagcactaacaccaccggtttgactggccactagagccgacaaccgaaaacacatcacactgcattttcaccaaacaattgttcatcaccaggattaatcatcacatgattttatattggcctctccatcactcatatagattcattagcatctatatgaatttggagatatatacaaaggacataatggatccatgcaagaaattattccaaatccaaaacatgtttgttgtcgaaacgacgaccgcatacgtcgaaagacgtggttactcaacagtggttggaaaaacgaagtgtattaaattttgaatttcccttgggatcttcccccgttacatggccctagggggctatttatatccccattacaggttcttactactagggtttaggttatacaggggaatttacatgattacccttatgaaagggacatttacaggggtacatgatgatataggggctcatgggcccttgatgggccgtctggcgatcgccggccctattgcccctaggcttgatgggccggaaaggcttctttggccctcgcgggggcaaacttgccaaggcgaagtcatcttccttcggcagatagtcttcgccttgcacccttggcctgagacacctctggcctggcaaggcacttcgcacgactcttcgcctcacgccgttcttgctccatagccttcgccatgggtttcggcagatttggtcgaagggcctcatgccatccgccaacaagcccctcacgggcaagggtgaga

SEQ ID NO: 19755 - DNA, 5566 bp, Oryza sativa
atatatatatatatatatatatatatatatatatatatatatatatatatatatatatatatatatatatatatatatatataggacactcatatggggcaccatggtgcccgggcaccatggtgcccgggcaccatggtttcaaatgcacaaaatcactcaaatttttcaaaattttcaaattgtgagtatatacctagttataagaattcgattcatacctatacctatcaacaaaacaactcaaatttaactttatttcacaatccatgattacatacctaactaattatatgtatggatgctatatacctagaatcaaaatctaacaaaaacaagttcaaattcagttcaaacttgctttcaactagttagtaatgtagttaatattaatacctaaataattgaaaaagtttcatgctcatttgaattgggtatatactcaatttcaacaatggtgcccgggcaccatggagcaccaaacaaatttactatatatatatatgtatatatatatatatatatatattatatatatttttttatatatatattttcttttcctgggccgaaaggaacagtattgggctttcccttcgtgggcttttactgcgccgcttggacggtgggaagttaccgtttcgcctacccttgcgacacgtggcgctttattactggtgggtaggcgaacggtcgcccgagtgagctatatattcccaccgacctttccttttcaccgccacacttgccattttaccgcgtgcgctctcttcctccgtttctttcttccacagcatctctcgacccctcaagtgtttcgcccattctctttcttcgccaccgcaaacgcaccgttcaccatggcccctcgcaagccaaaccgtgcttcggctaaagggccggatcccggccgagtcgatgacgacagcaccgcctttctgggggtctctcttgtggacgacgtcgagctggcgaagctggtccgctctggggcgttggttgaggggcaggctttcgccccagggaaagccgtggtgccgaaacctatcgacaatcggacggtggtattcgccgtcttttttgaggctgggctacggttcccctgcaacgtgttgttgccggagatccttcgcctcttccaggtggaacttccacagctgagcccatcggcgcttgtttgggtcgctatcttcgactgggcgcgccggacttccgggtttgagcctaacgccgagctcttcggcgccatatttttcgccaccgtgaactcgaaaacggtgattaccccggctcgaacgaagaagacagtgttcgggagtgtgaattcaacgttcgtcccgagcggttcgatctttggccagtgaacgctgtcatgtcgaagtgggaccgccattggatagccaggtgcttctatcattccatccccttcgaggctagttctgacgcggcgaaagccctccggtgccggcgtagggcgatcgcaccgaactggaaacccaagatcgccgtggacggcactatggaggctcggttcgttctgctgcgcaaggtttgctcccgccttagctgccgtgacttggtggaggaattctgtatgcttcgcatctttcccctctcccagtcatggcaagtcacggttgatcaaggcgaagaggtcgacggtttgccgaacctgatacttcctgagggggcgaacagtaagactgttcttttgctatatactactgtgctttgttatttcgccttatctgacttttgacatagcctcacactctaattttgcagtgttgatccttgaccaggttgaaaccgaagcccgcaggatgatcggcgatgtgtcaatcgttgagtatagccagctgctaacacgacaagcggctgggcgggcgaaccgggtttacaacggcgaattgcctcctcgagcaaacccccacaaagccgacgatgatgcagggccttcacggaagcgaatgcgcggacaagtgaagcttgcccccaggaaacgaagggctcctgcttcgtcggactccgatgccgacgacgaggacgatgccgaagaacgcgacggcgagggggaagcagaggaggaggaggaggccgtggccgataaggccgcgaacgaggcggtcggagaccgcgtcgacaccctcggctacactcctaccccaagtccaggtcccaacgagaccggggtggagtcgaacagctccccccttcgacggaaggatttggaaggggcgaaggccctagttgcgttctcctcaggcaaggcagcgaagggaggtccggtgcagaagatctctaaaaaggaaagactcgtcgacatcgcccgcgttttcagcgacgacgaatcttctgacgggactccaacttcgcccgctggccgcagtttagacctttcgactgctcccctcgctccgctcagcgttgctggggcaggcggtaatgccgccgccggggcttcagcctccgccgaacggatcgtgtcggctgcggcgagggtcttcgggagccctctgcgtgagccagctatttcgccgctagtcaaggcgaaggggaagtgtgcggccgccgaagcatctgtctctgagtattcccttgcggcgccccacttcgcccctggtgatttcgagactcgggcgaaccttgttccctttgtggagggagtgagcaaccttgtcttgcccgtcggcaccccgagcttgttcaccgaacttaatgagttcgacgaggggtgttccgccattaaaagcctagcggttcgggtacgccttttcttccttcttcgttttcctcttcgtccccccttttttttacgtctgacaattaaccttttgttcttttggcccgctcctatctttcatctagattcttgcggctcactgtttgacggagcgaaccgtacgggcccgttttgacggttttaagagccgtctttgggccaaggacgacgaaataagccgcaagaacctggaggtggaggccctgaccaacaccctcaaggaaacgaagaccgaggtcaaacgccttcagtctgagctggataaggggaaagaggccagggctgaggttgatcgcctcaaggccgaactggagaaggagaaggcccattcgacagtgttgattgactactacaaccttatgagccgaagatggaggctcttcgcctgaaggctagtacggccgaagcgagcgccgcggaggagtcgcagcggttttcacaggagatggcgaagaccaccgaatccgcgagaactgcttgtcaaacgctccgcctcgcccttaccgacatgggcgcgaaagtgcgaggggttcctgccgaggatgcatcagccttcgacttctccgagtggacccagcaggctggcggatcggtttcggactgcgccatcgcgtacggcgattgctgtgcgcgtgtatcagcggccttcaccttaggccttttgcaacattttggctacgagcacgtcgccgagttccctacctatgcgaagggggactgggagattagtgcgcagaacatttcgcccgctcttcacgcgtggcgaaaacagttttggcagaaggacggccggtccgctgccaaggcgcgccttctggagcaactagcgaaggcggaggcggcagaccggcgcgaaggagaggacgcagcgggcgaagagggtggaggcaatgcccaggatcacccagaggtgtgaggccctccgccctttccttagatttttgtagttttcctccatcttttgcatttgcctggagaggcgaatgatgtacattcggcaggctgccgccaaaccttaaaagaggcttttctgtatatttggaatatatgacaccatcctaattactttttgatgatcgaagtctttggcgtattattatcttgcccatttcgctttatgccacaccttccctttccttcgcctattcttactatgtaaactgtgttttgccttttctgcactgtctaacagggggttcgccgaaagtcgtgcattcagcccccttccgggagctggcaaagtcgaaacgagaaatttgtggcattgaagggtctgccgaaggtgcgatgtccatttcggcctgtttatcgcgaaatggagataaacggtcgcagctacaaggttttcaaggttgccaactggctgcgggcgcaccccgggcgaaccttagaagattacgatcttgttcattcaagacgtttggaggatatggctcgcttttggcgaaaccatcagaagactaaacgtcaggaaatgatctttcagcgtcgttatagtttagtctgtgtttcgccgcctactactcttaaggttgtgtatgatattagtagtgaagacgaacctagttcgcctgtccattccttagggagggatagtgattatgggggcgaagatgtaatttacttgtaaggtgaattgtatcgtgttgtaaaccttctattcttcgattattttttcgaagttaataaagatgtgttttatttccttttcgctattctttcgcatcgtcacattccgtgcttttgttaggtcggaacatgtcggcccctttgcgtatattagcgaaataggtgtactgatttttcagcttttcgtcgttcattttcgatctatagcattctgtgttgaaagaaacgcttttgcttttatgtcgatcgaacgtaacgccgttcggctagttaggacacagaggttttatactggtttgggcctccatggtggataatagccctacatccagttttttttttctttttgcactctttcttcttttttttcttgccgaaaggctttcatagtgccaaagggcttacatagtgccgaagggcttacatgacagtatgtacatttttacaagttggcgatttgggtgccacccattctagacatagaagcgcttgagacaggtggcgttccaggaatggtcgaactcctcgcctttgagtgtcgttaggcaaaaagatcccgtcctagacttgtgtttgataaggtatggtccttcccgctttgattcaagcatgccaaccgctactgggttcgccttcttccttaggacgagatgaccaggcatcagctccatgggtcgaacttttttgttgtaagttgccgaagtgcttgtggcatacttgtgcatgtgctccagcgcttcgactcttactccttccaagagtttgagcgatacttcgcgtccctcttcgcccccagagaacatcacccttggtgagttagcccctagctctgctggggtcattgcctcatcgccataaagaagcataaacgggctaaacttggttggtcttgtgggggtcgttcgaagggcccagagaaccgatagcaattcctctggccatttgcctttcgctgccccctcgagtcttttctttagtgcttctaggatcttgccatttgtacgttcggccgccccatttgactgcgggtgtgcgaccgacgcgaacctgatttccaggttaagcccttcgcacatttctctggacttatcagagtcaaactgcttgccgttgtcagtaatgaattcttttggcactctgaaacgacaaacaatg

SEQ ID NO: 19756 - DNA, 653 bp, Oryza sativa
cctctcttttttttcttaaaaaatcttgagatacttttattgccaataaatatattttatttgtaccatcctcccgtccctctttttacttgattcatatacatgcaatttgttatggatgtgaaccaataaagatagaaattttctttaaaacttatttattttgttgtgaacttagtgattgagttattttaatttcaaaatagtattgaaatcaaattggtgttttatcatttttattctaaagtgtttttagggaatttaaattgtacttaatctcatattatattgtattatttggactcttcttttaacacttatttaaattttacatgaactcttgttatatttttatttctatttttaaagaaaattttgttttattttttgaatatgtgttttaatcaaattgcttgttttattttttttcttgaaatttttttacaaattacttgcagttgatctgcctgccactatcggcctcgcggatcatcttgctgacctccttatcagtgaatctctcccgatgcattgtccatgacatggcggggctcaacggcggagatgaagctctcttttggtccttatcgaagacacggaacgcctccctcaaatcatctccggggtccttgtcgatcatctaatcatcttat

SEQ ID NO: 19757 - DNA, 1195 bp, Oryza sativa
atgcatggtttagagtcggtaactatttggtatttcagtgttgagttttattacacttgctccattgtgcattagctgtacctctatacctgttaccatcaaacttagttctgaaggaactaacatgattagctgatacttaactcacatgaaaataaatttctctctcattttcttggccatgtctgtcttagtcctttggactgacctgtgtaatctcaacaggtattttctccttgtggagagattgttgatttgcggataatgaaagatcagaatggcatttcaaaggtctgatactaatgcaacattttgtaagtttcaatatatactttcttattttcgtatattcatcattaacttttctgatatcctttcagggatatggctttgtgcgatttgcggagagggagtgtgcttatattgctaaaaggcaaataaatggttttgaggcaagaatatctaacttcttgttcgatgttatcatttttttcatattgcacataatatatacatatgtccaaaagctttcaaatcccttgttttaatagatttcttatagtagctaggaagtatttgatgccttgtcttttgcaagatttctttctctgaagctatgctggactaagacaacagaaactataaattgccgtgagaagctcttttaatgatctatgcaaaattgtaaacaaattgctcataactacaagttgcaccgctgagttcatctttatgtttggttaatgtctagttaaacctgattcatctttatgtctagtttcttcactgctgaattcactgattctttccttgttttcatcctgtttcggtgcctacagaaaccataattttgcctgtatggctagtttcttcatatctcaatgtagttacaagtgctccctattttgtctttccttgtactattttcctagatatcgtgttcaaagagagaggattgtttgctttctcatttattagggagcaaatgttttgaacagcattactattatgcttcattactgaagttaatgcatgtaatgttattggttctctgccagcttcaaggaaagagacttgctgttgatctttcgttggatcaagatacactcttctttgggaatctttgcaaaggtaaacttaacccatgatggactttttgtatcacaatgtagaaaatttgttacaaaaaacatga

SEQ ID NO: 19758 - DNA, 7608 bp, Oryza sativa
tcctgcagcccggtagaaatatgatcttttctgattttttttatagttacgccctcttgatatttatcaattcagcatccatttcagatattactgaaagcaactataagtctgacaacaaaactaatctagattcaagaggctacaactgttcatcatacagcattatcatataaacacctactgctaatgttcctgaatttgagagaaaaaaatgttatcttttccttaataaatcattctaaaagctgtggtaacaaatccccaattttcattgggtgtaacagcaagcttatcttaataaatcattctaaactgtggtaacaaatccccaattttcattgggtataagagcaagcttacggtttgccgtgatggctgaagaaacaaggctgtctaatttcatcaagatttggagagagttacgataagttacaatttacatcgacagtaggccaagctaaggttgacttctccttaacagattgtcttgaaatatgatcactgatgacagcctgtaaaacataacttgtctagacatgcttatctaagcatagcaaacaatgaaatgactatgttaaagaagttttgaatgacacgagaatcttttcgacgcaagattatgtatttagtgacattagtttcatcatgaactgaaatttttgttaatttcatgcaggcacagaagcaggaagaactccctgagaatgtcctatgctgtgtaaggctgaacagagtcgatttcgtcgatcatgggcagataccgacgctcttgccttgcgacgacgactgacattttaaccggcatgctaatttaactggatctgatgcttcagtcaagagcagtaggccagtagcaggcgaccacaagttctgtcctgtgaaacttgatgaactcaccttggttttgggagggtgaacatggcatggttgcttcttcgctctggtccatgagatcaacggctctacttcagagttctgtaaaaaccagcgtacatagtcatgcatgttgtttggaaatctggtttgtggatgaattctatgggaaatttgttctgcaaatcaggaattggctggtaccaatcaatctattcattcaattcatctgttctcattccatatgtgatcatttacattcatgtttcgattttgtgtattgtggaagtttaatcctgtcaccaacattactttgtttggatgacaaaaaaaaaacagcaattttttaaacttacaattttcaacatctgataaaatctagtggggttaacaaaaccaggaaaccattaaaaacaaaaagcagcagttttctgatgatcataaactattgttgcagttttctaaaatgtctaattgagtttgtagttattattagttttgacagaatagttgcagttttctgaagttcaaaatctagtgagggtgttttcaacaaaactagaaagcctttgtcacaaaagaaaagtcaaaaggtccaataaaacagacaaaaccaggagcctaaaccagattatctcccatatcaacaacaacagcaacagcaacagtataatcagaaacaggtgccagagcagaaaatgcagcaattgctgtttccagcccataactaatgatggaagaagctaaggcagtgttgcaggtaaactgacagacagcagcattatgagtttgcaaactctatacaatcttttgctatacagaagtgctttggacagcatcattttcatcctggagttgtccatccattaatctttttatcttgttgaagttttttttagcacatcaagtgttactccagataattcagaaaaaattcagagatgctgacagcaacactgcaccaccagtttgtctcccctgatctgatggcatcatgctgctgcaagccatgtcctaacaaaagcttggctgcttgttcatcttcttccttgtgatgacaacaagtacacttgatgatgctcctcttgtgctctttgtgtttgtgtgtggtgtgtgatcatgccatgtctgtcttcctcattgctgctccttcttgctgcctgccaagaacaacaatgcatgagatcctgctccttttcggctactttataaacacacagtaattttatagaattttcttaggaagttcctctaaaattccattgaaatttctccgttccaaataggccccaaacaagtatagtacgattttcccgtgaacttttcatcagcatttcttagaaaattattttatttgttttcgaattttaatatttaattcatttgattgtgttctgaactcgcgaataattttcataaaatcagttccctccatcatatccatcggtcatggcatttcggtttcggatttaaagaggtcagcaatggcatgtgccatgttgtgtggtgtagaaatagatcctctacaatactgttctttgacgttgagtgactgacatgtgaaccctttactcagatggtccacatgtcaggaacttaagtcagagggcagggcagtactgcagaggagactcatcatccgtgtggtgtgtggatcacctttgcggaaccacgagtggcggccagctcgccggatctgctgctcgtggttctggaggagctcctcgatgcgccgcggctgcgacagcaacggcccggagaatcccaccctgtgcaacctcccgccgccgaccttgtgcttctgccaatggcgggaaaatcgtcagtgagatggccggtgaggaaggattacgacaatggtggaagtgatcggagggagacgagaccttgctgctcttgacctccttggtggcggcggcggcgccggcgccggcggtggccgtgggctccttgaaccggttgttgtaggattccgacgaggtgaacgcgtcggcgacctgcgcccactgcttcatcgcctcctgcttctccgcctcgtaggcgccgccattgctgttggttcttggcaccttggaggagctccgcttcgccgccgccgccgccgtcgtggtggagtctggtcgtggcatcttggcccaggcgaagccggtggaggcggtgagctgcaccggcccggagagcgggaggcggtcgccggcgtcgtcctggtagctccgggacatcggcggcggaggcggcggcggcgtcgggtcgtcgtggcgcttgctggcgatcaccggcacgggttgcatgtcgacgaacagcctcgcctcgccgccgttggcgcgggggagcgactcctcggcgtggacgtggccgtggccgtgcctctggctggcgacgacggcggccgcggtggcggcggcggtggtgtcctgcatgctcttgtgcccccgtgacagccgcttcgtcgcctcgccgccgccgacgccgccgtggttcctgccgccgacattgaccctccttctagaatcttctcgaagcttggcgtccatctccttgttgggcgcgtacttgggcaagctcgatggctcgcaggcgtacggctccgtcctgaaatactgagcaaatcgacacgaaaaagaaaattcagccacgaatgcccacggacgaacaccttggcggcatggtcacctacctcggaggcgagggcttcggtggcggtgccacgggcggagggctcgacggagaggagcttggagaggagcgcgaacgcgtcgtcgcccatcatgcccccgaacgtctccctgagccggctctcgtacggctgctgcggccggaacccggcgccgccgccgccgcccgccgccgcgcggcgccagtacgcgtcccccggcgagccgcagagcttgaagatcctgtggatctgctccacctccgtcctcccctgcaggatcggccgccgcgcgtgcatctcggcgaacacgcacccggcgctccacaggtcgacgctggcgtcgtacgccgtggcgcccagcagcagctccggtggccggtaccacagcgtcaccaccctgctcgtcatcgccgccgccgacgacgcgtcgaacacgttggcgagcccgaagtcggcgaccttgagctcgccgccgccgctcaccagcaggttcgcgcacttgatgtcgcggtgcatcacccccctcgcatggcagtgctcgagccccagcagcagctgccgcatgtagcacttgatctgcaccgtccacgtgtcggttagagcccacgtgtcgcgatctcagccgttgaatgtgttgggggggtcgtcgtctacctcgggaagggagaaggagagggaggggtcggaggagaggccggcgaggtcgtggtcggagtagtcgaagacgaggtagaggttgggggaggagcgggaggtgatgaggccgtcgagggagacgacgttggggtggcggtggaggcggcgaaggatgaggatctcgcgcgccatgaaccgcacgctctccggctcgccgctgtcgaaccgcaccttcttcagcgccaccatcctccccgtctccacgttccgcgccctgaacacgctgctgtacgtcccctgcccaatctggatcatggacgcgccgccattgccgccgccattgattgttagcttaattgagaaggagaggtgttcgacggtttgagttcttgcttgccttgtcgagcttctcgtagttggcggccttgagggggacccagccgtggacggcctcggcggcagcggcgctgagccacgacggccacccggcggcgacctgctccgcctcgacgtacctgtggatgttcccgagccgcacgccaccgccgacgacgacgacggacgaacactcaccacccccacgcgccgccgccttcttcttcccgtcgccatcatcctcgtacgcgtcgagccgcaccggccggctccaaatcgacgccacctccgccgccgccgcgcccgtcgacgcgctcctcgacacgctgtacgccgccgacgccgacgacgacgacgtcgtggtcgcctcgtacgccggcgacgccaccgccgcgcccttggacgccgcgcaccccatcgccgccgccgggaacacaggggaggagcaagaaacaggggattgcctcctctgtttcctcctcctccaccaccaccaccacctcctcctcttcttcttccaaagcaatggaaatgtaagctcgagctcctcctaaagatagctaagcttagctgcttctgcttcctttaattggcagaaaaatatatatgttttttttttactttttttttgttgttggcaaaatttgtccttccttttgctttaattcttgtgctggtattgagctagggattgggctggattagattagccaataaaagattagggaggagtgtagtgtaattatgggttatggcttaattgctctccctaatcaccttctaaagatagccaaaaaggttgttgatgtgctctggttaagtgcaatgcaactacctctacataagctgaacaggtgcaactgatccagcaatgatcaggctattttgacgtgttaatttttgggggttttttagttgttgttttgatgtaactttttttagaaatttgggagaaatttaaaatatgttttgaaaaagatttggataggagaatatactattgatgtgtgcattggtcaaagaatatttgtttttggagaaagtacatcagagggaattgatgtgcatgcaagtataggaacatggtgtccgggttttaggcgggaaaaatgttcatgtgattttattatggcgctagaggagtacaagtttgtactagccgttcatatttaaaatccctagccgccttgtgtgtgtgtctctctctctctcatttatccgtatatttgtgctgcattttgaatgctttgatttgtttatggataatgcatgggtttagcagcactgtttgcaatgatgttgttgatgcaaagatgagcagatgaacaatgatggtttgtttgggagaaacatggcaactactataaagttgccagttaattaggaacaagaaagtggtgattaagcactttaactggccttgtgtttttttttcttctcttttttacttttctcatgtctggagaaagggatatatgcccactatgttgcatgctaccccacaaatcaactgcatgagaaagggaaatgtgtgagagagggaatgtttgactattgtaatacctgtggatatttggtgaggggatttaagatagggattgttcattgtttgtccaatgcatagttaatttcagatccagttttgttggtagaatttgctgttttaatgactagcaaatctgtactcccttttattctcttgttctgtttgactctctgttttctaccatacctcctatttatttttgtaaggccacgggttcttttaactcctatttactcataatttcttcgacaactctaacatcgcttcacaaatattgactttaacaagagaaatactatcttcgtctcatgaagactttatttctagttacgaatttgataaatatttgcctagatgtagctctttttgggagggaggtagtaacaatgtgaaaggttgtatgatgttatagggcatgtgaaaatttttgaaattttgaggaatcaaatgcagcaaactccaatttggtgtgatttatgacctgcattgcatgcattgtgctttcatggttggttggctagccaatgcagcagcatgttcattctttctgtagaaaggaatttatgttggtgttgactataccaataaccatgctgtccctattctctgcctcttataaagacagtacaatataaatgggcccattgacatagagaggtgtgcaatggaccacaggatgaccccatggaaattcatcactttctttttgcatccaaggcaaaaaagaaaaaatatggccagagaagaggaaagaaaatactagcataacaaaagtctactcattatatgaagtggttggcagttcttttgaggaggtaagctgttgttgcctctttgctttttgtagtgtatcctatggctggattatattgtgtaaaatcaatctttcactacaattatatgtttcctaaaaaaattcttaaaaagtttattaccactgtaaagtttcatgatggaactccattgcatttatgagattttttttatgtaaagaaggacaaatggttactgcaattgtgttggaatagtgttttcactgttgcactaagcatttcatatttggctaaaattttctcttggtgggacctagttgcacgactgtaaaaacaaaaaagaacttgcctaaagaaaaaactcacaccaatgggcactagtctatgtgcatgcagatccatgggcaaatgcaaggagatagataggatcataagatgatcttttcctgctttttgccttgctttggcactcacatattccttgctacctttgatggaagatatgcttcatcaaccatcatgctgttctgatttctcttgcagcaaattgagctccctatcaataattagccattttaatatccatttgccaggttaaaacattgtactgtaccaagaatcggctagagatcaacagatatcatgtcatcagcatggctgatcagagaccaggtagaagcatctcaattgtttagactgtcactggtctctctggaaagtgttggtactggctgtcatagcacagg

SEQ ID NO: 19759 - DNA, 1671 bp, Oryza sativa
agccattttggcttattagaaaaaaagtcaaacgatggagcccgaacaaaactcaggtggtgtttagatccagggacttaactttagtccctgtctttagacactaatttagagtattaaatatagactacttacaaaactaattacataaataaaagctaattcacgagacaaattttttaagcctaattaatctataattagagaatgtttactgtagcatcacataggctaatcatggattaattaggctcattagattcgtctcgcaaattagtccaagattatggatgggttttattaatagtctacgtttaatatttataattaattttcaaacatccgatgtgatagggacttaaaatttttagtcccatctaaacagggcctcagatactagtaccatcaacagtccaaaatccgtacaaatttgaatccgaagtcgctttcaaaaagccagagagagagagagagaaagatagatagagagagagaagggaaagggaagagagagagagaagcagatcagcagagctcccccatctctcgctgtctcccctcctccacgtgtagacgtcgacgacgagttatatacgttcgcacgcgcgcacgctcgctcgctcgctgccaccgcctccttcgctgccaccatctccttcgccgccgggcaccatcgccggcggtggccgggttcatgtaatgctattgttgctcttcttcttcttcttcttcagcttcttgttttgtacagtagtaagaagggaggaagaaagtggttgttttcctttcttttttgttcgtttgtttggatgttaacgagtggcgagaagttggagtcgtcttgtgtgcgagaaaaagcctcgatttctccgggtgtttttggatctctgaatctctgacgctgatgcgtttcttgatgtgtcagactaagacagagaggctttgcttgttcttctggcgcgtgtgcttggctcagctcaagctggggatcttcctgtggtgattcttttttcgttttttttctttttttttgtgtttttggggaggtgaggtcggcaggttcggttttcttgtggtgaggagtatctgtcaaaaggctggatttttatatattgccaaaaaaaaatgtgttcttcaattttatttgtggctgtcttgccaaatgatactagctggctgtttggctgaataaagtgagaatttgatgcaaatcctttgttagattgtgtgtgcatttgtgcttctgatttctgaggcggcttctttgatggagttagttgcaggaaaattgcccctgcttttgattagtttgttttggtttacctatttgatgatccaattaggatattttttaaatatttttggtgttcttcgtgtttcatttgaaaagttcttggctaggagaattggagcaaagactaaagatccaggccttatgttagtaatttcactccgactattttaatctctggttctttgtttttcaatgtggtttctgtgttctttgcctctgagaagcttaaactagtttttgttgtagtggccatcaagtcaacttggatgagccgagtagttcaaggagcaattaaacttttgcagaatcttcagaattattattggtttatctggagtgcttgtttttttgaccaagtccaaagtacggggtgcagg

SEQ ID NO: 19760 - DNA, 1296 bp, Oryza sativa
gctatttttttcgtaaaaaaagaatgcatctttttcctgtttcactggttaaaagttccattcaagttctgagcataatacactgaagatcttcagaagggagaaaaataaattagttcttcagaaatagatagccagattgttattataacgcaagaagcatcacatggatgtgcaaccaacatctatctaaagactgcaatctaggatacagaatgaatttatcttcatattccggaaagcaggtttgttaattaatctctttggaatttctgtggcttgtagcttcctgaaatctgaagaaaataaattcggttttactaccaccatgggtgcctgcgtgtcttcaagcaaaaaacggagatcacagaaattgtgctgtatataccggcgttaccgcggaaaagttttgagcaatgcacctatagtacgcgccagtgatgcagggagccgtgctgctcctggagaagttgttcatgtggaggctaaatctgatggctcgaatgtaacatttcatctcacacagttgcagtggcatcatagtgagctagactcagaaaatggaaatggtaattggaatttttcttgttacttgcattttttttttgtctcggttatctgagttaaatcctgaatttttgccctactggtctagttgtgtgtcaagaagaagcgggttcaactctctcagtattttaggatctgattctgatgaagatttcagcagtgttaatggaggtttgtattacctttcaaccaatgtgatctgcactgtacatgtgaattgatgcagtatattcaggcttggtcttttcttgcagacctccctgcaatgtcaaattcagcgggtacacaattaatgcactgtgaagatgcttcaagcattgctgatgcaatccagaagtttgagaggatttttgatggttcatgtgttgctcaagccattggacaatacctgaaaagagacgcgaacaaaatggatagaccaaaccaagcagatattcaagaatcggagaagcctaaaattccaagcccagaatcatgtgatgtatctgatgtgaaggttgatgaaacaaagactagaaatgagggtataaaaattctgacaaaactcagaagaggcgaggatgcatgtaatacgttgaaatcttcgaaagaaggagacaaggctcatgaaagtatcttcaaaagtttgacaccagtgtgcacgcctcgccatgctaataaggttcagcctttggccgtagcaagtcctcggggccaaaagaagaaatcaggagttgtcaggctctcttt

SEQ ID NO: 19761 - DNA, 722 bp, Oryza sativa
ctgcaccccccccttggccatttcctaacctctcaacactctgtcatttagccataattcaatccactgtccagctaaattcctacagaatcttgctgcagctgaagcaaatgaggttcttgatcatggcagccatcaggtgggtggttcttgcatacattgtcgtcatcggatgcgcactattgcgcgtggcgatgagcagccactgtcgaggattgcgatcgagagggcgacggttgctgctgttgattcagccagcgtgaaggctcaaccgacagttcttggcctgaaggtttgctgctcatttgcttcatagaaacactgatttcttaattgcataattacaatgaaatctcatgcacttttacccttttttgcggctatgtatgtttcagggtcaaagtagtgattgggtggtggttgaattctcccatccgaaaccctccaacgacgattggattggtgtcttttctccttctggattcaggtcagctgcaagcatgtgttgatttgcatatatcttgtctaaattgtgtactagaactataaatggaacgatggcatcattcaatgtctgaacatttttagctctgaaatatgccaacctgaatactatggagacctcccaccctatctgtgtacatcacctatcaaggttggtgccctcccgtcctttcatatttttcatatttatgctgctattcatgatgcatcatggattg

SEQ ID NO: 19762 - DNA, 1433 bp, Oryza sativa
gattcaatattgatccttgtttgcatttcagtggtaatcatgaaagagattggcctgaaagcgggtcattttatggacacaacgattctggtggcgaatgtggggtccctactcagaccatgttctatgtcccagctgagaacagggcaaaattatggtaatttcagcatattaaagccatataattagttgaactcatgtgattacttattgatgaaaaaaattgttatcttatctccaggtactcgacagactatggcatgttcagattttgcatagctgatactgaacaggactggagaccaggaactgagcagtataagttcatcgagcaatgcctgtcgtcggtcgacaggtcgaagcaaccatggctcatcttccttgcacatcgggttcttggatactcatctgcgagttggtatgagatcatgatgggatcatatggtgaaccaatgggccgagatggtctcgaggaactctggcagaagtacaaggttgatctcgcagttttcggtcatatacacagctatgagcgcacttgccccatttatcaggtaaacctacaacctaaattctcatcaagaaattatgtaacagaaactcagaaatcaaattcatacaccatgtcagctttgttttcaactactttgcaggacttgctacagtagatatgtactattccagtagccttgatttacaatttatcaaatgtgtgacaaatttcattttacttggttgcagaaccgatgtgtccaggatggctcaaacctttacaccggtcaattcaatgcgactactcatgtaattgtgggaggaggcggcgcgatgctctctcccttcagagccactgtaccctattggagcttcttcagggactacgactttgggttctcgaagctcactgcactcaaccactctacgcttctgttcgagtacaagaagagccgggatggaaaggtctatgaccacttcaccatctcgcgtgattaccgagatatcatggcatgctcaattgataactgcccaagaaccaccttggcagtatgaacagcctccactagttcattgtcattatctttgtgaagtgttagtatgtgctgaagcatatatgctaagcattgtactgtttgacactggattatctagtgatatagtgacagtggagctggaataaaccatccaatcagccaaagtctgaattgcagttagccaaattttagagaggaaattagccaatcacactgccagtttagaacaaaaagagataagtaaaagaactggacaatgcataatatgtccaatcaatccatatatttacaaataactgtcacattctttttgacaaaaactgcactaagatgccctctgaatgcacctcatgctcaaaagactagttttcaattcccattgtaaatggagggagaatcttcata

SEQ ID NO: 19763 - DNA, 1310 bp, Oryza sativa
attcctgcagccccattaaccgatgtttgtgggctcaagtaggcaccttgcactaagagctctaatctaactacagcaggtgccaggaagtggacagaaacatagcagagcgttttagataaatcaaagatgggacacccaacccaaaaaaaaaagttcaaggatatgtgacttatgaaagtctactacacagcaacaaagattgaggaggcatatgtaatagaaaattcaaagagtacgcatagtttgaagctgataaaagattttaagtagctacttgcttcccaacctggataggattaagaaggatctgcaaacgttgtctcagtgaatcaccacactgtgctccacttctcttgttaataaacactagcaatggcctagaatcagaaggcacatccacgatttcatatttctgattattgtgtacgtgtgaatcctcatgttggccgttcggtatgctagttttgttttctgtcaacagctgtttatcattctctgattcagagctttcatgtacttcaggaagttcaccattggcatgatcctctctccttttagctgcattgtttgtttcttgtgaatctccttcaatatcagatggcgggtcaatagtaccagagctatctgaatcaacagaaatggtaccctttctgtactttttaccgcgactcctgatcctctctcggacattggaagccaattcattagccccatgtgttatagaactgataagtcctgctgcacctgtccaatggagctccttaacacaaagaggtgacaatattagccgcttcaaggggcaagtcacagatatcaccagtttctatagataggttgttgtgacaatcaacatgcactagccgttggcaccacatacagtaccaaattggagaacctgcgaggaaagctccattgcaagattcatcacaatagcagcagaaagaatcctcctcagagcgatccgatgtgtcaatccactgtacagcccactgatgaatgacatgttcaaaaccaaccatagaaacacatttgcaatctttgtgcgcatttcctgagcaactaggatgtgcagtggcaccacaaatatcacactgatggataactccccccatatactgcggagatgaaacagacttcaagcatacacagcatttcagacctttactacgagagccaagttcttttctccaaatgtgggaagaggcagggaccttatctttcaatttcttgtacttccttgccctaactctgatagctttcatcaaactcaagctgatgtttttgttcaattgattgacagtataata

SEQ ID NO: 19764 - DNA, 3663 bp, Oryza sativa
aaacccaaacgatacacagatttgaaccatgttttaacagaatgaacacggtctcaaggtttgtaccggattcaaacaagatggacaaaaaaatgaacatgactaatctgtgattctgtggttggagagagagccggtttctcacttcagcagtatgttccatttctgagggtagtgtgatctctgaatttttaagcgtttgttcaacagctcaaaatctcgctacaatcctaacgaaggtaagaaaactaaccccagaacactaacctttcgccgagaacccactcggcttaagcaagaaccctaatcagagcctcctcctccactaccactccccccatcccgagcatataatcacatcctaacgcccccctaaccatcgcttacacgcgcacgcatccatcccaaatcatccaagaaaaccctagcaagcagatcgcaccatccatcgaaaagaatccgattctttcttcctccaaaacgtaaataaaacaagaaaaacgcaaaccgtagaaccgagagatctcacctttgcaccggaagaatcgaatcgcgggggctcaagaaccgctctctcgcattgccgcgctcgattcgagagccttcgcaacgcgctcctctcctctcctctctctctctctctctctcgccttcctttcccctcctccgcttcgatgctgcgggaagaaggcgaaagttgcagatgctgtaattaaattaattgattaattaatcgattaattaaggtggagtaattaagaagctgtgctgattaaatgggattaggggggttaattacgcccgggtgtgggggcctcggatgtccgatgccacgtcaccagagacacatcgcgaccgttggtgtgggagtggacgggctggattggattggatggggacgcgcgttcgctttttgggtgggggtgggattagtttatttgttgcctgattcgggtggcccacctgcagtgggacaagggctgagactgtgagtgggaccttctttctgtagcggcgaagagaacaggatgggcatcttccatttcgacagtgactaagccattttttctttttttaaaaaaaaaaacaacacgcacaaaacagtgtgacatttcgtatgatagagcagaaagttaagccaaaattttcactcaagttacaaattttacgctagtttataaccctagcaatagttgttttgtactccctccgtcctaaaatataataagttttagagttggacacggttattaagaaaataggtacgggtgaatggtgaagggttgtgattggttggaaagagaatgctgatggagaagttgttatattttgggacaaatccttaaggataaaagttgttatattttgggatggttgagtataaaatttcagcgatttcgggtttggtttaaaacgcaccaccaggacgtgtcaaaataactgtcaaggtaagcatgtggctgtgtaccacacggtttaacggctagtggaccattgttaacagcgaaatctggcgagatatatatatactcggatttggagttagatattgaagaaggagattgaatcttgtccatgttttcggtcaacaaccatgtatttcgactaaatataatggtgagggggatattttttaaccgtgcccctaaaactcgctcctgtcaccgagtgctactaaggcattacaaactactaagctaaaccgccattcgcaaaattacataataacgtaatgtcgttttgatcaactcagattcttcagatgacaataaagtaacacatgatattcactaacaaggtttagttgtaacctacacttctagggttttgattacaagcactcctttctaatcaacattacaccagccgctagcgactacagttccatagccacaccgccatgctccccttgtatgcatgtgtcgtattaattgttatcaccatggttacatttatcccttagagtttgtcagttataagcctattgtttaactctcccatgccgctgttaccacatcaattactattaaaatatattcaacgcctattctaacaacgtatatacttgcgatttgtgactatcttgatcggggagttttatactcatattcaaattagaggatatgaaaactaaactttttcctaacacacaaaagtttttgtgtgtcggaatatgtattagacggtagcaagataaaaatatgacgtgcaaactatatatgtgcaggttaaactacaaaatggaaatccaagtgattttaacctctcacaatctttctaatctaatactaagaacttggttcttacctacttcgaaaataagttactgccacccaatagtagtttttaccccatttcaatggccatcccacctgctaatctttcatagataacaaaaaccaatgagaagatatatatagttttctttttcctaaatatgaatattaaattagactatataaaaagaataccatatcaaatcaaatgggtgaacattaaatctgattcttccaaagtataactcacaatctttagcagtaatcagttacaattgaaaagaagaaattcaagataagatctacagaaattaaaccccatgataataaaaaaaatccccacaattccactcccccttccaatcggacggacaccattgcccagcatcaccaccgccttatgatccaacggccgagaaaattcacagccgatggagagaaaataataataataaaaaaactagccgttgctgctccctcctccgctggcgccgccattttttacgttactcttcttctcctctataaattttggttcgattcgtctcggcgaatttcgaatcgaattttcactcgcgaaatcaaaactgaattccgcgttgctcgctcgttcgaaggattttcgattcgattcgatcgtgttcgaaggttttggttggtgagatgatgactacgccggtgatgatgaggagggccagggcgaggcggccgttcgccgtgttggcggcggcggcgccgccgccgccgtcggcggggaggaatcgggagaacgtcgagggcgaggcgatgtcgttctcgcagtgcgttcgtcggttcgggaagccggcggccaagaagggctcggcgaggacgccaagacgtgcgactccggtggcggcggcggcggcggcggcgtacgacgcgccgcgggcgccgctgtgggaccgatcggaggagcgggagaggatcagggccaggctgtcgtctcccgacgacggtggcgaggaggaggaggggtcgtcggggaagaagaggacgaggacgaggacgaggacgaggacgaggaggagcgtggcgctgcgggaggccatggcggggctcccggagcacggcgacggccgcgtgaggtacctggtcgacacgttcgagaggctcctctcgctctccagcgacccgggggagcagagcaggaggaggaggaagaagaagacgccggtggcgaggaagacgggctcctcgtggccgccgccgccgactccgactccgacgacgacgagagcggacgagatcgacgtgtcgtacccctccatcgcctcctcctccgaggtctccttccccatcaacggtgtcgtgctcaggttcttggcttctttgctgataattttcttccccagctgcacccatttct

SEQ ID NO: 19765 - DNA, 2559 bp, Oryza sativa
gcacaccagaacagttcggtctatgtgaacataattcctgacattgcaagtgttgatcatgttgttgattctatgtagaacccagtgaaacctctggggaaagagcccactgaaccgattgatgttgtgctacatagcgagattcgctctgtcggtcgcgccaggttcgatcaccaagtgagtagtaaattttgtaatgctagatcgccctcgacgagttcctaaacgtcttgacggtttatcttcaatcctgcaggtggccgaacgtaacagcttcctggagaaactgaacatggagagggagaggcagcaaaaggtacaccttgcaattcagagaatcacagatcaaaaactctgaattcagatgcaaatctgaaaatcatgtttcacaaaaatgattttaatgtaagaatttgagttatgaaatttgtgtgcagctggatgaagagcttgagattaagcagctgaggaaggagcaggtgccaagagcgcatccaatgccggatttttccaagccgtttgtgccgaaaaggtaactgaaacttttaaggtttctgttatttgtaaatataaaatcttgctgttacatttcaaatgaattcagatattttgttttcattgcaaatccaggtcagtgaaacctcaaacagttcccagagagccaaaatttcacccaaggctaactaggagcaattccaagacttgatttgatgccttcagagattcaccatttcctcctatctccacaagagaatggcagtaatcgtcatcgctgttacatatctatttactgttttgcttatgtgattcatcgtttactgttacatagtcatttgctgtcatcaaacatctctgaattcagggaaactgctgattgatgatgtaaaatgttgattcaaatgtgtagaaaaacaaaaaatcggacatgttttggtcactgtgtcgatactcgtatcgatttcttgtagtttacacaaacttgggaaatgttacgcaatttagcatgaagaacattgttactgtgatgagtagataaaagtaaaaaaaaacaggttgacaaacaaatgctcagcgctgcacatggagagttattgatgaagtttattgcagtgtccattctggagggaaagctctttcaatgtactacagataatttgaaatgtgacaagcgataatctcatatttgaaagatggaatcatggaaacctcctagtatggattatttctgcatcttggactgtaatttaaccaaatattttaagaccctgtttagttcccacacaaaaattttacaccatatcacatcgaaagtttgaacacctgcataaagcattaaatataggctaaaaaataactaattgcatagattgcgactaatttgcaagacgaatcttttaagcctaattgctccatgatttgacaatatggtgctacagtaaacatttgttaataacggattaattaggcttaataaatttgtctcgctgtttactgacggattctgtaattagttttttattagtgccgaaaacgctatacgacaccctgtataatacccgatgtgacacaccaaaactttacacccaggatctaaacaccccctaactgaagaaaccgggtggattttgaccatcagaagcgacagcaatctgtgacatattctgcaatcctcaacaaactaacgcctgtcaatctgaatcagaaacatctcattttttgttaatttttcacaagcactatgtgaatcaaacgttgaaatttggcacagattttttttttaacttttcagaagagaaaattacacacacaaaaaaaactggatatgtctgcgtgacgctgtttaccgaacggcccagctcagcgctttgctcgaactgggccggcccatctggccatctatgctctctgacatgtgggccccactatatagtcaaaagggataattcgttgatgaaaaaaaattttggaacggctcggcgcagactgcagtgctctctgtaaatggtgcgtgctcgagactcaatccgcgaaatcctccctgttttttcgattcaatccgccctggggacggcggattcggcgccggcgatccggccggtcgccgccgcgtccgatttggtgcggatttcgtcggagaaatcgcgtcttgaccttcctgtgcctctttttttttttgttgctcgtgggggatttcaggagaagaggggggcggcgtcgcatggcgactacgacgagcaaggttattggatgggtttcttctctttgatacctcgagcgagtcttgcgttgcgtggtgaatgaatcctgaggagttggggggtgtgtgtgtgcagatcgccgggtgaaaggcgccgaggtgttcgtcggcgggttgccgcggtcggtgacggagcgggcgctccgagaggttggtgttcttccgagagttgcgcgctgccggtagaatgtgcaactgtcactgtgttgtttgattggtgttgtgaattttagcctagtgtactgcatggttgaaaatacctgaattgtttgtgtgcttgattgtgtggacgtgatgctttt

SEQ ID NO: 19766 - DNA, 10215 bp, Oryza sativa
tatttgagatccttggaacatatttttaagccgcacatttcgttttcttttcttgatagcatcgaagtgacttttctttttaagaaaatggcgaatcttggaacagtctgaacttggttaactgattattggagctccaaacattccactcgataacctaaaatattcaggttaggtacatctccagagtcacagatgccaatgtttttttttcccctttagaaccaaatgataatgattgacccagctttcaaaagttgagaaatactattgtgttgaatacttagcatcacagcaacataaaatgtgattctttacaatatacaaaaatttgaatagatggtctacatgtatttatgtgaaataccacaaatatgttctcaatgcatgaagatatctgcattgaaatttgatagaacaatatatacttcttcattcatacgttcgtttagaaaaggatgatacatgtaaaatatgaagtcaagaactgtaaaacctccaaaatatactattcttatgcgctaacattgtactgttgcagtggaaagagaaaaatgctgctctgttgaatcttgagttcctgtcttctgctttttcagaaggccctaaccataaacctttgtttcggttttgtctaaccagatgaagtgaaggccctaaccatgaactatccgaccattgtcagtgttttgtcagtcacccccatcatcatctgtcgtcatggtaacagtcataacagagcaaacctgatggcagatgcgcagaagctgatgaatgcctcaagctttcaacacatccaaggctgttcactcaatcaaagaagcttctgtaccatgtcctaccaccttcttgattgcaggcagtacaaggaatggtgcttcctttcttcagatcacatgatctgcaaggttaatgaccaggcagaggttcccaaatttgcaatagcctataagcatgcattgccctaataaacgactcactgcacaagcagctcatggcctgctggaacacagccaacatgcttaacatgcgagctcaatctgtcaaccatctcagatatctggtctgaatcttggtgctttctatcccccacggtgaactcatggaacgtctcattgagttcgacccagcttgatcctgctgttttctgcgacccagttcctttcatctgcatccttgcctttgccatgtcactccactgcccagcctcagcatagatgttcgagaggacagcatagttccctgcattcgacggctgcagcttgctcaactcgttcactgctatttctgcatactccacattcttatgcagtcggcatgcactgagaagggatccccatataacctcattaggctcccaaggcatgcttttgatgaggtcgacagcttccttgatgagccctccacggccaagaaggtcgatcatacaaccgtaatgctctatctgaggcatgatgccataatccctctccatgttggagaaatgccggcggccctcatccacaaaccccatgtgtgtgcatgcactaagaacattgatcattgtcacagcatcagggttaaatccctgttgcttcatttgagcaaagagctccagtgccttgtctccatgcccatgcattgcaaaacctccaatgatgctgttccatgacaccgaatccttctgaacagtctcagtgtcaaagacataatccgctcggttcacacacccacatttgcaaaacatgtcaatcagtgcattgcacacatgggttgatctccctagattcctctttcgcacgtatcggtgaatcctctttccaagtgaaagagagcctgactctgcacacgcagccaggatactcacaaccgcggcaacatcaagttccacggaagcctccttcatctgagcaaacaacttacctgcctcatcaacaagccctttctgtgcacatgccgagaccattatagtccatgtcaccaagttcttgctaggcatcttgtcaaagatcacccgagccatctccaggtcacccttcttgcagtaaccagaaaccatcgtcgaccacgacacgacattcctctccggcatgcgctgaaacagctcgaaagccgcctccacctcccctgcctttgtgtagccatccaggatcgtgttccagctcaccgtgtccttctctggcatctcgtcaaacaacttcctcacgccagccagctccccctcccgcaccatcgccgccatagccgtgttccaggacacgacatcccgctccggcatttcgtcgaacaccttccgggcgtccgagaacccgccgttcttggagtaggcgtcgataagcgcgttcccgacgaaggtgtcctcgacggacccgagcttgacgacgtgcgagtgcaccgcgcggaccggggcgacgcccgcggcggagagcgccttgatgaggaaggagtaggtgaagctgtccctgcgcggcatggcggagaacgcggcgagcgcgtcgcgcggcgcgccccccagcgcgtaggcgcggagcatggtgttggcgaggaaggcgtcggcgtgcgggtcccggatcgcgtcgaagacgcggcgggaggacgggaggaggcggaggagcgcgtaggcggacaccagcctcgccgcggcgcgcgggttgaggtggaggccctgcttgagcacctgcgcgtggagctcccgcacgtgggcggcccgcgggaggccgcgcggcagcgacgccaggtgctgctccaccagccgcctctgcgacggcgccccccacgtcggcggcggccggaccgccgatgccgacgacgacgcggccgtggacatggacatggaccacttcacgaatcctcttcggcggcggcggcggcggtcgccggagaagaggcgtggcgagagaggcgtggccggtgaggaaggggaagctggagaaggggctaaggttgttgtctccgggtggctgacaggtgggcccgggcaaaacctcttccaggtggactaggattagacgtgtagtgaggcgtttggtttggttgggcctgactatatgtgggctggccctatgcaacgatgcatttagcctcggaaaaagtccacttagactcccttaattgttcaccgaatctaattcgtcacccttaactgtaaaaccggataggacgactccctaaattattgaaaccagtgtaatttgactcttccagcggttttggagggtggttttgctcacgtggcgctgacgtggtgagcgggaagaagcagccgccgcaggggctagaccaccgggtgatggtggcgctggtcaagatggtcgccgccaacttgttcctgcctccgggcaatgccgccgtccgcctacccgtcgtcgctcccgccgccgtccgacgtgctcgacgacgaggtccccgtgatggtgctgctcccgtcgatcgtggccgcacctccacctcgtctacgacgtgctcaccgccgcggtcgccgccgcggacaccaggacgctccgcaaccacgtcgaccggagcttcctcgttggcctcgtggcgctcttcgcctccgaggatccgcgcgagcgcgaccgcctcaagaccgtctaccaccagctctactccaagctcaccgtcgagcgcgcgtttatgcaacgcaccatggccgtcgcgctgctccggttcgtctacggcacgtccccggcggagcccgagcgccattgcggcgtcggcgagctgctcgagatctgcggcagcatcatcaatggcttcgtcgtgccgctcaaggaggagcaccgggcgttcatggcgcgcatgctgctgccgctgcaccggacgcggtgggtgcacacatgccaccgccagctctcctactgcggcagcatccgtcgtccgggacatcttcctccgccactggtcggcgaccaactgccagaaggaggtgctgctcatcgacgagctcgaggagatcgtcgagatcctcgaccagcaccacttcgacaagctcgtcgtccctgtctgctcccggattgcccgctgcgtcagcagctgcagctcacaggtttgtgtgcttcttcctccattttcacaatcgatttcatttcagtaaaaaaaaatcgatttcatctacatttccacattcaattaagtagcacatgcataattactgcttgcttccaacatccgggttcgcgctggatccgagcgccggccgggcctagagggggagcggcggtgggactgcttggagacggggcaggcggtggcgcggccgtcgccgctccagccctcgcccgcacgctgccgtcgccactccagcccccggccgccgccgccatcgatgcttccgaagggggaagagaaaagggggagagagaagagagagaagggagagagagagagggaggaggaagaagaagggaaggaaaaaggatgacacgtggtccatatgtaggtgggtcccatgatatattttgtgtttgaatggcagatgggccccacatatatttttttaattctaaatgccacataagtgccacgtgtaatgaaaaccgggttagcactgccacatcaacgtcatgttagcaaaaccgctctccaaaaccgctggaggagtcaaattgcactggcttcaataattcggggagtcatcctacccggttttacagttaagggtcacgaattagattcggtgaacaattaagagagtctaagtggactttttcctttaacctccgtccctcgcgccactccccagttcgctccccgaccgtatcccgccgctgctgtgggaggaggcgaatggaagcggcaccggcccaaggaggagcggcggcttggccgtccgcgtcgaggcgccgaagttaaggctgcggcagccagcgccgcttcccatctcactccccgaccgcatcccgccgtcgccgtaggaggaagcggaagcggtgccggcccaaggaggagcggcagctgcgccgttagcgtcggggcgcagaagctaaggctgtggcggccagttccgtcctacaccgacatcgcgctgctcccccctctcccgaccacattccgccgtcgctgtgggaggaagcggatggaagtggcatgaggcagaggaggccgacggcgatggctttgtcaattgggcaaacgggtccttccccgggctgccgaacgtcgtccccaccgccggatgccgacgccgccgactgccgcccctagttccgctgcgccccgatgccgccagccgccgctgccaacgagaagaaagagagaatataggagggagtcattgacaggtgggtcccactttatttttaaaatttatttgatgactggaatgccacgtaggtgccacgtcagcgaaaccgcccttcaaaaccgttgagtgagtcaaattgtactggttttaagagtttgagggtcgagatatctggttttgtggtttaggatcacgaattagatttcgatcacttttgagggtcacgaagtgaacttattccttcttgatgggtctgacggtttgggcccgtttggttatgggcctagttgagcgatcattttgagttgggcttagcatgggccgtcattgtacttgggctgctagagcaaaagctatcataaacatttttgtcatttagcaattttagtactccttttcttttttgaaacggcaagataaatgtcatgaatgcgagaagattaaaacggctaatgccagctgcatgccggatttcaaagccagaaaaaaatttgaacgaatacatgctttggattccatcaatgtgtttgtacacatgaccttttttttttcatcaaatgaaaagttcaaaacaaatatgaaaagtagacggaagaaaacaaaaaggaaaaaaagaaaggaagagatgctctgctgctctggtgggacccacctcaggggaggggatcagcttgactcaccctgacacgtcctgactcgccaaccgcctctgcctccaagtgcgtgctaatcctaatctctctctcgtcattagcagcgctaattaacccaaagtacataagattagcagtaatccgtaattagtggagtaattaatcaccaagcaatggcgctggcttggcttggcttggcttggcccgcgcgcgaagaagaagattcgttcaacgatcggacggccatccggaaagcaaggagaaaaatggagggacaggatcgctgcttaattagctggcaattgctttcttcgccgctacgtatcatgcatggacaatgcatgtgcttgtgcttccccttggtttaattctcgcttcgcttttttactcctccctttggtttactcacaaactttttttcaaaaaagaaaaatcttgatggttaggagtatttaagatacttggtgatttttttcatacatggtataatactataatttggatatggagaactcatacacactacgctttgtgccaaatacaataaaaatgagacgatctagatcatgttgtttatagtacgtaaatagaagagatagatatgtcaagttatgatgtttgtatatagaggaggaaagtatatgatatatttatcctacacattgtttccttctcgctttacacgttagtattttggttcgctcgcacctttttctatcttaattattacttatccacacattgtcgacgtggttatgtatgtataccgtttattagaaaagcataccgacaatgtagcgttctcgatatattttccagcattgtttctttccgcctttttacgtaaggtattttcgaaaacaaattatacacaatcaacaacatatgtgtcgtttatcgcgatggtaatggatacgtttaatccttttttaattgcttccaagtaccaatataatcacactcttcacgaccctcccacatttcttactcatccttacaccatctcagccacccaacgcacgatccgacggtccacaatccatcaacagcacaaggtgcggttctaccacagccgcagaggcatacaaagctcatcacggccgtccagatccgatcggacggtgggggatcgctccaaccccaaccatttctctctataaaagccggccatggcggccacaagccaagctcaccgccaccactccattgccatcttcttccacctccagcctcctcctccgcctccaatggagcttcccctggacaaggccgcggcccgctccaccccactcgcgctccccgccgctggggcggcggcggcggcgaaccagtccccggcgtctctgccactgggaccacccgcggccgcctccgccaagcccctcgtcgcggccgccaacccgccgctgctgccggtggtggctccggcggcggcggcgcccaagtcgtcgtcagggtgagctgtgtgtggtgtggggttttgctgtgttcttgtgtgttctttggtggttctgaatttgcttggtttcttggaggaaaaacttgtgagaaaattgcactgcgagatgggggcaggtttggatgttttggtatccaaagctgcactcctctgtagttcgcagttaaagttgcagcagaatactttgcgtttgcatttctttttcgctgatcgaaacgatctcatgtgttcttggttgtgcttgctcttgatcatgccgatgatcctagtgacatccaggggtagagatctattttggcttcctcgaaagcccggttgatgatctctcggtgtcttggagaggcaaccatgctgcagagtacgtgtgttcttgggtttctttggatgttcttggaggaggagaacttgagaagttgttgcactgtgagatggacagctttgggtgttttaatatccaaagctggactcctcttttcgcagttaaagttgcagcggcagatgctctctcttcgtttgcgtttcttctgcgttgagatctcgtgttcttggttgggtaacgaagctgcatatatatgcttttcatgccgatccatgcatcgaacggtagagatctcttgggttcatcggaagcccggttgatgtgatgatctctctcggtttcttggacgcaaacgcgtgcatgcagcgttgcagtagtacgtgtgatgttccagggtttcttttggttggtttgagttgagacttgagaacgatcgatcgacgactaaaggcttgaacaggttggatttctgccgtcttttggttgcatggagggtgtggatgttcttgaacttttggtgttggatctttgtttttcttgggaggttttggtttggcttctaggtttctaggtaaaggtaaccatagatccagagttgagctcaaaatgttcgtctcaaagctgcatgcaagagatcaatagtttttgcacagcttgacgacgagttcgacgtacgtgctagcttttgcttttcttgttcggacgatcaaaagcctgcatgctttcttgggtctcgaattgctttactttcttttctgatcgttttatgcatggctgcttttaatttgatcttgtcttcactccaggggttcatgccttctcatgcatgatctacccactcacgttctttctctttttctttttttttgtcgtgccatttttttttccttgatgacaagcaatattattcggttcttggtttcttgagtagtatttctaggtttcttgataagtatgtttcaatgattttggttcaagagtttctgggttttctttggtgttttactgccaggaggggtcaaaagttaagccccttttgctttttttttagcttctttgttctagctttgtgtttttggtgtttttttttttgtcttcttcttgtggatgaatgcctcggttcttgtactgatctgccggtatttttgttcaagctttggtccccccttactccatttagagatttcggttgttttatttatgattattcatcgtgtgcaagttgataactatggtactttggatcactttgtgcttcaccttgatcttgttttgtcacaacatgaactagtgcaaggtgttagtccccccttttttagctttcttgaacatcttgaagcttatttctggtcatgcgggtcaggctaaagtttcatcttgaagtttgtctgaaatcttcaagtatatttgtataataatatactgtgtaacattagttcactgttcccgtattaattgcactgttcaagtatattttaagtgtaacattagtttttagctgtgttaagagttcactgttcatttattgcattattcatcatttagtactacattaaaccttgacatatacacagttgtaccaattaaacctactgcatcgtttgaaattccgtttgggttaattctaacatcacaccgtctattagatatgatcaggtttactgcttatttagctttgttcaacaccctgactctatttatctctaatcatgttgttgtagggccgtggaagagagcaaagagggtgtggaagagagcaacaagagcaatgtgttgaccattggcagcatcaggagcacgctgatgaagcatgaggacaccatcatcttcggccttctggagaggtcacagttctgctacaacccggacacctacgaccccaacgcttccaggatcgtccggttcaatggctccctggtcgagttcatggttaaaaagaccgagaagatgcatgctagagtgagttcattcatttctgcattctgaatttgtgacagggacagaataatgttgtgacatcctttcagatggggaggtacaagagcccggatgagcatcctttcttccctgagaatttgctggaggtggtggagccatctgttgagtatgagaatgtaatatatatatctcactcccccaattttagagtcactttgtgataatgtgatttatgtgttgactgttaaatctgtctgtgttttactctttttgtgccatgctgatgtgctgtactttttgacaatgtgatttatatgtttaaatctgtctgtcttgccatgctgtttactagctctgcaattccagttctttcgtgcacatgctgataatgatattggtattaggttcttatgataatgtgatcatgtcactgtttcctaatataaatttctgaacttactacttatgattggtgacatttaaaattagaagtttcaggtcaacatcttagtaaccatctatattcagtcatctgctactctttattcagaacaaattgtctgttactgtctgtctccaaaatcatgtcatcagcaaaaactgtactatttgatactgaacctta

SEQ ID NO: 19767 - DNA, 1907 bp, Oryza sativa
catccactggttcttgccatgacagctgcaaatttggggcacatcattcccctgaacccaagaagtactggcctgttcgtcgcaggcgacatcaggaccgtgccaatgccgggtgcggaaagcaaggccaggatgaaatccagacacaaaaaggcagatccagaaacaaggacctggagctgaagatttgtcttgtgaaagatggtaatgttcatgacaagcctgaattcatcgaggtgaagaagccgcctattgaaatggcatctgacaactctgaaacctcaccatgcgtgcaagatcagttgtcatcagctgaagaatccaaacgtgttgaggatggagctgatctgccatgtggtgatgataaattcttgatccctgatggcaatgctgcatgttttgtggatggagaatcatcagagggagctgtaagcattgagctggagatgccgttggccatccaggacagtgacgcgtctgacgatcatatcgcagatgccatttcgcctcctgaatgtgtgtacaaagctggtgaacagttacttgtggatgacatgtgtgatgatggatcaggaaatgagtgtgcaggttcagagaagaagagcactcagattgtgatggcctccgagaagcgtgaaaaatctgggcatggaactaaatcgaagagtttgtataatgtttcagtaaaaccgaaggtgaaagagacatcgactgcaacgcgaagcaatgcgtcaagccagaaaattgtaagaacattggatcggaaagcttcaggtacaacaattgaaagctccaatggatcaaaggtagtgagagccaccaagttcaatagggacaagaaattcagatctaccgtcgcatcgaatgtaccaaaagtgaaggagatcaaagttacatcaccagctactgtgatggatcaatcttccaaacctactaggcaatcaaagctgaagtccttggttgcaaatgatgctccatctccatcagttaattcagagaaacaaactgacagaaagatgacagtgatgaatgttgccaagaatgctcgtgtttggcaaaagaaggaagaagagaaaataagtccagtgaaactgtctcgttctataaacttgtcatccaagtcccttttgagcataaagatgagagcagtcaagaaagaaaaacctgcttccctagtgaagagcaacaagaaggtgtatggagcagaaaatgctgttgctgacgttaaggagaaaaacctgaagtcagcttcaccaaaagtgagaaaagtagaagttagcaagaaagaaagccgttctcagaaaggtactacattttgtttgcccccctgtcaacaccatgttcaaagatttgcttaatttacattcaacattactacagatttcacatgataatctgtctgtttatgtcatgattgacaataaggtttaccttcttttctccccatcctaattcagtaatcttgcatccaacattactacagacaatttatgcagaaaacacttgtttctcaagcaaacattgacatgtgctcattcaaatttagcagaaaattctgccactccaagaactgaaaacacaaggcagccaaagtcctcaaccatcccagcgcagtcgcctcgcaagctaactttccgacgaggaaaggtactgaacctacagagcaattcagagtcgagcagcacgccgagacggctccggttcaggcctgcaaagactgtagaagacagcaacaggagcaaagaatccaccagagggagaaggaagagtgacagtgcagcctcttccgggtcaaaagattcaggctcttcgaaacctgaagttgtcatcctgaggcatcaggatgtcagggacaagaagaagaacgagcagggattgttgaacaatgtgatcgaggagacagcgag

SEQ ID NO: 19768 - DNA, 6084 bp, Oryza sativa
ccattcattcattcagtaatactccctctcttattaagatgaaggttggttagtctaaaatactactcccttcgtttcgaaatgtttgacaccgttgacttttcagcacatgtttaaccgttcatcttattcaaaaacttttatgaaatatgtaaaattatatgcctacataaaaatatatttaacatgaatcaaatgataggaaaagatgtaataactacttaaattttttaaataagacgaacggtcaaacatgtttaaaaaagtcaacggcgtcaaatattttgaaacggaaggagtagtaattaaccaacgtcatataataaaaaaattggaggaagtaagaaacaggcaaataatcattttatccgaagatttgatttgttttaatgctctacaaattgggctacgaccttgccgtcattaacttagatgatctcacatattattgtcacttagtgtcaacataatcgaagtggcaacgaatactatcaaattttactctttttttttctctccctcttatcctcttctatttgtcaagtttgtaataattaaaacttagttaattattccctatgtcctataacatagcaatctagtaccgagcaggatatttcatattacaacgaatccagacatgctttctgtccagattcgttgtactatgaagtgtcttgtccggtcctagatttctatattatgagacggaggaagtatgtgctaatagctatctcgtttgacgtgctccaactttattttcatcttcatgagtgtcaaacactacctatgacttctttcatgtccccaatgagccggctagcagtgcgagattgctgattaaaaatgcgtgcatttcgcttcttccaaaccatacaacagagtaaaagaccaacaaaaccaaagaaccctcatgcccttgtcttgggcatcctcgttatagccggtttcagaccttgcatcagaagaagaaagcccaaaatgaggctgaaaaggaggcaaaccaggacagcacaattgtgcataagcacattttcgtttcaactgacgaatgtttcagttatcatcctaacctataattagttcgtagagatttcactagatttttcttcttacatatgtactagaaaaagaagaagaataggtctctagttgttaattatctcaaattatgaaaaaggtaagaatgtaaaaggtcagaagcaataggagaggattggtgttaccatttcacagccaagtttcataaccaactgatgaaaaatgtatcaatgtatagccatttcaattaaaacaaagattagttgcaaggttatcatgtcactgtctcaaattctcaataaaaagaaaataaaaacagaaatgtgaaaaatctgcagcactgaagaatgcaaaacttccctgcttgtttattcaagagtgtgtttgttactgtacaagagaatcatccattcattatttattaaccccaatataccattaatttactcccaacaaaacaaaaaaacaatttccagaataattctatctcaattcatatatgctcatcataatttcaaacctatttgaaattttcaaatgctacatctattcatttttaaaatttttttaacactttcttttacacttgagctcaagcttggaggtcacccttctcctctggctcgagctctctgagctcgtcggcctcgcttctcctgcaactccggtagaacatgcagctcacgatgatctcgagcacgacgcagagcgcgtggatgtacgcgatggagaacgcctcgccggcgacgcccgccgcgagcctcttgccgtcgccggcgccggcgaggcggtggcgttgcgcctgcgacacgacgcggagctggaacagcgcctccgcggcggccatgccgaggttggtcgggagcgcgagcgccagcgcggtgggcacgcggccgcggatgacgacgcacgccctgagcaccgcggcgtggcccgcgcggcgctccatggcggacaccaccacggcgaggttgcagaccacggtggcgatccccacggccaccgagtaggcgatggcgcccgcggcggacagcgcgagcgtcgccgcggcgtgggaggtggtggtgaggcccatgaggtcggcgccgttgaaggcgaggaacatgagggagaacacggcggcgttcgcggacagcatcacgaacgcgccgaacaggtgcgtcgccaccatcgccgggtacgcgcccgccacgctcccgcacggcgggagccgcgtcgccctcgccacgccgcgccctcgccgcgccacgccttcgccatcgtcgtccggccggagcatcgccgcgacgcacgccttggcgaggagcaggaacgtgagcgtgaacggcagcgcggcggcgaacgtgaacaccgtctgcgacagcttggcgttgaacagcgcgaagaacgacgacggcgggaacccggcggcgtcgaacatgcgccgtatcctcgccgacaccgccgccagcgctcccgacgacggcgacgccatggcgcccgacgccagcacggcggccgagaacggcagcaccagcagccccgccacggaggtgtagcaatggtagccatggaagaacgccgccaccgccgccctcatcaccctccccgccctcgccaccgtcgtcggcgacgccgccgccgcgccatggaagcctcctctcctcatgccgccaatccaatgcaatagtgtcaagcctttggtttcttggaattcttggaggattttgtagcttgagattgaggttgagatgatgatgatgatgatgatgtgctactggtttttgagatggaagctagaatgattggctacctactgatccatgagcgaaatgggcgatgcaatggactcatctcatctcatctcatgtccaccttaatatggtggaggttgagaagaagcaggtgaaggaatagaggttgaggagaagcaaacaaatttataaaatttagaagaattttcaattactaaccattgatttaaaaaaaagaaatgttttttttttaagtttatgttgctttggtaatatggtcattgtaggtagtcctaacttggatgtgtgatgtttcaattgtcaaaaaatattcttggattggatatttatgagaaaattattttcattaaacatatggaattagtgcaattatttatgtctttgcgtttttgtgccatggaaaaatatatgatttgtgacaacgaactgcatcagaaactggtagtctaaagatacaataaataccgtgtcaataaggtttgaaatttcgatccaaaatctctgaaatttcagatttaccggtggatcccagtaggaagcatttccagataaaacttttgagtttgtttgaatttataaattttctgttcaaattgagcgaaaatctttctcaaaatttcgtatgatattttggtgcaccatttttttttaacatcctgaaatgtaaaaccctggccgaggctgcactcaattctgtcaccagctatacaaaaagtaacaaatgacatgcaattgcaggtgacgttgcatccaaggctgtatgcatatcaaatagacaaaatgtaagaggtttcttcgatcatatcccactcaaaggtcaaaactatttatgaaactgaagaaatacagctttcggacggcgagcgtacgacaacggagttgggcagaaacgcagaatggttggaagaactgaagccactgcattaaaaaaccaagaagaaaaaagataacaaaaaaaaagcagttcagataggaatgttggtgactgtcagaaactgtcactttcacagttgggtgaaattaggtccactaccgaattcaccggcccaaccaacatctgacagtccgagtgacagttactctgaattgttcatcagcagttggaggggtaaaaaaaaaggcagagcaccttcttgctgttcttttattttttattcttttcagctttatttgatggttaagatagtacttctaggtttatcaagatttggtttgttggttgcttcgatgtgcttcacttggaattgaagttacttcagagtcacatggcactatgtaggattttgttatcgtttatttgtccccctcaagaaaaaataacgttatttgtagttgataattgttatgtactgtcaacaagatcacgctattgactttagatcaaatggagataacagatgtaacctttctctctgcattattattttcttttcaaaaaggatactttatctctgattgatctttattgttttgtaaagtacgaagactcaaatgcttaaaataggatcttatctgcatacagaaagggtgaaattttaatgaactaactttatccagaacagataaatgatcttttagagaagttaataactgtttacctaatatgttcaggtgtaacaaagtttggtacaatcttaacacaactcccatttcattgacaaaccttttacttccttacatattcactcctctagttgcatatcaaagtgatcatttattacctatccaaaagtgatccatggtacacaccggtaaattcacctgaagacagttaaactctcccatgaattaggtaggtcaacttcttaattaacattaagctcttctttaggttgggattaggaaacgtaataattctaatacaaaagatattagtactatatcatcacggactctgaattgtactgctagtggagatggaaggtagatctctcttgttcagtgagatcctatcaccatttattgtctcttgttgccatgttcttttcccatgtaattatccagccaaaaaagcagggatctaaatggaaattatccagccagccagcaattaggcatagccaatgagagctagctggtggttgtactgactaaatggaaaaaaggctagtagcagcagcatccaccagacatgcagacactgataactaaaacctgtacataattcagccaagaaaaatgcagttaatggctgttttgatcaacttgagttcagcttgttacatgcactaataatgcagcttctgcactcaaagtagtacagcatgtgtttctgcaggggtaaaattgttctgcaatgcatgtttgcatgatccaattttgactttgtgcatgtcacttcacttcaccctcactctcactctaattgagtcactagagtttgttgagctgggactcaaagaaggtgattaatgcactttgctgtgtttgacctaactgatgaaccccaattattattgctaagccaatcttgtggatgttcttgatgtgtgtgtgtgtgcatcatcgctgccattttggttttgtaccaaagtaaggaagctaggttgggtccaaggggcaggaaagagaggttggccacaggaccactggtgacaggtcaattcatttggtggaaaaagcatatctgcaaactaactaattattaactaatggcctctcatttttgtttattaacttagtttccttcactagttgttcctacttatcttttaaaaattgtgtcattactttttcagtgccaacaaggttgtggagaaggttttgtatgttaataaaaaatctatttggttgccaacttactattatcagttaggtgtttctaacagtgctaagtcaataaaaagtgcttgatttcaggtcgttttccagggcatcttgataaaccagcagcttacctatctatgtggttttcattctctttttaccaattgccactaccattttgaaatgtagtgttcaccaagcaaaagagaagacaaataactaaaaacttacatggaccactctatgcttggagggaggatgatccaaattccaaattaagcatgcaaatttaccataacatcttctttcttcctctgtctttttttagccgagccggcctaagacaggcggaccaaatttacttaagaaaaggatatgtacatatttacagagttcaaacttcgacaagaggctgcccaagtaatggatgttgcacaggagcaacttctttcttcctctgtcaaaaagttttacaataataacatcactctctccatattcttgatgttcatatataattaaa

SEQ ID NO: 19769 - DNA, 1615 bp, Oryza sativa
tttctgtccttaggattcaaacctctgttcatattttctttgttccaaaggagcaccaagcctttgatgcataatagaaatggattgtagtttaatttgttacgtaaaatttgcattattagttaagatttgaatttgaaaaccattgataatatattcacaattcatgtgtatctcctcaatggccatcgatccatggccagggcattgaatatatctctctcatatctagaggcacggggatgggaaggggttaggcctccttcaacttctgaaattttgcactactgtattataattgcatattttgtaaaattttagaggatttacatttttcgctctaacaaataaattctagtgtttctaaagatcagcctaagttgattcctaccactcaaaactcgtcctaaataagttgatcaacgcacatgcgaggtagctaaacagaactccattaatttctttagccgatcggtcggcatgcatgattgcatacatgctcactttctatctcccaaacctgacctggcccacctgtcgataactttggcagacaatatatatggcttttttagcctaagatcttcctactctctgatttaacatcattcacagcacaattatatactccctccgtcctaaaatataagcatttcactggtggagaaaccatctttcgtcggtcggccaaattccacaatagtcccggttgcaataaaaaccggggctaaagatcatctttagtctcggttcaaatgctgtcagggcttgtcaggccccaaccaggactaaagatcgtaactttagccccggttcataacaccaaccgggactaaagtcccacccctatatatatatatatatatatatatatatatatatatatatatatatatatatatatatatatatatatatatatatgttttcttcctcctcagctgcccgagcaagcttcaaaatttcttcaaaaaagaggggaggtcatgccaaaatttctagtgaatttattttggtgattatatacaaatcggaggtgcataaaaggttagcaacttcatcctccaatatttttttttgtcatattacatttggagctatgttttgtacacttttttatctccaaaatttagttgtaagttgatgagagagaaaatttgtgtggggaagaaagaatatatagaaatttagtttatttgctaaagaaggttttataaaatagttgaaaaggaaaatagtgaaagttaatcttaaataatagaaaacaaactaaaataaaaattaaaagaagtacaacacattaatattagtttaaaactttagaaatagtaaatacgaattatttggtgtaatattttataatttttgtatgaataatgatatgtcattattgtatgactgttgaaagagtttgtaattattttataattattgtatgactgtcattattgtatgaataattatttgtgtacaatttttttttcatctcatgtagatggatcggcaatggatgtacgctgaccagcggttcaaagagtttattgacggcgtgcattattttttgagagtggccgaagctaacaggcataagggttttatttgttgtccatgcaat

SEQ ID NO: 19770 - DNA, 5640 bp, Oryza sativa
gtggcggccgttgtagaactagtcgatcccccgtacgagaacctagaagcatgccctgtttgcaaagcactacgattcaagattagacgagacgatccaggagaagttgacgggcagctaacaaagaagagaattccggctaaggtaatgtggtatttccctataataccatggctaaggcgtttgtttagaaacaaggggaatgctagaatgatgcgatggcacgctgaagagcatcaacaggacgggatgctgagacaccccgccgatggttcgcagtggcgaaacatcgacagaaaatttaaagactttggaaaggatgcacgaaacatatggtttggtttaagtacggatggcatgaatccttttggagagatgagcagcggccatagcacttggcccgttacgatgtgtatctacaacctccccccttggctatgcatgaagaggaagtacataatgatgccgattattattcaaggccccaagcaacctggtaacgacatcgatgtgtacctaagaccactggtcgaagatcttaaactgttgcggtaacgacatcaatgtgtcctcaggctcctgcaccgactcctcctcaggctcctacaccgactcctccgcaagctcctcgtccggcaccttccaagtcaagggccccccaagctccaccgcctgcccccacaagggcaacgaagaaggcgaaagttgacgccgcaaaaaacaaggacccggggtacgattgcacgcaagaggagcttgacgcttatgtggcatcagaagtcaggagacaattgaagcctcgaagtccagaaaagaatattcctatagacccgagtgtcaggaacttcttcaggggtatgtctgcacctgccaaggaggccataaagctatcggactatgagcgaacacttaagaaagcatcttctggaaagtccaaaccagtccctcagcttggagagcaaccaaaccaggagatcgagccgttggtgaccggtgaagattttggaatacaagaatttattaatgacaccgggctaactacaaatcaattgctacgaggcgcaccaatcgaaaaggcggaagtgaaatacatgtacgaacttggtaaaccgcttgtcaagcctgagcagctgcagtccctacccacacaaatgtacaaattccatcaactgtacatggagatgagcgccaccggtagagagatgatcggagcgaggatcagggacacggacttcttgcaaggagatgatattctctggatcaatttcaagggtatctacgaactataccagctggacgccctcgatgtctctattatgagttgctggattttgtaagtatcgttcagttagatttcttattacgtttctttcaattaattaggtccttgtatataagtagctatatataatatataattccttttattgttgtagaatggatattcaaagggcccgacggcggggggttttcgatactggattcatcgaccctcggaaagtaaatgtcgcaatgctcaaccagtatccgcaagccacagaggacaatctcatccatctcctgaaggcgcatcattacaagacgttcgtactattgccgtacaacacagagttagtttttactgtcttcctataccaaatttcattcccgtacgaacatgctaagtgtttcatacgtaatgcatccgatgcacattgcagattccactgggtccttttactcttcgacttggaggcctgcaccgtcaacgtatatgactcaatggataaaaaagagtctacgtttgacaatattttcgaacttatagacaggtactgtcataagttcctatgttaattaagaatcttgttataattaattgctactacgaatcatagctttaaactccatctagggcttggtatcggttccgtcatttggtccgcggtaaatggagagaaagacttaggtggaagtttaattttcctgtgagtacacatgctctacatttatattgaatctccaattcaaatacatacaagtgtatattaattagatctctcgccgtttgtcatttatttatagtgcgcaaagcaaaagcagggaactaacttgtgcggctactacgtgtgcgagtattgccactgccttgcagaccaaatcatcaccacaagagagctcgatgtacgtacaaataaattgaaaatttcattgtgtacgtatcgatttgttgtttaattactaattaatttcatacattcatatagtttattcgcatgagggataacctcacacacaaggaatttatcgctgcagttcaagaacaactcatgggattcatcaacgaacaaatccttgatcccaagggtgaattctactacgacggaaatacaattcataggtccttagcttctgagataacgactactactacgtcgaaatcgtagctagctaggacatcataatggattgtaattaatacatgtctatttttctatatgcatgtacacattttctttaatgtaaatatatattttggtcatatatatatgtgcacataaaatgttaagtgctttcatatacacacacacatatgcatttgcataacatatatatgtataaatacatatatattatgcatgtatatgtattgaaacatatataaatataatattatatatatatatatacatacatacatacatacatatatataatatatatatatatatatatatatatatatatacacacacacacacacatacacacacacatatatatatacggtgatgctacgtagcgcccgtacgcgccatcgagtttcgtaacgcgagtaacagtcgcccccctccctctcctcctccgcttttcccgtttttaactcccttcgcagtaccgctattcttttcttttttttcctcccacctccttccgacttatccgttccacatgcagcactccagatgctagcctgtgttaagtaaaatatttactgcagttggtccattctcactaataaaattattttgttaatctttttcccacttacatccggtagtattaattccagtaaaaaattccatagcaaaatcagacctgtatatctacctagttaaaattttactccccacaagttagttaaattttactcacctctatttaaacttagttaaaattttactccccacaagttagttaaattttactcccctctatttaaacttagttaacttaggggctcgatattactccccgtatatttttcacaccagtttccgtgtgttaacaatagtaatatttttgttacatcctttttgcattattatagttaataactcattgattgttgaataaatattttattactcacttaatgatggcactgtatccatggaaccactacagcaggcaacgaggccacgcagcccgcgggggcaccgtcgatgtcatagaggatggccggcatggcaccaaggctgacgctcttcatcgatcctcctgctcatggaagttccatggcacgctcctagggagcgacatccagtgatggtaggggctgcgcagatcgattgtcgactgcaccattcgctagttgcttcgcaaaaaacaagccatatccggccgtagagcccggcctactcacagacaatgccagcgctcgccgccatgcccctcagcaccgggatcatgtatggcaccctcagcatccccgaccatgcatgtacgcgcaactgctgcgtaaatccaagatgaaggatgaggcacatctatttctccgagtcctgaaccgcctccatccctgtggcccggcgcgtacgcccgccatcaaggcaagcacttgggaaaacattgttgcgggcgccgcaccaattcaatttgacaccggcaatgccgacgggtagagccggataccgatccgccaccaagtctcgcaacttatcaccgctcacggcttggatctcgtcgcacgttgcctactgcggatcccgccgcgaacacgacgatcacgacggcgtggcggtgaggtgccggtagggcattctacggctgggtgctgggatggatccaaaaatttcgggaattggaggtttgaatggttacgggcttattgctggatacaaatacatatataggcagtgcaaaatgcaagtaaaaaaattactactacggctaggggtggattggagattggtcgtcggtgagttaaattttaactgcttattatggacctggtggggagcgtgggtgtgtggggctggaggctgtatcaggtgctgtttaatacgtagcaccttagggtgttgtatagtagttctctctctctctctctctctctatatatatatatatatatatatatatatatatatatatatatatatatatatatatatatatatcggtggcgctacccacaggcgctgcgcgccacgaaacaaaatggcgccagacacaaacgacgagaggtcagcccaccaccgacaaaatcccaccaacgaggcatccaacccacctgcggagttaaaatttaacttagatacagttggtggtggtggtgcggtgatatcgttgaggagttaatattatgcgatgattcagttggtctgagttaaagtttaacttagatacagttgggtggtggggtaaaaccaacggagttaaattttaacttagatacagataggtggtgggtgcgatgacgtcgttgaggagttaatattatacatggtttcagttgatatgagttaaagtttaacttacgtacaattgggtggtgggatgcgatgacatagtttttgtagttaaaaaattacttgttgttgttcaattctggattatatgtgattgagtctggtcgatgctgagttaaaaattaactcgcgatacaaaactgcaagacatcgttgtagagttaattcagtttgtatgagttaaattttaacttgtgtacaacaagattttaactcaacatatacatcctcacaatctataagcgtaagttaaatttttatcggcacttgctccggacatcaacggcggagcgtcatggaggtgttcgccgctgctcctccatgtccttcggtgttcgaactcgccgccgcggaggtcgccaccgtgtgcgtggggcgcggagcggcggccggatccgccgccgcctcggctgtcgcccgcagtcgctctgtcacgggatccgccgtcgagccgcccgcatccacgcctgacatgcaccaccgcagccggatccgtgtacgtgggacgcggagcggcggccggatgcgccgccccctcgcctcgccatgccatgttggatccgccgacaccacgccttcccgtgcaggattatccccggatccgtcatcgcgccggatacgccctaccatggccggttccgcgcgcgtggggcgcagatcggcggccgggtgcgccgcctcgtcgcctcctacacgtcgtcaaccgtcgcctccacgcctgcagccgtgccgtaccggatccgccgacgtcgcgctcgccgccgctccgcagtggaggtggcgctcgacgtcgcgccaccagccgtgccgtgccagatccgcccaatgccgccaccaccaccgcccgccgccacgcccgctcgctgctctcatctccgaaaaaataggatctggatatgtggttggt

SEQ ID NO: 19771 - DNA, 8274 bp, Oryza sativa
  unsure (1)..(8274): unsure at all n locations
acaacatttctcctcgttacgttcatggggaatcggggcataaagaggggcaatcttgaatcctatggcgaaggccatcatccgcaactcccggacaaaactctcaacactgaacaagtactctggcctgtggagtggcatctaaagacatgtgaaaggagagagttaaggcatttatccaattaacagcacaagttttggattaatttgaataaagcaagaaaaccagagtgaaaaaataaatagataaaataaactacttaagagttaagctgcaacagtcgaaaaccagattttttttaatacgttgaataacaaattttaagacaaaataaaagagagtcataaaaatgctaagttcattatactgtgacatcattatacaagaaatattgtaaaatttttctagtaattgagtcattagtatagtaatcgatgtacagtactaacaacataggaataataaataaattttgaacaaggagcaaattaaagaaactataaattgcatgtgccattaatctggtttaattagagaagaaagaggagaaaagttctaatttttaaatatttttagagggcttctaacggtaaccatttggcataacctaggatcaaggaggctctgataccaacttgtcacgcccggaatttctatccaaaactccaaactcttacatgtgtgtaaaccctcgtccagcaatcagccgaggcacacaataacaaattgataatagagtgcaaatatttatctaattaataggcgaatataaagtcattacagaggtagatagtccctctcaatcattaaagatctaagcagcggaaaaataaaataaatagcgtagacgacgacatcccacaagcagcttgaccagggctacacctaatcctccacaccttcagcatcactgtagaactcgtcgtctgattgcaaggtgagtatatgacatactcaaccagcagcgcagcaaatatgcaagtgcaagggataacaaaggatggcataatatagtctcatttgcataaacggtatttaacaaacatttcaaaatttagaaagcagtaaagtatttaattcagcagtattaattcaagctatacaacatacccgttgcataggctctcccatcctgaacaaccacacccggctgtacagatctatccccaaaccaggaatataccattccaaaccaggagctaagcaaattattaccagttataacatcaataattattgtgagaggtgtgagactaatcacgaaaaacattgttagaccccccataaccgcgagcacagctattcgaatagttttactctggcccgatgtaccactgtacccacaagacacagtcccacaaaatgtcaccatgcgcctgaataccaccacggtaccacagaaaggagctatggcagtacccctcgcataagtgcataacacaattcacagcagtggaccgttcctgtgtcataatcacccccttagaaaacaaggcatggactccctagcgactcccccaacaacccccgtgggtttatctctgccacttcttagtctggtgccccacaatgaaccatgctatacaaaaggtaaagccattgcccacgctggcttgtggttgtcacggttaatgtttcacaaccgaagctcgcgaccggtccttaattgtcatgagcacgaccaacaaaaccatgtgctcacaacccaccattaatcaagttttagttgacatattaattaattaaccatcacgattaaccatcgtgagctacaattaaatatctatcattacttaatagtgaaacattaattatcccaatcatgtgctaatatttctaagcatggctaagcatcctaataaatttagctaaaaccatagaatgttctagcacaaattttgacaatttgaccctttgaaaaaactaattttacaaatgatatgccgccaaaacttattttaaaaatgacccttttttcagcgctaaatcatgtggcgctgaacttaaacacctcggcgccacgtcaactggcgttgaatgccgtgccaccacggatggaggctaagtcagcgtgccaacgtacattcagcgccatgctatttgactctgaggtgtctaaattcagcgccacacaatttggcgctgaacaaaagggtcggttttgaaataaattttggcagtggttcatttataaaaaatagtttttgcaaagggtcaaattgtcaaaatttgtgatgttctagctaatccaattattaaccatgtgacaaagtacagataatcaataacaaggggctataacaaaggcaataggtcattcccacccggtgacattaaaaaataaatgcaatagttgaatagaaacaatagctttaaacaggatcaacgtgttcaaagggtgtttgggatttgtgtggcttgccttgctggccttcaaactcttcaaaatattctcctgaaaagacaaactctccggaaacgttggaatctaaacataaaagaacaaaatcaaccaaaacagtacaaaaacaatcataaacagtacatgtgaatatttttaacatgtagatctcaattttttaagaaaaaatagagacttgaaccaactaaatccgagctacggtgaattagttatgaatttttgaagtttaaaccgaattaaattatttatagagattttaattgaattatgacgcaataaagaattattttgaaaagaaaagagttaggacatgttaaccgaggagcgcgtctgtggactccgggtacatgtagaagtcagtggcggagaacggagaaaaaaagtatggcccatacttatgtgcagagtcaatacacaataagaacaacgaaaaaaaaactccattatctcaatgtcagatattatacggcactaattaaacctaataaatcgatattcacatttttaacatgtagatctcaattttaggaaaaaaatagagacttgaaccaactaaatccgagctacggtgaattagttatgaatttttgaaatttaaaccgaattaaattatttatagagattttaattgaattatgacgcaataaagaattattttgaaaagaaaaggagttaggacatgttaaccaaggagcgcgtctgtggactccggttacatgtagaagtcggtggcagaggacggagaataaaaatgtattgcccatacttacgtgcaaagtcgatacacaataagaacaacgaaaaaaaaactccattatctcaatatcagatattatacggcacttattagacctaataaatcgatattcacgaccgcgcaacaagccaacagtcacaaccatagaatatctataaaacatgtgtacataagagagtaaacactgaaaaatacctcaaccaattaagttttagcggtacatcacaaatacatcctgataataagtagagaatagatcttattaacatgtatataatctaccaaacaaagagcaaagatagatttttaataaggatgaaataaggaagaacaagtgcaatgggatgtgaaagcatactacacttgactgcattaattgccgcggctgcttgttggcttgctgccgcagcgtcgctgaagttgaacagcccagttgccctgcgcggctgcactccaagagtctgtcgcggcgttgttaaggacctgcctgccttgctcgacagcgaattctcgcgctcgcgtatctcagcagcggccagcaaggcagcaactgtgccgttcatgcgccaaccctcgccctaccgagcgctagctccgccattgtgtagaacgataagttgatctaggacaccaaggatcaaacgcacacaaaatgttttggctaaaagtcgcggtgtatcataggcaggagcagcacaaaatgctttcgaccaactgaaacattaggacaaactcattatagcctgttattttcgtttttcttcctagtttggttgctttattcattacttgggtaacaatgccacatcatatctgatttcagagaatcacaagtcatttttctaccactgcacattggctaacaatatatttaagagtgaactgcggttttaccgcatttcattaccaaagttaagaccactatgtaacatttttattttaactggttaaatttatctttatatcactttagaccaccgtaattcttttctccatccacattcaacttatcctatgtcaaatgtttgggtttacgaacagcttcgaacatgggagtatctacatggtggtccggaaaatttccagcctaaaacccttatagaaaaatatatttaaaaagaaaaaaaactcatgtcatgtgaagcgtaaagtagaaacgtggtcgtctcggtcctatatcatgtttttttttcttcctcgccacatcgtgttgtcatagcagtagtcatcatgccagatgacaactacaagtctaagacagaggtagcaaattggcacgacaaggacactctgtcatagcaatagttaccacaccacacaacaactaggagtccgatatggagccagcaaactagcacgacaagggcgcatcactctattatagcagcagtcatcacgccagacggcaactaggagttcgagatggagacatcaaactgacatggtaaggatgggagattatcaagccgacatgtcagtaaaccaggaagggcaaacaccgtggcatggcgtccgtgcctctgtggcagccaactgacagcaaggtggtaaggatggcgcacggtggtatgttggaccacccaaatctgaaattctagatacgccactgactccgatgttcattaacgtgcaagagttgatttagttgatattatttatgtacttgaaaagagggtcagggtgatctaaatcacaacaaagataacataaaaattattaagttgggaggtaaaagtaaaacttagacagtaaaaactaacccaatatacaatatataatcttgttatttgccatcccctttacatttatgacatcttttgtccaccgttcaattatgtcagctaaactgtccaaagaccacaccaaatgttttaaatatcatgttttcaacttttctgttgatgaataataatcctaggaaaaacaaattcacttttcggtagtctttgttcagaggttacgtttggatgggtagttgaaatgggattcggatatgaggtgggatatcatggattggttatgaatagtgatttcaattgataggctattgtttacgagtatttgggtggcaaatactaccttcctctatcgaaagaagatttattttataatatccagattcgtatttaaaaataatttctttggaattgagggagtacaaagctagtaatcggtttaccatattttgctatttcgtctccttccctgttgacccaaaactgggagaaagccttactacaccccaaaagctaactcaagaggagtggggctccctcacttttaagttagttcaactccctctagataagtaatgtgggactattcctaacaatctcccccgtcacacattggtgccccttagccctgaccagccccacacacgggcacatacgggcctcacacccacgggtccactaaccggccccacacacaggcactagagattgtgggtttggctcttataccacttgttggcccaaaaccgggagacgttggcccaaccgggagaaagccttgttacaccccaaaagctagctcaagaggtgaggggctccctcacttttaagttagttcaactccccctagataagcaatgtgggactattcccaataatcccccaccccacaattcctacaggtgaaaatggatagtggtcctacagcatatttgtttaagcgtattcagaacggatacagatggtgttgatacatagcagattgtttcagatatcagaaattgtgtggaataggtgcaaactcggttcaaaaaacggattaaaattatcgaatgttacttgtatatgcaatcaatgcaacatcaagttagcaatggaaagaatgacaatagaataatcaataaacgatcaatcatagtatatgcttaagtgctagcaacatgaatatataattgtggcgggcagctaagcagcaaggccggtcctgggttttcgaggccctagggcgaaaacttatatagaggcccctatatatatatacacataaactaatatatatatatatatatttatagtcttataaaaacacaacatttaatattcgatgtgataaatttatctatatataacattttaaaacttcaaatagaaatattttgatgagcaatggagagattaggataacaatccacatctctaacatgcttgaacatctcaaatgctttttctgtttccttttttcgctactggatgcatattttctcgacgacatgattaatgttgtgttgaaaaaataatcatcaattattaagtagtacgagagctaataattttttatctatgaaaagaaaagatggagaaaattacctcgagcagcactgcagcaggctgcagcctacaggcgtggcgccgagccgtcgatcgaccggtgaggacagagggtgcgccgccaccacgcggttggcctgatggcctcgtctccttgcaacgcaagaagccgagaggcgagagctcaccccagcaggcagcaggcagcagcgaccgagcgacgtagcgtctgtagcgacgagcgatcggccagcgccgtgatcgaggcaagtaggcgacggaaacgggagtcaaatcgcttcgcttttccttcgctcctcttcgtttcgtcttccgtcttcgataggaaaggatcccaggcctgggaagtagcgatgcatatggggcaccgtgggccatggcccattagccatgggggccctggattttaggggcctcgggcctgcgcacgggctgaacccccccccccccngnnanaggaggccaggcctgctaagaaagtcagcaggcacgcaagatgaaacggttagagccttggacaaagaagtctaggttaactgatgaattgggttattggatgggccagctcatgctctatggaacagatagattggttgagcaggcctgataattttggattacccacaaaacaaccgatcggataatccaataaaaatatcagataatccacatccgtcagattttagggattgtacgattcctgtttggcatagctctacgggtctaagattttttttttagttggatatttcaaacttcacaattatgtggatctagatctatgtttacgttgataatatttagataaatcattttgttcctattttaaatgaattataaaattttaagtgattataatataagaaaacatataaagtttatatggatgatttagagttgtgagtcgtcacaccatgaagttcttctcccaagcctaaattaattaataaatggcctcaagaaattatctgtgtaatggcaagagagaaaccctaatttaataaatgcaaataataatcggaaatggcatgtggaatttttcttgggttttatatgtcaaaatatgccaacagaaatttagtggaattttcagagctctagaaataattttaactaaataaaaatgagcacaagcaattattaaatccctggaaatccctttttcttttctttttcttttcccccctttttccttcaaatgggccgtcggaccattctcccctcccctccccgcccgctagctaggccggcccgaggccgaggcccagcaagcggccgcgccgtgcccctcatccctccgggacaccgacaggtggggcccacctatcgggcccgtcccctacctccggccggcgccgtccgcgcccgcaaccgccaccgctcgcctctcgcgcgtctctcgggccacgtcgcccactccccgcactcgccccgcacgtcccgcaaccgtcgccccctctaccgcccgcgtgcccgcaccgagatggccgggattcaatttttgaatcccgcctctctctctctctctcctccccacctccccacgtcactagccgattcgtgcccctcccagccacgtctcaccccctcgcgcctatataaagcacccccgtcccctcctccacctttttctcattctcgccgagctctcccgtgcaatccaccgtcctagcgccgcgcaccacccgccgccatcgatttagccaccttggccgctgctcagctatgccagagcccgcgccgagccttcctgttgccgccatcggattcgcaagcccggggtccacac

SEQ ID NO: 19772 - DNA, 6776 bp, Oryza sativa
ctctcgccctctctaatttgccccttttcgttcccaaggtctccccagagctcgtctcgctgtcgccgtcgctttccgccgctcgcagtcaacgatcgtcgtcggtgaggcccctcccccttttcccctctctctcccacccacctagcgctgctgcttagccgcctagccgcgccgccgccgctcgccgctggttgccgccacgcgccgccgccgcgcaccagggccaccgggccggcttaagctgcccacgcgtgtacggccgcgcgccgcctccgccgtccgatctactaccctcgggtagatcggggccgtctgttgccgcccgcgtggcagcccacgtggccgccacgtcggcgccacatggcgctcccctctccgggtccccctggactcggtccaccgtggaccggcgtccccgagcagatgacatgtggggcccgcatgtcggcaccgcccccctttgctgacatccccagggttaattattgcgcaataaatcaattaaggtttttctttttatagtaaaagcacagtgaatcttctaaaattcatccgtgctccgtttaagcccattcaagtctcggtaaatcaagaaaaatgcaaagaatccattaaaaatggttttgttctctgtttcagtagtcttatagcctgtttgcattgtttgccttgtatgtcgcatagattccggctctcccgatgctccggtgtacttcaagatagtcgccgaagtttctccaatcgtagagcaaggcaagtcatgcttgtcacttgaacatattgatcccatattgcaaatgctctattgttttcctttaaatattgcatcgttttataatgttactatttgttatcctgttcccaagcgctagcttgggttgtaacatgactagatgttggattagggattgcttagccatgcttagttcaactagtacacaatggaggaatcacattaatgcatagacttcagattctagtattgatgttggattagtgccaccgctttggtgttggttaattaaaatatattaaatggtgggctgtgggtgcatggttttgatggtcgctgcaaggtgggcgtgatagagtttggatgggccctgcgacggcctttgcggctttcggattcacctaggcacgagaggggactgcccgctgccttgcgaggagtgggggtgaaacctgaggtgtggtgtgcttggttaaagggggttatgcgaagggtcctgtcacggcctctttccggtatgtcgtggtggcatgccggcgcacgggaacatgtcgtggggctgtgtattgtgggtacagttgtacatcgctgatcagagtaaaagtattcgaatagccgtgcccacggttatgggcggtcaaccaaattcaccgtgattagtctcaccctagtttagcttaatggaactgattagttcaggtggtagtttgggcctgtctcaacgtggtgtagcgttgagcagtgattggtttaatattgattaattattacaactgtttttctgctttcaactactgtttataaatgctagctttatgcaaatgaactcctttagccctcctttagttatatcttgcatcataccctccattccggtatgacttgctgagtacagtgggtagtactcaatcttgctctatctcccaaccctcagagttcgagtatgtgtccgatggtggtttctccgaggagtaggcttcgtccgtgccgtcgaagatgcctgtggagtggtgttcccgctgcaatccaagtcaaggcttagctccagttatctttttttttccgctgcatttatgtaagagttttataatgtttgtaagacgtggatctgtatgtcaactttgtcgtttgtgtaccatggccgatcctggacagaggttttaatgcacattctgcttaaaattctattcgggaatttctgggtgtgacatgagtccacatccgtacccacatccacgtacatatcggtcgcttttatataagggttaatttgatccatacaattagaaatactactatttcatataaatgtcactacaattcgtctatttgtagccgtgccactgaaatttacaaaattaggactgtgccactgccgtcacgttttccatcatctccttcgtgcgtccccctgggcggcgtcactactttgtctccccccgcacaggccggcaaggacgacaaggacgaggtggagatgctcaatcatggtggcggcctcgaggtgagccatccgcagcgcggctaggacgtttcagacagcgccgcaggaggtggccgtggagcagacggtgaaggagcagctacagcgcgtgctggagcgcatcacattgcagtcgcaggcgcaacatggggacggggagctgcttgtccaggtctgggtgccgacatggtggtggtgggagcggcggtgggtctaacgatggcgggggacatacaacatggggacgggaggagaagggcggtggggaagggctcgggggcgtccaggtacagcttgcggtgtccatggtgaggagaagacatgatgagattgggtggaggaagaagaactagtggatgtcctgcgcattgcagcgggatttgagaattcttactgagaaacattattgatcaatctttgtgtgtttccttcttttactcattggttacgtgttttcttttcgacaaaataatatggattacgtgtttatcaagtgggccgctttcgtccgttggttgctaagaaagaacaataggcggagacgtcaagggagaggttcgtttcctttttttttttttgccaacagcaaactggatacatgcgatgtttgaaagccatccgatcaatacctgacagttaaaatatgtagatgacgtggcaagctgtggtgtaagctttataacaattataacttagtgggtattattaactatataggaaaaagagatgtgccgagtgagtctcacgtgcagacgaggaagaagatgaaaaacgtgactacagtgacacggtcctaattttaaaaaaattaagtgatatagttacgaatagataaattgtaatggtatttattcgaaatataatatttacaatggcatggatcaaattagcactttatataacctcctcatttcatttcaaatcaaacgagataatctgatccattatcgcccgctccattccccattcccaccacggcaccacctgtccctgtcccgcagtccaaaacggcaccaagaatattgctcctacctttcctgaatcttcctaccgtgcgtgagccgtccccagtaccagtactcaccacctacgcggtcgcccaccgcgccgtcgccggcgccggtcagcccctcaccgccgcctcccgttcgccaacgacgtcgtcgccgtcggccctatcccccgtcaggtacgcccacgcaacgccgcccccccgtcttgtatactatttctcgattttgtttttcttttttaattttattttagcgagctctatcctcgcccacagctccgtcaaaggcacggagaaacgaacaaacgcgagagagaaaacaagaagaggaggaggagccgacgcaaccgaggccccagttccgattgatctccggttcccagatcggccaggtttgtcctccccccaattcgcccccctgaatccttctccccccgcccggtttcgtcctgatcggtgcccgtttcgtgctgttccgtgcgcggattagggttcttgctaggatctttgggggtgggctggcgacctggtgttgggtgcttgatgggtttgttcgttcgtgcgtgtgatccgccgtgggaggaaagaggaagagattgttctcctgaagaaaccttaccatttccgttggtgttttgatgaatggatatgttaggattggtttctttctgttattccctgcaagtttcgtcaagctcagctttgcgattagttactatgagcttattacaattttttacctttctacaagttattcattaccgatttttgtacctaataatgtggttcaatttgggatttggaagtatgcctgcgattttgtctggtattaacaatttagctctcaacaagcaaaagcaaccttttgaggctagttgcaggctgcagcagaagcagagtgaattaagggcattcaagtgtaaagaacagagggtatacttaaaatcattcttatatttttaacaactattatgtctcatgtggtactataaatgggaacttaaatgagattagttgttaataaaaatttctgtaggaaatatctttgcattttagcctgtttttccttatgtccactattaaggttggaataggttaaacagtgtacaggtgcaaatcagaacctgaaatgctgatagttaccttccccgtacatttgactttatgaccggacggtgcatttctttgctccgaaatgctgatggttgtcttcctcgtacttcgttaatacattccaccattaacatgcattcctcataccttagtagcaacagttttgtgtttatgtgaaaatatcaaagagacataatacactagtttcctgtcatgatatctcatggttattttttacacgtatccatcctattagagatttttatattatatcatccttttgtgtgcctacttgatgtttatgccattgttttgaattaaccagcaatggcttcatcttcggacccatggatgaaagagtacaatgaggcatctaggcttgctgatgatatcaattccatgattgccgatagagggtctcttccacaatcaggcccggaaattatacgtcacacatcagccattcgaagaaaaataactattctttgtactagactggatagcttggaagcattgttgtccaagattcctccgaagtcactgtatgttctgttgctactacctttttctttatataaaactgaagataggtggagttttttcaattctggcatatttccttatgctaaagcctaaatttattccgaaagcctatatactggcaaattttgtacaaactgttagctaacctgtttacttaatgtgacgtatcttaaaattgaatttatcagctattctttaaaatggaggataatgatgtttttgctcgtttataactgatgtgtggacttctgacgcctctgcttcaccacctatggggacccagactagatttaaaatgaaatacttcctctgtacaaaaatatatgaactacaaaggtaactatattttgggatggagggagtattgtaattgtatgatcaggttttgtgttattttttcaatgaccttagttggtgtagaaccataagagcttgtgttggttgtggagcatgaaaccaactatgctagagatgttataagatgcaattatttggcatatgttagaatttaagggctgtgcatgtagttcctgtttgaaaaatatccattgccattatggtaggaagattgcaccttatctcttacgtcagttgtaaggacatgttttgcctgcttatgagaaagatatggtgaacgccacttagcaagttaattaatgtggtttgcagtatagatatgctgatagaaaatggtttgtcattaactagttaggattttttttttatcgaagttatattttactaatgcaggaacctgcacattttaacactgacacatagttttatatttatatggcatggcagtatggtgtaatggttattggaatttatacctgccaaaagttctcaattcctttacttttgaattcatgcagcagtgacaaggagttacacaagcgccaagacacgctttccaatttgaaatctaaaacaaaacagatggcaacaagttttaacatgtcaaactttgccaacaggtgtgttcttcgtatcagtaatgatcttagtatggaataatgctgtaccaatgctttggagaagtatcaatcctttatgtcatccaaatatggtcatgtaattattgttgggaacttttatttctaatgatcatagtatcataccaaatttgtacttatccaatatagggaggacttgcttggtcagaacaagaaggcagctgatgatatgagcagagttgctggtttggataaccaagggattgttggccttcagaggcaaattatgaaaggtgacaaatatgtcacttaattattccattttttgtttccctatagcaggatcttttgaataatggcattgaaatttcggtaaaagaaaatgatggaattgaaataaaacatgaaaaaaaaaggtgcacgagacccctgtttctttacagtacatgcattttgtaattgtaggcacatatcattttatttccacaaaccacagcaatttgcatggtgactaactgtttggcatattttacaatttgcagaacaagatgaaggtcttgagaagctggaagagacagtcctgagtacaaaacatatcgctttagcagtcaatgaagaacttaccctgcatacgagattgattgttagtacctgctatgacagctgtatgcatgcgtgtttctaaaactagatgataattgctttatattcacctattgcaggatgacttggaagatcatgttgatgttacaaactcgcgtcttcaggtgagtctgttatccttcttcgctgttgttaatagtagaagctctataactactgtttgtcacgaattgtttaacactcacataaattaaacattgaacgaacttatttcatccagcgtgtgcaaaagaggcttgcaattctgaacaagcgcaccaaaggtggctg

SEQ ID NO: 19773 - DNA, 15792 bp, Oryza sativa
tttatcagtgtgtgtacgtcatatgaggccctggcatatatgcccaacaatatgtctgagactaccactcacgtggaatttgttggattgcaatgagaagtatatatatgtttttgtgtgtggagatgtaactgctgtagcattgtcaatccttggcatgtgcattcagaaagtgtgtgcgttcagataggatttcatttttctgtgatcggttgctgtcgatatgtacaagctcaatgtcagccactcgcacaaaatatgtgaaaaattatagatatggcgatggtttgggattttgcttatttgacaggaatactctcttctgcagcatgtagattccttgcttacgctcattgattcctccgtaattttgacattctagcccatccataaaacttatttcaaaaataggctgtgataaaaactatataaaaaaatatctttacactgtgggctaacatctcaccagtagggatgaaaacggtacggaaacggacggaaaccatctttatcgttttcgttttcataattctttcggaatcggaaaccccggatacgaaaacggaatcgaatattatcggaaccgaaaacggagcgaaaacgaaccggcgtgaatacggtaataaaaatttatcagaatacaaaaacccctcaaactgataaatccaattctcaagtctcaacggtcgacaattcatcataaaacacaatcatataagtccaattgttaagtctcaatagtacatcacaaaacacaatctatagaataaattatctatatttaagagagtaatgttgttgataaatcctaatgcatgaaaaaaatattcttatgtaacttcagatttgcataacaaatattttttaaaaaatagcagccaaacaccgtgatattcactatttagtgcttaaaaaaataatccaggatatttcaatcacaaaatttctgaaaattccgagaaaattttcagaaagtttccaaccgattcaaagttccgatggaaactgcccttatcatttttgattccgtttccgagaaaatatttctgaatttgttccgtttccgaaaaattctaaccgacagattcgttttcgaaaataggtccggcatctgaaaagtttcataccctttttcacccctactcagcgctaaggcctatggcaccaagacttgtgatatacaatttaaataaaagatgaacatggttggtggtggctgccttcatactagtgatctgtgttcaaatcaatccttgccgtgccacattttcagttcttttttaatcctgccgtgactttttctctagcggaaaagacacaaacttttcaactgaaccgcttcaatatgttgtacatggtaatgctcatctatattttttatagcttaatttggtcagcgccagaccctgctacgctgaggcccaaatcttagcgatgttgggcgtcagcaccaaggtctatggcactaagatttggttatagttttcgtccggtctacttatagaataagttttttgtgaaagggctaaaatgttaaagtttcgcttgattcctggagtcacgctctacacttacgttggaacttggcagccattttgcaaggaagctctaagttgccgtatgaataataattcctcgtttcatcgcagcacattacagtgagaaaatctgaagctgatctgtatttcaagagtttctctttgtcacttgcacgcctcctttttcatgatcgctaagaaaacaagtaaaaggtttatctaaatttgttcctgaaagtcaaactcaaaattcaatcactttatattataatccaaggcagggccaagcatagcataaacttagcttttgaattttgatagtctcattcaataatctacggtcatataattggtaactgcagaaactagggaagtagttttcaagacacataaagaaagtggcatttttttttttgaatctagagagcttgtattaacgatgaaaataggaattatacattcctggtctaacaaatcaagaatcactgcatgagcacataatctctactcggtgcaggacctcgacctcattgttagctgagcaagaacacgagtcatactattagctttcctctttgtttttgtgtgcacctcgacattttggagacattaatttcatcacaccctttgtttcagaaattgttcctgcccaaccaaaccgatacggtagctttttcacaagggctgttgcgacatcaacattatcagtctccaaaattatcggcatatgcacccaatcaattaccgcatacaaagccttctaaacagactagaaaatctcttctataccccaaaatttttagctaattctttctatgtctctgaattttgcttacttctttgtataccccaaaatttgattttgatctcttccatacccctcccgtcagttgactgtctaatttctataaaaataaccattttaccctttggatgaatatagaaattcatgaatcacattattaaaaatgtaaaagtttgccacataagactattatagttatgagtttgttatgcgatacattatttatcacaatttatttttagataaataaataaataataagtatttattttttaaaacaaagtcataaaaatgaggagcattcatacaaagataggactaccaatgctcacaatgatttttttatgaatgctcccaatcaaaaatatccatcgtcctattaaaatttcaaataaaaatttaaatttattacatttgttttattttcaaatttatgtcaaaattttatgcactaattatttagtctcattagtttcataaaatgcacatactgtacactaaaacaaaattttcaatcgtttttcaagtttatattcaaatctaaagcatcaaggacaaaaaagatatttgcaaccaaacgtaatagtaaaatgaaggaaaatgtaatggtaggagcatggaaaggatcaagttgaaattttagaagtatagaagggatcgggtaaattttaagggtatgaaaaggattgagtgaggttttaggggtacagatggaatttactccaaaaacttcagcctgaactgcctcaccgcaatgatgaagtgctttgtgagccacaaacagaactaagcctctataatccctcactattatcccagtactcgcttcccctgcctcttctctaaaccctacatcagcgttcacctttgcagagtctataggtggagcttgccatttttccttctctttgccgcagagtggggagtggtagcgggcagcagcgagcggccggagcaggtgggctagcgcgcggtggctgagtgcgcggcggctgagtggttatggccaagcgcgctgtggccgacagagcggaccggcggccgcggcggtggctgagcgcacctgcagagctaaagccatacgcgtgggaccggctccagtgccgacttagagatggtaggcgctctgtggccacggccacggcaattgctgctgtggcggccaccatggcctctcggtcttgtcggtaggtggaatggagaaggcggctaacgagagatgagggaggagagtggcagccggcgaccggcgtggcgatggtgggaggcacgttgaagaggacgagcccaccccaccacggatgaattgtcaatttgtcatgcgtccgacgacggattggcttgacgagctcctctcgccggtggtccctaacaaggcgcccagcgccgccaacaccgcctcctcaccgcccctaatcggtgtcacctcctcgccggcccaagccgtcgaccgtcgtcggctcgtcgttggcgtaggccccagacgacgcccccacaccacctcgtagcctcggctgcaacggctactaccaccatcacgtcgtcgagggaggagagattaagagcagaggagagagagggggaggagggagagagagcaggggaagagagaaggtggagactgagtatgataggtggggccattttcgtttttgccacatcaactcgagtagaccgggtcaaatttccacgtcagcaaaaccaggtgcctatattgctataggacgtaaaatggatggtcttgtataatttaggggtgaagatttatggtattaagtataagggatgtcaaacaaactcgttgtaaagttgaggtatggcaggtgaacttattccgatgtaggtaagcccaaggagctaacgtagccaacgagcccaagtgacctagtgaagtagctaagcccatcacgaaaataaaggcaaaaaagctcattagattagtcccgtacttgtctgaaccctagatcgaatcgatcgattccattctcttatcgttttcctcccgagccgcttcgtgttctcatcccctctcaccgagccgaggagagccgagccagctcgttatcctaacaagccgagccgagccgagccgagctggctttttgggtcccagaagcccaaaagcccaaaattctgatccgccgccggcatccctgctccgccccaccaccaccaccacctcgcgcggcggcgatgcttccggcggcgctgaggcctctccgccgcatccccctcgcgcgcctccggagccgcctcctctcctcctccgcctccggagagggcggccctcccgccgttgcctccaccgacgaagcggtgagggcggcgaagctgagggaggaggcgtacaagcaggtggctaacctcgactggtccagcaacgccgacttctggaaggccgtcgatattgtcaaaaccttgccacccaagcgcaaggaattcgggtcagcaccccctcccatcttctcctacattacattttattttggctttagaactggcggtcaatttggagaatggagctggttgttatttggggcaatggttgagagctgatgccaatagcccgttctgttgaaaagctttcacctatgatttgctattcgtgatgcaaatgtttaaaatgaatacaagtgcgtattgttacttcacactgaatgctagtatcattactaaaagatgtctattttgtatctgaacagtcgtggcgagtttcaaatcgattttttgaggtttagataacgctgtgtggtccataaatattttcgaaacccaaattccttgtcctaacactcatagtgaatagtgggaattaatcatgcggtcatcctttgtgcaaggttatcactattttgttcacattcagttgtaaccaggaaacatgacaaatttgaaaaaacgaaactcgttcaatatcctgctgaccccgaactttatgaccttgtagtccctggtaagtttgtaaagagatccaagaacatggcaaccagattcaatttaacacgaacactaattcagagaaagcacactatctactgtattctcatgacactcctcgtaaacatgtctatgaaacttggaatgccttccaaaattcaagatcatgtgatgtgtaatatatacatgtgttacatgttttggagatgaatttcattacggacatatcctatggcaggattcgttgattgtacatttccttttgagttttaggctggacttccacctggtgcaactcttctttgtgtgcctgccttctctaggtttgttttgttataaaaatcctcactttatggccttgttatttggaatgtacaatgtgaaatttcagttcttttgtgacaatatttcgtttgttttcttgtacagccgtttatttggttgctcagtatgcacggagtgagatcaaaaggatggaggcagtaataaactatgcttctctcatgcaccatttccttttgagtagatcccaatcagaacaatttgactcttaaacatcaaatgcacagaattctcagtttcaactatcttgttagtaaatactaaaacattgtgtttcaacttattttcgtaaatgattatgctactcatctgatgtattttatttttatatgctataactgtgtttggtgaaaaaagatagcttgtgtaagatttagttcttgctaaaatgatctcaggcaaaatcattaaaactgagtccttgggttggtggttgttccaatatcagttttgatcaagctctgttgtagggttgtcacctaaatgcatcaacgctggaacttgtcagggcatcttaaatgagtagttggttcattttaggtgttcaaaatatttgcatgattacatttagcaaccaattgatagcagcttgcctcgtacatggtgtagagagaatgataagtatgtgccgtcaggttatcactgtcactttttttcagttatatatgattctgaacatttaattgcgaagctgcaagtgtaggctgtattttggactatgtttccttgaagtgtcaagtgtcaacatagttttttttatccattccagttgcttttttcttccactgctataatagtatgtgcaacaatgcatttgtctcaagattgttagcatttcttattactgataatacatggtttggggatagtgattgttgataaattgaacacacttgaggttgcctgtttgctttagacttgcattgtgtcgaatattcaaatacttcatatgatgtcggcaacaatattactccctctagtctgaacatgactttttggatattgacatggtcttacaaaaaaaaaaaacaatttggaccataactcctgttgcagtgtctacctttaactctttatgaaacctgataatatgtttgacagcatgtgtgtccaaactaatatgtatttttggtcacagtgagtatagcccgagacattagtgtccatgtgtagttcgcaagaaaattctgttttcagatggtccaattcgccgtatgttattttgtactcatgatattcttatgataaggcatgttcattaagcatatgatgattgattaatatgatgcttgcttcaggaagcagaagagaaaaagaaaaaggatgaggaactggagaaagaaaaacagcttgaagcagattctgttaaggatgagactgattcaaagctgtcagcagttttagtccggttagatacactggagggagttgttaatgagattgtggatgacaaaaggaaaggttccgcccctggtttttccaacaaggaggaagccacaaagaaaggtgagagacaaagcaattccactgatggccaggtagtgccagtcaagagtaaggacatcatcaatggtgctacaaacgcttcacccaattctacgcaacagagccctacagggaatggagacaaggcatcttctgaccccaagggttgatgaatctcgctggttttttacgcttggagtgatacttggaatgtgctgtatgcatcagttgagttttttgttgatcaagcatgagcatcggttccatagagtagatgcagtcataggttcagttgcatcgcaccattttccaacagtgtgggactctctccgggaatggttgactccctacggtagagtagatgcagtccatagagccttgcagtcttatggtcagttttgcaggagaaaagacgccaatggtggatgaacatcagggctccctgctcaactttggggacttgaaaccccaaattttgtgtctagacattgttgatagcagttctattccaccttacaaaaacttggcacattgaggcttgaggtctgttgatgttggatgtactaactcaggattcggtttataaattactgagaagggctaacttccagaaataatgaaaggtgcttgttctgggtacatgtgaattgtgatacgtgacactttcactttcctgagctggtctatttgacaagtgtatctccgctttgtaagtaaacactaacccatttgaaggttccaatttcaagaatgcagatattgtttcattctttaatgccagcaggcagcagcttcaaccattaaatcgcctactaattcagtttgcaacggttcgtaaggaacgtttcatactgatgaagtgtctcgagcaaatagcaaatgttgtgctagctgggtgattgtgagacttgggggtagtttgccattagttaaaaaaaaaaacagtcagtggcaaatagtttcatcttttcacttatttgtgggtaaaacttttgtatatatattcttaatgatttaaaaataaatgctataaaataaactacaatgataaaatcacaaaagcaacttcaaaattaaaatttaaagtttggcttataaacataagggaaacgatggagcttaaaagtcgtaccatttcgcaggcgattagtccctcccctccgcatttccgccttttgaatggttctgtcattttaatgtgctaagactctatttagaatggactaaaacttttaagtcctatcacatgagacgaatctattgagcctaattaatccatgattagcctatgtgatgctacagtaaacattctctaattatagattaattagacttaaaaaatttatctcccaaattagctttcatttatataattagttttgtaagtagtctatatttaatactttaaattagtgtctaaatacagagactaaagttaagtccctagatccaaacaccacctaagaaaagaaaaaaggtctatgtaaaattgctagcgtttagggtctcaaattgataactttttcggtggttaagcagcagcagaaagtgttacacggtacttgtcacctttatgcctccttatgaccttacaacatctccaacagcctccttatcccattctccaagttaaactatagcaattttagctcaaattcgcactccaatagcctggccaaccggatggccaagccatccgactggccaaagtagcgctcgcgctggccaaatttggccagccaaacagcctagccaatcatgggccccacctctattctctctccctctcgtagcttctctcctcccaaatccaacgccgcccgtagcatactctccgccagcgccgcccctccgccggcgaagagagctccctccctgcctgccgcgccatccgcccagtgccgacgtcgtcgtcctcccggctccgccgtcatcatcgttgtcctcacggcgctgccatcgtcgtcctcacagcaccaccgtcgttgtactgccagtgttggccgccctagtgccccatcgtggccttctctcaacgtcgcctcgagcccgccttgcgtgcgcacggatttgcccagagcggcaccaacgggcggagcccgagcggcggcggcggcggtgaatggggacgcagcccgagcgatggtggcggcgggcggatggggatggggcggcgccggcggatgggatagggaaggggggtttggagagaaggggagaaagatgagggagaagaaggaggtgtagagactgacatgtgggtctaattgtcatagactcagaatagagaggacgaatggagaggcagttagagtaaaagacagtttgacttgccaaattaaatggagagttggccaaataaatatttggagagtcaaatttggagaaactgttagagatgctcagcctctccaaatcaaactctccaaacatttatatagccaactctccatctgatttggctagtcaaactagttactcactccaacaacatctccatttacactctctataataagtctatgacacttggggtccacatgtcagcctctcatatctattattcttcctctttctccccttcttttcctcgactcccactggagccatcctttgctacgacaacgatgtccacgcgacagcggatggcgaggggaggcataaattttacaatatttttttaaaaagtagtttatttcacataaaaaaatctataaaatatttatattccaaattcaggtgcgagttatttggaatccatagggcaaccatacgagatcggtgatgaaatggcaggtgcagtcgttgaggaagacgataggacataggttcaatttgctgttatgtgctttttttttttgaagctatggtgaaatgccaataattatttttgaatattagcaatattcatctcacgtctgcaatcatttttttttcgtcttgtagagcatctcccaaggcaaaatcgatttaaataaataaaaaaaacgagccatgtacattgcgccagtcgatttgtgattatctgaaacaaaataatcgaactctaatttggagtcgactcagagagtaaaaaaatatttattgtgcatgcatgtatggagagcagacatactgattggtggaatccttttacgtaggtaccacaaatggattttcacttcagccattgaaagaaatttacttaaatcgtaaaagcaacttagctttgcaatagaatagaagtaactaactatagcattggaagtagttatataatggatgaggactatgtgaaataaattcatatgtaaaatggaaagaaaaattgcaagtaaatacaactacttctaatacctttaagagttatttatattttattttttaagttacttcccttctggagtgtatttacttctaatattacgaagagttacttctatttttttttttaaaaaagttacttttctccagtagcgttgttacttttaatatcgtgaaaaaagttaatttttatatgatgcaagattttatttttcaaaaaacattatagtgattactttaaataaataatatatgtatttacttgaaaatcttctctacactttacttgtgaatttactccacacagtttcttattttatctcactcataatataattacttataatgctataaagagttactaatattgcatagctaagttacttctacaatttaaataaattacttttagattaataaaatgtttaaatatattcaacgttgaacttgttttgtaacatatttttgagtgtggtacaatggtgcaaataaatcttaaaaataatatacagtttaaaagataaaaaaatatacgttagtgatcaatttatatatataagtgtttgttgttgctatttttagatggtaaaaagggatttatacgtcatgtgagataaagtggtcgtgaccgtgcactacgtagccgtgtcctttttaatgtgctctaaatatgtttagaccctccattggtgtttatagtccaataggcgatataatctatattcccttgttacaggtaagaactcataataaggcaagaacagacgtggaactaaggcaagtaattagtagtaaattgatctcacggaaatgttctattgattcgaaatatcacgttgcaacactactacagatccgggcttcagtgacgggtcatctgtgacgggccaacgcaactcgtcaaagatgagtcatctctgacgggccaaaaaaatatcctctttaatatatggctaccagggaggacccgtcacagatgtgaagtcatctgtgatggcttgcacttgtaacccgtcacagatcgtctgtgacgggtcacaaccatggctcgtcacaaatgacatgtcatctgtgacaggtgtagtattatgaaccatcacaaaagagaccactcatctctgacgggtctttaactaacacacgtcacagataacgttatctctgacgggtggtagttatgacccgtcagtgatgagtgaaaattcaaatttttaaattttgcaaaaaacctcggattgaaacatgtcctatataaaagttgtagctctcaatgatatccacaactttataactaacaacatttctattagagatcgtttacatccccgaatatgcattacaagtgagtcagatctacttttaaaaacaaaattttgagttttttttcaaatgacatggatggatacatgccccgtatcaaagtcatagaactcaaccagatctacaacattataattgaaaatattttcatttcacaaaatttacatgttataaagtgagatatattttgaaaaatgaaattttgaattcttcaaacaaacatcagatgaagatattttctatgtaaaagttataaaacacgatgagatctataactatttagttgataatattttcatttgaagtcatttagggtgttaaatatatgttaaatgattcagacaagcatagacaaaataataacattgggtgactagtcaatatgtgttgagtaggtgagttggtaagggatctcacgtgtagcatgcaagttatgttgcatgaaaaattgtgaatttgtaggtagtgatgtgtaaccatgtataggatggctagtaaaattcaaaatatttttttgaggttttttgttgcgtttaaaattcaaaaattgtatttcttgctttgtcatcagtgatgggtcgtaagttacaacccgtcggtcaggtagttacgacacgtcactgatgactcatctgtgatgggtgacaagttttaacccgtcagagatgacttatataccagtcagagatgggttatttgtgacgggtgtttcatccgtcacaggtgattttgtcatcagtgaccactaatcactgaccaagaccaaacccatcaaaggtgagggtttgggcccgtcagagatgacctggtccggcgtagtgtaatttcatgtgtgtaaaatcatatgtactagtgtttgaaccatgctttaaattcagctaggatactgcatgcagaatttgcaatctgatgccaaaaatcaaaacgtagacgtttaagaaagtacttataacatttaaatgtattttttggtatacattttgtgatatcaggatttatatttgaaaaaaagttgtcacttcaaacttaattacatgcaagaccattaaattacggccagccgttgccaaattagtaccccccctactttctggcattcattcatgattaattgagcattatgttttatagaacaattaagagtgttgatcttttttttttcattttctaccgtaatcagtcaattgagaggaataaaaatatttttattagaagaaaatggatgaatgatcaatgcttaggatttattagagatcttacctcccagagcaggtcaggtggagcaccaaaccataattcgaacctctcctgtaattcaaacaagatcatcataagctaccacaatattaacgagcctttgtttaaatttgcgaccactaaggtaggcaaggaattttcgaccgacaaggggctcatggagacgggaactgttgccaatgccactactagaaaaaccactagaaaaatcatttttccaggcgatgacatttctttttccaggcgggtagacatctcggagctaaatggccgcctacgaaaataacaaccgtgggcgagatcgttgttcgtctacagaaagtttataagttataaaaatcaccacctacaccccttccctcactcacctcacccccattcctgcacccccatgatcccccatcaccctcccctccctccctctctccctccctccctcccagtcccgaccggaggaggggagggcggcggcggtatggcgtggaggtggggcggaggcggctccccctctctccctccccgctcctagatctagacggaagagggggagcaacgttaacggcggcggtggaggaagcgatagtggaggccactccttccttccccggtcgtagatccggccggacgaggggggtgacggcggcggcgcgtgatggtggcggtgcggaggtggctcccctcccctccctctcccagatccggctggagtaaggagatgggagggtggtggcggcgacagagacctcccctcacatatctggctagaggaaggggagcgatggcagaggcggcacagagacagtcagcgacggtggagacctccctccctcccatatccggctggaggggggagggtggtagcggcggcggtgtggccctcctctccctctggccggatctttcgctgcatgcagttgcagaggatgccgccggcagcacggcactgcgttgcgacgacgatgacgttgtttttgttagtagttttcattgattgatgttaatttgcaagttgatgttatagatttgaatccaatgctcttgtgttgatgtatggatgtttgtgattggattttatttcctggatgaagttgtgtgagagtttgtgatttgtgatttgaaaccctagggagggggagagggaggggcggggctggcgaggattttttttttggcgccgagattattttcgcaggcagggatactgtagcgcctgagaagattggaattgccgcctatgaaaatcattttcgtaggtgcctataaaaaatggggatttttacatgcctgaatttggccgcctatgaaaacgtgttttttaaaaaaaggccgcataaaaaatatttttgctatgctactctctgctagcaccagaggactccatcatactaccatgcatacgactggctgcaagtgttgttgcttcattgctaggcggatacaggcatggtcttaaaaataactcatgtacaacaaaatgctatatatatgccatcatattttttataaaaaaatagtcaacataacagcatttatttatattgtaaatccccaaattatatatatgcaattacactgcaagttttaaaattatatatatataagttgatgtaagtagatgaccatatacggttcaaaacaagaccgttcacaccttaacaggcccatcaacgatgatggtttgtaatcctcttcatcgtgtaccatcttcgtagcccataagacctaacctattttttacttatttcttcaattctatatcagctcactggtgaactaccgtatatgcggtggcggtggagccactgacattgttaagcctggtgaatgaaatgacttttactagcgacctataattctttttgggcattttaggctcctaaccatggcacacaccaacttacatagacccgaccacacaggtaccatcgtcgccaccttgttccaatgtcctatctctgccacaacttcctgcacgcctccaaatggttgcccttttgtccatgttctacaaatagtctaaggttagggttcaaaattagaagagatagtctttatatggatagaagttgtcagctgtctatgtaacatttgcaagaaaacccttcatcatgttggtaacttttagatggcccaaatcacgctaaggtttgtgcacaacttatctcctcccatctcccatctctttttcccctacccaaccctaatgctaggtcttttcttcgtcccaaccctgacaatactagatctagaggatgtgtgctgcctcaccaagtgccgccacctcccctgctccaacgtgctaccagaaggcgctaatgactctcgtgaggctccgttggccgtccacctctcctcgtctccatgtcgagcagtggcaagatgcttccatcccgtcgtcactactgcctcttaatcactccagatctagtgcccccgcctccaccgatggtcccactgccctactccaacccgcggcttcagaggagccattgccgcctcccaacccacatgtgtccattgcccagtactggttcgactaccacccgcagccatccctctaagtctagggaacccctctcttcccccctaattggttggagtgatcatcgccaccgtcatcagagttcattaatgtcattagagttggaggagaagctcactggagtacgaatcgcgaagtggatccgttggtccaaaatctgtatgagatttcggcttcggaatgaaggttagaaatgctgaataaaaatattgctttcaattactactagaaaaagcatttttcccaacgtaggggtctcattt

SEQ ID NO: 19774 - DNA, 1175 bp, Oryza sativa
acgaatcaagctgagtatgaagcagttcttaaagggttgcaattgctcaaggaggtcgaagccgatgctattgaaatcatgggagattctttgttggttatcagtcagttggcaggagaatatgagtgcaagaatgatacttgatagtttataatgagaagtgccaagaactgatgaagaagtttcggctagtgactttgaagcatgtatctcgagagcagaatattgaggccaatgatctagctcaaggggcatcaggatataagccgatgatcaaagatgttcagattgaagttgctgccataacggccgatgattagagatatgatgtgcatcaatatttacgaaatccatctcagtcggcttctaggaagttaagatataaggcgttgaaatatgttttattgaatgatgagctttattatcgaacgattgatggagtattgcttaagtgtttgagcgctgatcaagctaaagttgcaatcggcgaagttcatgagggaatttgtggtactcatcaatcggctcataagatgaagtggttactttggcgtacggggtatttttggccaacgatgttagaagattgtttcagatattataggggctgtcaagattgtcagaaatttggtgcaattcagagagtgccagcgtcggctatgaatcctatcattaaaccatggccattcagaggatggggcattgatataatcggcatgattaatccaccatcgagtaaagggcatatgtttatattagtggcaactgattatttcaccaaatgggtagaggcgattcctttgaagaaggctgattctggagatgcaatacagtttgtccaagaacatataatctaccgatttggtattcctcagactattacaactgatcaaggttcaatctttgtgtcttatgagtttgttcagtttgccgatagtatgggtatcaaattattgaatttttcaccgtattatgcacaagctaatgggcaagccgaggcatctaacaaaagtttgatcaggttgattaaaaggaaaatttctgattatcctcagcagtggcatacccgtttagccgaagcattgtggtcttatcggatggcttgtcatggatcaatccaagttcctccttataagcttgtttatggacatgaaactgttttaccatgggaagtt

SEQ ID NO: 19775 - DNA, 26216 bp, Oryza sativa
tattgcccttagttgtttcatatttttatcaatgttcttgacattgtaaaactgggggggcatatatgtctatcacaatacagaagacaatacagtgcaaaaaaattttttgcaaaaatttttgagcaaagcttatatgtcatattaatcggcaaaattgagataagtattgctggatagccgatatagctctctgcctaatttgttgtacttcttctatggcttgggcatcttgagcatcggttccaggaatgaccttcagagatttggtcatatcagcaacattcttgatagccgattttaactttgctctttgttcttcgatagattgtgggagatcggctaacttcttgtgctctaaatccagtttggcattgcattcttgaagttatgctaagagttcaatcttgcgagcttcaagccggtcaatattggatttgatcgggacttcagataattgatcgagtttggctttttcttcatgaacaagttgccgattagcctggattgttgcttcaatgtctttgcgctctcgatgttcggctaatctcagcttggccttttccagcttaaattgatgttgttcaagataaacagctggagtaaggatatcggctaactcatctaggatttgagtttggacctcatgaagatgagtcctaattgatccacagtcgactactaggctgtctagtgacgatgtctctagctgatgagagatgtcttcaagagttttctttacgtcatcagagaaaggagctagagctttgctagtagtgtcaacctctgtctcttcatcaagataatctctgatatcaaaagagaaaagatcggctaagacctgcagtgatgatttaaagagagttagagatcaaataggcataaccgatctgcatatgttggttataagaaatttactgggatagtctgagcagttagttgaacttcttcttctatgtaatgactccctacagccgatggggtccgatcgcttgatgattgttgaataggaggagaaggagaggaaggaggctgaaaatagacaagtgttatataaaatcggctgagattaactaatgaaagaattaaggctattgcaccggtgagctggtttagatgccattggagccgatttcttcttcacagcagccttccttttctgcaattaccaggtatgtgagcaatcggctataaagtaagatgattacaaaagtggttagagaaggttgcttactcttgtaaaaggagttggagcagaaggagttggaggggtctgcttaggtgaagccgatggtgttctttcagtatcgcttacttcggctgcggcttgatcaacatcttctccgatttcttctttatccagagcttgttcaatggatggatctagggcaggcagatcatcagctggtttagctttctttttgatcttcttctttggagccagggctgaagtatctacagctgatgatctggttttccttttcttgccggcatcggctggttctctgatgagctcttgaagaagagctgaagtcttgggggcatcatagccgatgacaggaggagatggcccacctccattaggaattaagcctggggtgtaggtgatgtccctgccactgttgctttgacgaggaggggaggattctgttgtctacaaatcaaagaagagattagttaaggtaaatcggctaagcagttattcaaatgaaatcaagtaaagtcaaagacttacctgagggacaacatctggaaagaggtttgtcatgtacattgaagctagttggtagaatagatgcaacttccattcaccccaccatctatcaaagtttttgctcctgaacattgctagctctatgttttcaatgctgcccagagggggtcctggaaggctgagcagccgatccatcatcaaggttgatgaaatttctcctcggcattggatcttgtcagcaaagaataagccgattgggagttggcccattccaagctgtctagctgaactcattgggtgatagaattcataagaggcttggatgtttcttccttgatggatgccgactggaagaatgcatggactgattgcagctatgaagacttctctggatgtttggaatctttcatgattaatgtctttgaatctgaaatctgatgggagctcgaggtctgctgaatcttcatagggaaaccaaactcgagcatctttttgaaagccttcatagaaactgcagaaccaatctttgagcagatcggctgataactttgctccagcatcggccggtgtggatgcgtatactctatatgacatacatcggcgatgagtgcgttcttcgtcatcttctataatcggctctaatctcggaaattcagcttctgtgacggatggccgattaacgactttcatgactattagattcaaccaagtctgcagcagccaccatggtccacctgctccaactactgagccgacagctaacttagccgaagcattattcagcatttggtacaagtagccgaggaggattttgcctaaaggaaattgtttctttgcttccaaggcttcggctatgaactgccagttggttgtagggccacagcttgatccataaaagaggaatttttctagccacattagcaaaaaggccacatgttctcgagggtgacagaaccctggctcatgtatgctgctacatagcctaaccaacctcgtatactcttggttttgaagtcgtattggttcttcatgttcagattcatggggttagccgttgaggtgacatccagacccatgatcataatgatgtctatgagagttagggtcatcggtccttggttgaataagaaggcgttgatggtgttggaccagaagtaagaggcagctgccattagaggttcatccttggctgagtttgctatggttaggtcaagtgcttggccgattccgatttcatcccagtgaactcttttgctagccgacatgcgcttgaaccatgtaatccaacttttctcgggtgatgttttttctagagacggccaagatttaaaggtgttcttccaatgacctagatctggattggacagtctaaaaggaatcctattggtctcaccgatgatgaactcagtggggtcggggttgccgattgggccgagaaagtagtggttttcatgcgacaagcttggaattgcgactaaattggagagatgctacaagttcagagtaaccgagaaaagaaagcagtatgaggcgagagaaaaccgatccaatgatgaaaaaggggatctagccgatggtaacttacctcagcgtattcggctgatggtgcggcagatgggctggcggaggtcgacatcgtcgcaggcggagatctggccggagatgaagtcgcctggggatcgccttgcgcgtcggaggaatcgccggagagagagagggtaaagtttcgcttaagcggggaaaacggaagtcacggtgtgagatttctcagggataacggttagtatttgaagcactagagtaacaatcgggaaaacggcagagtgcgaaacttgctcggagtctatacacggtaaatccggaacattaccaaatatcccggacttggggggcatgtgttacgaccaaatttggtaatatcagcatcggagatgaagatgaaatcgaagcggaatcgaagataagggttttttcggaaacagagtaagaatcggctggagtccggatcggctacgactgggatcggctaagtctgagttggactggttaagtgatacagccgattccgacaatacgacccgtgtgcaacattgggttcgagttgatgtgcttcaagatgattgtcacgcatggatagagtcctgggaaggcaattgtatctattaattaggatattttatgtaaattccttagagataaaatgtgggcaaaagtctgccgcaaagacttatggtatcttagagtttgttagagataagagtcgtgtccaatatggacatatcttgtatttctcgggtataaatagaccccgagccctatgtaataaaaacatacacacgttcaatacaatttcggcgcatcgccaccctttttgctttcgttttatttcgatgagttattgctttcgggttgagctgcatcagtttcgatcttcaacaagaggtaaaacttgttatggcggcttgtgttctcgagattagcgcttccatctttatgatactctaatcttgtttatgtaatctgtcaagttatcatatatcttgcataatccttgacaatatcgtcatttaacctacaatcggctaacatctgctaccagaaggcagccgattaggttaaataacgacgttggcttagattatatgagatatccaccactctatgaaacatccagcggcttgattgtctagatattgttcttctttttatacttaatgctgtatcagttgagtttgatctattaagtcgtgcttagaatttcaatctctagcctacctactggttgccgattagggtagtatcggagtttcagccgatcttatctgatccaattgcttttgttctacatgctcaattaacatgttagatctgccctttatgttaagatcttgttgcatttaagtatattagatttctgtttagtatattctatttgctttaatatcttaatataaagtagtatcgcagtattagccgatacacgctagatctatctgatcggctatgctatgaatatatatataatctcattattaatatatatttcgatctaggtgatttatactgtctcggcaaggtgatcgatctatcccaatcacttgattcaagtatatatcgatataaggattatatatcattgatatctacagccgatcgagtagatttagttctgatttgtttacttaaacaattgccgatcgatttacacatgacatcggctcaaagataaatgatatgtcatcggcatctagccgatcggctatcatttatgaatttaatcacggtttctttgtctttgtttcttgttgattgcaggatcaaatcaactgacacgctcatacatccaaagacgagttttggacctgcactggagttaagcagatctcccaggcctcgtgttttctatcaacacaagggcggccggatccggtggctgctccgctccccattgcgtcggcagatctagagagggaggcgctgcggcagcggatctggcgccggcgatggcgggagcagcaacggtgggcttggccgatgcagacgaatgagcgagtgatggcgggagaggggggcgctagggtttgttttttttttgtgattttttatctttgcatgcggtccgcataaacacccgcatggaaaaatcgctaattttaaagaccttttgatgcaaacggctggctcaacggcgtggaaaaattgattttgaccgtttgagaaaatgtcttttgtattagtgcatggagcaacctgaccttgctgttctagagccccaagcacgtggtgaccgtatctccatgctcttccacctttccctccctcggtccctcctgagcagatctcatcaacattgcacacgtgggggaagtaatagaggcggaacaacgacagtgaagaggaagaagtggagcagcctaggagactccttctgctcatcccatcggctggatctgatggccgtcatggcagggagaagaaaggccttgttgtgccactaaccaggtgtgggtgggaagataggaaaaggtgacgagagattgggaccggagggggagatggaagatgagagagattgggaaaggataagaagcggaggaaacaatggacgggggacttattaggatgtgtttagttcgcgaaaagaaaatttttaggtatcacatccgatgtttgaccggatgttggaaggggttttcggacatgaatgaaaaaactaatttcataactcgcctgaaaaccacgagatgaatcttttgagcctaattaagccgtcattagcacaagtggattattgtagcacttatggctaatcatggactaatttggctcaaaagatttgtctcgcgattttccatgcaaactgtgcaattagtttttatttttatctatatttaatgctccatacatgtgtcaaagattcgatgtaacgtttttgggaaaaaaattggggaactaaatcagaccttagtggctttctttttctatttttcccactacatgctcggcctcggtttggctccatcctaaaagtgttgttttttcaaaactactacactttggttttattacatatcagtgtcacattttttaaaaaaaattgacacctatattattattattggtatcgttttttcaataaatcagtactgcatcatatatgcgggttttaaagccgcctagaggtcgggggatgggaaaggctaatatgtgccggttctgagtgactagggtttttagtagtgctattaggctattaattagctgcaaatgcaactaccgcttgcatgacatacgatcgatattcatacatgactcaggtcatctgatgtgaaaccacttaaaattaattaatctgcaaatttaacaaatagattgaactcggaatcttattaattaatctattctctcacgtcgtcctattcctcaatgcagtgatcttaatattcacatggatatcatcaatgcagagtaacagtgcatgttagggaaggtgcatgtgtgaagacgattagaatattaagattaataatctctggggccttattaattagctgcgaggagtactaattttttttttaaaaaaaagagacgttcatttgatacctaatactccgtacatattaattatatacgtgccttatgtttgactcgatcgtcgccggccacaattaatgttctaatttgatgcatgagattcagttcacattgttgcttggtctttgaatttagtccacttgcattggccttgcaagtgttcgtggaaaatgtgtggcaaatcccgtgtacgtacacaggttgaaattatcatggacgccgttcacacatggctgaaacataatacgcctgtgggagaatgtagggtatcttataccatctaaagctggcaggattgctgcaagttgaattggtttatagggatgctcaatatataaattgttgacgcgtgttgcttttaggagtcatcactcaaaatacttcaagctcatggaaaagaataaaaaattaaaatctagagaaatatagagccttcaaatttggtttgatccaagtgacctaggagtaaacaaaacaatattaaagctaaactaatgataaaaaaggttgaagacacctgtagcattacctgataaaatcaaataaggggataaaaatataaatgaaatccagaaaataataagttaaattctagatgcttcccaactatatgtcccattgtaatctgaagataaatcccctttcaatttcttcttgttcttcaatcaaagaaaagtacggaattacttgagagtaaaatgaaaagaaaaatccaaacaacatcgtgcaagtttcaaaaaaggaagagaaaagaatttggaagaaaaaatgcatttttgcccgccgcaaactgccgccatcttcgccctcccacaagccactgccctgggtcacgagcaagccttgggagcccaaatctagctctaatgaagtggggacgagccatcagggtgagagagggatgacaaagtgacatgagccctcatctgccctcctccatcttaggaccaatgggttcaatgacatcctccacggctctatcctccccaacagccttatctcatgggctacagtaggagatctcgccagcttcttagtataggggagagaagtgcaccaacggtgagggtgagcaagaggtctatcgcatcccatccatggtgtagggcctaacacggctgtaacatcacctcaccgcgtagctgcatgtcgctcttgtcatggcatgtgttgtgagcccaacggcccaccctatagctagcgccaccaccgacaccaacattacgagtgccagagaagttgttgcacgcggatctcacctctacgcatctcgcaagaagttctcatctttctgagagagtgagtgaatagccatgatgacattggcgcgtgaagagagagagagaatgtgcgagtgggaagcggggatcggggtctagggagagaaagagagacagctcatgtgccaatcaccagtgtcacacgaagagagacggcactgtggccgagagactctaatatcatgatagaactaaaagttttcatttctccatttaaaatacttcttcttattatacactacatcaaataaagaatgtttacaaaattacacttatgcaccgtccatgtaaaagtacaggcgacttgcgagttgttatccagaagctgaacaactttcaatgcctccttttaggaaaactaaaaactgcagattcccctgaacagcaaattaaacacgcctttcctcttcgagaagtaaggcaggacataaacgaggaatgcacaccctaaaacgaagtttccagttaacagatgattcccaagttatggtcaaaacaaaaacaaatagtacaaggaaaaccagcatagaatattagcgaagaagagattctctcatagatacacgctatctgcgccatgttaaccccaagaagacgccacaacgtgacacgcatgtggccacaccaaacccccgggcggccatcacgcgtgcatccgccatatacccccggccagcactatttataccccctctctcatcgtttgtttcgatcacttcactacttcagcacacactgaacttgttgcaaagagagacatatagtatatagttagtagcttaatttgcagcgctaataagctctagctttctcttcttcctagcaaattataattaacactaggttctagctagcatgggtgtcgagaagacgacggcgaacggcggcagtggcgccgcggcggtctccggcggagggcgcaccgtctgcgtcaccggcgccggcgggttcatcgcgtcgtggctcgtcaagctcctcctcgagaagggctacgccgtccgcggcaccgttcggaaccctggtatgtatatatattgttatcggtagtttttaagaaatccatgtagattaatacgtaattatgtgtgtattatataaaagtatttttgcagtttgtttggtgttccagatccacgctagctgggtttaatttttttatgttaaatcatagtggtttaaaaattatattttatttaaaatgagattaaaataatttattcaaatgttaccaatataattatgtatttggatttgtagagttataaatatccaactctgaaaatcttagatcaggatatgtcgaacaggaccttcatgttgaaacacatgataaaaaaacatactccagatcttatgagcaaaacagcgtacatacacatgccgttgcagcaatatatcggggatgctgagaaataaagaggcaacgatcaactatcacaatctcctaattttgcaaatcccgatattaatatatctcaaccgtttgaccctcgatcgattaatcttataattaagtaattagcgaagaacacggccggcccatatggctggctgacacaccgcgctcgatcgagaaccctggtagcaacagaaagggtagcaaaattaatcactaatgatgtgattagtcagcgctagctaattaattctagtttctttagctaactcattaactaatgaattacttctaattaattgctgcagatgacgctgccaagaacgcgcatctcatggcgctggccggtgccgcggagcggctgaccctcgtccgggcggagctgctcgacaaggagagcctcgccgccgcgttcgccggctgcgagggcgtcttccacaccgcctcccccatcaccgacgacccggtacgtgactcatcacctgcaccagccggccgccggcgacgacgagacgacgtcgccgtacgtgttcgacagtctaagagagactgaccggaatgcatatgctcgcaggagaagatgatcgagccggcggtgagcggggcgaggaacgtgatcaccgcggcggcggacgcgggcggcgtccgccgcgtggtgatgacgtcgtcgatcggcgccgtgtacatgggcggcggcggcggcgaggaggtggacgagacgtgctggagcgacctcgaccactgcagggacaccggaaactggtactgctacgccaagacggtggcggagcaggcggcgtgggagctcgccaaggagcggcggctggacctcgtcgtcgtcaacccgtcgctggtgctcggcccgctgctgcagcgcggggtgaacgccagcacgtggcacgtgctcaagtacctggacggctcggcgcgcacctacgccgacgcggcgcaggcgtacgtgcacgtccgcgacgtcgcggacgcgcacgcgcgcgcctacgagtcccccgccgcgcgcggccgctacctctgcgccggccgcacgctgcaccgcggcgaggtgtgccgcatcctggccgccctcttcccggggtacccggtgcccaccaggtgcaagggcgacgccggcgagacggccgaggggtgccggttcagcagccgcaagctggcggagctcggtgtcgccgtcatgccggcgagccagtgcctgtacgacaccgtcgtcagcctccaggacaagggcctgcttcccttcgtccctgccgccgccatgccgtgagctagcgatcgccggcgcgccgcttttgttttacataccgctccggccggccgatgatgaccacggcgacgtgtcgccaccggctggcctgcgtgcgtacgtgcctgtatgttcgtcggaagatcagaagttgtacaactgtatttctcctaagggccggtccttttcggagcacctataaatcgggcaccgattagtttgtcaaaaatagcgtgctgtttcactaattaaaaaaaatgtttcaccaactaaatcgaaaatgtttcaatcttttaaaacactgaaacacacaccgctagaaaatcgcttttccaaacggaaaaaggaccacctacacgcaaaggcatgtgaaaatagatgattttcacaggcggcccagcgaaaaccatttttgcaggctgcatctattttcgcaggcagtagaaccaccctcctgcgaaaatatttttagcgaataaaaaaaaatccgccgccaccaccctaacccgtcggcggcgccgccagcctcccctcccctcccaggatccaggcggcaacggcggcgtcgtcgttgttgttatcgtcgtagtcgcggtagtcgtcgttgtcacggccgggcacgaaggagtagagctgcgggagaggagagggagggggagccgcacctcccctctggccgcgcgccaccgccaaagctcccctccccttcccagatctaggtggagtcattgtcatcgtcgtcgtcgcagcgaatgtcattgcggctggccgcggagggagaggagagggaggggagccacgccgtcgccgctgccgcctcagctcctctcgctgctgcctcccctcccctccccggatccaagcggcgtcgtcatcggcgttgtcgtcgcggccagcagcggagggagagtagatctgagggagagggagggaagccgcacctcccctccggccgtgccgccgccgacgccctcctccagcaccgccccttccctccacccacgccgctcttatgagaaaaaataaaattagagatttgtcacaacttatacaatactccttctaatccaaaatataagccacaaccacctttaacccaaataaaagaacaacaattatcgcctcctcatttggaacacctcctcatttggaacaccttaaaagatacaatgcatgcaaccaatataattagagattttgaaagtgaagtaaataataattttaagggcccccttgaatcgtaaaattgagaaaacataggaataggaaaaatgtaggattttgatagaaatgtaagtgtaaaatagaggattgcaaaacatagaaataaccatttgattggaccacgggtaaaacgcaggaattagaggagagataaaaactgaaaggaaagtttccacaaggttctaccttatgttagaattcctccaaaatttgcatggtattatgcattctatacgaatttcatagaattccataagatccattcccttgattcacagggctatataggaaaaattcctacaggaataaaatcctctaaaattcctatgaatttcctttaaatcaaagggggccttagtaaagaagaggtgctagttaattacactcatgtatgcacgtcttatattataaaaaaatttaaaaatatagttggaccttatttttttaatggagggagttggatagtaattaacttttcaagagatgtaatctcattggaacgtgagatgtgccccattcttagtacttatataaaagccctctactttttgtgaaaatcacaaaatttcagactaggctttaccatacgatgtaacgggtgaggcttgatccgaccaacctctatataagggccaaggccggttctattggaagcaatctactttcaacacaatatagccaattgaatcatttttttcgatattgcatctacttttcgcctagtttagcttagttttgtccatctttatctatttgcgttatgaatcgtccgcattcgctgtgagagtgcgaaatatctttgcaggtttgtcccatagaccttctattcgcccatgaaacatgtattcatctttagttccatctaaatcgactccgctggccggttaatatatcgaaacccatcttgatctagtttttttgctaggttggggtggttagcgactccataccaccgcaaggctttaggtatcctaatcgtgattgtcttcttgccaaaaaattccactaaaaattcaattggtgtattaaagcatagggaactcaagaaaaatcccaccaagctatttccatttattaaataaaattattaattagggttagctcaaggttaaacttaaacaatttcttttagcgatttattaaatgaattaagaccagaaaaaggaaaacttcagggcatgacatgcattatgccttgcctccgagagcggtggcaatggcgcacgagggacatgggcgatgccacagccatacaaattagtcaaaataccatctttaaaatttcaactaacttttcagccactcctgcaatttcaatttaaaggtttaacatatgtctacaatgtaaataatgatacccgtgcaatgcaagggtcaacaacgactagtgttacataattctccatacagtgagaactggttctccttatacgcttattctttgttgaaagtccacacgagaaattccacattaccacatagcatgctaaaggtggcttataggaaaactagatgttttcccgaagcagattattcaaacaacctctcaagaaacatagagaaagcatcaaatagtgaaccctgacccatcaaacttctcgttaaggattgagtccaggtgttgtcccatctcgagggtcatatggttcagccaatctcctgccactccctttctgaagtaggcatcgttcgagaacgtaatgccgacaccctggtatccttccctgttgatcttttgtttcttcatgctctctaggctgcaaagctctacgatctctgcaacaacacccgtttcttcttcggcatcagaaatcggctgcccaaggaactctgctaattgcctaattgtgcccatcggatcttggagcatctgttcatatgttaggaagagtaccctacttggctcttttttgcttgcgttccagtagccgaggatgtgatcccagacaggcccacaggcagaagtgccctcgcagatagacttgtacacctcggagaatggcacatctgatccaatacgtttgatacgcttgatgaagtgccatgtggagactgctctgtccttctcatctctgcaaattagcatgtcagcaacaaattttaattcaagagatgcaattaactcttaaacttttctaatagtgaaaaccaaaagcacggcatgcattgatccacgtcatccaaaaatcatgaacgttggatcgcactagtaggaaaataatttttgcatgtcccctaccttaattccagaggtggacgaagatacgaatcacctgctttatgtttaccatggtaggggaggtccacgaccgttatgtaaacaaaataccatgggcgactaccttaagcgccctcccaaggtaacatgtttttttcaggcaactgtcttataactctacctatgaaaacattggtttatttacatgtgtgatgcagttaataccctgctcatatcatgcaatttttcaggttgtgccgttaaatgcccacgcccacctagggtcggagctagcacaaaataaaataaaggagggttcctcttgcttgctttaccctggtttgaatcaaatttagcttaatacgggtgcctaactttgaactaatagagtatttatatggtgaaaatagataaactataagtaaaaaaatttttgaaccgggtttctaggcacctcctagctgtatgtagctccgcccctgtgtccacctatgtcatgtcttgttcatcttccttgtatgagatgggtaatcgactagtcgtggggccatcgcatgaggtgaagtctagggcatcaaccagctgggaggaggaggcacctgtagaggtggaggagaaggtgcagccagagtcctcacatgaggacccggtcgtccccattccccaagcacgcactctggtatgggccgaccactagcgccatggcaccggctgaccgggccctagagtgtgctccgacaggggtcggccataaacgttggctctagaggcaaagagattatgcagcaactaattagttagtcttttttttatcatatgcccagggtatgacaagtagtatgtaattagggataaacttttgctttgtattatagtatcttgtttaatatattaaatatttagtagaaactaatatatatatgttaaatatttttttcgaaatataccaatgttccatctcgaaaatattttatcgcgggctattgacatgtggaccggtacaagtttttggcttgtcaatgacatgcatcccaacatctttctaggtggctttcataagatatttttaatagataataccgtcgacttttagcatgatatttgactatttgtcttatttaaaaaattatatacatgttatttattttgatgtgatttgttttattatcaaagaaacttttggtttgacttatagtttagcatatatttacagtaaatttttaaataacacgaatggtcaaatgttataacaaaagttaatgacatgatatgagaaacatcagacattgtatttattctatgttgaaaatgttgctatatttttctatgaattttaccaaattgaagaagagtaacattgctgcaaaaaccctaataaggactggcatataggtgccgatttatttaaaaccggcacctatgccccccttttccaccctgcgcgcaatgaaaaaaatataacctgtacctttaaacactataggtgtcggttcaaggaaaaatccgataccaatactgtatatgttggtttctagataaaccggcatctatacttatattataggtattggttctagaaaacaaccgataccaatactataggtgtttttttaaaagaaccgatacctatactagtatagatgccggttcttttaaaaccagcactataggcgcctgttcttttaaaaaatggcacctattaaaaaaaagtccactgacgcactgcaagtcacaaccttatcccctctccgtctatctctctctcaagtatgccgctcctctccgtcttcttcgcttctcaacaccgttgggtggttctcgtcaccttgaggagcggcgaggtgatggtgggttttctcctcccagccttcacctcctccagatcctcctccgggccttctcctcctctagacgcaccaacggcaacagcttttcatctcctctcctctctgctgccttcttctctccatccgacaacagcgccaatgatggagaaagccaacggcagtggctacggtggtgaaggtggtgaggtgtggggtggcggtggccgggattttttttattcggtgaaaactataggtgccggttccagatccggcacctatgcaccctggacataggtgctgaccaattggttgaggtctttggaacgggcactgatgattatttgtgcagtgtaaacaaatccaaaactggagggagtaggaaaaagaaggtacctgcaaacatatacgatcttacaatcatcattgtcggttattgaagaaggcagcagcgagagtggcaggtgcgtgttcaagagcctcggcgacggcagcttgtccagcacaccctcccgcccacacgcgaacaggccactctccacggtaggcacgcagtcgtgcgagttgaggcggcggagcgggtggtcggggctcgccggcgggaacaagccgcgcgccatggtggcgaacgcgagggccttgagccacgtggtcccggccttgggcagcgtcgcgagcacgacgtcgccggggcgcgccacgaagccgccgcggcgctcgtcggccatggcggccgtgccccgcgcccagtcctccagcagccagaaccccctgtaggagaggatcgggaggctgttgttgtagacgaggcgcctcggcatgccggagatggcggcgtcgtgctcagtgacggggcgagccgggatggcgtcgacgccggcgacctccttgaacgggacgggccctgcagcttgcccatcacggtcagggagtagtgctccttgcacttttgccatatttggagccacggcgagagctataccaatctgagctatatgcatatggttgggacttggagtctaataaagtactacctccacattttaatgtatgacgctgttgactttttgtttaacgtttgactattcattttatttaaaaaaatttatgtaattattatttattttattatgacttgattcttcatcaaatgtttttaaagcatgacataaatattttcctatttacacaaaaattttgaataaaacgaatggtcaaacgtcagtcaaaaagtcaatcgaaaagtcaatgacgtcatacatttaaatatggaggaagtagtatatattgtccacctttgctgacccgatcttatcaagtacagtactagttagatgcattaatttagttagctcagggaaagcacgtgcttggcagatattgtacccttatggatcacactgtccttccaatctcctacgcgtactcccaccagatattctacgatgctgatctagtagtaactagtaccacgtaccaacccgagatatagatgaacagaccgaaaatgtcaagcaagttagatggacagatgcaagcccgccctagctagggattaaaacggagcggatagtttctattcgctgtggagaaaaataaatacggattccttttgaagcggataattctcgaaaagtccggacacggctaatctttccgaatgcgaatacgaatatggtatcggggtttctaacagacacggataataatatgtatatccggtgaacaacactatttgatatccgttgaatccataagacatatcacatttctttataactctacaaccttcaatctatctttttagatttttaataggagaccatctcttaacactagtccacattattaatattatttgaacttttaatatctttgataaattataccatattttaaggaggtaactgctggggcgaccaagatgagcttacatgtggaagctggggcggttcggccgaatttgtggtcgggacaaaccactttcgccgcctttagaaataattttaaaagcctaaaacaagagatctaattttaagttaataaactccaatataacagtaggctagataattttttaaaacacttctattgtttctatagttcctaaatttttctgggatttatttgagccaaggaagtatttttaataaatagaattgcatttcatgaataatttaaatagaaaaagttttaaaatctctcttttgggtttggcctttctctctctccccggcttgcgcgcgcttggcccatgccggcccagaccgccgcacccctccctcctctctcttttccgctgataggtggggcccacctgtcagtcgtcttcaacctccagccgccatacccgcgccgcaagctgccgctgccccttccaaatccggccacccctttccatctccggccaaattgtttgaggggaaatgatcccccggatctcctcttccttttcctttttggaactatcgcaaatttctatggaaatagcccggattcgaattcgattcttcccctctaaccctaaatcttccatctcgccgggctcgccgtgggcctagccgccgcgctttgccgctataaaatgacccccgggacctcgtccattcgccaccatcctcgccttggcttgccgtagctggtagagccgcctccgccctagctcgtgcgccgccgccgttgccgcgtgtccaaccgtgccgcgccaccactctagtcgccgtcgtcgctcggggttgccgtcgccggagcggcaaggtcatcgccgtcatcgtcccaccctccgttttcaccgaagaccgctggaccgccgtcgtcgccaccgccacctcgacccgaagaccatcgccgttgacccgaagaccatcgccacctcgacctcgccaccgtcgccatctgtcatcgttcgtgtggagattatgggtaccccatacccacacggcatggttattagactggttataggagataacttatatctatggaatatgtaacggatcatgacttgggtattacgtttccctgtatattatggaacggcctaaagtcctagtttgataagattgtaaagtagatttaggaaaccgataccgtattgattaaggtttctatcttgtagtcctgccccccatcctatataaggtgggcaggaggctctatatggggcatgacacacaaccagatcgtcagatctacaatgcacttggcggattcaaatccccaaacaggagtagggtattacctctcattgagagggcctgaacctgtctaaatccttgtctccgcatccatccacttttaggtctcgtgcgctaccccttttattattgctgaattcatgtttcgacagttggcgctccaggtaggggtacgtcgagttcctatcaaagaagtgtgatggaatcaattccaaaagcagggttgagattaatctcaacaatttcgaccactccaaacgtctactggtttgtcgtttcaatatattgttattagattgattcttctaatcatggattgctcttctgtgagacgctttgtttgtgtgcatgcactggcggctgatgagatctgctgatcgcctccggataaccatatgcaccatggctcggcgttggcggagagcttctgcgtccgatcttgccctgcgatttggctgaagtcggccaatattcaatggctgatctaatagagatctataatgagatttcggatagcatcgcttactgccgtgtcgagttctcaaccgatcatctggccggttacggcgattatattaattaattaattattatttttcactaatcacaagttaatttgtgatatatatttttgcatgtctaatgaacggttgagtccgattcataagaagacaagcttcccaactagattgcacgagcatggattggtcaggcgatgtgtggatgcatatcaagcgttcatgctacaggagattaattggccaatcaatatatgcgagctgcatatacgcattgataaatgcaaacgtatatacacaagcttctttatacctgtatttattttatgtggtactgaacagattaatctgttagttgatttattttgcatgtacccatgccaattgtctctgtcgccgctgctgggcatccacatcttcaccgccggccccctcgtctgccgccgactggtgtcctcgcctgcacggccggcctattatgccgccgtttttgggcgtctacgtcttcaccgccggccgcctcgtctgccgccgactggtgtcctcgcctgcacggctggcctattatgacgccgttgctaggcgtctacgtctgcactgttggcttgctttgccgctgccgactggtgtttccgtctgcacggcctatgccgccgttgatgggcgtctacgtcttcaccgaccggctggccttgccgccgccgactggtgtctctgcctacacggctcacctattatgccgccgttgttgggtgtctacgactccaccgccggcctgcctgcgtcgccgccgactgatgtcctcgcctacacggttggttggtcacaccaccgttgttaggcgtccatgtcttcaccgaccggctcaccttcgccgtcgccgactgttgtctccgcctacacggctggcgttgttggacgtctatgacttcattgctgcccagcctcgcctgccgccgactagtatcctagattatacggttggttggtcacaccaccgttgatgggcgtcttcgcttacactgccggtttgcctttgtcgctgtcgactggtgttttcgcctatacagttggcggactccgccgccattgatgggccttgtcatctacaccaccggcttgccttcaccgccgttgcccggtgtcttcattgttattgatggacaactttgctcccacatcagccacctctgccgtcatcaagaggaatattacaaagctaagtcattattttttttctttatatgatattttccttttcctctgtctcactatgtcaactggttcgccgttgactagcgaatcaggggctacagacgttatatcatatttttttaacaaatatcataatatttatcttgattgcttgcgacataatctgagtacaaaagtgcctatcgagttatggagttctatcttcctatgctttccgtttggtttgtcgatggatagttgcctttgggctgattcctagcacccgagggctcgttggatggagcgagtaacgcaaggtgctaagtattattcggaataaatcaaaagcatagagataagataaatttaatttctgctctttacaattgcaaaagtacccgagtagtaaattatgattcgtaaaactttgttccattaatgacgaactcatgtcactcatatgcatgtttgggaagtgcctagaccgactcccgatgcttgggggctatgactagtcggacagagtgtttaaacgtacagagtcatctgctcggggaaatcgaaattgagtagaggagaaatatatatttataaatattttaaaatacttgaatattatatatacatcagatactactcatcctatatgcttgttctgtaggatccagatccagatatgcataaaagggattcatggctttaagcttatctcctacgcttcaggattggatcagtcagaacatcaccaccggcttgccttcgccgctgccgactggtgtctccgcctgcacggctagcctattatgccgccgtcgttgggcgtctacgtcttcaccaaccggcttgccttcgtgccgccaactggtgtctccgcctgcacggctggcctattatgctgccgttgtagggcgtttacgtcttcaccgaccggcttgcctttgctgccgccgactggtgtctccgcctgcacggctggccttttctgccgccgttgttgggcatcatcatcttcaccgaccggcttgccttcgctgccgtcgactagtgtcttcgcctgcacggctggcctattctgccgctgttgttgggcgtcttcttcttcaccgaccggcttgccttcgccgccgccgactggtgtctctgcctgcacagctagcctattctgccaccattgttgggcgtcttcgtcttcaccgaccggcttgccttcgccgtcgccgactggtgtctccgcctgcacggctagcctattctgccaccgttgttgggcgtcttcgtcttcaccgacaggcttgccttcaccgccgccgactggtgtctccgcctgcacggctggcctattatgccgccgttgttgggcgtctacgtcttcaccgaccggccacgtcgccgccaccgctaataggcatcatcatcttcaacgcaagctgtctacgtatgatgccgactggtttcttcacttccatggctgcatggttctgctagtgttgattggccttatcgtcttcatcgccagtcgtctcgtctgctgctgactagtgccctcgcctctacggctggtttataccgcaaccactactgagggatgtcatcgtcttcattgctggccgccttgtttgacatcgactatttttttttctggagctgaccggagtatctatcttcacgactacacatcttcgccaccggttttcttctgttgctgccaacttgtgttcacgtcatcacggctatgcaactttgtcaccatgtggagcgacttcaccttcattattttcgacattggcaaactctattgcctctactttgcaagatttgctactttgtcacaccctgaaaatcctaaatttatgaattgttgtttaaatggaattattagaaatgattttaaaagcctagaagaaaagatctaattttaaataataaattccaatataaaagtgggctagataaaattttattaaatacttctcttaattcgatagttactagatttttctgggatttatttgagccaaggacgtatttttaataaatggaattgcatttcatgaataatttaaaaagaaaaaggttttaaaatcctcttttggctttgggccgaaagtcggcccaattcactccctctctctccgcggcctgctagcgcctggcccatctagcccgccgagccgcgccgcccgctctccctcctctctcccaccgacaggtgggcccacctgtcagggccgtcgtcttcctcctcacgccgcagccacgccctagcgcgccagccgccgccgcccccttccaaattacatcgcccctttcccgatccggtcaaattggtagaggggaaatgatccccttgatctcctctatcttttctcctatagaaacttcatctaatttcgtttggaaattgttggattcgagctcaattcggattcgttttctctcctctaaccctaaaccttccatcgccgtcgccggttgccgtgggcctccatcgccgccctctagcccctatataaggacccccgggacctcctctcttcgtcgccaccctcgctttagctcgccaccgctcgtagcgccctagccactagagcccgtgcaccgccgctcccgaagggagtccagccgtgcgccgccgccgctccgttcgtcgtcgtcgctcgggaaggtcgtcgttgggatcgccaagtcgtcgccgtcctcgtcccgtcctccgtttccgccaaagaccgccggagcatcgccgtcgttgtcgacccgaacgccgccgccgcttcgacctcaccgccgttgccgtccattgacgtccgccgtcgtccgagccttcggtgagttcaccgcgtcgccctctacccgtagatgccctccgtttgcgcctccgcgccgtcgttcgccggcgagcccgaggtgccgagccgtcgccggtgatgacgtcatcgctaacgtcagcgccgcgtcatccgtagacccgcggtggatcgaatcgatctcggccgtccgttttgtttagattagatctcggccgttcgttccgtagaccgtccctgtgcacccggtccaccgtgaacccgagccgatgacgcaataaatcctttttccttttcaaaaatagttctttattccgtcataattcaattaaaatctatataaatgatttaatccaatttaatctttaaaaattcataactaattcatcttagcttggatttagttggttcaagtctctaaatttttctaaaattgagatctacatgttaaaaatatccacatgtgctgtttatgattgtttatgtactgttttggtgattttgttcttttatgcttagattccgacgttcccggagagtccgattttgcaggagaagattttgaagagttccaaggccagtaaggcaagtcacacagatcccaaaaaaccctttgagcatgttgatcccgtttaaagctattgtttctattcaactatcgcatttatttttgaatgtcaccgggtgggaataacctattgccttgttatagtctttttgttattgattacctattctttgtcatttggttaataattggattagctagaacattatatggttttagctaaagtgcttaggatgcttagccatgcttagagacattagctcatataaatgggataacttatgattcactattatttaatgatggcttaatgatagctcacgatggttaatcgtgattggttaattaattaatttgccaactaaaacttgataatggtgggttgtgagcacatggttttgatggtcgtgctcatgacaattaaggaccagttcacgattttcggttgtgaaacattaaccgtgccaaccacaagccagcgtgggcaacggctttactttttgtatagtatggttcattgtagagcaccagactgtgaagtggcggagataagcccacaggggtcgctggggagtccatgccttgtttataagggggtgattatgatccaggaagggtgcactgctttgaattgtgttatgcgaagggtattgtcacaatctctattcgggtacttgttaagtatcgcgacgcatggttgacatgatgttgaggttgtgtcttgtgggtacagtggtacacctctggccagagtaaaactattcgaatagccgtgcccgctgttatgggcgggtctaacaatgtcattcgtgattagtttcatacatctcaccataataaatgatactgtaattggtaataacttgtttagctcctggtttggaatggtatattcctggtttggagatagaactgtgccgctgggaatggttgttaagaatggttgggcctatgcaacgggtatgttgtatagcgttggattaatattgtgtaattaaatactttactgttttattaaattctgaagtatttattaaatgccatttatgcaaatgagactatattatgccatcctttgttatcccttgcatttgcatatttgttgtgtggcttgttgagtatgtcatatactcaccttgcaatcattcatcagaggaggagttctacagtgatgctgaaggtgtggaggattaggcgtagcccttgtcaagctgcttgtgggatggagtcgcctgcgctgtttatcttattttccgctgcttagatttttattgtttggagtaataattgcctctgtaatgactttatattcccttattaattagagtaataattgcactctattatcaatttgttattatgtgcctcggctgattcctggacgagaatttacacacatgtaagcgtttggaattttggatagaaatttcgggcgtgacatacttcaccaaccacaacgtctacaagagcttcgacatctcagcatgcgtgaccaaatatgatgccgtgttattttactactacaagtggttttccaatcttcaatatttctactcggacatccccaatgcatatcttcactcaagtgatggctactcgatgacaagaagctacagttcgcgactctatgttcagttgtttctcaactaaccaaagagtcgggggctacacaaatacaagactcaaaattcgacaagctttatgtcaagacaaagcaatcaatcagccaacgagttctatggaatctacttcgggagtcatcagtttcgtcttcacttaagagttggcgttctacttgagaaactccaattatttcaccggcaattttggcttctccatgctgccacaatatactccaaatttctcaagtatcaagtttgagatgtaatttacatgtctgggagtttgatggattattatcattg

SEQ ID NO: 19776 - DNA, 3603 bp, Oryza sativa
cctcatcgttatcattgactgctacaccgctattgactggatcaatgatatcatcgtcttcatcaacatcctaccatacctcttcggctatgtctactctactgtcgttgatgcacaactttgtcatcatagtcgatcatctctattgatgctaatcatcattaccgtcggttgcatttgccatcgtcgactattttcttcatcttcatgattggtggatttcgccattgccattgatgagcgtttacgtcttcaccaccggcttgcctccgccgccattcatggtgtcttcgctttcatagctggtttattatgcctctactgatgggcgtcttcgtcttcttcaccgggcgcctcgtctgttatcgactgattattttgctgtcgtggctgcacaactttgtcgccgttgttgggcgccttcgtcttcactgctggctgacttgtctgctgtcgactggtttcttcgccaccaatggctatgcgacttcatcacctttgattggtgtcattgtttttatcatcaccaacattttcgtcacctctgactggcgatatcatccccatgttcgtcatcttgccttcatgtcgactacatcagctattgccaatggataattttgactatggcagaaggacaagttatatatgctcaggggcttatgaactcaaacacgaggattatatcttcaatttggacttgttccggatacattcaacatgaatttatggtcatgagtcgatttcttatgctcaacgactggactattcattatttcccatgagggccatcagctgagtgcttgcaccagtcgggattcaattatcacatttactttggtattctccatgagggacaattacgcttgatctacatcacccaggatatttatcacttgggatcatattatttggcgtgttctatgcgtcatcctttaaagggtgtcgaaggcatattttttggcctaggcctaatatgtctgcagcccatattatgagatgtggcctgtcacgttcttttagggacttaggcactttttgcttaggccaaagtgcgcgtgatccagtgcccaataccttaaaatccttttataccgcaattactcaactttttaggagttggtacaatgcatcttaaaaggtgtcaaacagtaaagctttatatagctgccccgctgacttttttatataagtcaaggtgatgtttgagtttttaagcaattgattggatacaatatcgttgctttttgccacgtaagtgtgcatttttatttactaatattatggcttaggctgattatatattgtggtcattttccaagcggttggtaaatcatttttgagtttatttactcggatttcataccacatatgccatatatttccaggtgtggtgaaaccatgtgtcttttagggacttaagcacatctgttaaagcagtgtgcgcatggtgtgtgcccaatactttggaaattttttattcacagcatataagcttctttatagctgttttattttcaatgatgtagtcaactttaggttgcactcatcatattttacaaagcagtcggtatatcacttggatcatgttatttgggggattcacaccgcatatgctatatattgatatcaagtcatttggttgattacaattatcaaaaccactcggttggttggattatttattccttgactatatgcttagtttgttcagctaaccacatagtcgagggctacacctattaggtgcatctagtcgatgcacctgactttatttttcagccctccatagtcttcatatttggtaaaagtactcgggagaccatggcaaagatgattgaagaacttggctttggagtaatctggttcgagagaagattatcttttcgactatgaaggtctcaggggctactgtagagattatgggtaccccatacccacacggcatagttatccgactggttataggggataacttatatctatggaatatgtaacggatcatgacttgggtattacgtttccctgtatattatggaacggcctaaagtcctggtttgataagattgtaaagtagatttagggaaccgataccgtattggttaaggtttctatcttgtaatcctgccccccatcctatataaggtgggcaggaggccctctagggggcatgacacacaaccatatcgtcagatctacaatgtacttggcggattcaaatcccaaaacaggagtagagtattacctctcattgagagggcctaaacctgtctaaatccttgtctccgcatccatccacttttaggcctcgtgcgctacccccttttattattgccgaattcatgtttcgacagttcgccgtcatccgagccactggtgagttttccgcgtcgcgctctacccgccggtgccctccaattgcgccgcctcgttgtcgttcgccgctaaccgtcaggtcctgagccgccgccgccgccaccggtggtaatgttgttgtgatgtcatcgccacgccagcgccgcgtcagtgccacgtcgaccgcatccccgcctcgcccgtgccacgtggtggaccgtttcggtgcacccggtacaccatgaacccaagcctgctgacgcaataaatctccttttctttttaaaataattttttattgcgttataattcaattaaaatctctataaataatttaattcggtttaaacttcaaaaattaataactaattcaccgtagatcggatttagttggttcaagtctctatttttgattgattttgttcttttatgtttagattccgatgttcccggagagtctgtctgtgcaggagaagagtctgatgagtttgaagggcagcaaggcatgtcacacagatcccaatcactctttgatcacgttattcccatttaatttctattcaactattgcatttattttttaatgtcaccgggtgggaatgacctattgcctttattatagaccattgttttttttactcaaagacaggggggaagcccccacggttaaattatattaaagaaggaaaaaataatacacacaaagaaacaaaagaagaaagcaaagattacagattgtcaatccatgattgaaccgtgggtctatgaacttctctgaacctaattaaatgtaggctcaaatcctccttcaaacccttcctccaattgtgaactgatggctgaataccttgaaaaataaggccatttctttctttccatatattccaggctgccagtagaaatagttccataaaactatactgagaaaaggaatttctttgaaccttcagcatttgatggtattctaatgaggagttccaaacccagcccaactttctccaacatgacttgctgaactgacattgaaagaagagatgatcccttgtctctcttgcattaatcccacatgtcaaacaataggcagtggcattcaaaggaatacaatgtttcctgtcaagaagatacttggtattcactctatccatcaacagtagccatccaaagactttgattttcatgttgagcttactttgccagatccaattaaatgaacaagggggagataaggaccaaaaggagagcttataa

SEQ ID NO: 19777 - DNA, 2343 bp, Oryza sativa
aaagaggtaaaatgaattggtcctgtggatttctttgaagatcctgagcaactgaatcccccttatgcttagcaaaggaaaaaagcctgggatatttgacagatcttatattatcatgccacaaatcctcccaaaacaggactgtcttgccagatctcaaaatgggctttgcaatacctctaaacaagacatcaaactgaaagacatctttccaccaaaaagaaccacaagaattagccacttgggggattatatttgagtaatatgaagaccagattaaattcacccaaggcacattatccttattataaaatttgtgcagatgtttcatgaggagagctctgttttgaattctaagatcaatgactcccaagccccctttattctttggcttgcacaccttgccccaagctgccagagactttttggtggaattaaggtcattacccctccataagcaatgccttctggctctatcaatattctcaatgactgaaaatggcagagaaagcgaacacatgtaatacgttggtaaggaggagagtactgagttaaccaacgtcaatctatcaccataggagagaaaagaagaactgactgttaatcttctttcaattctatctgtcaatggggcaaaatcaatcacctttggtctagtggttcccagcggcagaccaagataagtgaaagggagagttccaatggcacaaccaaaagtggcagctagcaagtgagctttgtcatcctcaacatttaaaggaatcatacaggactttgaataatttactttcaaaccagaagatatggcaaatgagtttagcagagctttgagagcaaaaagctgaggggccgaagcttctaggaaaataagcgtatcatcggcatattgaataataggaaagttattatctcctgaaactggaattggcagagagagtatccccctgagatgagctttgttaattatggcttgtagtaaatcagcacccaacgcaaaaaggagaggagagagaggatctccctgccgaacacctcttttacacttaaaaaactttcctgggactccatttaagagcacttttgtagaagcagaagaaaagatgttactcatccaaacattccattcatccgggaagcccatagctaacatcacttgaaggatggcaccatgttcaattgtatcaaaggctttctcaaaatcaagttttaataaaacaatctctctttttgactgcttgcactgatgaatgtattcaaaggcccaagctatgcagtcttgaattgatttaccttttataaacccatattgattttgatgaaccaaacttggcatcaacgattgtaacctgtcagcaaaaaccttgcacaggattttaacagagaagttcatcaatgagattggtctataatcactgggggtttgaggacttggtttctttgggaccaaagtgatataggaaaaattgatagaagacaaatccaccgaatttccccaaaaatctgagcaaagcctatagaagtcctgagctatgattggccaacttgatttgtaaaaacacccattaaacccatcaggacctggggttttgtcaccaggcattttcctcaagacaccatcaatctctttggttagaattagtgcacacagagtagaaaggtcccccttatgttcaatcagctcattgagatcaaagaccatagaaggtttcatagaaactcccattctttccttaaaaacattctagaaaatatcagctttcccctcgtgatcaaaaatttggtttccatctgaatcttgaagacaagaaatagcatttcttctgaaactttctgttgccatagcatgaaaaaatttggtattttctcccccaagaagaaccagcttttgtttaaatctctgcctccaatattgttcctgccaattcagcaacctttgaacacgagccttaacaagcaatctgaatttcaattctgggacacatagcaacctcaattcctccaatttatcaagaaagagaatcactttattgcaactttcgatggttttcgacagcttggcaagggaggaactccaacattttaggaacagagccttttgaattttgcagctataagctttgcttgatcattgatattttcaatatctctccaagcattagccactagatgaaaaaacccttcttgatgaatccagtaattctcaaaccgaaagatgttggacttaggaatcgaggtggcaatctgtattttgattggagcatggtcagaagtatttctagccaacactagcgcctaggtgttgggaaataaactagtccaattcgcagaggtgaaaacccaatc

SEQ ID NO: 19778 - DNA, 1268 bp, Oryza sativa
cccctggtaattatgaaggttcggccgaataccacgcgccaaatgctcaggaataacttgaggcaccaccgaaccatccggttgcacatgatgaaccaagtgttccgggaccacctgatttgcagggtactgcacaggctgaccaccaggcattgcaaacctagccgacgcattcattggggcttgttgctgaatcggctgaacgacctgctgtctcaacggtgtctactgaattggctgtaaagccggttgccttggtggcgtctgctgaactggttgcacggcctgctgaattggggatgcttgttgaataggctacacaacctgttgcctggacggtttttgttgaatcggctgctgctgagccgaattaatagcattttgaggaggtagaaacatagatgcaacctggtcttgtgttaactgagtcacattcggtccaggatgctgtgattgctctcttaccaataattggggattgattaattgacctggagccgatgacggtgctgcaggtgctggagccgatgctggtaccgtcgattgagctggaggagttccccgggtaagtggatgaacatcggtaatcaaagtccgataatttggaaaagtacccccttgcaaatagactgggcctgcagcctgatgttcagctattgaaccatcggctaccgatttcatcatatttgacaaagtattagttaatactccagattgattgatcaaagcaatatacacagcatagtcgacccgatcttgaaagttattgaaaaaatcttggaatgcattgtcattctgattaagattccccccttgcaatccctgagtgccgtcaccttgaactccatgtactccatgagagtagtcaccctggctctcctgagtcgacccatctgtaacacttttgtcactcggctgggctgatccatctggaacttgtttcttttctccctctttagacgaaccgatcccaagatcctcaggaaccaccttcaccttgtacttctgaacaaatgtgtcgttgcgagtttgcatgaacgagcttaaaaattgatcccgtgcttgctgcatcattgcattgaagtctttcttctgttcgggagtgagcttctctggatcaatgggcacaacgtttccttcatggacgtcagtcaaaccgaacttctgagtcttttccttaactttacccgggctgcccgacgacggagacagtggtggtttctcagccatgaaggaggctgccttctgacttctaatcggtcccacca

SEQ ID NO: 19779 - DNA, 12555 bp, Oryza sativa
aaactcgcctttggatgtatgagcgtgccagttgatttgatcctgcaaacaacaagaaacaaagacagagaaaccatgattaaattcataaatgatagccgatcggctagatgacgatgacatatcatttatctttgagccgatgtcatgtgtaaatcgatcggcaattgttaagtaaacaaatcagaactaaatctactcaatcggctgtagatatcaatgatatataatccttatatcgatatatacttgaatcaagtgattgggatagatcggtcaccttgccgagacagtataaatcacctagatcgaaatatatattaataatgagattatatatatatattcatagcatagccgatcagatagatgtagcgtgtatcggctaatactgcgatactactttatattaagatattaaagcaaatagaatatactaaacaaaaatctaatatacttaaatgcaacaagatcttaacaagatggaagcgctaatctcgagaacacaagccgccataacaagttttacctcttgttgaagatcgaagccgatgcagctcaacctgaaagcaataactcgtcgagataaaatgaaagcaaaaagggtggcgatgcgccgaaattgtattgaacgtgtgtatgtttttattacatagggctcggggtctatttatacccgagaaatacaagatatgtccatattggacacgactcttatctctaacaaactctaagataccataagtctttgcggcagacttttgcccacattttatctctaaggaatttagataaaatatcctaattaatggatacaattgccttctcaggactctatccatgcgtggcaatcatcttgaagcacatcaactcgaacccaatgtcacacacgggtcgtattgtcggaatcggctgtatcacttaaccagtccaactcagacttagccgatcccagtcgtagccgatccaaactccagccgattcttactctgtttccgaaaatacccttatcttctattccgctttgatttcatcttcatctccgatgctgatattaccaaatttggttgttaacaccttgccactcaccgtcgcagacgacgcagctgcacccgagatggatctggtcgtcccgaggatggcaccgccggatctaccgcccttgtcgtgcgcccaccgcgacacccaagggacacctcctcgtcggcggcgccacctgtcatcagaggagaggagatgagagagagaggagaggagagaaacagagaaaggagagaaaaatatagagggagagaaagaaggttgaaaaaaattaaagtggtgagggaaagagagaggaggggataaaaaatgaggagttatttttgcatgcaaatcacataagaggagctatccattatctcttaactttacgattcaataacatgcatgtctagattaatctaggataaaagtactgcgaatttggataccatgtctaaatatgtagtcttagaacatatggtgtgtcagggttacggataaggtataccctctacccttagatatacgtcatgtatcgatatggtatatctgcgtgtatacggacgttctctgtacacgctaaggaaattcatcacggagtccatagatgggaggattcctactcggatagaactgggtcatcactgtattatgtagggtccgatgtctccaagtcctacttggaggccaactgacctgcggtataaaagggaccccccgggaggacccaaggcatcgaatcgtaccgccaacacatcgaccacagcctacatgagccaaatcgcctggtgatctagtcgaaccaactcgactatgatctcgtcggtatcatcgagttccactattccctttgtaatatgtgatttatgtcatataatctcatatcaactagattagggctattacctaccaaggggcctgaaccagtataatccctgtttttgttgcttgatatcgtattacgtagatcctcgtaccagcgtaccccaataccctctatatccggtctacgggtatcccccgttgacagtggcgcgccaggtaggggcctttggtgctcaaggttctactactatgtcatcaagcttcgtcgacaacagcgtcaaccctggcttcaaccaaggagtttctacttcaacaatgctggtgtggactcaagtcggtgaaatcgtcttcccggtttacacctcggtgccgatctcgactggtccatcaatggccggaagtgagaacgccgtggttacaaccctggacgactccatgtcgaaggatcctcccgctgaagtagagaacggaacgtcgacaacatccaagcccgagaaggatcctagtgcggccaaaatcttgtccttccgacaagaatcacgagccgacaaggacaacttccgaggtgacagggtcctagtgtcctatccacaaaaccaggaaacacaccttgcaagcttgctgggtttttctcaacgtacaagctgagattcgtgcctgcaaagagcgtgggattcagcgtacttcttcaacccgtgatgtctattgtcctattcacaagacaaagaatcacgacctctcaagctgcaaggtccttctcagcgccatgaagacgtcgcctcctaaggtccagcagttacaaatctctcttagggatgaggacaaggaataaggagcgacgcttgtctcagatcgattcgttggggtaatcgacattgatccccatgagccgtcagtcctacacttgctcgaagaatagggctcatcgtcaacgagtacaccacgcgatgtatttgctatcgatgggaccagcacgtcagcgcgtgctaatgtagaagcggagaatcaagtggttacgccggcccagcatatcagggccatcaacacaatactgagggaaaccccttatgatcccgttctgaacgatgatcttgcacagtggacagaatgactacacgaatcagtggccaacctcagcaacgcgttcgaggaggccgctgccagagcacagctagaacaaccgacagctggcggcgccgatggcgaaccacctgagcagcggacatcacctcaatgagccactcctccacctcgtggtaccggcaatctaaatgaccatctgaatggtcgccgagaagcacgacgcgtgcaagacaacgagaaccgttcccgacatcgcatctcttcacgatgtcacgagaacgaagagcgaggagacgctcgggcgaataccgagaccgtgataactgccacgatcacgatgatcacgaacagcagatgccgggcgatactggttgaggacgtcgccataacgatgacgacggtggagatcggtgccgggacaataacggggggcgacgacaggattctcgagatcccgaacttcatcctcgtaatcgtacaccggaaccaagtgactcatcatcatcgtcatcatcctcttcatcctcatcgtcagatagacatccacgaaggacatacgatcgctgacaacccaccgcccccagcgtcgggtgtagagctttcagtcgttcgctgcgtgatgtccgatggcctgagagattctaaccgggagcagaagtacgatgggagtaccgacccagaagaattccttcaggtctactccatggtactctacgctgccggagcagacgacaacgtgttggcgaattatttgccgactgcattgaaaggttctgcgcgttcatggctgatacacctctcgccctactcgatttcttcatgggcagatctgtggtagcagttcgttgctaacttcctagtaacttacaagcgccacgcgatcgaagacgacctacacgcgttgacacagaacccgggcgaatccttgagggactatgttcggtgctttaatgagtgcagaaatacaatccctgaaatcaccgacgcttctgtgatccgcgctttcaagtccggtgtcagagatcgctatactacccaggagttggcaacaaggcgcatcacaactactcgaagaatatttgagattgtcgatcgatgcgctcacgtggacgacgcactaagacgcaagaacgacaagccgaaggcagggggagagaagaaaccagccaaggaagcacctgaatcaagcaagaagaaaagtcacaagagtgggaaaaggaaagcccaagcggaagtcctcgcgtcagaatacgcgacaacgaggcatggacaatggcgttcgacggcacactcaacagccaaggagcaggggcaggattcatcttgacatcaccttcgggagatcagggcaaccaacaacttcagggcaaccaaccaacaccttcaggagatcaggggcacgcaattcaccttaacttcagggcaaccaacaacactgccgaatacgaaggactactcgctgggataagagcagcagccgcacctggagtcaagcgtttgatcgtaaaaggggattccaaactagttgcaaaccaggtgcacaaagactacaagtgttctaaccccgagttgtccaagtatctcgcagaagtcaggaagttggaaaaatgatttgatgggatcgaggtccgacacatataccgcaaggacaacatcgaaccagatgatctagcacggcgtgcgtccagatgggagccactcgaacccggcacctttctagacgtcctgacaaagccatcagtgaaacaggcaaacgacgaagatagcccagtcatccccgacgtcagctcgggggctatagaggcagagcgcgccgtcgccgacatcgagaccacggacgactagcggaccccactcattaaattcataagcagcgacgagttgcccgaggacgatgcagaagccgagaaaataacccgtcaagcaaaaatctactgtatgatcggcgacgatctatataagaaggcgccaagcggggtacttctcaaatgtgtctcgtccgacgacggcaaacatctcctccttgacatacatgaagggatctgcgggtcacacgccgccagtcgcacattggtcggaaaagctttttgacaagggtttttttgggcgaccgcccttaaagatgtttgcgaaatggttcagcggtgtgaagcctgtcaatttcacagtaaacacacaaagctaccagcacaagcgcagaccatccctcttacttggccgttctcgtgctgggggctcgacatactcggaccattcccatgaggacagggcggctacaggttcctattcgtggcaatcgacaaattcactaagtggattgaagcgacacccacgggggaaatcaaggccgacaacgtcatcaaattcatcaaagggatattctacagatatggattgcctcaccgcatcataacggacaacggctcccagttcatcagtatcgacttccaggattactgcatcaggctgggagtcaagatctgcttcgcctcggtttcttcccctcagagcaatagactggtcgagagggcaaacggcatatcactacaaggaatcaagacccgtgtctacgacaggctcatgtcacacggcaagaagtgggttgaagaactcccctcggtactatactatgggccgtacgtactacactgacaacgtccaacaaggagacacatttcttcctcgtgtacggctcagaggccatgctccccaccgagctacgacatcagagtacacgactacagaagtactccgatgaggatcaggaggagcagcgaaacgatgatgtcaatctactcgaagaacatcgagaacgagttgccgtcagagcagctagctaccaacaggcccttcaccgataccccgagaagcgcatcagagcacgcacgctttcaatcggtgactacgtcctccgacgggttcaaagccaagcagggcgaaacaaactctcacccaaatgggaaggaccgtacacgatcacgcaagtcttgcggccaggtgcattcaagattgtagacagcgatggtcgcgagttggtaaattcttggaacattgatcaattacgtaaattctatgtataaatcaatagtattcatacttgtaagacatcttacagcttctataaagtttattttcaggtaaagattacaatcaaagtgttccttcctgacgatcccttaccacgatgacacctagcgttgaaacctatcctactgtccctttacgccgtcttgacaaggcctccgaggaacctaagggaacttcggctggggacgcccagagccgataaagccttgtcggatcctgtagagacaaaagaccatgtaagatctggtcgtgtaagagttctcaccgtgcgtattaaccaagccgtgtaatcggaaattaggttttccaacttcacggctgggggctaggatcagtgcttgttcaaccaaggcaggtcaaaggtccaagagccttatcttctaggggctagggagagtgtatgactcaagtgagaagacactcgtacacaccgcatccagagtaaggaaacttagtaagatatatttcttttcaatttcacaagtacttcttacagttcgtaaaaattccaaaatatattacatgcctccctgagatatttgtcacaggatataaagactaccaggaaggccagcaccagtccatggactgaaagactttctccgcaagcggcgccatcgactttgccaggttatctatctctgcgagagtcctccgagaacgtgaaaaccctccgtggaggaactcgagatgcagctgcggacggcgatctcgcatacaagccagcacatgccctcaagcatatcggctcgatcgacggcactcctgcttcagggcctcgtcgatacgcttgccgatgccttcgagctgagcgcaggccctattcaaccacgagatatatccggctgccgactcctcgggatccccgcgaggtactcggagttccctgtagactccggccatggccgtgcaacagctcctgaggtacgagttgaaccacacttcgcgacctcggagtgcttccacggaccggtccttcttcacttccaccatagtcctctcgagttcggccacctcgaacttcgtcctccagtattggatgcgacgatctcggtcggccagtgcactctcgaggtctgctcagcatggaaacgactaagtcaagctgttcttctctctcgagaacacagcaaattaagtcaatcccgacagaagagcaaaggagatgaaaacaaaaaaaaaaaaccaacctaaggaagtcgtcgccatgcccgctttcatgggcaagttctaatctatgtcgacctgcagcacatatggctcgagcgcaagtgccggaacgattacaaacaactcaggctgtctgcgctgctggacatcctcgacatcgacatctctacaacgacaataaagtactcgggatcaaaatgctaaagaaaacgaaggtgatgactgcacacacaaaggcagttggaaccaacaagagttttacaagcacgactaattaaggagtacaggggaactgaaatcctactcttcaaaaaggggaagaacagactcccccagatcaccgacttcttccatcacgcccttacgcgcgtcattagcagccccctgatccaagataatctagaggtcaagttcagggtgcgccaaccttacgcattcgaggacgtggcacgccccggtgtagatcccgttggacgtctcctccccgatcctggccacatgcttggaggggatctcctccatcgccgtcaccagttccgcgagcgaagtcgtcagcgaaaactcatcgggattcaccgggatggtggtcgtaacaccgcactccccgacgagctggtgcaggccggtgtaggtaatccgcagggagccacggatctccgacaagttgttctcgagctccgacatgcagtgctcgagcccctgccgctgccgctcgttgccgaccaccagctctctcatcttctggaggtcctcacggacctccgccaggtcacgcgccagcttgtcggcgcgttcgttcaccgacgacgccgctgccgccttcgcctcctcaatctcgcgccctatgccgcgagcaccggcctggaggatgcgctccatctcgatttggagctccccccagatgaggatgtcagcgggcgggcctcgagcgggcacaaggccgcctgcagggccgctgggcgtcacctcacgactcttgggcacgaccatgacctttgtcgaagccgctgcaggagacgcactggagttctctccagacccgtcttgcgccgccttcgcccgtgccgccctgtgaaggattgccgtaattgccatcaagacgggctgccagagttcgatgaattaaaaaacctcaaatttgtctacttacttctcgccaagtgtcaccagcctctaccgtcgctgaggcgggggagacgcatccgaggcctgagtaaaacgagtacggtgtgaggacaatatcttccgactacacaataaatgaccaaaggtgcttaccgatggggtgggcgccttccgacggttcttcggaatgttgccgccactggtcatggcagcggcagcagcagtagcaacatcgaatgcctcctgggcgacgccctccttcaacgaagctgccgcctagtggtccacgagcagcccgaagatgtcagtcagagggagagcctacactacatgaagtcacaatgcgatcctagaagaaaaagataaaagggtcgtcaaatacactcacgttgattgcagtttcacgctcggctgtccctttctcgcaaagggggacatggacgttgctcgccgttgtggggccgctgatcatcacttgaccgacgcggctctccacggtttcgctgttcaaacctgtagatcgagaaccagaattcgataagtcaagaggaacatgcacataaggaatggaatccgaaatacaagaaaaataccccgaggagaaacccgggtcgcgtcctccggcctagaataatcaaaggctggatgggctcgagcctggagcggctggatccgcctaccaatgaagtcggcagtgacttcataccccgacaaccctcacactcggaggtcatcgatgatatcgatgaaggactgaagggagggggttaaggcgggtttgacggtccaagacgaaatcttgtctggttgttcctcagggacaacaaagactggatccgaattctctatctgaaaatagaaccacctcgcccgccatttgctatgagaaaaggggcactaaaaggggatgtatcgcgacttcaggccatcccgaagtcggaaaccgacacatccggacacctttttaggttccatccagcgcaactcgtagtagaaacgaaagagatcaagaaacggctctaccccaatgtaggcctcacaaagatgggaaaaaatactgaggaaggcgatggaattggggttcaaatggagcaaagaaagaccgtagaaattcaagacgagaagaagaaactcggaaggcggaggaagaaaaccacaaagaatatagtcctaaaccgcaaccatgcggcccaagacaggttcgggttcaaccatactaggacaggtatatacctcctagttctctctccatggtcccgcgaccggggagagcgtcgtcctcctgcagcttcttcagggacgcgccggtggaagtggacttgtcgagatccatagccgccggagatcgctgaagaagggactgagatgagcaagctagggtttttgcgggagcggagaagacgaggagcgcttggaggctggaaagtttttcacaacaggcggacttcaaaatggatcctcaaaactcccttaaatagacgcactaccgacagtatgaattccaaggaaaggagagagatggccgccggaaatttctagccccgttacgcgtggcagttttcggacttcaatttaaattcacttatgaccgttgaacttcgcacggggttgtcgattactccatgtctctacggttctcacaccgagatcgaccagtagagaacgacaataaccccgacatcagaagtcgcgatcggtcacatgagttcatttaagcagaagtcgggggctactgtcagggttacggataaggtataccctctacccttggatatacgtcatgtatcgatatggtatatctgcgtgtatacggacgttctctgtacacgctaaggaaattcatcacggagtccacagatgggaggattcctactcagatagaactgggtcatcactgtatcgtgtagggtccgatgtctccaagtcctacttggagaccaactgacctgcggtataaaagggatcccccgggaggacctaaggcatcgaatcctaccgccaacacatcgaccacagcctatgaaaccggagcctacaggagccaaatcgctgggtgatctagtcgaaccaactcgactacgatctcgtcggtatcatcaagttccactattccctttgtaatatgtgatttctgtcatataattccatatcaactggattagggctattaactactaaggggcctgaaccagtataatccctgtttttgttgcttgatgtcgtattacgtagattctcgtactagcgtaccttaataccctctatatccggtctacgggtatcccccgtcgacatggtgtatattatggaggcacctacaaatccctattttcttttgcaaaaatcgggcactgtttcaccaagtagatcggaattgtttcactaagtagatcgaaaatttttaatattttaaaaaaactgaaacacaaccaaatcaccttgtgaaacattttgctacaacgtacgaaacaatggttttcaaaaaaaatcgggcgttgtttcaccctatataaaaataatatttcagcaaatagtgaaagaatgtttccattcactgcaacatttgatctatacatagtgaaatattacgagtatacttgctgaaacattactagatgaacaaaaaataaaacggatttccttaatacaacgtttccgtaatatgcggatgatttgttgtaacggcgtgtgtggtggggtgcgcgtgtgtgtgtgggagggggggggacagcgcagaggcgcgggcggcggcgggcgcccgatcgctgccgttttcagtatattatctcatattaggttaaatatatagtattatctaatttctacatgccatctaagatctgagagacagacttaattaaaattagaataatgcattaacaatgttagtgtatgtaccgagttgcgtccacttgtacgtgccaacccatcgtgtcttgcactttggaatgcaggaatttcacaggaaatagttcggttcgtccaaattaaatttccctgaaattaatttctccaatccgaatatatagggcctaattatatatgctgaacgagatgaaccggccggtaatggcgctggtcagcagtaacagattggtaagatctgttggaatgcgcagcccatcaatctctgcgatttttttttccttctccagcttctcacgtggccgatcgacgatgacgtacgcgtatacgcctgcatacaatgcatgacgagattttcaccagaaggagagcctagcttagctagcagctagatagctagattatcgatctactggagtagctaggacggcgacggccggccaccatgtgcgtacgtgcgttgtgtctcccgcggacagaccggtaaaaacgacggtagagtgagtgatgagtgatcgttgaggttgacgagccgagtggggtcgtaagtacattttacccactccaatcatttatttaagagtaaattttactttggaccatatttattgaccaaaattttacattgggttagggctagactcatgttttcgcttaacaccacgtataattaccgttctttgaactttggacctgattttatagttaccatcacacgagttgttatctaggtgcttagcattttacaagaaacaatgatatggaaatttttgccatgcaaatatgcttagcacaagaacaatgatgtaacatgttacaggatatcctatcagattaatgggacttcattactactacatatgaacattcacaacccttatactatagacaaaattggagaaatattgagtttaagaactatttttttagaaaagatattacatgttttacaaacccaactgtagtgttagtacaaattgttgaattctaagttttctaacacaaaaaagaaatgagatcagctctacgatcattatactatgtgtaatttgtgaaacccggtccaaagtgcaaatgatggtaactatatatggtgttaagtgaaaatataagtctaattctagtccaatgtgaaaatttggtaaataaaggttgaccaaagtgaaatttactctttatttaaagagagaatatcttatataccactagtctaatcccttttatgccattaaaaattagcttttcccctatataccattgttcaaaatttgcacatcctctcatgccactcccgtatgttgaccgttaactctaagtaaaaaagatacatttgcccttctgaatataggatatgtctaacaactcagaagggcaaat

SEQ ID NO: 19780 - DNA, 1429 bp, Oryza sativa
ttttgaataagacgagtggtcaaacgttgtaaacaaaaactcaaaatcctttatattatgggacggagggagtagtgggtcatatgtgtctactctgtggcaataaggaaaggaagtcccctgaaagaaaaaaggcatttgaatcagtttcacaacagtaggtaggcatttcaatcagtttcccaataacagtagttaaaccaaaatttacagaggaaccgtctccacaggttaagttcacacggcacttaccagccacctctcctagaaaaataatcacaatccagagacaccgcaagagctagtgcaacagccctttcaggtaaagtcaactggcgaacaacatgcagttcatcgatctgtgaccatcatttgtgacatggatctcgatcaggtaaatagcagttaagtaggcaagctgtgtgtggactgtgaagtactaaaatgagaacagcacttacatctgaagcgagaccaaatttacggtttagtcctgcatcaccaaatcgaattgcatactggccagcatctgtgaagagctgcagtgaaccaaagatacattcagtccttttttttttggaataatgatacattcagtccttaaaagctcagtcccattatttatgcaggctagaagtagcagtgcaacaaatgaaaaaaatgcactttgaaaagatgtggggtgtggcatctgccatcagctgcatcaaactgcacaaatatgtggagtcaccataaagcaaattcaaattactgcacaatgagtctgtcctgtataattgacgagttctgtaaaaaaacactttaagcaatgtaaaaaagcaacaccgtcatataaatttggaagggcagctcttactatcaatctgtaaataatgaatctatatgtatctagtttttcttgtcagataagcatggaatgcccaccgacataaaagaaaatgcatattatttgacaattctctactagaaaagacatttacctcaaaaccgattcccctccaattacgatcaatctgggctagtacattgtcatcctcatctgtgagagtaaaggtccagttccaaaatccaggattctcgaccacagcaaattgcctattcctaaagaacccaaaaggtggcagatcaagtgtcaggcagtaaagcaatactaaaaggtacacaaagaattgagtaatttgagtctagtcgaagagacaaggaaatgcagagatcagaagaccaaattaccctaagtacaggtcataaattctacgccagagatgccaacgtctgtggactacacctacctcctaaccaaattgaaaccgttaaacaatgtcagtacattcctgcacatttatctgggggcaaaattcccatctaaataaatttgcacaagcaagtaaagaagtttgcataccttggcattcacttctgcataaat

SEQ ID NO: 19781 - DNA, 2464 bp, Oryza sativa
ttaaagttggttgcagccttgggtttgacatcaggcttgactttcttgttgttctgggatgcatgagggttcttcttctataccatattggcactagaacctccctcaacctttttgccccggttgtcctttccctcgccttctcctcaacacccaaagagccaatgagatcagaaacactgaactcttgtctcttgtgctttagagaagtggcaaagtccgaccaagaaggtggcaatttggcaataatgccacctgccacaaacttgtccggcaactcacagttgttgtcctcaagttccttagccagcatctgaatctcatgagcttgttctactacagaacggtcatcgaccatcttgtagtcatagaattgctccatgacatacagctcactgccggcgtcggaaactccgaacgtggcctcaagtgcatcccacatgtccttcccggaaggcatgtgcatgtacacgtccactatgttgtgagcgagtacactgatcagtgctccatggaacaggcaatccgaagcctcgaacttagcctcttcctcatgagagagagatggttcacttcgtttgccctgtgaaacacagaagcattgcatcgctgtcaaccacaatagtgcacgtgctttccacctcttatagttagaaccatcaaatgcatgtggtttcagtgcagcagcaaagccaactaccgaaaatgacctatcaggtttttggattgttggaaatatggtcatatatcggcatattttaatccaaaatattaagacaataaccatggcatgaacaatgtggggtgatctagtgataacatgtagcataaccagtaatatgcttaaggtatcataagcatcatgcacataccaaggacgcaattgacttgcgactagcacgactaacagcggtatgaacgaatgagttaacaacaggagaaggacataccccgagaatggccctccgctggattgtgaggtagaattgcttccgttggtgttgacgttcgcaacggctccggttcccggcgcgccatctccagagacagcagcagcggcgccggcgacagatcaggctccggctccaggcgcagacatggtggatgagacaacaacgaacagagcagtcgtgcgggaagcactccccaaaaccctaatcacccgcctacccggtgcagatctcaggcgaaggtgtggttccggaggccctgctccttctgcgcgcaagcgatcagaagcgaggaagcgaaacagcacaggcgcacgcggaggaggaagaacaccagggagaggaaagcaagcgaatcattctgatcggactagcggcctccttagatagaaggagagattccgcaagttgcagcacacgcgtcgtgggatcgtgggatcgtgcacgcgctattacggaggcagtcgtgggaacgtgggatcgtggttgcaaaagaatagagacgtgacgtgacggcacgcacgcccgccagccacgcctcgcccacgcccacgccctggcccggcgcgcgcgcgcccgcgcgtgtggctttccgactcccacctcgaccggtcaacagggagcctccaataactccctatttaggttgagatactcctcacttaattcctaaggtggtattattatccttaacacttattatggacctttgagatttaatagaataaatcgggcctagcccaattattctaacaatccccaccaaatttcaaggctcataaaaaatgttctcaaggttgtgcctgtttgatatacctgtgttttggtggagactgttaagttgaacttccactaggatatgagctacatcagaccacaactgaacaatggactatgccttgaattgtcagtcttgtgtgatcaggtttcactcaaacccttgactggtactgggctgccgttcgcatcccctctgtttggagcatataagtcaaactccaggcctttcatgagtatctagagatcgcccaaacctcatagactgtgactagcagtcgaactcatataggtgtgttccttctgagatgttctgcaggtcaacatctctgcttgaaaaagccactcggatcacattaaggtatgagccatcctaccatgcagaaaagaatagaagtacatcatgaaaatgagcctttttcaagggtctcttctctctgtcacacaatagtttgtttcaccatctaaattcacgggatctccgatcacaatggacaggtttccactattgtgcaaccttaggtgggtatcaagcccatttccctcgatgcactgtctatcacattacatggtagccccttggtaaactgatctaccaaatttctagccgtttggacatagtccaatgctatcactccggagtttttctgctttctgacagatttcagtcttctcttgatatgcctagatgacttcatgttgtcctttgaactgttcactttaataatcactatttg

SEQ ID NO: 19782 - DNA, 6055 bp, Oryza sativa
agttgataattttctgagcaagtaacccagtcattcatcttggaacaacccaggttccaccatatggatacaaacttcattcaattggttatgtaacataaaattttctgaagtaatcgatctgataatacattctgaattcagtcagaagatatgaacaagagtacaagagtaggtaataatacgaatagagacatacctgatttgagcaattcattctgcacgaagggtgccatgaagaaattaaacacctaatctgcagctctgaacagaaaagatctttaattaaattaaacgtggggttctgcaatttcttaccggcggtggagaccagacgatcggggaggtggcggtgcagaggttgcccgccggggttgccggcgcagagtggagcccaattagctaataagattcaagacactcaatcaaatcactcaagtacttgaattgagttctatgctggcatttaagtgctcagagcaccaatgctatggagctcctaaataaaaaagcacaacattttcatgtgaaaaggcatataaatatgctagaacagtattaccatttatactaattatgctagtccagatcaaatcagtacagtgtcattatttgcaaagatcaaagcacccgtccagtcagtagagggttagtatatatatgtaaagtctacatagaagaatagaaaagtattaataagaattcagtggttgcaaatattttgaattcttgaatcatatagacaaatatcggtaacgagacactcttatttgagtctaataattgtgcctcatattttctcagatgattatcagtttgcagatccaacttgttgaaaaggcttagcagctttgacaaaggttaatgtagaccaattactgggaaagggtcttcagtcttatgcacaattaccgagcaaatcgacaaagttacgagaaatgtgaaaaaaataaacttcttatgagctgtattttatagctcaacagtagtacagtacttctgtgtaagattgactggataagggctgcaatataaggtcaaattttacatcaattaagcatttcacccagatcaagaccagtcctataaatctcaaataataacaagaaacaaccaaatgctggaaaaaatggaaaaatatttgacccataaatctgaaacaatgctggcccagttttagagggctatcggtatttccaatacaaagtccagctatgttggctttacagggaacaagtccgaacgtaaattatgcagttaacccacaataataaacatacaagtgtaatactatggtttccccaaaaagtgccctgtaaaatgccatggaacatatattcatcatttgggaaagcgaaaataaacagatagttgatatgtatgactgatagcatatgttcatataaacaccgatagcaccttgtacatattaacaatagcagaaacaataggtcaaactgtctttaccttcactgcatgggaccaacgaaaatggatttccagattgaaactacaaagcggtctttttgtttgaagctatgggaccaaaagtccagtgtcctcgatgcaactgtctgatgaactgacaataatcagataatgcagttacatatgaaactacaaattaagagctcacctcgtcgattggcactgtctatcagtctatggcacaagtactgctccagttaactccttcctagctatcctgcacctcggtagcgaactgcaggcctatctgcatgatcattcttgttgaagtgcagtgatgctattagtataactttatactgagattttggagtccttccatcaaccgattaaaaattgcaatatacaagtagaaaatcatgtttatttacctttagaacaacggtcatgagccactgatttaaattttctgaacctctcttccaatcttccaattattttttctattttgtcttctctctgtttttaactttttttttctcttttcatcccttatttttttttatgctccttcccctcccttaaggctggagctcgcgactcccatcctcttgcacacgctgcgtcgtcgtctcccagccacaccatacaagctgccgcatcagagctgtagctagctagctaggtggtcggcaggagcaacttgctaaggaggctatcgtcgtcgtcgtgtccgctcagcccgtgcatgtcgttgaagggaagcccagaatggggatgggcagcaggcggcgtcggggctcgtaggagagtaggtggagattgtgagctgtcatcgttttgctcagatctggcgcccctgagctcgtccgacaaccggtgcggcctggacgggaaggcggcggcggcggcttggagggcgagtcggcgacggggatcggtggcggcgaggagcagatcggcgcggtgttgacggtcgttatcgatcaatttcgaccgtaaatattaccaaaatagaggagaactagtgatgcttgcaatgcataaatatgttagaataataatattccactagtattaggtatactaacctcttgcagggaatgacactaaagtggaggagaatcgacatcaacacaaacaataaatcaatcagacgatgtcgagaaccagacttatgtatgaatggggcaagaacacagaaataacacgacacattgggccaaaattcacaagtctgcggagaagaacaatggagaaggccgccaaccgaaattgggctggattgggccggccccaggttcgactgaacctggtggttcggccgaacctccctcgcctccgttggcatttctggcaccattgctggggaagattcataatagagattacttgaactaatactttatatttatctctgtataatcatttactttataggctaacattggttgttttcacttttgttgtggaacacagggcagtgcatgactggtttcaacctgccagaaaacttcaaagaaattccagaagctttcttccggagcgtcaggacgcgagtcgttgctccgcagaaaactctaccgacagagaaaccagtcgtaccagcgccaccgaccttcaagactatggccagcaagactcttcgcgagttcgctgctccctctgctgacaatgtggccattgggcagcaggtcaacataggggacgtggatttcgacttgaagtccagccttatcacgatggcgcaggctagaccgttctgtggcaagcctaatgaggatgccaatgctcatctgcaacagttcctggagatttgtagcacgtataccatcaagggcgtcagtcccgatgccgtcaggctgcagctgtttccgttctccctcctcgggagagcaaagcagtggttctatgccaaccgtgcttttatcaacacctgggacaaatgctccacggcattcctctcgaaattcttcccgatgggcaaaaccaatgcccttcgtggaaggatttccagtttccaacagacaagggatgagtctattccggaagcatgggagcgtctgcaggaatatgtggccgcctgtcctcatcatgggatggacgactagctgatcctagagaatttttacaattgtctcaccccaatgtcccgtgatcacctggacgcggtagctggaggagctttcttctctaaaacggttcaaggagccgttgaactcatagagaagatggtctccaatatgggttggagcgaagaacgactccaaacctgttagtgaggcatgcacaccgtcaaggagacggaactgcttgctgccaagctggacctcctcatgaaacgtttggacgaccaagagaaaaggccacaaggcaccgtcaaggccttggactcacacgtcacgtgtgaggtctacggtggcacgggtcattctgggaatgactgcccagaaacccgtgaggaggcgatgtacatgggcaacaacaacgggtatcgtccacaaggaggtcaagggaggaaccaaccacgcccatattatcaaggaggtaacaataacggtaacttctccaaccagccctcctagaaggatcttgtttttgcgcaagctaaaactactgattcgctaagcaaaaagcttgctgccaataataaggtcctggaaaacataaatgtcaaattatatggctttgcttccgcatttcaaaatcagctgagctttaataaaatgatagaaacccaattagctcagttggcatctttagtccttgcaaatgaaactgggaggattccggggcaacctgactcctccattgaaaatgttaaggcaatcacgacgaggggaggtaagtccaatcatgatccgccgtatcctaaccctacaggaactgataggatgtcaaaagaagcgtcatctagtgactcggctgacaaagaggttcagccagagaagacagtgccgcatgagtattgcgacacacggttgctgccattccctcagcggagtagaaaaccgtcagtggacgagcagttcgctcgttttgttgaagtaatccagaagatccacatcaacatgccattgttggacgctatgcaagtgccgacatacgcccgttgtctcaaggacatactcaacaaacaagagaccgctcccaacaacggaggtggtcaagctgacggaacaatgcagcgacctgatactccacaagctcgcggagaagaagaaagatccggggtgtcctacgatcacctgctcgatcggggcacaacaattcgaccaggccttgtgcgaccttggagccaatgtcagcatcatgccaaaagacgtttccaacaaacttaacttcacggtgttgtcactaacaccgatatgcctccaactggctgactcgtcagtctgttacctggcagggatagcggaggatgtgccagtcaagatacgggatttcttcattccggttgactttgtggtgctggacatgcacacagggaaggagacgctgctcatcctggggcatccgttccttagcaccgtaggagccaacattgacgtgggaacggggagtatccgtttccatatcaacgggaaggaggaaaggtttgagtttcaaccgaggacggaacaatgctccatggttagaatcaagtatgggccaaacccgcagaatattcaagtggtcgaagtggagccacccaaaacgaatagcctggcggaattcatgtagaatttccaggagaaggaaacaacgatgccaggaaccgttattgaaggacaccggtaaaatcacctgtaccggccaagaagttagagcagccggctcaaaagaagccgtcttccgcaccgaaatcaaagaaggtgtggaaggaaaagccaaagacgcccgctccatcacctccggagagcggtggaaaatccgcgcactgaaccgaaagaaggtacggtcctacacgtcggacctaaaacgacgcgatcttcgccaacaggtaaattggtatgtatccgcatatttgctttcaacaatttgaatttttgcacaatcacatgtttaaatttcaaaattgcatttaggattttgaattttgaggaaattcttcaactgaatttttcagagcaaaccaaaataaaattttcagcgaaaattcactttgccatgaccacactgaccgttcgaatccaatggctgaaagtggggccggctgggcccaccaggggttcggccgaacaccctggttcggcggaaccggccaggcaatggctccctgccactttttgcaaggtaacggctagtgggtcccacatgtcatttctaaccgttgtgggcaccctaaaaaagccagccggctgggagagggaattccatcccatttcaacacattttcattccctctccaaagtttgctctcaagttcattcaagctttgatagtttccctcaaattcaaatttttagttgcatatatacaagttgctttagtgaaactaaccggcgggtgaaactcttgtcattcctaacccccgccgagttagtccgttcttgcttcattatgcagaatgaggaggcgattgtctcgtctgttcaaggggtccggctcttcatcaagtcatcatgacaggtccggggtgcaggaa

SEQ ID NO: 19783 - DNA, 1139 bp, Oryza sativa
cctgcagcccaccaccgttttcgccactcgccgccctctctccccgccggaatcgagctcgcgctgtcgctctctctctccgccgtcgccgccgagctccggtccgcagccgtcgtcaccccggaccacctcccacctcggcgccgcctccttcggcttcgccgcatcctcgccgacctcgtccacctctccgtttcggtcgccgaccaccggagcaccgtcgaccccgtccacccgagccgcgccgccgccttcctccgctccggtcgccatttccgtcgtcgccgtcgacccggggtgagccgtggaccgccgcttcgtttccctctttccctcccctctctcagccgccgctccgccgtgcctatggccgccgccggcgaccataggggcgcgggcgcaccgcctcccgccgctgcgctggcgtggcctccttcgggcgcaccgagcggctgccgcgtggggcccggccgtcatccgcccgctccctcgggtgcggctgacgtgtgggacccacggcgccggccggtgtgagcccgggtgcacccggtccaccgtggaccgtgaggctgccgcgtgggccccactcccgtggacccggtccgcgcgcccctcccctcggctgacgcaataaaccctttttaaattaaaatttaaatgaagaaattcgcaaatattcatttaaagagcatataaacttcaaatgaccataacttggccatttgaactcggaattggaccgttcaagtctctaatttttccttaagaagtcaagaacccatttttgtgctttgttcctgcttgttatatggagtttattagagtaaaagccttttcttttccgttggtcgtgtagacgctgcagcttcggaagatccgctcttcgtggaagttgaagccgacggttgggaaagcgagcaaggcaagtcacatcatccttgaacatattgaatcccagtttataaaattatgttgatttaaattattgcattatcgctttatttaaattcccgcgttatcactgttttatctagccatgcctatttacctttgttatgaccttattattgttattgttattatttccttgttcaccctagaataaacaaaaccccaactagtgggcactctactcatgg

SEQ ID NO: 19784 - DNA, 5524 bp, Oryza sativa
tggttgaacctttagctgacttcgactgggttgtggcacttgatgatggggcttcagatccagaacttctcatagttcgtatctttggcgtcagcctcatacaacttacccacttcatgtcacgcgtcaacactagcttgtcattactaggataccatgcttgtcatctacttctaagttgccacaaactgcctcatattagttttcctggtctccgggtgctagctacttctgctatgcgatgcgagggtcaataattttcgcctttcaattatgtttctcaacagagtcaacttatcccacttgacatgctttgacgcctttccagatgactttactgctggacttgttattgtttgatcgttaccctgccaaatctgaagcttcgctgttagatgcgattttaatctgacctctatagactatcttcgaacatatcacttggttcataactgggaatagttcccatgaacagacaactcggattcactttctttacattcagtttacttcctgctattctcttcatgttgtcattatttagcattcaaagtattccttcacacattcaaccctgatgtattcttttcagatttctcgtatcaatcacctttcgacctacttctttgcccgacaataaacacctttgctggtatcttctatcagtcacctttggaactttgtcaaccaagtactcttcactccgagagttgtggatgcttctggtgacgatgtggtcctttggtctgctgcctttcagtgaaaccttgaagtgttttcgccaaaagctatactgactgtcattgcctttgatccgaaaaagacatgtctgaaactctcagtccaaacaaatgtctctttggttaatcgcttgattttcttttccatcatcaggttggttattaactcgaggttagaacatggttcctctgaaatgagaccctaggtctcctttgacagtaaacaattatacacataatcccatatcagcatcttccgaaataatcctcatagaacttgtttttattacacatgtctcccttattacatgaatgcaaggccttgccttaaacaaaaagggaaggtgcttaacatcagtacattgcatcctcaacatgaatcttccataaacataacaaactcattgtttataatcatgaatgtatttatttattacatgattgctgcaaactcacgattacacaatgataagtagcgaactgaaaaccacaaacgtggctactcattttgattctggagagatatagctggcattgtcctagtgactgcatccttgattggttctgtgatgatgtgttaggactgcatattgctatcattcacaggagaagcttccttctgattgctatttgaagcagataacggtcttctgcttggtatcgcactcctgagattgattgcccttcgctcggcctggagtaggtcggggagagacacaacttcttccatcgacgacaattctttgctgaggccgtcggtgcagagaatggttggtgttgaaggtattattgctatgatttactgcagagtcaggtgcagcaggaggagcattggtgctgtggatgatatcgtcgaggttgctgttggagctgactagctgatgagacaatcgtagggttgttcgttggatttctgcggtcttggtcaacaacacactgagttggcaatccttgggcacatggttggtaccttcgcacagaaaacatgtgaccttgcgggtgggacattcacctggtggatggtcttcttcacaatgagggcagagtgtgagacacctgctagcaatgtgtccaatttctccacaacgggtgcatgcctttgattccatctcttcctcgccgagatgtcggggagactcatcttcaacatccgaggagacttgatctgacccttcactatcagatactctgccaccatggcttaggaggtgctgggtcaactgtcgtgcacctcggaaggtatttcctctttgacgtctaggaatagttatccctgctggaggccattcggtgctggtaatagtcatcttacgtacttcttcttcagttcgcatcggtgcttttctcttctgattcttactcttcttgcctttggcttgcttagtacgtgaccccacgtggtacgaaaggctaggaggaaagcaattcccgggattcaatggattctctccattgggctctctactttgcacactaggctgcaagcttgacttggtgcgaggaggctggtttagcgatgtctgccctgttaaaccaaaggaaggggcttctttggcatatacccatggacaattcaaggcatagtgtccttattctctacaatcatgacaaaaggggacatgctcttctggcattggaagctcattgatctgggtggcaaatgctcgatcaaacacatactgattttggtcttgacttccaaccaatggtagctgggaactaagcagcatgcttggaatggaccaagggtgtgccctggttaactctcttgaggccagtggtggattgagttgaaaacttgagttactggaggcataccctctgacattctttcctttttctctgttaaacatctgttacagggattgaggtgagagaggaaacaagctaggaaagaatagaccagaactagagacaggaccttaaaggaactaactcttcttgttgatgtgttgtttgtttcacttattatgcaagttgattaagcaaacaacctagcatggttacatcacaacccaccgatgcaaaccacgcgctacacacacaagcaaggaacacacgactaacaacactaccctatagggtggcttaggttctgcgacgggttctccaagatcttcactccttcacagctggcttcactgcttcctccacttcgctagcggatcctgcagtcttccggagcttcggcgaacaactgacgatgtcttcttcttcactgacctgaccatctagtactagttgaaatttgaagaaggaagaaaagggtaaacattttgcaaatagcataggggaaaggaggaaaaaggaactttcgcaaatagtttcatttataaaatatgtccttaggttttatccacttggcttatcatacagtcaagatggctctgataccagcttgtcgcgaccgagaaaatttgcattttcccgaacgctagtgtattaatccccgtcccagaaaaagccggggtacaccacacaaacatgatataaaagacacatctttattctatcgataatatttacattattacaaaggcacttcaggcctggcaatcaaaaataaacagcagcggactagcgggcctacggctccatcttcacaggcgctcaactggggtataagccaggactccacctaagacatcttctccaaagcctctcttactgaagaggggaaagattgagcaagagtgagtacaaccacagtactcagcaagccacaccggagatgcataattaatgcaagggagtacaaggggataattatataggggttaagttttgcagtaaacagcatttaaaagtcacttagttgcccaaagccattttataagacgatcctagagctacacagtattattaatcaaggccgtgaacccccacgaacctgccttaacccaaggcctacgatgattcagaccgaactggcaacccgaccctgggtcccagctcgtcccaagccaacccaagccaaccattccacattttagttgttgagcaaattttaagaattaaaacactaacttgggtacattgctcggcttgcccataaccgagggcgcggctattcgaatagattatactctgatcagaggtgtacgtctttacccacaagacacatcttcctcacgtgtaaccacgtgccacataccaccacggtatacggacggaagacgtgacatagttcccaacccatcctagccataaacaagagtaccgacccaaccccacctacggccggaacccccgggacaggcaggcaggattgagccccctagcagcaggacaccagccctgtgccatgacatctcgactaccgggccgcagctcgtgtagccttcatttgccttagagaatgtccatcgacccccgacttcatccatctccaatccgtgtacttttgtttataaccagactgagccacaaactaagccttacccactagacatgtggaagtacggtagtgctttgcaacagaggcccgagcttaatccttatagtggccggggtgctacttcccacaactggcatgcacccaaaccccaccgaaaaaacaggttttaggggctttgaaagaggaagagaggggtatgtccaattccaccataagccaaccattccatagtatccaaatgatatgagaattcccaaagtctaaagttataaaatcacctaatgttgcctaattaatcagcgaagcatctacctaaatttatactagtggaaccatgaatagagtacccactagttggggttttgtttattctagggtgaacaaggtaataataacaatagcaataataatgtcttaacaaaggtaaataggcatggctaaataaaacagtgataacgcgggaatttaaataaagcgataatgcattaatttaaatcaaaataattttataaactgggattcaatatgctcaaggatgatgtgacttgccttgctcagagagaacggccttccgaaccttcggcgacgaccacgaaccacgcttcgggaacctccggaacgacgaaagctacacgaagcacacaagcaaagctacaagcctaaaaagaagcaataacaatacataaaaagaaagcacacggttctttaggttatacaaacattaggagacttgaacgggtcgattcagagttcgtatgaccaagatatgatcatccgaagtttaatgctgttgtatggagatttgcggattattataattaagctttgcaactttaaaacatgtgtaagcgctagcctggaaaagacaggaaggctgcgccgttgacatgcggaccccacatgtcaacctaaaggaccgcggtagaccgggtacacagagacggtccacgggtcgacggaagcggaccgcgtgtgtcaaccgaggcgagtggccgacaaacggagtccactagacaccacacgggctgcacacgtggaaaccacgcggctaccgagcgggcacactaacacggacactacacggtcaccacccgcacacgtgaacgactaccgacaccggtacacgggtaccggggtcgacgaccgcacaacgggtacggggcgacaccgaaaggacgaggacggggcagcgagaggagagagatccttaccaccacgcgacgaggcgcgggaacgacaacgacgaacgggcgcgcggagacagacgggcacaacggagacgaacggcgaggggacggcttcggcggcgatccttggacgaaggcgagacgcggccggcgcgagccttgccgacgcggagccgaggacgaagacgaggacggggctg

SEQ ID NO: 19785 - DNA, 927 bp, Oryza sativa
tcaagcgcttgtggtcatcgccctagtcttccgctgtttctcgtttgtctttgtgtgtgctgggccttcgccgcccatgtaataaattaactatttacgcttccgcttgataaactctgaaatgtatcaacttttggtgtaccttgcctcctgggacaaggaataatacacgcacgtaaggaacgcccgttgggttaattccggtcatgacagaaggcatgacaagcagcaggacaggtatcttgaagaagatgatggtggttttgatccgtattgggattgtgagtttttcaggttctgctggaatgaagggatgaggctgccatcaatagaagattgccctggatgcagtgataatgcaggaagttcgagccgatcttataatagaggaaatcagctgaatcagaaaaggttgcctgttcattagaggttgggtccggtacaccaagagcattttcaggatgaagatgaaggcagaaattcacagtggtgcccttctggtatttttactaaaaatcagaagagaagggtccagaggattagaaatagggagcgttttcaggaggtacaacaagagatcaaccatcggctgaagaagacaaagaccaagcaggagtggcgcgttaagagcaaagtgctgtcagccgatgagattgaggccgacaaagcaaagaggctagccagaggaaaagctattgcatcttcatcggtaaacatggtgttcgtcctgccagtagaatatgaagctaatcaagccgatgtgaatgatgtggaagaagcttctgctgattaattttgtcaccagaacaagcaatttttgagaaatcagaggggacatagaatcggcatctcaagccattgtatgttaatggatttgtcaatgggaagccgatgtccaagatgatggttgatggtggggccgctgta

SEQ ID NO: 19786 - DNA, 5330 bp, Oryza sativa
aagatcctcctgcaggagcggagaacggaacatcgacaacttccgcgcccgagaaggatcctagtgcggccagctcttgtccttccgacgggagcacgagccgacaagaacaactcctgaggcgacgaggaccgggtcacaagacaaaagggcacgacctgcaaacttgcaaggtttttctcgacgtagaagctgaaatccgcgcctgcaaggagcgtggaattcaacatgcgcttccccaactcgtgatgtctattgccccattcacaaggctaagactcacgatctatcaagctgcaaggttcttctcagtgccatgaagacgtcgctccctaaggtcccgcagtcacgaatctcttttagggatgcagacaaggaacaaggtgcggcgactacctcagatcggttcgttggggtaatcgatatcgatccccacgagacatctgtcctacatctactcgaagattaggcctcatcatcgacgagtacgctacgtgacgtgtacgccatcgatgtaaccggcacctctagaggcggcaacacggaaacggaggaacaattggctacgccagcccaacacattagagccatcaatgcaataccgagggaaaccccttacgatcccgttctaaacgctgacctcgatcagtggacggaacgactacgggaatcggtggccaacatcagtaacgcgttcgaggaggccgctgccagagcaccctcgaaacaaccgctgacccgcggcgctgacgaagaactgcctgatcagcgggtgtcacctcatcaatctacccctccacctcgcggtgctagcgatctccgcgaccacctaaatatgcgccgagaagcgcgacacacgcaagacaacgaaaatcgttctcgacatcgcatctcttcgcaacatcacgagaacatagagcgacgtggacacccgagcggaaactgagaccatgatggtcgccacgaccgccgcgagcagcggctgccaggcgatgctagtcgaggtaaacgcaacaacgacgatagaggtcgacgccgggacaacgatgattggtgacgacgaggttcacgggaacccgggcgcaatccctgaaaccgtaccccggagccgagcgactcatcatcatcatcgtcatcggacagacatccacggcgagtgtatgatcgccgacaacccaccgcccctggcggcgggtgcgtggctttcactcgtactgtacgagatgtccggtggcctaagaagtttctaccgggagcaatagagaaatacgatggaagcaccgaccctgaagaatttcttcaggtctattccacaatactctatgctgccggagcagacaacaacgcattggcaaattacttgccagctgcgttgaaaggatctgcgcgttcatggctggttcacctcccgccctactcaatttcttcgtgggcagatctgtggcaacagtttgtcgcaaacttccaaggaacatataagcgccacacgatcgaggacgacctaaacgcgttgacgcagaattcgggtgaatcattgagggactatattcggcgctttaacgagtgcagaaatacgatccccgagatcactgatgcttctgtaatccgcgctttcaagtccggcgtccgagatcgctacacaacccaggaattggcgacaagacggatcacaactgctcgcaagctgttcgaaattgtgccaaggacacacctgagtcaagcaagaaaaagagtcgcaagaatgggaaacggaaagctcaagcggagatcctcgcagcaaagtacattgacccgcccaagcatccagacccacaaggcgacgatacgaggaaaacatggtgccctatacacaagtcggacaagcactctttagagacttgtctcgtcttcaaaaaggcactcgcaaggcaactagcgttggacaagtgcaagcgagtacgtgtagtcgagaaggccgccgaagcggctactcaggactcagatttagcataccctgactccgacctccatgtctcacacatcttcggaggttccacgctgtactcttctaaacgggaatacaagaaagtggagcgcgaagtttgttcgacatggcagggggctgcatccaagatgaagtggtctgaacagaagattgagttctctgaagcagaccaccccaagactgccattactccaggacgatatccgatcatggtcgagcccactattcggaatatcaaggtagcacgggttctcatcgacggtggcagctcaatcaacttactcttcgccagcacattggacgcgatggggattccacgaagcgagttgacgcccactgatcaacctttccacggaatcactcctgaatcgtcgtccaagctattgggcaagattatgctaccagtgaccttcggtcaggcaaacaacttccgaacagagcagatcacctttgatgagctgagttcgacgcaacgtataacgccatcatcgggaggactgcactcgcgaagttcatggccgaagggaacaatcactattcagggcaacgcgaagctagcagtacagtgcgacaagcgtgcctcgacatggtcgagcaaactcccaacccgcccgccacagctgagccgcccaagaaagtgagcaaaccaacaagacgccgaagccagacagcgcaattaagatcgttccgctcttcggggcatcactggacgacaaataggaactcacggtcatcaccttcctccgcgacaatgtagacgtgttcgctttgtagccgtccgacatgccgggggtccccatggaggtgatcgagcacaaacttatggtgcgacccgatgccaagccagtaaaacaaaaactgcggagatttacaccagatcggaaacaagccatatgagaagagctcgataaacttctcaaagccggcttcatccgggaagttctccatccagagtggctagccaatccagtcatggtgcacaaggccaatgggaagtggaggatgtgtgtcgatttcaccgatctcagcaaggcgtgccccaaggatcacttccctcttcctcgaatagaccagttggtggactcaacagccggttgtgagttgttaagtttccttgacgcttactctggctaccaccaaatcagcatggcgaaagaggacgaggagaagatagcattcatcatgccgtttggtgtattctgctacgtcatgatgccgtttgggctaataccgctggaaacactttccagcgcacggttcagggggcgctcaatgaccagcttggacacaatgtcaaggcctatgtcaacggcattgttgtcaagactaagaaaaacaactcattgatcgatgatctccgggaaacgtttgacaacctccaacgatatcgcctcatgctcaacccagagaagtgcacgttcagagtaccgtcaggcaagctccttggattccttgtctccggaagagggatcgaagcaaatccctagaagatcaaggcaatcgagaacatgaaatcgccgacaagactctaggaagtccagaagctaactggatgcatggcggcactgagcagattcgtcgctaggatgggagagcgaggacaacctttcttcgccgtgctgaagaaacaagacaaatttgtgtgcacacaggaagccgaagacgcgttcatcgcactcaagtgctacttgtcaaatccccctgtacttgttgctccccaacctaatgaagaattattcctctatatcgctgccacgccatattctgtgagtactgtcattgttgtcgagagagagaaggtgcaaagacaggtttattacgtcagcgaagctctacatgacacaaaggcacgacgccgcacgacagggacgctacgctacacaccgggggctttatccctcacccacctggcgtggctcgacttcgcccggggcacacttagctacttcgcctgcgatgccacaccgactcaccacgggcttcgcctccctcgtcgtccgggtgctctacaccgacttaccacggactcgggggcttcgcttcctcgttgtctgggcatttttcgccgacctcaccatggactcgggggcttcacctcccgcgtcgtccgggtgctctacaccgactcgccacggactcggaggcttcacctccctcgttgcctgggcattcttcgtcgacctcgccacggactcgggggcttcgcctcccgcgtcgtccgggtgctcttcaccgaccttgccacgggctcgggggcttgacacccctcgctgcctgggtactactcgccaccaccaagtgatccgctccccgcgcaggatggctacttcatcgccgaccgaacgcttgcaccgagccgaccgcatacaccgccgccgggtgatccgctccccgcgcaggatggctactgcgttgccgaccgaaggcttgcacctccgagccgaccgcatacgccaccaccgggtgatacgctccccgcgcaggacggctactgcgttgccgaccggagccttgcaccttcgtgccgaccgcatacgccgcctctgggtgatccgctccccgcgtaggatggctactgcgttgccgaccggaggtttgcaccttcgagccagccggctacgctgccgccgggtgatccgctccccgcgcaggacggctggacgtctgcatcgctgcctggtgacttcctccccgtgcatgacggctgcaacaatttccacctggcaatgttgagatgagtactcagccagtcttgtctccaccagatggcttcaccaacctctgagtcttcatcaagcaaagtactcggaggctactgtgggatacacggtacccgggtacccaaggagaggactttgggccatacggcataggttgggccaagagccctaagcccatacggcatacatgtaaataaagaaagagagattcccgggataagatataaatctcggggatcatgcatatctttataaatagaatagggacatccagttgcaatcaactagatactttccttgtaacccttccccctcatcctatataagagggggcaagggtcctgagaggagaggccggatcgtctccacgaggcttcttcctcttctttgatcattttgactagagacagagaaaaacacacactggacgtagggtattacctcatctcgagggcctgaaccaggataaacacctgtgtcaccatctctccttgatcttgcacacctcgtaaaatatattgccgatcatagaaatcgacacaaatgtcttcaaaagatttgagatgacaacaaaattgagttaattgtccataaatttacatatttcagtatagccaaagatccaa

SEQ ID NO: 19787 - DNA, 3250 bp, Oryza sativa
cctgcaccccgaatgcaagatgggcagatgtcgccatcgatgcatgagagcacggcgacaacgagagcgagcggtgggtcgttgtgcgcgacgaggcacgggacgtcatgcgactaggatctcccaccagccgccccgcccagctccactcccgccgcttgttgcttgcctcccacatctggggagagaggggagaagggaaaggaggtgcgctgcacgccggccagcctagaggagtcgaggagatagagaggaggtcgcaaggatctggcgggtcgttgcactcttcgagttcccaacgccgtggatcgccgacgtcgctaggctgttcggcgtcaaggcgacacagttctctgtttcccgcgtgtacataatagacctcgcacgccgcctccacggcgagcaccggaccttggaggacctcgtgtcagcgcccatggggtttcctccgtcgttgctgcttgccgccgtgtggaacggacgacgttgattgggaggcggaagagggcggcgatggagaggaccagctgtggaacgccaccgcgagcccctctagcctgctgcgtgtgcctcggctgcagcgggatgtggaacttatttgccaaccccgccgatatcaacggccaactttgtccagtccgccactggtaaaccggcattgcgggccggaattgctactgggcgagcgatcgcccagggcgatcggatccggatcccccttcctccacctggttttctttttttgacaccgtattactttcctattttaataaatttatgcacctatagttcgtacacctcaagtttacacatttaaagtttagagacccaaagtttataaatcaaaagattatatatccgattcaaatttgaatttgaattcaaatattttttatatatagtatttctatacatctaaagtttatacacctaaagtttatagacccaaagtttataagtcaaaagttaacatacccgtttcaaatttgaatttgaattcaaatattaatttatagacccaaagtttataagtcaaaagtttacatacccgttcaaatttgaatttgaattcaaatattagtttatagacccaaagtttataagtcaaaagtttacatacccgttcaaatttgaatttgaattcaaatattagtttatagacccaaattttataagtcaaaagtttacatacccattcaaatttgaatttgaattcaaatattagtttatagacccaaagtttataagtcaaaaatttacatactcatttcaaatttgaatttgaattcaattttttttatatatagtatttgtatttctatacataaattttttcaactttgtttttttattttttaaaattgtatggtgtactgtagtatgaagagaagaaagagaggagaaagggggagagaagggagcatacagggggagcaggtgggcctgtgatcgccgcccattagccgtcccccttctatattcaactcctttaatgattgggctaccacgtgaaaacacttagaccaagtcgatctgtcattatggaaaaaccgcttttgaaaccacccaaagagtcaatttgaactggtttttgaaattgtgcaaggtgttatatccggttttgtgattgagggatacgattcaacgaagcaagagaggagggagcaaaatagacttattccaatcaactaacaagcaattttgacgtcctaacatctggacgagctaggcccggtttcggacctcagatggcctcacaggccttacagacaaagcccacaagatcaccttgtaagacagcctggtttatgggccaccgtgtagtcatctctgggtaaaaatggacaattgtgttcttatttctgttctttaacttcagctacgattttaccttttgttttaactttgtgattttgtaatacttcagttaagattgtatccctattttttgaagtttttgattttgtcatttttaactgaagtttgtatgtgctcttgttaacatgatttaacggtgttcgtccctacttttccgaggacattatgattttgctccttttttttttacattaagcttcattttataaatgttgcccctattttaatacgaatttccacttgtttagtaaaaaaaaaactaagggatagagcaaactcaaaatgaattttgaccctacatagttagtcatcttaacggaatggggtaagcacaagcttcagctcaaatataaggacatgatcttaaagttaaaattaaggataaaatcgtaattggagcaggggaagccaccgatattatgcacatgtaagtgagctttcaatagaaaattaatgggattagatatatgccactggtttcctatatctttgagcgtgtgttagggatgtattcattagtgtatgaatgtggtgttgtgtgcagtggtgtgtgtaaacatatttgtatgtcgttcaattgttaaaaaaaagtaacaggagtagaaaataagggtaagaatgcaaacaagaaagctatttttttttggatggatcgacgacttgaacatgtgtgctagattgtactacctctgttttctagtagatgacgtcgttgatttttgaaacacgtttgaccatattgaaaacatttatgtaactatcttttacttattgcgagttgttttatcccttgaagtactttaagcatgatttatgtattatgcatttacataaaatatttaaataagacgaatgattaaacacataacgacgttatttattaaaaacggaaggagtaaaaccacaaagagcattgagagaaaatagcaacgatgttaccacgctgctttattgcatcacagtatttacaacaaagatacgtcaccacaaatccacatgaaaatatatacagcccatggatgatcagctgtcgttgacgaccctgcagtcgcacctgacctcgccgtcgctgggctgcccgatgttccccatcttcaccatcgccttggcgaagtcggcggcgaacagcgccgggttggcggcgtactgcctcaccagcgcgtcctgcgacccgccgttgaacagcacctggtcggagtggagcaggcctcgccggaccagcaggttgccgtagtaggcgttgtcgaacgcgttctgcgtctgcacgtcgagcggcgccaggttggtgtcgccgttgggtgccgcggcggggcacgcgcggcggcgcagcgcggcgaacgacgggtcgatgttggcgtcgttgtagatgtgg

SEQ ID NO: 19788 - DNA, 3273 bp, Oryza sativa
tcgcaccggccgagcggcaccgcccagctcggcccgcggagcggcatggacaagacgaatgtcgctcacacaccagctcgccacgcatgtcacgagcacgcgtcgaacactcgggtgaacgtaccagggcggtgctgtcgcgcgcggcgagggcgacgatgtcggcgcaggagacaacgccggggcagacgtcctcgacgttggccttgatctggtcgatgacctcgtacccgcgcacggagttgttgttcggggcggcggtcttctcgccgacgaacccggtcgccggcacgtcgtccagaaggatggacgcgtcgcagccctggaccagtttgcagatcgatcattaataccatgattaatcaataatcatccttgcaaagttgcaaacgttagaaccctaagacattataacgtggtgattaacaaattaatccagtttacaagatgattaaacctggacgaagcagtcgtggaagaagaggcggatgagggaggcgcccatccggcgctcggcctggatggcgctcgccacggtggcgtgcacgaccttctccaccgacgggcagctatctgcgtagtacgacgtcgacagctgcccggaggcgtcgtcggagaggaggaagaagacgagcaacaaccagcaatgccaagtcctggaagccatggcaccgtactccgtacacacagctagctagctagtgatatgatctcgatcgcaattaatcttaattacctatgtgtgattgaccaagtgctaattctttccttaatgatcactggaactctagctcagctaagatcagtagcttcttgctcttgtgattggcacgagctaagaagttacacttgtctagctatttatagtgtggctgagatcagatcgcatgcacgcaaaaaaggggtagctttccatgacgccgatggggggtcacaaacttgtggaaaaaaatgggcaagttctacgacctttcttcctccagttgacgagagcgacataggtgtatgtgccaaataaacttatcggctatgtatcgctcacacaacttcacaaatccaatgaaagtttacaacacatacatattatctggaggaaatttcgttccttgcatatatatcaccttgtttttgctcaatatatcattccatccatcgtcttgattaagctttgtttcatcctggcatatacggagtatatccattagggtttacttgtgatatccctaacatacctattcagtgagttggtgcagtgattttctttttcttgatcaaaatgttaaatttgaaagtttttgaatcacaaaaaactatggtattcttatcttgatcttttcaaaacaaattaaatttcaatctgtcacaattaaatcatatcggaattgaagcaaatttcaaattggagaaaagcactgagattgatcacttacaatatcaattatttcaccttgttttttaacactgaaattttaatatttgagtgaacccttacgatgattcgatgagggggagggggggaattgtcacttatagcctactatgaaacttaggccccgtatagttcccagaatttgttttcccaaaaacatcgtatcaaatctttggacacatgcatggagcattaaatatagataaaatgaaaaactaattgtatagtttgtatgtaaatcgcgagacgaatcttttgagcctaattagtctatgattagccataagtgctacagtaacccacatgtgctaatgatggattaattatgctctaaaaattcgtctcgcggtttccaggcaagttatgaaattagttttttcattcgtgttcgaaaaccccttccaacatccggtcaaacatctgatgtgacacccaaaaattttcatttcacgaactaaacagggccttagctaataagtggcacgaaaccggtgtaaattacgagcaccaaattttattaccaactacacaaaaaagttatttggattggctttgacccggtaaatttacagctgctctctgcctattcgaacagaaaataaattgtgtacttctcatatatttgtcacgataaaaatcaggcttgggccattaggagctcggtctcaacctcaggcatggaaaggacttttggcgcagcttcgccacactagtaccttccctccaccatcgggccctacgcgcatgcattggctcccccacgtccagcctcactcttggcaagacggcagggagcgcccacatcatcatcctccatgatgaattctagtcttgtccttccttgtaggcttgggcttgctgcccctacctcgatcctcttcctcttcccgttgagattcagataattcccacttcttcctaatctctacccgataaggcgtgatgagttattctttcctttgttagatttggacactggtaagctccataccgctagttcgtgttaggcaaatcacacaaactttcgctttgaaaagttcgagattaagcttgtagaatgttttgtggtttttgagctaaaagtctgagttataaagttgcacatattaccactgaaagtttcagaattatggttgtaaattcctgattttgaataaaaaattacgatattatatcgaaatttcgaaccacaagtagatagtttttttttaaaaaaaaattactagaaagtttcatttgttttctcaaaagttctgtgtttatattgatagtttgaaccacaagtagaatatttttaaatttttagttgaaagtttcagttcatggataaatttttttgtgattttgtataatgttagtttgaaccacaagtagaaagttttttaattattaattgaaagtttcagattttgaattaaatgttctgtcattttatattgaaagttttgaatcacaagtggaaagtttttaattttttagttgaaattttctggttttgaatcaaaagtttgtggttttatgttgaaagtttgaagcacaagtagaaagtttattgaaattttaggctcaaagttgaaagttttataattcgggttctctccggttgcatggagagtcaattgcaggacgaaaggatcgaaaggagcagcagctctgattcggataggcacgtgcacaactttctctcctagcacacctgcgcaattgaggagccccctcgaggtaagctctctttctcgtccactgtacattgcatgctgctaccgtttctatatcattgctctactacaataaatataccttgtagagatattttcccaataatatatagacggggtgcagga

SEQ ID NO: 19789 - DNA, 5969 bp, Oryza sativa
ataaaacgtgggagaaagagaagttgtgtaatagagtgttttcaatggtaaatagtagaataatcacaataacaacaacaataaacaaagtttatgcttctctgctgccatgaaaatagtgtttgcaatggtaaaaagtagaataatcacaataatattgtatatacggagaacttgtgttcatcaatggtaagtagtagaataatcacaatatttttatggcagcagagaagcataaactttttttattgtttgtagaaattcttgcacatccagatatagtttcacaacttagagtgagttcgaggagaaagggattaagaagattaggaagatacgtaaaacgagataagccattagcacataattaattaagtattaactattttaattttcaaaaatggattaatatgattttttaaagcaactttcctatagaaaatttttgtcaaaaatgcaccgtttagtagtttgggaagcgtgcgtgcggaatacgatgggctttctcacccaatcccccaggaacgaacgcacctttagtgtagcacatgataaacagatgttcccatttataatgaccttgcttggttgatccatcacttttcaacccaaggtcatatgtgtactttccatagcttacttattcatccatgtatatcatgtgtatatatgggttggtcacctttgtaaccaacatcaaagctgcgaatcaccatgaacatattaattaagcatgtttaatgccttaattaattacacttatataagcaataatccatcagctgctgttgacggccctgcagctgcgcctgatctggccggcggctccggtgagcggtttgatgttccccatctttatcatggcggcggcgaagtcggcggcgaacagcgccgggttggagctgtactgctgcaccagcgcgtcctgcgagccgccgttgaagagctcctggtcggagtggagcaggccgcgctgggcgagcaggttgcggtagtaggcgttgtcgaacacgttctgcgtctgcgcgtcgagcggcgccaggctggagtcgccggagcccggcgcggcggggcagccgcggcggcggagcgcggcgaacgccgggtcgatgttggtgtcgttgtagacgcggtcgcggaagttggcgcactgcgagaagccgatggtgtgcgcgccggagagcgccgtcatgtcgcgcgggctcaggcccttgttgccgaaccccgcgatgagcgtggcgaggtcgctcgacggcgccggcaggtcgctgttcgccgcgctgaggctcgccgtcgtcgagtcccgccgccccagcggcaccgcccagcttggcccgccgagctgcacgtacgcgcgtcgccgtcagaatctatggaatcaattcgaacattgtgtgtgtcggtgggcggcgcgtaccagggcggtgctgtcgcgggcggcgagggcgacgatgtcggcgcaggagacgacgccggggcagaggagctcgacgttgcgcttgatctggtcgatgacgtcgtagccgcggacggagttgacgttggggaacgccgtcttctcgccgacgaagctcgtcgccggcacgtcgtcgaggaggatggaggcgtcgcagccctggacgaagcagtcgtggaagaagagcctgacgagggacgcgcccatccgccgctcggcgaggagcgcgccgagcacggtggcgcgcaccaccacctgcagcgtcgggcagctcgccgcgtagaacgtcgtcgacagctgctgcccgtaggcggcgccggcggcggacgagaggaggaagaaggccagcaagcagcaatgccagctactcctcgaagccatggtaatctcacaaatcttaattaattaattatctatgagtaactaagtgttcttgcttaatcacttgagctctagctaagcttagctaagctgagttagctcagtagcttagcttacttgatgtgtggctggcacgagctgagaagtaacaaatgtgttgctatttatagtgtggctgaggttgcatttgcatgcatgcaaaaggggtacctttcgatgacgaaaatggggggtcaaagttaggccgctacacaagtggaaaaacactcgagaagttcaaagacctttctcctcctgttgacaaatgcaacactcatatatatgcagccaaatatgcttatcgtttatgtatcgctcagaaaaaatgcccaatggattgaatggaacaaaaaaaattgtttagataacacacatgttgttggcattactatttggagacgtgcgcaatagaccatgagtacagttcaaaatttacaggggatcagagaaaattatatagtccctctatttgtttttggaatgagattagttggttaaaaataaactaatcattatcatatattttggaatgtacctccagatagtaagtatctcaaattacaacaaactttaatgtgccttgagatattttctcaaggactgcaaaacttttctcttggaatgaaggtagtactacacatggatacactagcttagtagcttctgataaaaattttattatattcacacatttatctttggtctctatctacatgatgtatatatatgcatgtggtttgcataataggaaaaatgcaaggataacttcacgaatatgtgacgagaccaccactaggacttcaataaacccctaagcatggacaccaaggtttgtaattggttctctaccaagttgtatgtgtttcccccaaaatacattcatatgcattaatttatgcaattcataaagttcaagcgtggattgtgttcaccggtaaaaatcgtaatcaaccagctaatttgaattaagcttcgtgtctcattcttaggttttatctcggcaaatcgtggtttttaaagttatcttttcctgtgatcacgttcatgcatgttgtgatcacgtataccgatcgtatataaattcgcttaagagatgtgagaaacggattgatgccattaaatagccgtgatgagcacgtaggcgagacatgacaggatcatatatatccaatgtgaataaaagaataatattcaaaacagattgacagaatttaagatggttcgatcggtagcttggaattaaactacatttgctgtggatcgatgaatataggaggcaaggggctgtcgatcatgcaaattggacatattaattttggtattttcacaggcgctatcttacgtggtccgcgtgcgaaattgtatcttcgcagacggactgtcatcgccctccccctcctcctcccccttgccattttttagccggtcctttggcttcgagagttctacccgcctagaaaaatattttgccatcgtctagaaaatagtctttctagtagtggtggatgtgcccatcgtaattttggtatttgagatatgcccatcagaccacatatgagatacgagctaacgtaattaaccttaactggtcagggtcagggtcaccaccatttgtcgtcggagttggagcataaccaaagtagatacgactcgaaatctacataatttaattaggcttcaattttctatcaaacgaaggctgtgtttagttagatccaaagtttagatttggttgaaattggagatgatgtgactgaaaagttgtatgtatgacaggttgatgtgatggaaaaggactgaagtttggatccaaactttggatctaaacacagccgaaggttagcaattccgcagaaggaaacaacctctgtcaatatttggttttccagttctgacaccattcagctgagcaagtatacaaaattcagagaaaaaaaatttcgatcgggactcgcagcattttagggatggacggacgtacgagcagacacgagcatgtgcccggcgacgaccacttgaccaccctaattaattaaactggagtgcagttatacgggcttgatcgatcgaccaacgaaatacttagcttctgacgtgattcaggctggaaagtagcggtgctgatggtgatcgattttgtgtttggtcgttgacactttatttatacaaaacatgcatgcatatatatatatatagggaaactatatgtcaaattgtcaatcgtttcctactacgagcacatgcataactcgcgcaatatgcgcaataattaatactatcaagcacttggttcttcagacttttaggcgtactaataactgaacctcaactgaattctatacgcgcatagtattgaagagtgccaagtccaactgatcagtgacactcacacagccagagaagcatacatgcacgcagaaaggggaactattttattccacgaggcgatgttacttcgtttgctaaaaataatccaaacgataataaaaaattctgaaaaaaatttgataggactcatacaacatatatatacaactttataaaatcttagatttaaactcaactcacacgtcgagatataaaaaagataaatttatatataaacagtagcgcacgattcacatattaatttgtctttttttatttctcaatgtgttggtcaaatttgaatttgttgatttttagtagatcgatataaattactccctccgtcccataatcccttatattatgtccctatattatgggacagagggagtattttttattttttttggaatttattactactcactactacagaaacacacatagaagtcgacactataggtgccggaagtgttaaaaccgacacatatagaccttttcccacctccgcggtccgaaaacataaaaaaccaacatatttaagtgattataggtgccggttctgtataaaaaccaacaccagtactataagtgtcggtttttaaaaaaacctgacatccataaaaccgaactgagccgcacgggggagggagagatatttctagccgttcttatccacagcccacccacacaccgcactctctctctctccaccttctcctcctcttttcttctcttcaccgcactttctctctatctctctccaccgcagtttcttctcttctcctcttctcttcaccttctcttctctttcttctctcccggcggcggaggcggcggcaggaggagcagtggccgctcggaggcgccctccctccgccagattcggtaggaggaagggcggcggcggcccaacaacgccctcccctccgctgtagcgacgtgcggcggcgtcggcggcgtgcggcgggaggtgcggtgtccacccggaggcaccctccctctgccagatccagcgggaggaaggacggcgacggcctaacggcaccctctcctccgcggcagtggcgtggggcggtgttggcggcgtgtagtgggaggagcagcggccgcccggaggcgccctccctccgctagatccggcggaaggaagggcagcggcggcccggcagcacccttccctctgcggcagcggcgtgcggcggcatcggtggcggcggcggtgtatttgttgatctagatgtgatttgttgatatgtgatttgtgatttgttgatcaagatgagagctagatgtgtattgtttgatctagatgagttcatgggtttgagataattttgggatcggcttgacaaccgattttttttggctcatgtgcacttcaaaggtgccagttctaaaaccagcattgatgaccgaaagtcaacagtaccgtctcggtggtaccggttggaaaaactgatatctaaggttaattgggtgggggcatatgccgctagctgcaaacggtcgcttgggccatttaattgcatgtcagtttccgagtccgacgatggttgtctgttgctctgtagagaggtagctctccttccagctggatgccatgtcgactagctttagcctctcaccttcgtatatactaggcatgtattgctcttattcccaaatgtattccttacgttccaaaattaaaccaacggtactgcgcagagagaggacaaaccgg

SEQ ID NO: 19790 - DNA, 2327 bp, Oryza sativa
cggactgtcgtaaggaactcggcagttgttgacaaccaaatttggtaatatcggcatcggaaaagaagattagatcaaagtggaatcggagacggagatcgatttaggaacagagcaggaatcggctagagtccggatcggctacagtcaggatcggcagagttcgagtcagacagggctagctgatacagccgattccaagaatacgactcggtgtacatcatcgggttgagttgatatgcttcaagatgattgccacgcatggatagagtccttagaaggcaatcgtatctattaattaggatattttatgtaatttccttagagatatgtttgggcaaaagtctgccgcaaaggcttatggtatcttagagtttgttagagataagaagtcgtgtccactatggacatatcttgtaattctcgggtataaatagaccctgagccctatgtattttttgaacacacacgtttaatacaatttcggcgcatcgccaccctttttcgctttagttttatttcgacgagttcttgctttcgggttgagctgcatcggtttcgatcttcaacaagaggtaaaacttgttatggcgacttgtgttttcgggattagtgcttccatctttatgacactctaatcttgtttatgtaattcgtcaagttatcatatatcttgtataatcttcggtaatatcgtcatctaacctaccatcggctaacatctgttagtagaaggcagccgattaggttagatagcgacgttagtttggattatataagatatctaccactctatgaaacatctagcggcttgattgtctagatattgttcttcttttcatacttaatgctgcatctgttgagtttgatctattaagtcgtgcttagaatatcaatctctagcctgccttctggttgccgattagggtagcatcggggtttcagctgatcttacctgatttaactatagttatcctatagcatcggctatgctatgaacgtatttagttctattgttaatttgtatttcgatctaagtgatttatactatctcggcatggcgaccgatctatcccaatcacttgatttaagtatatatcgacataagggttatatattgttaatatctacagccgatcgagtagatttatttcttctttaattattcatgactgccgatcgatgtacgcatgacatcggcctaaaataaatgatatgtcatcggcacctagccgatcggctatcatttatggatttaatcgcggtttctttgtcttcgtttcttgttgattgtaggatcaatcaactggcacgctcatacatctgaaggcgagttttggaccttcactggagttaagcagatctcccaggcctcgtgttttctatcaacacgcttttggcacgcccggtgggaccgattagaagtcagaaaaccgttttcctcatggccgagaagccgccaccatcgccgtcctcggctagcccaggttctgttaaagagaagatccagcaattagaccaatctgacgttaatgagggtaacgttatgaccattactccggacaaattgacacctgatcagaaggagtttgaagcaatgatgcagcaagcacgaaaccagttcttgaactcattcatgcagacccgcaaggggacagtggtgcaaaagtatcaggtgcgagtagtggctgatgtccccgggaccagttcttccaaggatgcgggactgaaacaagccctagatggcttgggtcaaccgagcgacaaaggtgctacagatggatcggctcaggagaatcagggtgaccactcttaaggagtgcatggagttcaagttgatggcactcagggaccacagggaggaaatcttaatcaagatggcagtgcgtcacatgaatttttcaataattttcaagaccgggttgactatgctgtgcacaatgctgtaatcaatcaatctggggtattagtcaataccttgtcaaacatgatgaaggcgatagccactggttcaatagctgaacatcaggctgcaggcccaatttatttgccaagaggtacctttccaaattatcgtcctttgatcaccgatattcatccacctgttcaagcggttcctcccattgcatcatcaacccagccgatggcgccggtatcgatttccccacctgcgccacctgctccatcaacgccggcaccaggtcagctggttaatcctcggctgttgatgagagagcagccacaacatagtcggcaagttgcgaatcggctaacgcagcatcaggttgctgccgtgtttttgccaccacaatctgctgggggtgcag

SEQ ID NO: 19791 - DNA, 707 bp, Oryza sativa
cccttcaggaagttgagcaggaaatcaatcatcggctaaagaaaacaaagccgaagcaggaatggcgcgttaagaaacaagcttctgtaaccgatgaagctgtggctgatgaagcaaagagattggccaaagagaaaagcattgtgattgcgtcggttaacatggttttaccttgccagccgaatttgggatcgaccaagccgatgttgatgaaatagaagaagaatcggctaaattgattctgtcgccagaataagcagtctttgaaaagcctgagggtacggagaatcggcatcttaaaccattgtatataaatggctatgttaatgggaagccgatgtctaagatgatggtcgatggtggagctgcagtaaatttgatgtctgatgctatgttcaggaagttaggcagaaacgccgaagatctcatcaaaacaaacatggcaatccatcagaaaccaagggtgttctagatgtggagctgacagtcggcagtaagactattcctactacattttttgtcatcgatgggaagggttcttacattttgttgcttggaagggattggatacatgccaattgttgtattccttcaaccatgcatcaatgcttgattcaatggcaaggcgacaagatagaaatcgtgccagccgacagccaattgaagatggagaacccaagctattactttgagggcgtcgtggaggg

SEQ ID NO: 19792 - DNA, 1026 bp, Oryza sativa
  unsure (1)..(1026): unsure at all n locations
aagttagaatcttttacaccattattgagattgaaggccgattagcaatttacttggggggcagaacaacagaaggcgttggataatattaaggaatatttgagttctcctccagttttgattcctccacagaaaggaataccttttcggttatatttatcggccggtgataagtcaatcggctcggtcttgatttaagagctcgagggaaaagagagggttctattctatttgagccgtcggctcttggatgcagagactagatattctcctgtggagaagttatgcttgtgtttgtatttttcatgtacgaggttaagacattatctactgtccaatgaatgtaccgttgtatgcaaggccgatgttgtcaagtatatgttatcggctcctattctgaaaaggaaggattggaaagtggatattttcattgactgagtttgatcttcggtgtgagtcaccgaaggcgatcaaaggacaagctgtagccgattttattgttgaccatcgtgatgattctattggctcggttgagattgtgccatggactttattcttcgatgggtcagtttgtacttatggttgtggtatcggcttggttataatctcccctcggggggcatgctttgagtttgcctatattattaaactttatgcaactaataatcaagtagagtatgaggcagttctcaaggggttgcagctacttcagaaagttgaagctgatactattgaaatcatgggggattctttgttggtgatcagtcaattggcaggagaatatgattgtaagaatgatatgttgctggtttataatgagaagtgccaagaactgatgaagaaatttcggctagtaactctgaagcatgtgtctcgagagcagaatattgaagctaatgatttagcccaaggggtgtcaggatataagccgctgatcaaagatgttcagattgaagttgctgccatactagccgatgattggagatatgatgtctatcggtatttacnnaggatccccatctctgt

SEQ ID NO: 19793 - DNA, 1587 bp, Oryza sativa
ttcctgcagctggaatagtaggagtagctggttgttcttcctcttcgacgttatgactgtctgccgccgaaggaataaggttgcctgattctagctacacaggaggtgaaggaggaggaggaggctgtaaaaaacacaaatgttagacataatcggccgagatcagttgatgagaggattgataatatcttatggtggagccggtttgagagttggtgcggccgatttcttcctcacggcagttttcttcttctgtgattatacatctgtgagtaatcagctgaaaggtgaagtaattacagaggaaatcaaagagagatgcttactctcgaaaaatgagctggggcagaaggagttggaggagtctgcttgggtgaagccgatggtgttctctctgtatcgctcacttcggctgcagcttgatcaacgtcctcttcaatctcttcctcgtctagcgcttgttcgatagatggatctagggcaggcagatcatcagttggcttggttttctttgacttggttttcttcttgagagccggacctgatgtgtccacagctgatgatctggttttccttttcttgcctgcatcggatggttccctgattaagccttagagaagagccgcaattttgggggcatcatagccgatgaatggaggagatggtccacctccatttggaattagtcctggggcatattcgatatctttgccactattgctctggtgtgggggggaagattctgttgtctataaaataggagattgattaatcaggtgatgaatcggctgataattgttcaaatacgattaataaaataaagacatatctgagggacaacatctggaaataggtctgtcatgtacattgaagccggttgatggaatagatgcagcttccattcaccccaccatctatcgaagtttctactcctgaatcttgccaactctatattttcaatactgcccaatgggggtccttgaagattaagcagccgattcatcattaaggtagatgagatttaccctcgcattggatcttatcggcaaagaataagccgattggaagttggcccattccaaactgcctagcagagctcattggatgataaaattcataggagacttggatgtttcttccttgatgaatgctgacagtaaggatacatgggctgattgcagttgagaagatttctctgggtttctaatatctgtcatggttgatatcttcgaatctaaagtccaaaggatgttctagaagtgttgaatcttcatagaggaaccagactcgagcttctttttggaatccttcatagaagctgcaaaaccaatctttgagcatttcggctgatagctttgctcctgcatcagttggtgtggatgcatattctccgaaggatgtgcatctccgatgagtgcgttcttctccgtcactgtcttcaattggctccagtcttgggaattcagcttgtgttacagatggccgattgacaaacttcatgactaccaaattcagccaggattgcagtagccaccatgttccaccagctccgactattgagccgacggctaacttagcccatgcgtt

SEQ ID NO: 19794 - DNA, 6231 bp, Oryza sativa
ttccaccgccggcgagctcgccgtggacaagccatcttggagctcctcctctccatctaactagcaaaatggaatccccatacgccgtagatgctcaagccctcaccaatttggtcggaaaccctccccatcgccctagcacctagccacccgtgcccagccatggcggccatgctgtgccactcgcccccgcgccgtcctgcgccgtggcagccggcgggagatcgccggagccttgccgcacccttccctggccgccgtcgggtcgccctcggccggccttgccgtgcgcgtcgtgtttcccctgctgctcccgctcggtcgggaggaagaaggagacggaggaaggagaagaccagccgagccactgacaggccgcgccctctccttgcttttccctaagaaaattaattcggtagaaaaagaaaaggaattctgggtcccacctgttggtcactagggttatggattagattacggattaaaaaaaatcatttatgaacagtagccttttacaatttttcggatttattccaatttgaatatttaaactagcataacttattcgttttaactccgattcgagtgaaacttgaacctaaattcatctaaattcataagctttccaatggtatacaattaactatttaataaaatatatttataattataaattaattaatatcaaatgattagataatagttaacctaaatagtgtgccaataaataaaaatggatattgtacagtagaataattatctttaatatgttttgtcactgtagcaaccacataaattaattataatcaatgtttgaaattaatggatatataggaaaatattagtgccatttattaatctatgtccaaatataattaaaacccatgacttattagttatttaaatagagttagccttataattattaggtaagtaaaatatagatacacatagatcggtcctaagcttgtttatggcaaataataacagagctagtgtgattaaatcacctatatgaaattaatcaacgacatatcccatataatagcatatagtaggagaggtgagcaacccttagttaaccaagcagtaaatagaaactattcaaataaatgattccatatattaagatattgtgcacatatattgtacatcccattatagatatatggtatcgtattaatttgcttgttgcatatattaatttagagggagtatatgacaaacatgaatattagataaatactagttatacatcttgtcctcgtataattacagatcaactgtaaatttagattattcattgtaaaattatgtgatgggataatctgtaaccataatatgattaacctaaacaattctaacatacaaagcatgggtaattgttaaccttttataatttattttgacaagtgaaatatgtacataattaaaataaagcctccattaataaaataataatacaaatgattcacagtaattatttgaccgatccaaaatccatccggcaacagaacctctaatgtataaccgttctatttagatagatgcatgtgtaaccataatccttccttagccattagctagactgaaccaccatgacaacagaaagactaagaaaccttagctcttagcttgattagagtccattagcaagcgcgaataatatgagcaacctttggttcgacctcagcaaatatattttgtttgtgcatatttgattgttgcttgaatattggtttttctcgcgtattatagactttgtgtatcggttagtcgtgaggcaacgtctgcaacttccaggaggtgaaggttgatcaagattatatcgagaatagggattatcctgagcaggcaagtcatcaccattccttgaacatgttgatcccaattgcgaaattgttttgtttacaaataaaattgcatgtaatgatgaacatcctacttgtgattatgccatgccttgattattgtttacccttaaaatccttgtaaccatgattatttatgagtccctagtcaattatgacaattgcttagaaatgccattctagaatcatgcatactcatatttatcaaatgctatatgcttgggcaattacctttgggaatgtaattgagatgcggcatgtggagacatgagcgccacattgccatgatgttgatgacatgatttgtgaaaggagaaataaaattaaacaattgttttcgactggggcggacggaggatttgggtggtatctgggaaaggctagtaccgtccccggtcaattaaggaccgagccatgaagttaagcatgaaacgacccccgtacaaccgtacttctcgaatgggtatagacctagcggattagatagccgagcgaaggcagtatccctgcatagatggttcacccctgagtgaggcaggtgcgctacgatgggacagccgttgaggtagggccgagaggcgtgccctacatcggtgtcgccattggtaggactgccatgagtgtgtgagagagagaacttaacttgaaccataatttaatatgtgtgagacttctctttcccgggagcgccagaactcctcacactgctagaaacatggacgcctagagtgcatgaggatttaagttcatggagcgggtactgccaatgcgaggttatcgaaaagctttaccgtgacgcgtctcatgtgttgggacgaggctcatgtgttgggcagtcgcggagcgcgggtaaagtgtacatccactgcagtgtgagtaaaccaaatctattcgaatagacgtgctcgcggttattgagcaccgggacatgtattacacttggctagactctaaattcttaacctgtgtgggatgggatattgcatgatgatttttatgttgatggagccacttcctgagaggagggaaggtggacgtcctcagaaaaccatgacgactcaatggcgggaagctatccttgggatcacaatggatggtggacagaaccgtcgttgtttaatgtgaacactggtattaaaacttgatcagtctatgctaggtctcatgcttgtgaaaagatttgcaaaagcttgctttacgtaaaagaacctggagcccttccttgaaataccctctatcatatgcattgttgttgtggtggcttgctgagtacggttggtactcacccttgctatttatatatcttttaggagagtgttgaagagaagtccttgtcgatacgcttgcgtatccaacaagatgatcgaagtgcggtcttgttctaggtctcattccccagtcgactgcctgtggcatgttaaccgggcccttatattatttgtcttccgctgttgttctctgatagttgttggcctacttggccctaacgtaagtatttaactcttttagcctgaattcattcatgatatgttgtgatccaactatgtatgtgtgtaccaactactgatccactgattggtacggataaacacagaagatttccgatttccaaaatcgggggtctacattccgcccctcactggcgcccgatagccatcgtcgtcgttttccccaaatcgggccgccgtcgtccgccattgctgccgtcgctgaacctcgtcaccgcccccaataaagcccccttctcccctctcttcccttccactttgcgtgctgcacccggctaccgctagaatggtcatcatcggcgaccaaacgaccacgcccaccgccgccaggaaacctcgccgtgcaccgccgtcgtccatcaccttctatccctcactcgcaagtcgcaccgcaccacaacaacacaagaaaagggaggcgaacgatggagggagatattgcggcggcttcgggggtggacgcggcggcgttcggcggcatcaggagtggatacggtgtcgctcagcagcggccggcaacggggacggcataaggggaaggcagaggtggcggcgcggaggaggcgctgaagagagacagggagagggtgcaggcggttgcgcctgccgacgcaccgatggcgatggtgcgcgtgaggaagaaggcctgcgaagggagatgaagtggaaggagactgactagtgggtcccacatcgtttttcgctcaatgttgccatgttggcttgccacgtgggtaaaagtggcaaatagttaagaagccacctcttaagaagggaaaaaaattaagtgcaaattcaagaggggtatttggataattgccaaacgtaatagtggcaaatagttaaattccccgaccaggagagcacgatgtcgcccaaatccctgtccccaatgtcgccgccacggcaggggcctttctctctcatcgaccaaactgggtggtggagaggctagtagcagatggtggagaggctagtagcagaaagccacaaccagcattcgcgaggaagagtgaggaggagtcgccggagtcgcggtcacgtggagtctaatggtggtcgcatcgctgctcgcggagaaaccggagtgatcagtgagaagaggaggaggagaggggtttaatggcggaggaggagtctctttagagcaagtttaatagtatagcatactactagctctaaatcatctatagccaatgtagggtgtgttcagtttatgccaaaattggaagtttggttaaaattggaatgatgtgacagaaaagttaaaagtttgtgtgtgtagaaaagttttgatgtgatggaaaagttggaagtttgaaaaaaaaatttagaactaaactcggccgtaatagccaattcatacaatagttgcttactatactattaatatctggtcccacctgtcatacacccattacgtcttggagtccgtactgcagcccgctgctcttcttttttttttcctttatctctttaaaatatctttatctcttagcttttgtgagaaggaaaaaaaaagaaccgagagtcggcggttcatccactgcggttcgtgcctttttggatcatcggggactggaccctttgtatggggaaggcaaagaggccgtcgcggtggtgtgtgagtgtgtgaccgtgtcgagtgtattggccgcgttgaaatgattttactactgccagtttttttttccaaaaaggaatccacacaaggcatgtcagcaaaaaaaaaatgatttcactatgttgcaaatgttcactcatttacatctagaactacaataaaaataaatatataatactagctaaaattctagacacatatatatccagattcgtagttagtattgagtttttttttaagacgaggcgtaaactagagtctatattaacatcatgtctaaattttaaaaactgctactatttatataaaatatcgattttgttataacattagttgaacatttcgctaaacaacattagttgaacatttcactaaactacaaccgtagaaaataattttatcaataaactacaacattaacaaattatgtacgcatgacaggcggctgcgttagataggatgggttgggaacccatccccttcccacggaaaatggagtagtccattagcacatgattaattaagtattaactattttttaaaaaaaatagattaatttgatttttttaactaacttttttatagaaactttttgtaaaaaacacaccgtttagcagtttgaaaagcgtgcgcgtggaaaacgagggagaggttgggaaccttgaggttcgaacgcagccgttgcaaatgcaaatcttacttacatgataatagtttcatcaaaataatagttttgagaaaataatcatgtttacaatttactccgacatctataatgaaaaaaaaaagaggttggtgatctataataataggattataggtagaatgtttgtcttgtctcttaccccctccatcccataaaaactaaccagtatcaaatatgacacaactatgaatctgaagatatatatgttcagatttatagtactaatatgtgtcatatcatatcctagattcgtttttacgagacgagggaagtactactatgcaaaatgtactgttagcggaaggaagaaaggctcgacccaattatagtttcgtctcttatgacacttccatatctacagtactctcgccgtaccataatataagagatttaaggtgtatatgacatatcctagtacaatgaatctggacaggctgatccacccaaaatcctttatattatgcaagggagggagtacatgccatatatatatatatatatatatatatatatatatatata

SEQ ID NO: 19795 - DNA, 4560 bp, Oryza sativa
tctacatgcatgcaagatggcattcgtgaactgtcgtcctgttctctgcattgatgggacattcttgacaggaaagtatcggggccagatactaacagcaataggggtagatgggaacaatcaggtattgcccttggcatttgcttttgttagagtgagaataccgacagctagtactggttcctgaaattggttaaaacaaaagttgttggtatgaggccaaatgtgtgcctgatacatgataggcacgctggcattctgcgagcgatacaagagttgcagtttgggagtatggaacgaggataccccggtgtttgggaagatgtacagagtaggtggtgcatgcgtcatatgggagctaatttcttcaagcaattcaagaacaaggagctcatgaacatgttcaagaggctgtgcaatcagaaccaggagaaaaaattcaatgagctttggaagagattagatgagttgacagccaaatgcagtgatcagcgtgcagcggctccatcgaccgccgttgctgaccctcctcaagctcttggacctctcccaacggatagtccaacattggctagaagaactggattggagattcggaaattttctcagtggattctgcatgaaccaaaagagaaatgggccaaggcgtatgacacaggtggtgctagatatggaataatgacaacaaatttggcagaagtttacaactgggtgatgcgcggtgtccgtggactgccactagttggcatagtggagttcattttacatgggacatgcaggtattttagggatcggttccaggcagttcttccctctatgccgaacaacagcattttgtttggaactttcatgcagaacaagccagaggagttgcgtaaaaaggccatgaaacatcaagctttagtgcaaggtacccaacagcacaggtttgagatactatgtcaagataaggcaggcaagggtatctaccgcaagagagtgaagcaggagtgtgttatcaaagtcgactggcacatgtcattgctcttgttcaaagccgaagctgctccacaggccatgcacccatgtcattgctgccgcagcagagtgtggcataccagatgcagtatatgtgtcacagtacttcagtaagcaagcaatatatcatacatggagcggcgagatttatgggttcggcatagctggggagttcacagagactaacgatgaagtactcaatattcctgacccatcgaagctccgaggcaaggctggaaggaggaggactcgtcgcatccgcaacgatatggacgagtcggaggctggcagggtgaagcgttgcagcaaatgcgatgaacatgggcacacctacaagcattgtcctaaagacaaggagaaatcaagtgcggcgatgaacatgggttagtagtcagctggcgacttttgttgaggactggttgctcgcaaccgaggaggtcgtggaccacgagggagaaccacacactgaggaggcgtaccaggcctacctatgctggtaccagccacgcacctgtactagggtcaccttcgctcccttggagcagcagccccacgttgcgagcactagagacctctacgccaggcaccgcgaccaggacttcgctcgtgctgtgagtaccctgcatcgcaccattcctttatgttttcatgtctttctcttcgtcaaattttacgaatatttacgaacaaattaaccatgcaggtcgacgacatcaaccgggtcgtcgttgacggttcaacgacgatccaatgtttaggcgtggggattccggtacccgtagaggagcacctgacgacgtacacgcggatggtggagtcgatgcgctcgattctccgagtgctcacctgtcgtgcagacgacgttgctcgggcagacgcagctgtacagcggccacccgtaccgactggtccctgtccagctgcgcacgttcctaggccgactccccctctgcacggaggtaagtatttttattactatttctgtacatgcctcgcacatataagtgagccgtttcacttgccgattgcttcagggtttcgtgcaccgttcagtaccccgccttcctcggctaggccttctgttgtgccccccacaggtacttaaaaaaacaacattacttcgacaatcaatttacatgcattttatgtcttagcttataagggtcccgttgtcgatgtgtaggtttcgcccagttcgctatgacgcaggccgcccacttctcgcaggctgcagggtcagcgtctcaggcagctgcgtcgacctcgcactcagcgcagttctggcagtacaccgggacttcgtcacaggcagccggcacgtcgaatcagggtccaccactggaccatgctaggacctcgttggaccgcttgctgccttccaccttgctcttcgacatcactgactttgacttcgcttcaggctcgacagaggacgtcatcagcccctcacagctgggaggcgcaccgccggtgcagacgcaggaccaggcgcaggccactcctccgcgggacactcgtgctactcgtgctgtgccaccggatcgtttcacctactcctaggaccacgtgcgagcacaggcccggaggaccaagcgtggtcgcggcgcggggcagggccagtagagcagtcttctctttgtttatttgcttcactttccagtactgtatgcttgtgtaatgactacgttgttgttatatgtgcacaatacctttcggcgcatgcacgatacctttcggcgcatgcacgactactttctgccgcaccgatgcagccttctttattcgcgtgcgatacgagtatttgcccgccatttggcgcatacgaccaatgtaacttttggcgccgatcaggcatgtaactttcggcgccaatcaagcgtacccaccataccccaccacgttcacatgtcaggggtatcactcgattttttgcgcctatataagtcgccttaacgagtgaggcctcacaatctttcagaactcagtcacattcagtactctcttccccacttgcttcattacaaatccgactggctttcgtcaatggctagacgtcggggtgttgaggatccgaactggcgtagcaatccttgtgtatacctactaccaccttggtgctagcgtcctctctgcctatgcggtgatcgatgccaactaatggcttcgaggaatcctgatattcgaggaaggcgcttttttaggtgccctaactattttattatctgcatatgcttattcattccgtatgggcaatcgctttattcttcgtaacactactctattcggctctattcggcagacccgcactacggcttgcgcatacatcgagtgggtcaatacagaaaatctcgttctcgacctaaccacttgtttacaagaaggtcgctggtatttcgcatccgaaagtactgagcaatacttacagagaaaagcggcaaaaagcggcttatgaacgacaatgtcgtgaacaacagagcgactggcgggtgctaactacggcactccctccatgggaagcccatccaagatgcaggtgtggtgatcgttgtcaggttcttcgttccataaatcctacaacattgggtcgaaggttctttgtttgtccaaatattcttgacgacgatttcataataagaatattttgattacatgaatccttattttctcacaatatttactaactttgcttgctttacatctattttttcctcccaggaaccactaaggagatgtcaatacagagaatggatagacaccagaagggttctaactccacctagccgtgttgtgcagcttgaactaccagagcaatacagggttactaaagcgcggtttgagagaggagagggatcctcacgtaggggttagctattatcggacaactaggcatattgaaatttctactgtcatgcttccttgtcccattactacatcgtcgctgtgttcaactattgcactacctccctcatagttcgaatctaatatcatctatgtaaccgcaatgcaaatagttatatcatgttcaaattgtactactatttcttcatgttacataattctccttgtttaagtcaatataatgtttctacgacccagtctgcgataggcctatataaattatccgagtactaatacgtcgaataaggtacaaaataatacctcacttaacatatgaaattgcgcaacaaccaacttcaatacatttttataacaatattaacaagttttaccaataaatacttttttatttattattaacataacatagaaaaatcttttggccgtacttttttcatctgggtcccttgccgccctagcagtaagggacccagatgtaaaaagtacggccgcaagctctttatgggcggccaaaattgcaattagccccttgctgccctctgtatgggcggcaagggcctaatcgcaatttttgccgacggcggcagatggcgcggtcgacccaccgtctgccacgtcagcttgccacccaccattagggcggcaggggctatttctgcaatttttgctatatagattatgggg

SEQ ID NO: 19796 - DNA, 4148 bp, Oryza sativa
ttcctgcaccccatatttacaaatgagtgcagtaatcgctttattataaaatagtaccgtaaagatctcattgcccatagcatcagtaatttctgcaacaaatggccttcttgagcaaatagctgaaacattagcaaaatgtttcttgtacatcaaagatatggaatgggtaaataaacacaagacctttttgcacgacagttatacaaacttgatacatatttactccctccgtcccataaaaaaccaacatagtactggatgtgacacatcctagtactatgaatctggacgtacctctgtccagattcgttgtactagagtcacatccagtcctagattcatttttttcgggacagagggagtactttttatcatcacaatgaaaagttatacaacaacaaggccagatcaaataaacaagacgaacatgtacaatagagaacacttccttttaaactactgctatcaacagctagctcaggttctctaatgatctaacctttatgctatacctcaaatctaccagatcgataaacaaattatacataaagcattctacataaaacaaattatacataaagtagttgatatttctctgaaagaagatgtaaagtatgtttccattaagttgaaacagaacaaaagcacagatataacccatccctcagtatcccagtaaccacttaacatggtaacatattgatatgttagatgattaaaaatgggagggaaaatattttttgacaaaaattcaaacacccacaagttacagccttgcataacctgcattcccttccatatctctagtttctgagtctctacagctagatactacaactccattgtgaaattttatataacactacattctacacatcgaaattctacataacattgcatgagtcccaccacattctacacataatgaaattttacataccacatcacagccaccctaattgaaagtttgtagcatcgatcattacaagaaaaaggtggcaagagactccttgcccagcaaagagagcaaccaaaaaatcattcaacacaaaagaaaaggagtcgttaccggtgctatagctaaaagaagggttatctgtctaacccactaaaaaccaacagctgttctttaacactaggaagagaaatgcataactcgataggacatgatgcatgatatatgagaccatgataatgttttatacagaaataaaataaagtcgatgctgactaagcacactagtacaaatatcacatagcataatagttaatttgagaagttcaacatattatgaatttatgacactggtttaatatttagaacacgaaatcatatatgttcgaacttaagtactgctacgcagagaatttaaagaatcaaaatcctgtctctattccactaagttactttgaagtcaaaaaacaacaccatgaaacatggactactacagtattaacttttttttttcgccaggaagtattaacttatttaggataaattaatcacaagccatacctgcctaaatatgacattgcttttctctcgaatgaaaccaacaggctggaaatttgacgaaaaatacaagtcaataatgaagccaagacaataaaataatacaacaatagagtaatacagcaatggaaccaatgacaatctgagtacacatactgattgaggaaagagcggatccattatgatatatctactctcctgcagtatgagtaataacagtaagtgataacaggttgaaagtctgaaacaatcaaaggacataattcaataactgggagaaaatatcaatgtcccaaataaatgtgcatatattcaggaagcacagaatgaattgtgtaactttgttgctggtaaaatgaattatgtcacttttttcagttttttagccgagaaacgaagcacttattcaagtatgtgctatcctccttgaatcacatgaaaattgcctgttgttttatacagtaacaaaaacaaaatagcaaggacaattgaacacagttactatttcatttccaaacacagcaagagaagcatcctagagtcgcaacttcagtacacgtaaatgagtaaatgactcacagatacattacctgctcaaaagccaacatgatatttgcccattctatgtccctagcgatcaggaggttggcccttgagaggagaggcttcagtttggcctgcgaacccacaggaaagtactctcagttaatcaagtaactctagataatgattacacataatttcaacatgacgaaacagctcatgtaggataaacattgaccattaaatctaactgtaaagaggtaaataaataaatatagacaattaactgattggttaatatccttccatcccacctgcccacaaaagtgtccatcttgttcattcaaaaaattggtttccatcttcatcctatatcctatacccttcaaacctatccagctattctgcaatacaaatttaccagcaattccaaaattggggtatagtaattcatcattcactctttcaatctgacatgtcatagttgcaaaacgtatatggattcaacgatagcatcaacaatcagactatgttgaatgacagtgcaaaataacagtggaacagactataaacagaaataaatcccgcttgcctctattggcgtgaggtcccgatcgtcgtgttggaagctcctcgacggcgccatggcgaaatcgccgaacgaatccgcaccgccgccgtcgctggtcgcgaccgcgcgccgcccccaccgcctcgcaacatccctttgcttcctcaactcctcggttcacagcttctgtagccactcccgaggcaccaccgtaccatcgccgcccccgcagccgctcgcgaacccattggatcccccgacatggctgccagtggtcctcgctgtggccctcccagccgccgcggcgtgggagagcagccggagcagccacctcatcggagcgaactgcagaggcgggggaggttaagaggtgttaggattctataagagaaggtttcatcgccgcccccgcggccgctcgcgaacccattggatcccccgacatggctgccggtggtcctcgctgtggccctcccacccgccgcggcgtgggagagcagccggagcagccacctcatcggagcgaactgcagaggcgggggaggttaagaggtgttaggattctataagagaaggtttcggtgtggtcgcggaaatggggtttccacgctccacgacgttaacgatggaggttaagaggtgttaggattctataagagaaggtttcggtgtggtcgcggaaatggggtttccacgctccatgacgttaaggatgggcttttgccgcaggtacggcttccggaggattaaagtgggctcatttccgactaggctatgttgggccaactgggccgtgggccaactaccgtcttaatgttttttttccatttttcaaaatgggcctttacgaaatgtgtcatacacgtccaaagaaaatagagaattgcacctatacatatcattggagcataacaaaagtagagtcttttcatacactagcgaaatgcccgtgcattgcaacggatgaaaacaattttaataattaatctatcatacggtaaatcatccgttttactcattgatatttaataaaaataacgtgaaaatatttagaaatacatcaatatcattgtttattaataatattttttcctttaataattttaacttgcattttattatgttatcacttaaatataaatttatatttttctttaattttatatatgaatcgtacttaaactttataaaaatattatattcacattgtttctaacattctattgttattagattgtacttggcatatatcattttgttttttttattctaaactatagttaatttgaatttattaattacctaatttaaatatctatattattagtctaaattatttttaatattaaaaattataaaatattatagatatatcacaatgttttagagacgggaagacaaagtaaattcgatggtttcaatttataacttgataaagaaagaatgctaaattagattcatgccaagtggcacaatatgtcttataaaatttataacctaataaagaaaaaaaatgtt

SEQ ID NO: 19797 - DNA, 1647 bp, Oryza sativa
cccctaaaaattttgtgagtttggatgagtacaaattatgagcttacattttccgttctaatgcaactgttctaacattttccgttctaatgcaactattctaagagtgtttggatgagattcagtaacaaagttacatcggctaaaaacaaaaatcaaaattaacaagttgaaagtaggtggaactgggcagaggcagatctaaccctgtttcggttgaacccccaaactttttcgagggataacgcagaatagctgatgaggtgtgggtagggagggatgctcaccggcgagcgacgatgcggtggaagcaggaggacgccgggcgccacctctcctcgcaggatggggatcggcgcaagcggcaggcgaggagacgaaactcgaggccgaggccggatgggatggattaggatgctcaccggtgagcgaatgcggcgggagcaggagaacgccagcgccacctctgctagcaggatgccagcggcagggcaggcgaggagacgcgagtcgagggcggcgggcgaggagacgggacggataggggaggcggaggtcgtgcagcgctctgctgccgtatactcatatgcacaggcccatgaggctggaatgttttcatctcccaaaaaagttcatctaaggtcccttatcttgtcgttgagttttaaacggtacttaaccctctaatattgtaaaaccggatcacttttgatcataaggtagtattgctttctggttttgttgacacggtagtattgctttctggttggttttgttgacgtgcggttgagtcccacgtagaccccacaagtcaatcgacaacttctttcacctcactcccctctactcccatctcaacccaaacctccagggcatccaccaatgggtggggagaatggtgtcggtcggcggagaaaagctcaaggcggaggccgccggctgacgtggctcccaacggccgggagcgctcacatcatggacttgcgtgcgcggggagtgcggcgcgggtcccaactacaactgcaatgtcgtcttcacctgttcttgcaaggtgctaggtctaagtaatttttttataagggcgcttatcactacaaaaaatagtttttagtatctttccatatgggcagcgcaaaccgcatgtgaaaacagggtttttgcgtgtgggcacatatggtagctattttttaagaaaatgaactattacatatgcaacaggtgaatcagtgaaacaaaaataattaatagctaaaactggttgagtgaaaaaaataatatgaaatgaaggaagtaaagtatattctatgaactgttggtgctcacaagatttctatacactagggatgaaaacggagcggatacggacggataatgctcataccatattcgttttcatatttttttaccggatacgaaaacgaatacggatagctcgaatacggaaacaaatacatattatctcgaatacgaataagtatcgaatatgatcggacacgaatacggaaacaaatttttctcggaacacgaaaaccaactcaactttaatagaaacaaatattaacatatataattagctcattttatataaaatgaggtataatttataaatattttttaaaatttaaataatattaatggggtgcagga

SEQ ID NO: 19798 - DNA, 4818 bp, Oryza sativa
cctgcacccccatttatttatacttttctgcaacgtaggggggccttgagagttcctcttgtggtagcaagttacttcataacctgctcaatttggccttatagggtcgggaactaatgaataaaaagggttggataccgcccaaccacccagccctctaccatatctagacaaatagaatagtccttttatacagagcgggaactcggatcccgttgggtcgacttcctcgacgaatccgcatacccttccaacttgggctcaggaagttcgaacaacacgccgacctcaagccatccgccctgcgagatcttcatcgtctttcaagagacagacgaagaaaaaagggaacgcgaagaggaggaatgtcgtatccagcaacaatacgaggatctcactcggtgcctcaacgagcttcaacagcgcagccatctcgccgaagacgctatccttcaagtgaagctggggagcacgacatcttcaccacgccgcagaacaagatgatcgctgccaaggccctcctcgacaacatgccggtcccagtcaacctggccgtgaacaccaccatcgcccaagtgaaggccatggtggaagccgccgtcgttgttaacgaccaaatttcgtaagtaatgaactaggtttggcattggaatcgaagtggattcggcgaaggactgtgttcgaagaatagagtgtgcatcggctgcagaggcatcggttgaagtctgcatcagctgagatggatcggacaggggacagccgatacagccgatttcattgagatggttataaaaccgtttctggaatcgatcaaggtgctacgaaaggattgccacgatggagataagctctcagataggcaattgtatctattaattaggatattttacgaagtttccttagagatatgtttgggcaaaagtctgccgtaaagacttatatgtatcttagagtttgttagagataagagtcgtgtccggcaaggacttatcatgtatctcgggtataaatataacccgaccccatgtaatttacaacaacagttcaataacactctcggcgcatcgccaccattttactttcgtttgtttcgacgagttcttgctttcgggttgagctgcatcgatttcgatcttcaataagaggtaaacttgtcatgacggcttgcgttctcgggattagtgcttccatcattatgatactctaatcttgtttatgtaattcgtcgagttatcatatatgcttcataatcctcattagttgcgctatctaacttgcaatcggccaatttctactgttaggaattagccgatagagttagatcttgttattaatttagattatatagcatatttaccatctcttagaggttttcatcaccttgtctagatcttatatttatttttatgcttaatgctgcatcggttgagttcggtctgttaagtaatatctataactataatatctagcttattttatgattattgaaagagatagcatcggggtttcagccgatcttacctgatttagctatcttataatttatatgctcgattgctatgctaaatctgccctttatattaagatattattgcattagaatatattaggctttctgtttaatatattttgtttgttttagtatcttaatatagagtgatatcagagtattagccgatacacattggatctatctccatcggctaggctatgagtgtatataatctttatcttgaagtacttttggatataagtgatttatactgtcttggcatgatgaccgatctatcccaatcactttaaatatatttcaagacatagattatatgttattgatatctacagccgatcggatagatctaattttatcttgctttattctttactgccgatcgattccaacatgacatcggctcgaggataaacgatatgtcatcggcaaccagccgatcggctatcgtttgtggatttaaccttgtttttttgtctttctttcttgttgattataggatcaaatcaactggcacgcctttgaacccaagagcaagatttaggacctgcacagaagttaagcagagctcccaggccagtgtgtgttttttgcatcaacacgcttttggcacgcctagtgggaccgagttgtgacatctttcatcatggtggacatcaggcagacatcaaagccaccatccgactctactcaaaagccaccatctgaccttagtcataagcagtcatccgatgtcggccctgacaacatcatcccaataactatggataaactgacgtcggagcagaaggcagagtacgagcagatgatgaacaatttgcataattagttcctgcattcatttaagcaaactcgctcgggcacagtaatccagaggtataagctgaaggtcactcaagacacggaaccaagcacatccaagggaggcaagacttccaagggtaacaaaggcaaggatgatgaataggagaagacaagtcaaaggaagaagagcctcaagaaccgacgaattgcaagatcggattgactatgctgtctatcatgccttgatcaatcaatcaggagtgctagttaatacttttaactaatatgatcaagtccgtggtcaatggtacaattgctgagcatcaagctaatgggccggtttttcttcctgaaggtggatttccaccatatagagagttggtgaccggcacgcagcagcctgtttctggtgtggctctagggcagccgatggcgtcagcttcggcccttggaagaccaggtgcatcgtcatcggcacagaggcaactgttagagccttaccttttgagcagacaccaacctgggcacacatggcataatatccctcggttgactccagaacaaattgcggctatgttcaaaaacaatcagcaaactatagagccaattcagccgataccaatgggacagcaaacacctaccattccacagcctcagcccgttggaaatcagtttgttcccggttagcaagttcaccagtctcctcagcaacatcctagtggtaacattaattttcaataccagcctcattcacctcaagtgcaatatcggctagggggatcaccacagcctcaggttctgccccagtataatcagttcgagcaaatccaaaagccgatgcagggagtgcctcaacagaagccctgggccgatatgattgcagatgtaatgaaggagtagtttggtctcaagccaagggacactgaaaatttgtatcggcacccatatcctgagtggtttgagagggttccattgccaagccgatacaaagttccagatttttcaaaattctcagggcaggataatgtgtcaacttatgagcatgtcagccgatttttggctcagtgtggcgaagcattggctgttgatgctttgagggttagattatttccgttatctttatctggattggcatttacatggttttccttgttaccttataattctgttcagagttgggccgatctagagaagcagtttcacagctatttttatagtagaaatcatgagatgaagctttctgatttaacagcagttaggcagaggcatgatgaaactgtacatgactacattcagaggttcagagatatgaggaacagatgctatagcttggctttgacagattctcagttagccgatcttgctttccaaggtttgatagccccaatcaaggagaagttttcggctaagactttgaaagtctgtctcaccttgtacaaaaggtaactttgcatgagcaaaggtttgcagaggccaggaagaattttaagaaagtcaatcatgtatatccctatatgtatgagtctgaagaagatgattctgaagtagcagcagccgagtgggcaagaagcaaggaggttgtcacttgtcaatgggtgaaaagttctaggaaagaggagaaatatgattttgatatcactaaagctgacaaaatttttgaattgctacttcgggaaaaacaaattcaacttcccgctggtcatataattccatcggctgaggagttggggaagatgaaatattgcaaatggcataattctggatctcatactactaatgattgcaaagtcttcaggcaatagatcctgttggctattgagggagggaaaataaagtttgatgactctaagaagccgatcaaggtggatggccatccttttcctattaacatggtgcatacgtccggaaaggcagccgatcggggtagtcatcggagctcacagcttaattcagccaagattatcaataaatatcaaagaaggtgtcacgtcccaaaacgaccctaaaatatatcctctaaatggtgcctagaataattaaaatccgtgtgaaagcctccaacaattaaaatgtgcaaagttaaaagtcaaacaaggcttagacggtttttgtatatttcctaaaagcctaaaatgcgtaaataaattttagtggaattttcagagcacaaataataattattaagaaataaacaaagttgaaaaggttttataaaaagaaaagctctaaaaagtcccctttccctccctctccctctcgggccggctcggcccatttccctccccctccctctcctctccccgcggcccatccggccttcccccgcgcgcgcgccgctgacgggcgggcccgcccgccaccctcgctgacgggtgggccccaccctttctcccgccgctcccgccgtctcgcccgcgccctatcgccgccgccgccgagaatcccgacaccttccgccgttcccgcgcgcaataaagtgggggggaattattccccgggatccc

SEQ ID NO: 19799 - DNA, 1254 bp, Oryza sativa
acagtggcggcaacgccactgttttgccggcgagaacgcgtctccggtgctttccccgcgaaacggagggctgaccgagggagaggaggtggctgcgaggccgagggagaagacggcgcggccggacggtgctccggcgaggagggagaggcggctggaggcggccggcgcggaggaaagagaagggcgacggtgggaacgcgcctccggtggtcaccgcgcgaaacggagggcaggccggggtggaggaggtggcggcgacgctggaggaggcgacggcgcggccggccggcgcacggtcgaggcggcacaggcggctggaggcggccggcggcgtgggagagagaggagggcggcggggagatggctagggaccacggggaggctcgggagggggctaaaacgagagaacgggggatgaggatcccattttatatgagagaagagggagccggccacgggggaggtcggaacggcggcgggaatggcggccgacggccatggaaagcggccggacttggcgcgtccgttcccggggattgaaggcacgaatcaagggggaatttgggggcaattgaagaggattcaatggggattaaaaccccccaattaattttggaattggccaattgaatcaagcggatttggaggagggagcgagctaggtttccgggagggagagagggaggtggccgggcggctggaggagggagacgacgcgcctgacgcgtgggccccacccggtcgggcgcgcggtcagcgcgcggcaacggcgcgcacgcgcgcgcacgtgcgcggcacgggcgggagggcgccgctcgggttgggccgggcggccggcccaggaggagaggagggggaggcggcttgggccaggcaggccgggaggggggggagagacagcccgggagagagagggaggagggtgctgggccgaggggaagggggcccaagaggagggagagaaggagagggagagaaagagagggaggaaagggagacttcggccgcgggccgaggggagagagggaggactttgggccagacttggcccaaaggaggaaggagggttatttttaggtttttctttttaataaactttgttaattgtttttgttgcttaataattatttccggtgctctgaaaattcaagtaaaatttgagggctccttttagaccaaggagaatttaacaaaaattccccgggccacattcgaatttttcttgtacgcattttagtgtttgccaatttc

SEQ ID NO: 19800 - DNA, 1084 bp, Oryza sativa
agccccatgttcgtaggtatgagagatttaatttcttcctttcccattcctcgaatggtgttacttccttatgcttcattggaattttattcaggacatgacacgcagtcaaaactgcctcaccccaccattccatggaaagccccatagtgtctaacatggcattcaccatctcagttagagtacggttctttctttcggccaccccatttgattggggtgaatacggaggcgtcctctcatgaataattccaaactcttcgcaaaaggatgcaaactcattcgaaaaatactccccacctctatcagacctcaaccgtttgattttcctttcaagttggttttctacctcagctttataggtcttaaagaaatgcaatgcttcatcctttgttttcaatagatacacataacaaaatctagtgcaattatctatcagtgtcatgaaatatttctttccccctttagtcaacaccgttcatttcgcaaaaatcggaatgaacaagttctagaggtgccaaattcctcgcctcagatgccttgtgaggcttgcgaggttgtttcgattgaacacaagtatgacacttagaacctttgaccaaagtgaattttggaattaaactcatgttagctaagcgcgtcgtacaaccgaaattcacatgacagagtcgcgaatgccacacattagactcatcattctcgctaatatggttcacaacattatgattattacacatgtcattcagagaaaagcggaacaagcctccgctgtcataaccttttccaacaaaagttccatatttagatacgacacatttattggattcaaacacaagtctaaaaccttctctacacaatagagagccgctaacaagattcttctttattgaagggacatgctgcacgttcttcagctgaacggtctttcccgaagtaaacttcagatcgaccgtaccaacaccatgaacagctgcaagcgacccgtttcccatcaacaaggaggaacctctcccgacctgataagaagaaaacagagaaatgtcagcacatacatgaatattagcaccagtatccacccaccaat

SEQ ID NO: 19801 - DNA, 4949 bp, Oryza sativa
taatttgctttcgtactatgttcctgaaacagtgtctgtcctgcgacccttgttcggaaaaccggatcttgccgtaccaaaatcagaaatcttaggattcatttcagaatccaatagaatattgctgagcttaaggtccctgtggataatctttagccccgagtgcaagtgaaggtacacaatcccttgagctataccttcaattatcgcaaacaacctatcccagtagagagaccaatcggttcttgggcctgataaatgtgtttaacagaatggtgattatgagatcagggtacaaattaaatcatttatagacttagttatttaagaacataatcctctggggacttgtcaaaacataccaaatatgaatttatcgaggcttttgttttgcatatactcgtaaaccaagatcctttcttttccttcgatgcagtatcccttgagcgtcacgatgtttctatgttggagcctaggaatgaatttaatctcgttttcaaagtcagacagacgctctgggctcgattccacgaagcatctcttgacagcaactggaagtccattcagttgtccctgataagtgatcaaatagaggaaagtaaaccatatgaaatatagaaggcatgctccaagtggtcttagagcaaacttatagtcttgatgtagtaattgtcaaaaatcaataaagccttctttattaaaaaaggaatacggaaggctatgcattggggaaggcatgcagcatgctaccaatctggattaagattaattgtggtgattgcatatatattataagcgagtacatagctaggctccgatcctacagttacgctaaactctgtgaattgggtagatgatcgtttatggatgtgctcgtctgctcgcatccgctcagacttcagagcaagcctgttctataaatcccacagacgacctactaaaaaaaatatagaggcaatcgctcattcaaccctattctaaagcttaactaacaattttatcctaccttctcaagttggcttatttgatcctttttcaaaattgaatgagataacagtgaagacaagataacagtgttaagtaattaagggcagtggagtgtaggcattggtgtcaactaacaccaattacttcttgctaatctctttgctaatacactttggaaacaagaattactctcttatatatgcattggcaccaccatatttgagtaatgaccccaatgactatatttcctgtacccgcccctgactaaggggcaaattatcttttttgcacttactcatttcatcgtgcttcttttttttatccaaacttttgacatatttgtaaccaatttagcatagttttaatagattcgagacaaatttaatagttttggcttgaaattgacaaatttgataaaatcaaattaacaaaatttgacatatttatggctgaacatttaaaatattttaacagcatattggtcttttttttcaatcccaaattgcatccaataaaaaaatacacagaaaaagtagaacacaagatagccatgcgccgtcgtcgcccctgctgcccaccgtcgccaccactgccactgttcccaccgcgcgccaccttggtcgcccctgctccaacggctcgccgacaccgtcgccgctcccaccgctggccgacgcctccgtcactcccgccggcacccctactcttcaccgtcacagctgccactcccaccgtgcatcgccgcggctgcccttgctcctactgctgccgccactcttaccgcaggctgatgccttcgctgctgccaccatcacccctgctccccgttgtcgccatcgccgctgccaccgttccccgcctcggtaatatccgccacacgagtatccagacatgaatggaggagaaggaattcggggatatagtattgttgtgttcttatgtgtatttttgttagtttggcatataaatacatttctttcaatcttttataaattgaaccctaacggtgttatggaaacagggtcaaatgacaactccgattttgaaagacggggtcaaatgagcaattgtcccaaaaaatatatgttgtttagttaaacccacaagaacattggcatatttctatgggtttctcttgaacaaaatgaaattttgctactttcgtggtggtcaaactcacgaaaaataaagtagctggtgtaccgtataaaaaagtcgagcaaccaacccccaaaacctagtttgtcatcccccgttcccagtctatcaagcaccacctccgccactcgattcacccagatccccatcgaaccagtaggcgagtgggcacaaagaatagggaggcaaaatagacttattatatggcacggctcaaagagtaggaacataatagacttattttagctatatatatatatatatatatatatatatatgtgtgtgtgtgtgtgtgtgtgtgtgtgtgttacagcctaaagaggagggaggataaatagacttattttaaagaaggcacgataggccacccgtgccttcgggctgacacggtgggttgtgcctgggcctgaggtgcggcacgtgggccggcatggcacggtccgaagtgccgaccgtgccgtgccagcccgatggccatgggccgtgcctagcccgtgtctaggtcgggctgtgccgagcgggtcttatagtcatctataccatgcatgcacgctggtccgatcgacctgcctgcgataccagctgccacgagctcacgggctccagatcaggacagcccaagccccaagctcagggactgtgtgaatcaagtcgtcctgagtttgggtgctccagattaggaggcccccaccatcctgctgctaccgcctagtcatccactagttgattctgaaatgtgtgtgattctccttttttatgacacaagtatgcatagatatagttaccttgtaaacacgaccaaacccaccctcgccgatcttgttttccagcgagaagttatctgtagcatccactatccgaaataagtcgaacaatgaaaaccctgcggctgtaagaaaataaattactcatgaattaagtgaggttagagaagggttttcaccctagccatcagcaaaccagaaactaatgttgcttcaaaactacttaatatttttttcttaattcattatttacatctatttcttaaatatgtagaagtttaagaattaaattaaccttggtgggctggtgtcaataggtgtccaatatcatcattgcttgaagatgccttatcgactccatctttgttcaagttatgatgacctgcatgcaagggtaatcttatatttgtatgtaattatatgtatctgtaccatgcatggtcgcgataaaatagaagaaaatttctcaaacggataatatagggacagaattattagagaagtcaactctaatcgtcctttcatatcaatttatctagatccgactttctcggaggagatttgctctggttcaataaaaagtatctcgagagactggtaccttacagtaccaaatcgttttttattgttggatttaaacaatgcttacgctgcccaactagatccaatgatcgaaaacgattcagtaccctaaggtaccagtacctcgtggtactttttgttggaccgaagaaaatctctccccgggtcttcttccgcttcggcaagtcttcgggcatcgccggcggtggagtacggcggctaaaaacaaagggccaaaccggtgttgtggtggattgttgtgtaatctggcatcaaagggccaaaccgacttaaaaatatgcacatgaacaaaacccctccagctaaggctttgttccaaaacacactctcagcctcatcgtttggccgatacgaggaaatactaaaacggtatatttgcaaatgaaaaacaatttatgaataaaacttttatatacgtgtttttaatgatctaaaaacaaaggttgaaacatagactatgaagaaaaaaatcccaattacctccaaatttaagtttgaaaattgaaattttggctaataagtataagtataagaaaaaaatgagggcgtttggaatgaccttctaagccccacgagctagctcatgagctttcttacgataaatgagagtagcctaaacctaaaccatattgtgctgtttggtctggtttaaccgttgaagcatttttctttttggaaatggtgtttatgtatattgggtgttataggagccaatttggagttgaggggttatttagacccttgggatgctttgagggtgtaatatcgactaactccttgtgagaattactttctttctcgagggttcttacatgtaaattgatggattaaaaacaaatagaggacaaatgtagacatgatttattaacttgaagccacttgccaacttgggagaacaaaattttacacaaaactacaggtattttgcataatttatcacaaaactacatatctaagagtttgtttcacaaatctacatattttgtgtctctgtttatcacaaaactacatgtactttgtacagtctattataaaactatagatttaaaaacttgtttcataaaaattatacatttagtgtattcattcatcataaaactacacaattagtatctttaatatttattaattacaaaactacatatttagtttctccattatcataaaactgcaggttttaacaatgctaaaacctgcagttttgtgataatgaagtcactaaacctatagttttgtgataaatgaagatattaaatctgtagtgttgtgaaacaagttctcaaatctgtagttttatgatatattgtgcaaagtacctgtagttttgtgataagcgaatgcactgaatctttagttttgtaaaacaagttcttaaatctatagttttgtgatacatcgtgcaaagtatttgtagttctaggagtgcgacatggctgt

SEQ ID NO: 19802 - DNA, 8613 bp, Oryza sativa
aatatgcccctaagggcagtcccaacccatagtgtctataagcagtgtctatggtgacatgtcaattagacatcacaatagaaactacactctacaacccatggtttcttaaagtgggccattaataaatacatcatctctcttctctaccaatcatatttattctccatctattatgaagacactattctctcccaatgcaaaacttgatggtgtctagtgcataggttctagtgttgaagctgtgtcttgtatgagacccggtttcttcctctcttcactctctctcttaattaatatagtgccacgtaagctaaaagtcttacatgacaatgtagttaataccatagacactatcctagatggagggttgggactgccctaatgtaagagaaagcatggacacaagaaacacaagagatatttgcatgcaagagcatgtaaatattgctctatactttattcaatgaatggcaagctttgccgtcgttaaaaaaaaaacttgcatacaagagggggcggatcccaaaaaaatacttcctctaatcataaatatttatatttagaacataatttggttttttttaaacaaaaactgaagttactatatattttcttatagatatatacttagttcagaaaatgatgtatttgtttcttgaaaatgacaatcattatatcgtaaacctatatagattttatgaacttgtttttctaataaaacatttatgcttaatgtttggcactactaattaggaacaaagtgcatgcgcacctgatttatcctctctagttgcaactgcaataggctcggttctggcttgcggtctttcagaatatgtgtaatcttcatctccgttagaccaactgcaatcagatacatcgttagcacagtatttactaacgatattgttgtttattgtttgcagtaattagcttaaatttgtaataacaataatgaacaacacaagtggtatgtgtttctagaatatacttgataggtgttgctataacatcaacatatttaccttgatatgtaattaacaatattatgatcatagattataatttactatgctttcacgcgatcacttgtgtctttgttaaatttttaaatgtgtcatttactaatctgaattaaacaatattatcgatacagcaaataattaaccatgattatatcgaccttgtaaaatgtattatgaagcttatatacttatgtgttgaggcaaattaatttacttatagaagatatatatactacatacacgcatatcatcgccatatgaaatttataatgcatgtgttatattaaattcaaatttactactccccgtttcaattgtcattttagcaaatctcatactaaactaagaggtgtgacaaattatattgatacactcattagttacgttcaagtcatctttcccaaagcatacattaaaattgcttgtgaggactactactgtggttgtattgataaaaagtacaaaagaaaagacatctctagaacacaaaattcctaacgatttttgagtaaatatgtactccatccgtcccatcgaaaaccaacctagtatcagatgtgacacatcctaatactatgaatctgtacatatctctgtctatattcgtagtacttgctaaaataattctaagttgattttttatgtgacggaaggagtatagtgtaataaatagaccaaaatcgaagtgcgtacctcaatcccaaaatataataacttaaattttagctatatacctagacaagcatgtgtctacatatatatagacaaaaaattatattgttatatttttgaaacggtgagagtattttttttcttgtttagaggaccctagaataaaagatatatgtaggtgtgaatgtgtaaaagtggcatgataatttgtcagctctagaagacaaaacgcgtgttgggatttttatatagctataggggaatgtgtacgaactcgtcattttggtattttcaattattcataatggttgacttcaagtcttcgacgacgtatccaaaaaaataaaaagtgctagataatgatgcgatcgactgaccgtgatgctcgtgccgaacgattggacggggagctccgcaaattctgaacatatgatataccatcatatagtacatacatgtgtgagaaaataatgagagagagagagagagagtatggtatagtaaattgggggtaatggtatatcgatcgatcgtatctacgtacctgcgtgtgaggtgctgagtcaagacgccgggagaagacgctggtggtgtagatgcaggtgatgacggggaagagctggagcctggaggtagaagtcgatcttctccttgatgcgctggaactgctcggcgatcttggcgccgcggaagaagcggcggaagtagctgctggcctcgcaggaggagacgagcacgacggcctcccggagcgtcccctccagcttctccagcggggcggcgatccgcgggtcgtccctctccacgtgatgcaggagccccccgaccgtttccacgtgctccgccagctgccggcactcgtacttgttgcgccgcaccttctccgcccgctccgtcaccatgctgatcagaccgtaggcgtccacgccggcgatctgggccacagtcgccaccgggtccacactgctccatatcggcatcgtctaggtaagctagtagctctccctcaccggacaccaccctctcaagctctcatctgcatctgcctagctgcctgcagactgcgcctgtctcctggctgctctctgcttatatatatatgtaggtctgcttacacggaaccacaatggaagcatcgtccatgaaagaaactgcaggttgtgttaattgcgaattctgcggggtgacgaccaataaaatagtcagacgcggggtgacgacctgctgctgctgaaggatggaatgctcgctacgtatatcgttttattttccacatttataatttagttatttctgagatttttgtttacttcaattagccgatcgatctatgtacgtataaatgaatcgtaggattaggttgattagattaattagcgcctaaggaacgagtctagaagaattggtgtgtgattaattagggtcaactactataactgttagacgacgtacgacacttcaacggatctcggtcgatcggtgtcgcccatatggcggaagcggtcaatttctacttcatgtattattgaggcaacaactagacgtccggcgttgggcgtaacataagacactagtgcagaatagattatccatgttgggggtaggaacccttatatatatcggcgggggtcttatcacggattagtggttactgatgtgaaaactcatagctgttgaacaagcagtcatcaccgataggataatctttaaataaaatccaatcaccgatatataacgtttaacccagcacacgaggcatcctacaacccgtcaattaggttcttttctttagacttatagccaacttataacccaaaaagtttaagtctaaataaacaagtaccacctctattttttaatatatgacgctgttgactttttttcacatatttgaccattcgtcttattcaaaaaatttacgtaattataatttattttgttatgagttgttttatcactcataatactttaagtgtgatttatatcttatacatttacataaaattttttaataagacaaatggtcaaacatgtgagaaaaagtcaacggtgtcaactattaaaaaacggagggagtatttttttttcgtttcaaagccaaaagctattacaatgttaaatcaaaagcaggttagagaagattttttggcttatttgaagtggggatgtaactccacattaaactttatgtttaaaaccgttggcttataaaacatatatataagttaaaatgtaagcttaaaatctaaaccaataagtctaacccaaaataaagaagcctgttatgaatgacttatcagtgatggcttctcgtttagaatcgacgaccatgttgctcatccgtgacatttctttttctaaagaaatcgttttattggccagcctaaggtattcactacaagaaaaaacagaatatccttggcggccagaatatggagtccccccccacccaacatacttttctcctttgtcttataatacatttccttttcttgtcaaagcctctatgtatgtccttcaccatgtcgaccaccttttctctagttacatccgatggaattgggagaagttctctcttattgttaaaatttttgttcattcttctatacgagtgacgtagcgggagccgacttctatggcctatttaaactatctttcgcgacttatttagccacttactgtgtgtattttccaaatagtccgagcaagctttattttctttcacagggcctcatcttttctcttatacatatgcttatccgtcaaaatttgaattttcaactttaaatttagagttgattttgaggttttttcatcgaagtttatttttcagcatttgcttttagatcactaagaacacgtatataaaagtcttattcacaaattactttgcatttgcaaatatgtcatttcgcttattctacgatgggtctgatagtttgtcccgaaaggttaccaagtgtcaggtagtcgttaatggagcaaaataatagggtacgtagattgaagttctccctactaattaaatacatcccaagtatgtacacagtctcaccatagcgtttctaggtcatcgattacaagctccagtaatacatcaatatcattactagattgtttcagtacttggattagcaagcaaaatataatgcgcttccttttgaaacacaactatggtggtaggttataatttgctataagaactagctaagtgctttgacaactgcataaatctccgaaaggattcatgcaaatccgtatataaacatagctttcaatctgtggcataagcttaccattggtccttcaatccgtggcatgcaaatatactaactctactttcttggaattggcaaagatatcttggaacgatcgatgataggtagatacctcacaaccttcgccggaccacccactttaactttttcccccttcgtcagaacttgtctatcacttgtatcaagaagtcttgcacacaagacaagactctaagtcggcgtattccttatagtacaatatgcagttgtttgggcaagcataaattctatgaacctctatccctaagagacacaaaagctattttgcttcatttttcgtcttaggtaatgtgttctcctctggaagtaggtccttcaacaaacttccatccactactcatgtgttttgccttgcatctagcgtatagaggtgtttgtcaatcactgaccaacctggcgaacttcatgaaatctttcttgtcgtaatctggctcctcaccatcacgcaacattgcttccagagaagttattgacatcaaccattctgtcgcccaatggagttcagcttcatcttcctgattttgtccaccgctcgtttcatctgcaatattgattgattcttgctctccatgcttggtccaacatgtgcagccctttataaatcctcgacatattagatgaaaagtatatctactcttctggcaagcatctcctcatttttgcaatctacacatggacaagtcatataatcattgttccttcttttcttccccttttccgcgacatttataaaatttgcaacgttctttgatatgtcgatcaattccatacatccaacttctacccatctctgcaaatgcgaacaaatattagatatatttttttatgatatatactacaaaatttatagagatggtttacttattaattggatccatgccactacaaatgtggcactacaaatgtggatccacataaatgaagtgttaggctgtgttcggcagcctgggttgggaacccatgtcccatgcacggaaaacggagtggtccattagcacgtaattaattaagtattagctaatctttgtttcaaaaatgaatcagtatgatttttttaaagtaactttcgtatataaacattttaaaaaactcaccgtttagcagtttgaaaagcatgtgcgcggagaacgagagggggagttgggaacaggggcaacgaacacagccttagaccctatttggatcagggactaaagttttactccctgtcatgtttggacactaattagaagtattaaactgttgatgtaaaaacacgaggcctgggagatctgcttaactccagtgcaggtccaaaacttgcctttgggtatgtgagcgtgccagttgatttgatcttgcaattaacaagaaacaaagacaaagaaaccgcggttaaatccataaacgatagccgatcggctaggtgccgatgacatatcatttatcgttgagccgatgtcatatatgcattgatcggtagtcattaataagtaagacagaactaaatatactcgaccggctgtagatattaacagtatgtaatccttatgtcgatatacacttaaatcaagtgattgggatagatcggtcgccatgccgagacagtataaatcacttagatcgaaatatatactaacaacaagatagatctagcatgtatcggctaatactccaataccactctatattaagatattaaagcaagtaaaatatatcaaacaaaaaacctaatatatctaaatgtgacaagatcttaacataaagggcacatttaatatatcagtaaagcatacaagataaatgtatttaaataaggtaagatcggctgaaaccccgatgctaccctaatcggcaaccaaagacaggctagagattgagattctaatcacgactaataagatcaaactcaactgatgcagctataagtatgaaaagaaagacaatatctagacaatcaagccgttggatgtttcatagagtggtagatatcttatataatctaagtcaacgtcggtatttaacttaatcggctgccttctactaacagacattagccgattaagggttaaatagcgatattgccggagattatataagatatatgataactcgacgaattatataaacaagattagagtatcataaaaatggaagcactaatcccgagaacgcaagcggccataacaagttttacctcttgttgaagatcgaaaccgatgcagctcaacccgaaagcaagaactcgtcttgacaaaacgaaagtaaaaagggtggtgatgcgccgagattgtattgagcgtgtgttagtttgattacatggggctcgggtctatttatactcgagaattacaaaatatgtccatatcggacacgactcttatctctaacaaactctaagaaactataagtctttgcggcagacttttgcccaaacatatctctaaagaaattacataaaatatcctaattaatagatataattgccttctcaggactctatccatgcgtagcaatcatcatgaagcacatcaacctaacccgacaacatacgcaatgttatactatcggattcggctcgatcagctaaccccatccgactcaaactctgccgatcttagttgtagccgattcggactccagccgatcttcactctgttttcaggacgatctccatctcgaactccatctcgatttcttcttcatctccgattcttggattaccaaatttggttgttaacataaacgtagactgatgacaaaacccattccataaccctggactaattcgcgagacgaatctattaagcctaattaatccatgattagtctatgtgatgctacagtaaatatgtgctaattatggattaattaggcttaaaaattttgtctcgcgaattagctctcatttatgcaattagtctatgtttaattaatacttcgaattagcgtcaaacattcgatgtgacaagactaaatttttatccctggtccaaacaccaccttacgctagacaggccattatatgcaccgacatgcaacacttacgacgggcccacatatatatgcctttcgtccatcgcgcaaatgcaatgacgcggatttagagcaagtattacaacaggctgtaagcatactaatctctacgtggaggagggagaaacgaagagagagatctggacgggcgactcgcgacgcgcctgcttgaggccggcggatacgcgctacggccgctgctattggcttaggctcgtttatgtgcattaaatactagcgggtccgtcaccaccgcgtggtgatctggcgcgtgttacagccatagttattgggaccggaccggtggtccgaccggagaaaaccggaaccagccggtcaggtccagctaaaggaccaggcgtgcaatcaaacctgagaaaaccaattaaaccgtcggttttttttgaagaagtcggtggaaaaccgggaaccgggggcgctggtggggacctgaggagaaggggcgctggtgggatggagagaagaaagtacatagtaaaatgttgtggggtgggattcgaaccctcaacctcatccttccctaccaggaaccccaccaatgagctatgttggacgtagtg

SEQ ID NO: 19803 - DNA, 27569 bp, Oryza sativa
atactagaataggaagagagtagagtagaaggagtcggaagaattccggagttgtcggtaatcttcttctatttcttttattgtgtttattactctgtattcaatataatattcttcttgagtaatttagatttatcttgtgagaattatctcttggttagttcctaaatagcatacgggattattgttcactataatcaactaaaatatagtaattgctttggtgagttataaacactaaagtagatattaattgcttagacgtggtgtttaggtaattattatccagtaattgctacgtatcccacagtacgtttgaggtgggcgcagaggtggtgacagccctcgagatcactgaagtcctccttgtccgggtatgtagttgagcgacatctgggaatagcaggttgccagtgcctgaagtattgcgttaggattaaaattaagctttccctagacattgtttctcactagtaaatcctctctatcctggcctatcttttgcttggtgtccttggatgaaccggaggaagatctgaccacacacgttcccttggattcgatacccatggaatactccgtaggggaagtgctactttggtatatccgtgtgtttgcggattttatctgtaactgtatcaaataccaacaagtatttctggcgccgttgccggggaacggttgctgatcatttccgaacccagttcatcctcatatcctttttcatattttattctaccttcacccctgctatcctagagaagtattcctgtcaaacccttctcaaccatggagcaacctcgttttgaactatctgctcctcgggacgaattctacgagccacctccttcatcggaacccatttatacaactggttatgaaattcgtcccgaactaatcagtatggttagggaaaattccttttctagctttgatctagaaaatccctaccatcatctgtgagactttgaacaagtctgctcatgccttaagattcgtggcatgagacaagaacctgtgcggtggaaattgtttccgttctctcttcaagggagagcaaagcaatggtacacctctaccgttggatgtgtaaacagtagctgggaaaagttgcgagacagattctatcttgccttcttcccagttactcgtattactacccttcgagttgaaattctcagtttcaagcagatcgaaaacgaatcaattggtgcagcttggtccagattcactaatttagtgcagttcggaccaaccctgtccttacctgtgtatgtgcttctccaacatttccatacgggtttggataaggaatctgcattctatctggacataaccgctggaggatcgttcatgcataaaacgccgtcagaaggaaaaacgatcttggatcgtattctagaaaggcaaaatttgctacaggacactcaaaaaacgtgtaattggctgggagacaccgtaaaaacgtgacacggctgatggacaccacaaaaattgtgtaattagctataggacactggtcgcattattttattatttccggatcaaaatagttgagaaatttttcaaaatggcgagattgcgcctggcgccattgttgtgctccggcggcagtggagtcctatctgtaagccttcaactagctaaggtggctattaatgagtgagagcttaacgctgctttattagtttaattaataatcatcgtgttcacgtagattaattaactgactgattaaggaacttgaagaggcacgcgatgggcaggctgcgcgggaaggtgttcccggcgtgcttcgcgttcaacgcggcgtgcacggcggcgttcgtgtggctccaccgcccaccgtggccgccggccgagcgccagcagctcgcggtcctcctcatcgccgccgggttcgacctcaccaacctgctcgtcttcagtcttcacccctaggacactcgaggtacatatggctccattcttttcagatcgagacatgaatgaaggccaccgaggacactcgaggtaagatcaccgccacgtatacccagcacattccgcacggcaacgtccttggcgaacgcgctcagtagctcgctgagccgcatgacgccaccgctcgccgccacctccactagctggaggagctcccctacctcctcctcccgcacggcgcggtagccccggaccctggccgggccgagcaggtggagcacgctcgccctgcgtgcggcgcgccagtacgcaccatgtggcgcaaaggcaatgtcggtgcagccgtacaggaggcggcgaggcacggtgagccgggggcggctagcgaaggcgctgtcctggtcgcgcatcacctcgcgcgccgcgtcggcagtggagatgacgacggtgttcactcggccgagccggagcatcaccatgggccggctggcggcgagcgcacgcagggagctgtgcgggagcgtgcgggaaagctgttgcagattgccaaggaagggaagggcaatccagacatgtggcaaaatatctcacctcttttgacctagaaataataaaataatgtgaccggtgtcctacggccaattacacattttttgtagtgtccatcagccgtgtcacgtttttgcgatgtctcccagccaattacacgttttttgcgtgtcctgtggcaaattttgccttctagaaaatacttccttcatgacgcagtccaatgaaccccagccggaggcatccgtgtccaagatagagaaacctctaacgatcgagccacttgctgaaccatccacttccgctagctcgattgatgagaaggttcctgagcagccgtccgtcgagaatgaagaaattcagactccggattgtgccgcaattatgttcagggaaggttttgacgaagattactgcaataccctcaactattttagcaagaggaaaccatccgttcctttgtcacctcccaatcctatggaacttgggttcctacgagaaattgtccgggaattgacatccataatgagcgacgaatggctaagggaggcagagctttcatccgaagtaattcggataaataccgcaccccgaatcattccttgccatctggaagggaacgatgtcggtattccctacagtccaactgtcggggccaacctcgtctctgagtcttttgcattcgcttatttaagcgataaggcagtgaccccgacaaacaaattcttcaagcatccgaacgaaaatatcatcgaaggatttgggtttgtgcaagatgtgcatgtctgctttgaagacaaggaggcgatcttggatttccacgtctttgaaatccaagactttgatatcctaatcggtctgcccattgagcaacttctcattaacacaccccgattaggtagcctcaaaataacactgggagagaatgaatctcaattccattctcgcgggcaaggatcaccttgaccgaccctctcctagaaattgagtcagcgaaagaggttaccgcagttcctcctcatgagtctcccgaggcccttctggaagatgaggtccccgacttcatcaaggaagaagcagatcccggtgagactctcgacttgccaatcatggaaccaccacctcaacctccgctagagcttaaacctctacctccaggcctacgatatgccatcctacacaataacagagaggctcctatcataatcagtgacaagctctctgaagacgagactcaacgtcttctcaccgtgttagaaaagcatcgttctgttcttagctactcgcttcaggatcttagggggattaatcccgcgctttgcactcatcgtattcctattgaccccgagagtactccctctagggaacctcaacgacggctcaataatgcaatgtgagaggttgtaaagaaagaggtcttgaaactcctgcatgccgggattatctatccgtaccatacagtgagtgggttagcccagtccaggttgtgccgaagaagggaggaatgacggtcgttgcaaatgctcaaaatgaactaattctcaacgaactgtaaccggatgaaggatgtgtatcgattacatgaatcttaacaaggctacaaaaaaggatcatttcccgctacccttcattgatgaattgttggaacagctggcgaatcattccttcttctatttccttgatgggtattccggatatcatcaaattcccatccatccggaggaccagagtaagactacgttcacatgtccgtatggcacctatgcataccgtaggatgtccttcggactgtgcaacgctcctgcaacttttcagagatgtatgatgtctattttctcggacatgatcgaagatatcatggaagtcttcatggatgatttctcagtttatggaaagactttcggtcattgtctgcagaatctagacaaagtcttacaacgatgccaagagaaggacctggtgctcaactgggaaaagtgccattttatggcccgtgaagggatagttcttgggcatcaagtgtccgaacgaggaatcgaagttgatcgtgctaaaatcgatgttatagatcaacttcctcctcctgtgaacatcaaaggaatccgcagcttcttgggacatgccggcttttatagaaggttcatcaaggacttttctacaatcgccagatccctgaccaatctgctagccaaggatgtgccctttgagttcgatgatgcatgcctaaaatcttttgaagttctcaaaaaggcactcgtctctgctccaatcattcaacctcctgattggactctgcccttcgagatcatgtgtgatgcaagtgactttgttgttggtgcggtcttgggccaaaccaaagataaaaagcatcatgcaatctgttacgctagcaaaactctaaccagagcccagttgaattacgcaactactgaaaaagaactgctcacggttgtttttgctatcgacaagtttagatcttacttagtaggagccaaggtaataatttatactgatcatgctgctttgaaatacctgctcactaagaaagatgctaaacctcgtctctcaagatggattttgctgctccaagaatttgacttagaaattaaagataaaaagggaatagaaaattccgtagcagatcatttgtccaggctgcagatcactaacatgcaggaacagccgatcaatgatttcttaagggatgacatgctgatgatggttagcgactccaacccgtggtatgccaacatcgtaaactacatggtatccaagtacgtaccacctggggaaaatcaacgaaaactgaagtatgaaagtcgccgtcacatatgggatgagccatacctgtatcgagtctactccgatggcttactacgaagatgtgtgccaactgaagaaggatttaagatcatagaacgatgccatgcctcaccctatggtggccattacggtgcattccgcacccaggctaagatttggcaaagcggcttcttctagccaacaatgtatgaagactcaaaagaatttgtcagaagatgcaccagctgccagaggcaaggaggaattactgcacgcgatgcaatgcccctcacatacaatttgcaagtcgagatatttgatgtttggggtatagacttcatgggacttttccctaagtctcacaactgtgagtacattctggtggcagtcgactatgtctccaagtgggttgaggctatgccgtgcagcgctgtggatgcgaggcatgccaagaagatgttcacagaaatcatcttcccaagatttggtacccccagaatggtcataagtgatggaggttctcactttattgacaaaaccttccgagacctcctacgagaaatgagagccaaacacaatgtggccactccttaccatccacagaccagtggacaagcagaaacatcaaacaaacaaatcaagaatattctgcaaaagatggtcaacaaaatgggaacaggatggaaggacagattgccggacgcactgtgggcataccgaacagcatacaagacacccattggaatgtccccatatccgatagtccacgagaagccatgccgactacccgtagaaattgagcacagagcatactgggccatcaggaattggaacatggattttgagggagcaggagaatggagaaaaatgcagatcgctgaacttgaggaatggagagaataggcttaccacaatgcaaagatatacaaagaaatgacgaagcgctggcatgacaaaagaataaagatcaagaaattcaagccaggagacaaagtactgatgttcaactccagagttaatcttttcggccacggaaaactgcgcagcaaataggaaggaccgttcgacgtcatcgacacctcttcgcacggggcaatcacactccgcgacgaatcaggtaacatatttaaggtaaacggtcaacgcctaaagattttccttgagccaaacaaaactttagatgaagaagtggacattattgattgattgattatgaacaatgatgatctcagctaatgcgtgcttaaaaccctgtatagttgtcatttttgtgcttagaataggttttagtgggccttggaagaaaattggcggccagccaatggttcggccgaaccagggcggcgcccgatcggccccaaattcgaatgatagtctcccccgctcgtccttagtccgtttagatgcgcgtttgaaggtagaacgttcggatcacaccagaacacttcgtcttcctcctttcctccacctttgcacactctcctctccaattcaacccaattcctcaaatttccactcatacccaccaatggctggcaaatccctaatcccattcatcggctcctcctccaattccacatgcaacctcgacggagagccgacaccagcaaatcaattgataccggtggaggattacacgatggaaggggtgaacgcactatgggcgcagcccctcgcagcagtgacgggctcccctgcgaatccggagcccatcggcgaactcccttgttcggccgaaccaggggttcggccgaacccttctcggccccccattcggcagcgcgatccctctcccctcgccatgttacaagaacaaaaatccgggggagggggggattcgcctgcacgacggccgacaacgggagagctcggtctcttgaaggcacgacgcctttttcaagatgacgggaaggccgcgccgccgagcgctatgtggacaccctcttcaccaaggcaagggatgaggtgctccacaagtacaccacacccaccgctactccatctactccgaaggaggagcgattccgtattcagggagtgcgaactcccggcggtgggtatggtaagggtttactccggcctttaacagcatcggagaaggagggggcagcggagtcccgtaggtgaagcgtcatttgacaccccctccaatttgagggctcccggccaattccaaaaggatgaggtgaaatcgccggagccctcgatccacaagctcgccgctaaagtgaagaaacttcgcaaggagaacatagagcttacggatcgcaatgcggagctaggggtagaacttgctgaaattagaaataattttgatacccttagtcgcggtttgtgcgctaagatcaagcgtgcattcatagagatggggaagaaaaataagtattatgctaactagatgtttcctttcccatgaataaaatagtagtaggtgcttggttttatttttcaatcatgtaagcacttgctataaataatgtggctcattggtgttaaccccaatgtttgccaaagtttgtttttgttttaagttcaataaagttcagcttttgaataagtgtgggggagacatcccagcttctgacgtgcatatactctaaaaattaatgaaatctctgaacacctagaagcactgaactctgcagaaagttgcaaagggatcaggcgccagagtggttcggccgaaccagtgttggccccaatccctctcaactttcacaggtaagcaggtgagcacgtcttttatctgtatatctccaccatggtatagtactagagctgaaaattcagaaaacaattgcttcaagcataagtaagagataaaatttccaactaatgaaattcttcatgtgattgatcttgtatattcattattctcagctgaatttgtgcttgtgaacaaccatccatgattagggaaccttatgcatctaagtaattgctttatgtgagatgattaagacgaaaggaatccttgcaacttggttatgactcttgggaatttgttttcaaaataaaaattgttttaagaaggctcaatcctctaattgactttaccttatacctaccaaggccatatgcaagtatatcattgatgaaccttatcatgcatatgactgcttgacattatattgagctttgtcaaatttgtgtgacttgtgttagatatctttcatacaacatatttcacttttccccttgtcaaatttgtgcaaagaaaatatagccatgccccttccataatcatgccaagagaaccaattggagagaaagtataggaaaaagggagaatcatttctttattccaccattccacaacatatttcacttttccacttttcaccataaataaagacccttgatctaggagtatgattgatgatcttcttgagtccatatttttggcttggaaatatatatgatgcaggtatgtcccagttatccctaccaagctccacatatcagccgtagaatagggatcagttctggcacattttgccttggtgacgatccaaagaaaatatacatccttgagagaccagagagaaagtcaatatgaggaaaagagctagtttgcgaaaattcataaaaaatcccatgagtctggtagagaagcaagaaggactggaatcaagatcgttccatttatcaattactcaagatggtaagatagccactgaaaaagttcacaggtgcaggtatggttgtgaatgatttatatgcttgattcatcttttgaagaaattcattctacactaacctttactcagggacgagcaaagggctaagtgtggggggttttgttggcggctgttaaatgccgattctataccgccaacatctgcataaagattagataataaaacatctaacatagtgataggtgcttatctcacgtattccacaagtgttgatatatatttgtatgcaggtaataaaccccggtgcgggaggaaatctagactaaagtgaggagaattctgtatccatacaaggatgggttgtgaacttcatcgaaacatcagtaaatcagcccaaaataccaagaaatggatagaggaggaccaggggaggacttgggccaaaggccaagccagatgggtccagcccaggttcggccgaaccccctggttcggccgaaccacaatcttagccatctaggctggggtttggcgtggacgtcccagatgcatccctgatggcggttggagggcacttcggacatttccccttcgcctaccgtcatacctacccctatataagaacatcatctcattcacttctacacacacttccaagcttgagctgaattataagaggctctattgtactatattgtatactagaataggaagagagtagagtagaaggagtcggaagaattccggagttgtcggtaatcttctcctatttcttttattctgtttattactctgaattcaatataatattcttcttgagtaatttagatttatcttgtgagaattatctcttggttagtacctaaatagcatacgggattattgttcactataatcaattaaaatatagtgattgctttggtgagttataaacactaaagtagatattaattgcctagatgtggtgtttaggtaattattatccagtaattgttgcgtatcccacagtacgtttgaggtgggtgtagaggtggtgacagccctcgagatcactaaagtcctccttgtccgggtacgtagtagagtgacatctgggaacagtgggttgccagtgcctgaagtattgcgttaggattaaaattaagctttccctagacactgtttctcactagtaaatcctctctatcctggcctatctttttcttggtgtccttggataaaccggaggatgatctgaccacacacgttcccttggattcgatacccttggaatactccgtaggggaggtgctacttcggtatatccatgcgcttgcggattttatctgtaactgtatcaaataccaacagcatgattccatagaagacttggtatatggtggcacttaagaccatcaacaacacccccacacttattatttactcgtccatgagtaaagctcatgaatccgctagagtaatgactttgtgcttaatgcttaatgatatgacataccaaatatcctgagacatacttgagtctgtgaatcttgatgtgtctaccatgtcatattgagcgatcgaaaaacggaaccgtcctcgaagtcacctttattccttctgatgaattaccttggggttttctttgatgcccaataaaacatactcccttcgtcccaaaatataacaacttttagcactcaggatttgttctaaaatatattaacttctccaccaaacattcccttccctaccaatcacaatcctccatcattcacttttctcacatacctccacttctcaaagtgtttattcctcaccaaggcattgatgttgcattgtctaatcctacctttctaataaagcttatgtggagcttatggtagggaataagaaatgatcatatacttgcatcagatatattgtaaagtcaaatagaggattcaagaagatatccaatcatataactatgactaatcttgtgcacctatatatatatggccatatgggtggaaatggaaaggtggaaaagaatttaaaaaatgggatggtgactcacttttttttgtatgattctcctccatgctcttttattttagagaacatggctatactttttctttccatcatgttcgagaacattttgcatcattcacttttgacgtagtatttatttggtggatgctgactctcgacgtagaagcttagcatatggaaatggatgaaatgtttttgataatcctccattgtagagaaagagtaatatttttttgtggctaagtgcacaagattttggtcatcagaatatgaaaagaatctagcaagggttgcaaccatttagcaaaactcaaaatggtagcaagcagcatatgtaaaaggttttatcattaaaatcaacatatggctttggtaggaagggaacatcaataaggagtatgtaaagttatttattttccttttataaaattcccaagggttcaacatcaagagcaaggttcatatcattgggctatttctcattaataaataacatagataacatatggtcctatgaatatgattcacaagcaacaggtgtgtgtgttgactttttttgtggtcaacacagaatcacctaacgatatgcagtgtaaacaaagtcgccaaaatcgatatatcaaaaccgtctagcggaaccggttcaaaattaattcacttttgcggaatcaaatgactaatttacaagcaaattaattagcaaagaagataaatatcatacttacgtgacgacgaacgactagtttccgagcaaactagcaaaggataaccttctcgttttcgtggagaagcacaaccatttttcagcgcaaaagagcaaagatgaactaaattctagggtcgctagaactcagccatgaaaacaaaatagaaaagaacttaaaaagtaaaagagatgaatagtagattgaaattgttcgggtgtctctaacctgatcgaccatcaccagtatatatactgggcaaggtagacgatcctttagcaagtctgatgatatcggtcccacacaaaataaaagaaagattaaccgaaaaggaaacaaactaatcctaacaaagaagtttatctatcttctagtccggcacgcgttaaccaatctgcctcattgcatgcaaaccgacaccaaatctccatgcctcatgcgacgcacgcataaaccagttgcatattcatctcggtcaccagtgcaaacccaacgtgaaatcctcatgtgcgcttggctcatgcttctcctctctgacctccatccaaagccgtacgtcaagcaaatatcagctcaaatcagccatcaagcaacaactgaagataaagcatcatcgattctccatctgcatgcatccagtcccagtccaggactccaaatacagagctactcctttctcgattgcagcactgtagcccaactgacatgcacacatatctccacacgacacatgcatgatcaaatgatcgaataaccctgcaatttacatggatagccacccaatgtatcacaaattcctgcacatgtaaactgagctgatcttccaagcaaatcatcagtccattacaccaattattctaaaataatctggcttgcacaaataaactaactataagccaaattatgccacaaacagtgtgtagggaattagaagttgttggcggttattaaatgccaattctatacagccaacatatgcataaagtccatataataaaacatccaacatagtgttggtgtatatttgtgtgcagatgataaaccctgaagttgggagggtaatcagactaaagtgagggaaaacatgtatccatacaaggataggttgtgaactttatcaaaataccagagaatcagcccaagactccgataaatgaataaagcaaagcagagggagtccacaggccgaaggccaggccgggagggcccagcccaagttcggccaaccctggtgatcaccgttgatcctggggtttggcgtggatcctccagatcactccctgatggcggttgcggggcagttcggacatttccccttctcacagcctataaaaggagcttcactgcttcactctcacacacacttccaagcttgagctgaattataagaagctctattgtactatattgtatactagaataggaggagagtagagtagaagaagtcggaattctggagttgtcggtaatcttctcccatttcttttattctgtttattactctaatttcaatataattatcttcctgagtcatttagatttatcttgtgagaattatcttttggttagttcctaaatagcatacaggattattgttcactataatcaactaaaatatagtgattactttggtgagttataagcactaaagtaaatattaattgcttagacatggtgtttaggtagttgttatccagtaattgctgtgtatcccacagtacgtttgaggtaggtgtagaggtggtgacagccctcaagatcacttatgtcctccctgtccgggtacgtagtagagcgacaactaggaacagcgggttgccagtgcctgaagtattgtattaggattaaacttaagctttccctagacactgtttctcactagcaaatcctctctatcctagcctattctttgcttagtgtccttggatgaaccgggggaagatctgaccacacacgttcccttggattcgataccctttggaatactccgtaggggaagtgctacatcggtatatccgtgcgcttgcggattttatctgtgaccgtaagaattaccaacagaaggtatgtaagttattttaacaggcaagtcagaaactctagttgatcatgtcaatactccttgaccttgattcgcctataatgtcatactttggtttgtttcttgcacattctgttattgtgatagaatgtgtctctccattcctccagttctgacaggtgcatatgttggtgccgtccgacttgtcccaaatccatattctaagtccggatggcccagtgcgccctatgttccagctcaacaggcaggtggcaagtcttttcatagacaagctagtatggtgacattccgatggacgtcttgtatgcggttctacatgcccaaagagcatcaggtagcttatgcttccatgttttcccctctcattgacggctttctgcggaatattcttgatttgcttattgtatgtttctactttaccacctgtttgggggcggtatggagttgcaatgttgtgttgtgctccaagctcttgtaagaagttcttggaggtcttatcgataaaatgagaccctcagttagtaatcaccatccacggtgttccaaaccgagggaagatgaccttgtggaacatcttgcgggcgtgtttgacgtcgacatgaaattgcttccacccacttggacacatagtcgacggccaccaggatgtgctcgcagtcatgggactttgggaaggggcatttaactttttgccacttttaaaatgttgcaattaaggatttgccactcatagtctatgacatgtgggccctcatgtgtctatggcatataggtccagtgacaaatccttaattgtcatttgtaagagtggcaaatagttaaacatgtcctttgggaagggtttcatgtagttgataccccatacattaaagagttccacttgaatattgtatgttaggggcatcgcatcgcgagcggtgatacctacatgcttctggcaccttgcacatctttgaatgaattcttttgtatcttcatacattgtaggccaaaaggatccattctgccagatctttgattggctgaagagacaaaaaaaaggaggagaaaatgccagccgtccaaataaggaatgggaagcaaaagggcctatagcctagtggctacaagagcctcagtagcatcataggtcatgtgttcgactctctatgagagtgaatttttcagaatttgatggctatgtgctttcagtggtaggcgacgtacccgtcaataacaggggtagggtttgcgtgcgttttatagggtgagtgtgtgtgcgttgtgacttcgtctatctccaggatggatttgccggcccagtcttcgaagatgctcataggggtagggtttacgtgcgtgcgttcatagggtgagagtgcgtgcgttgtgagtgtctgcattgtactgtctaattctcaaaagaaaaaggaatgagaaaaaaatatataaatacgacgtctaagctcatctgctcatggagtggccggattggtcctccctcaatctctaaattttgaggaaagtctaaaattcattcactaactttggaaatatcttatatccccgaaccatatatctatgaagttcacttttcatcctttgactggagcgaaaagtctgaattacacccctaaattttaggtgagtacgaattacccccttaaacccgaaaaccagacatctttcactctcaattattaataccggatgaaaaaccccctcgaacagctttgcaagcggttttgatcctatgtggcagttcagtcaacaattattttattaaaaaattgatgggccgacttgtcagatctctcctctgtctctctctctcgtcaaaatgccatggaggaggcgcgccagcggctgcatgcgtctcgcagcggaggccgaggacgagttgcctccaccccccgcccccattggccactgccctcggctccccctccgccaccccgcccccgttggtcgccgacgtcgactcccccttcgatgctgtgagctgcctccgcccccgcatctgccctccgccatccttggctcctcctccgtcgccccgactgcctccgccctcgcccccttcggccaccgttgtaggctccccctccggcgctcccctcctcggtgataagagagagatggaggtgaggggagggaaaagagagagatgattagggagagagagagaggggggaggggaaagagatacagatggtgagagactgacaggtgggaccaccgatttaaaaaaagtgctaactggactgccttataggaccaaaaccactctggtttgagttaaggggataattcgttcggtattcgtagttgaggatgaaagatatctaattttcgggttagggggtaattcgtattcaccaatagttcaggggtgtaattcggacttttcccttaggctgtgtttgatttggcggggtggccgagcttttcaatgatcataacatgagaaaagttatggctaattaagttacaaacataaaaaatatatttatttatttttaaaatgaattttctatatacatatttttaaaaagcatataatgtttaacaattcaaaaaacttatgtaaaaagaggtactagcctaatggagaagctgattgaaactcaacctcaaattaggttgatgacatagcactaatgtgacaatgtggcgtaatgttgaaaatatatattaattaaaaatcactaaatgatcttgaaaattctaaaaaagattatccccttatccatgaaacatttttaaaagaaatatttttacaagcaagatacatataacttgcttgtcgaaagtagtgctaaaacatgacaaaaaatataataaaattaagctttatttcattttggacaaaatttatgtaagttctaatccgtccaatttgtaagcgtatttccttttcaaaagatcttttcaattcagctactaatttaaaatttaaaataccaaccgatggatggtattatattacatttaaaattttaaaattgataatttactttaaagagtatagaaaatgtgggttacacatttgtgcatattaaacctatataaatcggacttgttacaaaacaaaggattattccaagaaacaaaatgattttgtacggatcatagaactattttctgcaggcaaactattatatacacaactcaagaaaaaacaatctaggtcagtacataatcgtatataacaagtgatggtttttaaataaaatttgcatttatgtacattttttaaatttaaaagcattttcagccttaaaatgaactgttgatgtcatccaatatctctttgaatcattgaaaggatgagatgtgactgtatagaaagttaagggtgtagcaaatgttcaattttttggacattgataaaagttccttttttcttgaaaagtcaaattgggcgtttgttgcgcacctgaggccctacatcctgtttttctgagacgagatcacgagaggcagagtccacgaggccacgaaagcgctccaccgaccaggcgcccaccacctgttcgatcgaatgccgccgccggccaccgcgcgcggcgcccgctccgccgcctcctccaccccgttaggcgccgccggtggcggccgacgagggcccctccccgaccccttggcgcatccgctcccgacgcccttaccaacctctccggctacgccttccgccccgacctccgggctcctccatcctctcgcaccagcgcgccgccctcgcgccgcctcgggcgcccccgttccaggaccgcgtcgtccatgcgctcctcctcctgctcctcgagcccgcaggccccaaacctttcgctcccaccgccacccgttccgtccgctcccacttcgccgctctaccctttggttcatctctgccgacctcaccggcggtggccgacgcgctctcgccggatactttctactttcctgttgtccagaagaccgtctctgaccgcaatgcccatgtctgggctgtgtttgtgccaccatgataggagcttgatggtctagctaagagaagaggctgaaaaggaaggtgctcaggaagaacagaatgtgcccccctgagttcctgacccatattgattgaggttaatacttcggaagttcggatttaccctggaacaggcgtgtcatgtgccgaattgtgggcattatggtatacttagccattttgcctgccaatgtgtgccttaacaaactcaattggtggatggagggaaagatgcatgagtacttctggccaggcatgattcgattgggaaggaggtgggtgactacggatgcgagaaacgcccagggtcttctggcttagctccacaaggtggtgggctagacgacctaggttcgaagcctcaccccttctaattatttgatattaggtccttccctaatattcgcatttttggtgaccagggatgtccgcctggcctgagtttgtcccatgaagtgggaaggagtaaaacaagtaagatggattacctaagatgtggtggttcccatgctcttattgggatcaggggtccaagggaggacacagttgaggtaaaggatgatggagttctgcaagagcacttttggtttgaggcctgagaaagtgagatatcaatggttgggattgagcacatgaatcaatcaagttcttggatcacgtgatcacccgctgggttatctaccaaccttacaatatactgctaatggaggaaacattgtgagtgacaagggtgttggaacactcttatagcaaagccttcagaggtgggaggtgcataaggcatttaaggagtcttgaagttgttgccacgttcaccaatgctgtactctgggcaggcacgcacaatcctcagatgacaaatttctcgagaccatgtctgattagtacatgtacacagacaaccggaagaagattgtaggttctgttgttatgaaactagtagcactaacagtacaaacaatttttaaatgtttattaaactatagaattttaacacgcattatattgcttttaggcttaaggatattaactgaaagtcatgatgcttatttacccattgcaataggactatacatttattccgcatgtactctactgtctttccctaagctaccagaagtaggagtatgtgattactgttttgttctttttgctcttgtagaattccactaggtgtgatactgaattatctattgctgctctttttttgtttcttgcatttcaaacagaacaaccttgaataaaatctatagtaaacgaactagcaaacaagaacaagagaatttcacatttattgatcaaatctaaattgatgtgagttctgtagtccttgatggacatgcaagttgcttatcctcacttttcagaacaaataatctcatatatgatatagttcctgcattttctaaagattcactaatctttcttctcttttttctttaggaacagttctattggagcaatgttccttgactcaatgatagcagttggaattatttgcatgtactgcttggaggtggcagaccactggctatcagatgcttcctgcagaggtaatgtctgggtatcaaggctccaccaccgttaggaccagccaggtttgatcttgagctggtgctgactgggagatttgatagatattcttgttgtgaggctgattgttttcaattctcttataagttacaatcgatgcattgagtgattaagaacttaatctactgccaactacagtttaagatttacccagtcactgggcttcagatgaaatatagagctatctcccattaaaattaaaatagaaaaatatttccaggataactattcaggttatgcttggaagttaggtttctctgtctgtttaacctaccatttctgcatggatggagaaaatcattgatgttgtttagtatgacttaatatgtatactatcatgggcatgattagatgactgatgactctaggggcctaactcccaagcggtacaaccacaatgataactgttgcccatgccacaagtggcatggaagatagactaggaacttttcttactcctaccaatggtagcatatgcgactccttttcctacaaaatctagtttctgtaagctcaacctaattgcttttaacaaataaagataacattgaggcagctaagatcctatcctaaaataacttgatagttaagaaatcataggtgtacctagctagtgtggctgttgctgcttgcctcttttatgctgcagcatctcattatggtaaccatgaaaagagtaatggaccttaatggtctggagtctggacatatgcagcagaaaaatatgaatagggaagggcagaagagggagggaggtagattacgcttgatttgttcctctgtacaagtctctttaaataaagagagggctcagcacggcaataatcaaatcttaaacatggggaacaatctgtagtttgatggaaacaattaatgaagtaattgcttatttcatagccttatttcctaacacatgatcccacctgccaaacagttccctctcgtgcacccacaggacagattagaaattactctttgccataattacggatttagttcaactcttctgtatttagtaatgttgtagtggcaatggaacgagtgaatttatgcttaacaatgtataactctgtttccagcaacatgggcataagactatgatcagtgatcaccgccatcttaaaggtgattctttcctgctgctggttgtagttacctgttctgttctattattatggatagcaattttttacatgttccagtttatgcatagaacaacctaatatgtgaccaaaaagtatgtcatcctcattagtttctgactttaataataatagacccagtattctctgcattccacatgaacaaaagtgaacttttgaaaagggcaaaagaaaaagaaatccaaaagttcaattacttagtgttttgttgcataataatgcatgacaatcaagcattagtttgaatcaaccctacatcatcagcattctctgtacgtcacatataataaacaattgggaagggtaaaagcctgatctgtgatgaatctgatgatcaattttcttattttcttaatgaggggtagtgtattgcatattgctcaagagttcactttgagggagatgactggtggactttgtaaaacctgtttgagtggtgatgtaaggagcccctggaaagtgactttaccttgttttgtcatattaaccaattggctgaagttcttagtgacgtcattgatgatttcatgttgatattgatatctggttcccagcttaacttagtaggtactatgtagtacaaaaatattagtgaatagtgagctgcagctgtatgtttgtacaactgtattgctgtaggacatggaattattatttcatggtctaaccttgcttttgatatttgtagttgtacttatgtttgcattttgtatggtgtctatttatcatttattttgttagatgttccatcatgcggatgagcgtatagcatttttattatgttaaatcctggctgccacatttgtgcccaccttactgtacgaggtttcggtgggccccttcatttgaactaagtcaaaggggacgtccttcccccttgatcgaaaaaaagatgttccatcatgtgagcataggctgtaggtgtacatatggtacatatatgtatagctcttcacctggtggaaagtgttaaatcagaatagtataaaattttagtccatgcattctaagatgcttcagtttaaacatatatgtttattaccagatctaggaaattatgtgctcctgcaacttccatttttttgtaattcaaactgatatttccatttttgtttcgtggtgcagtaataattattttattggcaaaaggaaggaaaatttaatttggttttttactagtatggatgtgatgtttctgaaacataattttgccacacattgttggtgtaacatacagattgaggtattgagtggtacaatatatataatatatccaatatgcgaggagccaactgatatcaatccatcaggtttcgcagtgttagaacattggtccgtgattcattaatgccgctatggttaaatgtcatataatttggtttgttttacttgaaacagtaattgttggaatttagtcaccctggttcacccccatggtattttaccatgatgctattttgcacgctagaaaaccagcccttccccctatgagagaatgcatactcttaagttttgttacatcaatcagccctctatctgtacgatccagtacaatttttggctaaagttggctgtcctgcctcctgaggcaaaattatacagcattcgtttgctagttgtcacatgtttggttttggtggatcttttcggttggggaaacccatttgtgaattttacatattcgctgttcagcataggtgcacttgtcaattccgaatgtcagactgataaattttcacttcgattaagctaagtatgaggttatgagtatacaaaggaaccatttattttgttctctttgtattgcccaaaacacaatatccctttatggcttgtatgtggggctttgatttttgtatctattgtaatctacgggacccagcaacaaattcatgttggacctcctttcgtgctttaccagtgcttcattttttcacaaccacataatccctctatggcctacgtcaacttggagtggggttgggttaattatctagtagcactgatggaatgattttttgtggggttcacacctttcccttttgtgggccactgttgtaatgcagaaagtgttatggtgaggacggctcgttggttcacagggtcaccagcctatgataccatgggcaggagggaagtcatacagatgacctaccgtgtttatgatctattaacaccatattcatcagaaaataagtgtatatgttcttgtcattgcttttcttttgcaggatgaccaatcctggagtacattttgttttaaaaatttcacagtatatccttttatcctttctggaggttacagtatcttatggacagttggctttcaggtatgtcatgggtatcctgtgtgcattatcttacaactttataagcacccagaaaactaatctcgatcagtgttgttcatatgcagacttgctagattaaaatttactctcatgacctaaatgcaagttaggaggtcactgatataagattagattaatctgatctttttatctctttcagttacacataacgaacgatttccttccccaatgtgaggcatcatcctgtccctgttgctaaatcgtgtcagattaacttttcatacaggatcacagttagaagttgagaagccattttcacatgatggaaccctttgtatagtagtgtataatgtctgcattagatatctggcccctttcaattattcgtattggatttctgcactacccaaacccaaacttgcctggataacgactgctctcaacaaaagccttatcattctggtttgtttgttcttccatatcttgcgtgacacaccatgccgtttgttgttcttgttttcttcttttgtgcagctctcctttgcgtcatgggatttgtttctctatcctatcctatgtgctgtacaccatcccgttttgcgcaaatcctttttttgtgtgttgggccgcttcggctgctgcggttcagtccttttcgttgcagcaacaatgagttctgtcaaaaatgaataaagttgtggcatatgttctgaagaatataatatattccctgtgtgtgagagagaaaaaagggcctcatcttttgttttgtccctttgatgacagctctggattcttcagtttggtctactgggatcatgatggtgatgatatcctgcagggcaaccatatcaccgtggggcagcgcagaaagaaagaaacaggtagaaaggtagaaacaacgttcgagcagcttctctctgttatgtttttcagattggagaatggaagaaatgcagaattattctccattctgcgttgctgaactttttttttctctgaaatgaattcaggtcagaggcattgacattgaccaggaagaggattctttgttcctcctatgttgtttgatgtgattcgtgctgtttatcagatgaacttgactgtaattaacagtggagaattctttctggtgaaattttcacaggaggaatcagtctctcgtcttggtggcggttcttgatccgcagaaaattgaccggactgctgaactaacgaactgccattattatacagtaccccgtgtgcttttcccgtttctatcgtctcctaagccattgaccaaaatttattgtactttaactacggatttactcctaattgaatacaggcgtacgcgttgccgagtcccgtgtgtcacctctcctgtcccgttcacgtttcgtcgaattatattattctgaaaattgtagtccgttttattcacgtttcgtcgaattatattattatggaaattatactccgttttttttatataacgccattaacctttatacgtttgatcattcgtcttattaaaaaatatataattttttttcaacttaatttatcatcaaatgtcctttaagtatgatttaatttttcttatatttacataaaaattaaataagataaatggctaaacgtttataaaaaaatcaacaatatgatacattaaaaacgaaggttgtataaataaaaagggtactgcctttttgcccaagaaaaaaaataaaggagaagagaagattaggtagagtatactcggggttttttttttaatcttttgtcgacgtgcgaaattcacgcatgcccttttctttccctgagctcacgtgcgtcagctctgagccgcccgagacgttgagatcccctgaggctgctggattttataatcctagttgtggcagcgttacacgtgatgatcgcgccaaggcagcatgggacaaagcgaaccggctaagttaaatccttgttgctgcggtgatgatttctgtgcacgagaaacggaatctgtgtgtattattgttttctggatttcgttgtgtacttgtgtaactgtgcacttgtatatactacgtaaactattacttaagttcagttgaaaattcggttcgattaggatatgttttaagttgtgtagaattgtgaaatatttcttatttaccttattattaataattatattattttctataagaagctttgttaattccattgcgcattaattttacttagagaaactataaattatgattagtatatatgatgatgcagaccctcatggtttttaaaaaataatacatccgtcctaaaatattgataactaaatagcaatactctaggtaacaatactttgagacagaggtactatgtttgttctaactagtataagcacttatcgtgaaaataagataccacatatattagctaaacttttaaaaataactcttaaatgaaaattcgatgaaagttctgacatatagaacaaaatatgttaaacttactattatttcgattatcttcgttgagaaactaaatctctctcactattacataaggtagggtttttttttcttgttctttttctatttaactcggtcaagtttatcactgtgatatttaaaaggtttagcatggtatttttaaatcctatattttttcattgctactatgtacgagtactatgttttaattttattttaattttagtttaagtagattgtgttttgttcaaccgcactcccactacaattttggctggatgcaactcaaaccagccacagaagatcggtctagcccgtgccaacgtgctgctcatcccaatgctgccgtgccatgccacgcaactaacaccatttccaattttccacccgcaatctatttaggatttgtttagtttcattttttttctaaaaacatactccctccgtactcgcaaaaaaagttaattagaacaacgacacggtctccaaaacacaactttaatttcttgtttctataaaaatatttattgaaaagtgatatatgtatacttttatgaaagtatttttttaagataaatctattcatataatttttacattttcaaactcaacaacttgatagttattcatgatttatattcctaatgtttgacttaaacattatcctaaacgacttcctttacgagtacggagggagtatatcatatcattcgacacatgcatgaatcattaaatatagataaaataaaaactaattgcacagtttgtatgaaaaatcacgagacgaatcttctgagcctaattaatccatgattagccataactgctacggtacttacatgtgctaatgacggattaattaggcttaataaactgggttaataaattcgtctcgcggtttctatgagttatgaaactagttttttcattcgtatccgaaaacccctttgacatccggtcaaacgttcgattggacacccaaaaattttcttttcacgaattaaacacacctttatcacttctatttcgaaaattcatttttagaaatgcaaacaaaatatatactccaactgtttcattataagtcatgactttttttttcaaaattctttatgtttaaccaaatttataaaaatattagcaacacctacacaaaattagtttcattatatttaacattatatatatatattaatgtattttaattaaaaatattattatattttttataaacttgaagcttgaaaaaaaagtcaaatgacttaaattacgaaacacggatagatgtatacaagaggaaaatatatctcatatttcgaaaatctatttttcgaaatgaatagagagaaaaaaaaaacagaaagaggcttcgctttgggctcctactactacttatagccaacttccccgaaagcgatccctcctgctcgcgtcgcaacctcgccttattatttttccactcctcacctcgaattattccaataataaaaattccacccaaatttcctcgattcgattcttccagcgagctccgttctctcctctcccccctcctcctctcgcgtggttgcgcgtgcgatcggaggcggccgggctcgatcgatccgcgccgagatggttgccgtggcggcggaggccccgatccgcgccgacgccgtgcccgcggcggcggcggcggctgctgcggccgcgccggatgccgccccaggtgagggggcggatgcggccgcggcggtggaggcggaggcggcggggaaggatggcggggaggaggtgagggagtacaagagcgacgcgaggaagctggaggagctgttcaagaagctgaacccgtcggccgaggagttcgtgccgctggcgcgccgccgcggcggcggggacggcgcgcgccggctgtcggcggacgcgcccgtgttcgtgtcccccgcgatcgacttctactcgcaacacccggtgcagcagccgccgccgatccaggtgctccccgtggtggtgggcggtggcgggggcgcgggattggactccagcagcgacggatccaccaacggccagccgaatcgtcgggtaatcgatcgcctaatcgcgctgctgggttcggtgcgattagtttcgctgtggggggtttggcgtagattcattgtggcatgatcgatctctatcgatcgatcgatcgatcgattgggatttggggtttagggtgatgttgttgtcttcattgccggagttttggtctctgacgcgatcattccagaatgttgattcatgggcgaggggggtttagttctagttaggttatgatatttatgtgatcaatttaagacgaattttcctcgaggaccaattgattt

SEQ ID NO: 19804 - DNA, 3406 bp, Oryza sativa
atttttgctggttgtattttgatcgagttattttttcttctggttttttatgttgacgtttttgttagagaaattgcttgccacgatctgtacagttctatagtcactctagtgggctttacgttttttctttgttgataattataagatgtattttgttacagagaaggagtagcttcaaccaagggaggaggaggatgggaggccgaccaaggcgaactgatagggaggatagtgtgcggcgaactgtctatgtatctgacattgatcagcatgtgagaatatagtagagaatgagctgttacatttgctttgacatttattttcctgactgactgacctgaagcttgatccattcgtttacaggtgactgaacagaagcttgctgaagttttctcaaattgcggacaagtatgtttctgatattttaatattaattacatttgtgagaaaacggactttctcttttcttatatcttgaaaacaaacaagcaaagttggttgtcttgtctgacttaataatttgcaagtgaagagaatattactgttatcatcatcaacaccaacaatagccattagtttcaatcaagttgaagtaggctagagatgaaaaccaagtcaaaccgcatgaaccaaaaggtatatttgtactaaaaatataatagagattctgacagatattctgtagtaaaatactttgatgacttatgcatatttcaagctagaaaactaacatatatgtatagtattttgcagagtagatttaaattcattttggttaatactttataacaccagagtgacaaagagtgattttgcattgtaagtatggagcacaacttttctctatggtaaatgactaaatgcagttgggtgcaaccctaaagttatgattcagttgaatgccactctagaacaagtacagcagttactttcgacagctgcttgttttagattgtgaccttgcccggcctgaatggattgtgacttagcacctagacaagaccaacttgtcagaagaatttattattggcaggaggtaatagtttcggaaaaaaagggagatcacaagatgagaaatggaagaaacttgcaggaaagcaacagttaatattttagttgactagcatttgatagagccaatattctgtagttccattttcctgaaatgtttacttcagtatgctggtaatggtgttcgcttttttgtaatgtaaactgaatgcaattgctaggccaaaaaccgagttgtattgttttgtttgattaacatcatgtaaggtaattgcattagatgtttatgcttatgaaatagtaacatgatgtaaggtatctccaagttaattatggttgattgttaatggaagtcaaaatatgagtaaattgcgctcgtggtacatgaacttgcttggtgggtgcaaataggtacaacaacttgtaaattgctcgttttggtacaataacttgcctagtttgtgcgaacctagtacaaaacaacacacacatgcaaaattgatctaatgtgtagtaccagataaccagagtgagacatatgcacgctagcaattgtttgtagttgtgcagtcccaatcacactagcttaattttgaacatatcagtcaacaacaataattactatattgcaatctcttgtaggctgcttgcactactagagtacggattttatttttcaaaacaaaacaactactagcgcgcaaagatcaattttacttgtgtggattattttggcccatgttcgcacaaactagtcaagttattgtaccaacatgagcaatttacaagttgttgtacctatttgcacccacatcacaagttcatgtaccacgagcgcaatttactctcaaaatattgtgtgctcagattagtaaacatgagttgtataccctatttggcccatctacaataaaatgcaggaacttgacatcatgcgtactgagtgatgagctgagcaaagttcagtcacaaaacagtattgtttctgtactttttatagactttttcttaaatgaaattgatgcctcaaagttaaagttgtgctccgttgaactttcaagttctatttctttctaggaaatccagtaaactgatccttttgacggtagcactagtactacttttgtgggataactgctcactttcacttcctttttttttttttttgcatgtttcagtttctaaagtgtcaaccaagtccaattactggttatgacgtatagatatttggtagtaaggctttaataacacgcaactaataagactatatttcttcatccctgcatgcaaatggtgtgcctaatgtttgattcttagcagactggacttaatttcacaccatcctaattgacacacccattaatgaccgtcagtaggtgcctttcaagaaacataaggatgatgtttgaagccatatggtgtaaataggtagtttggcataaatatttcgcgtgccagttcatccacctaaaaattcctgaatctgcccctcttatgtgatgtttctgcatgggtaacacttcatgctaccttttgcctcatttgtcaatactacatctgttttcttacaaccatcttctgcacttataggtggtagattgccgtatatgtggtgacccaaattcagtgctgcgttttgcctttatcgagtttgccgatgatggtaattcaacgcaaaattcatctcgcatgctcatttgttgcaagaagcaatcctgaatgaagttccctttttcctgcagttggtgcaagagcagctttaacacttggtggaaccgtgcttggttattaccctgtgagagttctgccatctaagaccgcgattttgccggtgaaccctaaatttttacctcgagtaagtaaacagattcgggtattttgatattatactaattgatttactctgtagtgtaataattattgtactagttgatttccgagatctgtagtgtaataattaattggcataatttcgtttctctctcgcagacagaggacgagaaagaaatggtgtcaaggactgtgtattgtactaacatcgataagaatgtaagctgatctctctatcatttctgttatgcttataattgcacgtatgtattaaaccacatctaaaagtttggcctacaagatttagttcaattccctttgaatgaatgaactagctgaaggctcacaatatgtcattgttgtccaaatcacttcctaagtaacctgacatgctacaagcacttggcaactgaatgaatgtgataccagtgcattaagaaaatatcatatgtcagaaatacatattgttttgtttgcactgagaaatagtaattgtaaaccttttctgcagtcatttatgagctcatctttctttgaaaatgcaaattcttgatccatgatt

SEQ ID NO: 19805 - DNA, 13966 bp, Oryza sativa
ctatagattgactgcatcgacaatatagcaataggaaagggtcttaagcccttatggcatacttatatattatgagagtggttcttaattatagtagtcctttggatgagctaccgtatgcctaaggactaaccaccaggggtggataacgagctagcttggctcgttaagtctcggttcatttgagttcgttatctttaacgagttagcttgtcttggttcggttcgttaaggttaacgagctaaaagcctagccctgctcggaagctagcttgttaatcatcaggcttgtttaagtatttatatcatctttataatttttaatatactactttaccaactaatcgattcattaaacataaatagtttggatggaattaaaggacagatcactagttaattaagaaacactaagtatgtgaacataatgttgatcttttgaactaacgagctaaacgagtagctgtgagttgactcgttaagctcctgagctaaatgcttagcttggcttgacttattaagactacgagttcgagtcgatctgagccgagctcgctacagccgattcaagccacgagatttgagctttttgtccactataactaaccataaggaatacattaaggttatctctctctcccctttgccacccccctcgctttcttgtgtctttacttactgttacttttttatgtcttaataggtctcatgtctaaagtgcatctagagctcaccattatagcaacaaaaataactgaagaccattattatggggcctacccataaggacaatatccatacacattacccttagtgcccttaaattccatataggaaactaagcaatgagttcaaacctcgttttacttttcctttgaaaagcccaaccggcaaccatcttctctctctgtttcctcttatcccacttggaggattaacaaaatccccatgttaaatgatctctgaagaatatatgcataaggagagattatgtgtcgcgagtttcttactagtgataacttgcgactttgtgataacaacgaacctgacgttggaggaaagttttgaattcaacgaattatatcatgtttgtttatggctttatttgagaatcaagatagcttatacggtcgagtacggtactagttgactttagcaaaccgccaaacgtcgtaggtatggtgagcagaatgtcaacgaagcttgcttccgtaggttacatggaagttaaaagggagctaattaattaatcttcaccgccaaacgaaaaaaaagatctaattaattttgttgttattggagaaaaaagaactataatttcacgcaatgtcaaatctgtatgccaatggaccacatttcagatgataaacaacagttaaactaaatgtctgcctgtttcaagcagaaaaaactgcatgaccccatagaactaattcatgccatttgctcttggatcgattcatgatccattttgtagaaatcagaggacgcgcaaagaagactgcagtcggagtgacgctgctaagaagttgtaacaagactctgttagaatctactgtctttcgttaatgaaatgggagagggctagctccctctctttctaaaaagaaaatcttggaaattctataacatattttactggaatctttaatttctcagtgttctttaattacaaagctgtaccaaagtatacttgccaatctagattaaggttcaaatcaagaaatgacatgcaagtggccccatcgtatatgaactaatactaaccatgatatatactcctatatgtgatgtgatgatgatggagatctagttagctagcacagagctagctacaccggtggcagcgcctccgtcggcgacgactcatctgccgccggcgcaggtcggccgccgccgtcccccggcggcggctcgacctccgtccggcagagcgggcacgtggcgtgcgaggccagccacatgtcgatgcactccacgtggtacaggtgcttgcacgccggcagccgccgcaccgcctcgccgccctgcaccgcgccgaggcacaccgagcactcgccgccgccgccgtgcctcgccgaccccgcgtacgcgaactccgggatcttggccgccacgtcagcgacgccacgcagtacgtcgtcctctcgcccgccggcgccgccggcgccctcggcggctacgactggcgcacgcctccggacgtggcggttgcagtagaagacgacgacggcgacgagcgcgacgcccgtgaggccgacgcaggtgtagctgaagatggccgtccctttgccaacggactggttctcctgcggcaccggcggcggcatactcatcgtcgtcgagccggaacgcgaacccatggcgatggcgatggcgatggcaatggcggtgatttgagctttgtccgtggaggaatgagccgcggcatcgggtgatcggggagagataaggactgtggtgttgactaagtggagaacattattttttaaccagcgttgagaattgagattgcacaggtgtgtttgcagtgaacttcctccgttaaaaaaaaaaaaacctgagtttccatgtccaatgtatgactgtccgtcttatatgaattttttataattaatattttcattgttgttagatgataaaacataattaatattttatgcgtgacttatctttttaatttttttcataattttttcaaataagacggacggttaaacgttggatacggaaacccagtgtttgtcttttttaggacggagggagtacctctcctgaatgctgatcagattcagagaatcagagtggtatattatcttcgccccaaaacacttgtcattttgagttttttttaacgtttgactattcatcttatttaaaaggtaatagaattattatttattttgtttgtcaaaatacttttaagtatgacttatcattttctatatttacactaactttttaaataaaaacgaacggttaaacattaaaaaaacaaaacaacatctaatttggaatacagggagtacttatcacggacgagaagcgcttaattactagcgcgaaagtgacgcgttattaataaacttgttttgcaagtaactaatagttctccggtcaaaatagaaataacatattactttgactctatgaaatggttagttagggagggaggactatagcaaaatacacatattactaccgagattgctaatgggtgattgatcgcccctagtgatcagctcgtgccctctcccctccatccacctggtttttttttttggcaccgtattacttttctaatttagtaaatttatgcacagtttgtacacctcaagtttacatatctaaagtttagggacccaaagtttataagtcaaatttatatatccgattcaaatttaaatttgaattcaaatattttttatatatagtattttctatacatctaaagtttatacacctaaagtttatagacacaaagtttataagtcaaaagtttacatacccgttcaaatttgaatttgaattcaaatattagtttatagaccaaaagtttataagtcaaaagtttacatacccgttcaaatttgaatttgaattcaaatattagtttatagacccaaagtttataagtcaaaagtttacatatccgtttcaaatttgaatttgaattcaaatattttttatatatagtatttctatacataattttttccaactttgtttttttatttttttaaatttttatggtgtactatagtaggaagagaagaatgggaggaggaagggggagagaagggagcgtatagggaggggcggacgatcacccgcccattagccttaccctattactaccaacaatatgtgtaccgtgattcatttattgatggttgtttgaccattcatcttattattttaaaacagtgtaattattatttattttgttatgacttataccattaaaggtatttgaaccatgacttatatttctgatatttacaataaattttcatgacttatattttttatatttacacaatttttaattaggacaacacataaaagaaaaactacatgtactactagtagtaaggtaaataagggaatacaaataaataatggtaggaattatttttcttatattctcctatctccatgccttattaagacactctttggtattttctttctattttaggagctacagagataattctaaaaatacaaagattattttagcaattattctaaatacataagcaaatccttccgttggagttgggttgatttcagcctactttcttccccgtccaccgttgagagagaaggaaattggcaaaaatcagtagactgtacactgctacggaaatttatctagacgagactccctttagttagtttgccgatggaccataactacttccacctacaaaatttgatctctagagcacgttttaaggaccgcatacgaaaatcaattttcgcagacgccccccttaacatgcccgcatgcaagacctcttaagaagccacatacaaaaataccccactctttttactcccgttccctctctctcccactaaggcctcgtttagttcccaaattttttttcctaaaaacatcacattgaatctttggacacatgcatggagtattaaatatagattaaaaaaactaattgcacagttagggaggaaatcgtgagacgaatcttctgagcctaattagtccattattagccataagtgctacagtaacccacatgtgctaatgacggattaattaggctcaaaagattcgtcttgcggtttccaggcgagttatgaaattagttttctcatttgtgtctgaaaaccccttccgacttccggtcaaacatccgatgtgatacccaaaaattttcttttcacgaattaaacaggccttaagtctctccactccacttctatgttttttctctcccgtccaccactcctgtcccttctctctctccctttggactccctcgccttcccccccaccccctcctctcctgtctcctcccacttcctctcctctcgacgaggcagcaacgggctcaggctttggcggcggcggtcttgagctcgagcttgggcgtcagtagtgggcaaggatgagagcggcaggctcagggggaggaatcccactaccggcggcgacgggaagggcagaacctgtgcccctccccctcttgcacggatcccgcagcctctctgcccccacgagcgcagatctgccgcggggcgatgacgatgatggtggcggcggcgatggcttctggtttctagggttagagttccgaggctaggtttctattttcagaatttttttttgcgatttttcattttcgtagtcggacggcttaagcgcccacatgagaaaatcagattttcacgtggggttgctctattcccatgcaaaaatatgatttttgcagacacctggtgcatgtggataacacactctcgtgcgaatatcgattttgaccgcatggaaaaaaatgattctgtagtggtggtagacacacataggccgaccagttgtaattttgtctttttttagcaaaatacatcgtattatctaaaagaaaaccatcaatagatgtgtagacttcatgaaaggtttgtacaacagtttcactatatcacaaaccgtagctcgaagttgttaaaaacatttcacattttgagtaaatgatgtaaaaccgtactcgattttcttacaaaaccatatatatactagtactgtctatattggtggcttcacattaaaaaaagtcaaattgtttttataatgtgaactcctaatagagactcgcacaagtacttagaaaaacggaacaaatgatatgagcttaccaagttcctttaaactagcttattaagtcgcgttttcgtgcgactatatataacctatctcgctgttaaatatgtttacatgttatttatggttgtggatttatcttgatttatccttatgtgtgaataagtgtttgtagagcattaacgggattaataatattcatccaaaaagggagtaacaatattatcatatatcaaatatttaccgtaggtacatacaaaattagtatttgaacaataggcttgtagtttgaaacagctaacacatattttgacggaataaaatgatgagtgtaagaatcaaggttagggtttttattggtcttatctgctggtatttctccttcctatctttgcatctataaccgtcttctcttctatgtttcttgagttgtgtccttcccttatatatatcctcctttatatctccgcttatggtacatatatttttgtaaattcatttttgtttgagatgctaaataggtgttcaaagaggaattttagttataaataaatagatatatcttctaataagtaaatcttaccacgaaccaaaatcagagaattttgcttactgtctcatgaaatttcctaaattatgtgcccgcctgccaagaaatggaatgatctagtataagataattacgtagccgcttgccatgctctagtattcattgtaggtttcgaaaaaaggtgccaagcaaaatcacatatgtaaagtgcaatacacaatggagtaaattcaaaatttataaggtccttgatgtaaaaaggtgagtaataatatgggagcatttgctaaagtacttttaattttcaggggagcataggataaaatatactaaagatgaaaatgaaagaaaagttccaagagtcagatgtcacgaacaggtggcattaggacttgagagctagctgtgagctgcacaaccctctttctatctctctccctctctcattttctccgtttgccttgttaccgacgaggtttctctagttctctctgactctctctcattctctagctgctggtctccaatggacgagctaggcccgacggaaggtggacatggaagccaagaagacttcactcatctttcccttgttgtgctcccacagtccctctacgtctcatcgcttcctctcctgttaattgctgtcgtgagccgacaatgtcaatgatgcagcagtgagttagcgacgttgcaggtgaccacttgagcactggcggagcggctggatggtggcggcgatgatagcacaacagtggggactggtcctctctctctctctctctttttttttttgattttactaaacttttccagattcttctttgccccaagattattttcagaccatttatcttatcctatggctatgatatatactttctccctatattatcgttgtttgaatcagacggtcctatattatcgttgtttgaatcagacggtcattattttgttgcttgcgtggctcatcctcgtttcatattgagatttacccgttcatttgtttagttttggtccctatgccctttttccatagaaaaccaagcaatgagctagctcaaacattacttttatttcccttttaaaagccaaatacttctccctttggttctcttttcactcttagcttggagcatcaataaaattcctatgttaattgatcaatagagaagatatctctatctctactacttcaaaaatccatagtggtggtcttgattcctaacagagcagacgcatctgatagacacacgtaatctcaaccatccgaatgccatatccaacagcgtcaatctcctcccccatcacgcgatcgctcatctcctctctcggattgatctcctccccacgccgctgcgtcgcctcctcgccccgccgccgcgtcgcctcctcgccccgccgccgcgtcgcctcctccacgcccgtcggcctcctctccagacccgcgatcgccgccgccctctccaatctcctccgcgcctccacctcgcatcggattgatcctacaccttcgccctcctccctgtgtcgcctcctcacctcgtagccgcatcgcctcatcagcagccacggctgccggcctcctctccagacgctccctcgccgccgccctcgcaaatctcctctgccactacatgataattgagctattgccaccaaattattacaacaaaaaataatacgtagcaatatattatactattacaatgataatttttctgtggcaaataattattttttattgcaacgatctacaatcgttgttttatttagtacttttgttgcaatataaaatgagatatcgccataaaaaatcgtactgttgtaaaaaacatgttctatcgccacaattttaatttttgtggcaatttatatagtacatggtacttttcactattttttgttgccacgatcaacaaattcattgcaataaaaaaattgtcgtctcataatttaacttaattttttcatatggacacggattgagacaaattttatatggaaattatagctctcgacgagatctacaattttgtaggtgataactttttcatttgaaatcttttagatattcaaatctatgattcaaatcttagttagctaggctcaaatggaacgatatgcattttccaacagaattgatgcgtaggtgagttggtaaaggagagcacgcgtgaaggataggtcttaggttcgaatcctagccaagacacaaaatcaaaaaaataagtagataaatagataggatgatagattaatatttgaacttttaatttggtacgtaacactaatgccacatatggagtggtggcaataatttttattacaacgatgtaaagtgttgcaatatgactttttgccacatccattccgtggcaacatctaaatttattaccacaaaataaaaatcattgcaataacctattaccacgctgtctattaacacggctagcaacgattttacaattgtggtaacatgtatgtattgccacaatttaagtattgatgccacgatttttttcgtggcaacaaatgatttttctagtagtgtgcgcgctctcatccctcccttaaccatcaccggccgctctcatctctcgccaggtcgtccaccagcccgcggcgatctctcccgccggcgtcactatcgacgccttcctcgccgatctcctccgcgccctcgccgcccccgatctccgcctgggtgcccgcctccacgcctcccccaatccgcgcctccagatcaccgttgcccggagtctcatctagccgtctgcaatgggcaggcacgatggatcagtgtttggttctttttatggggtatcatcctgcatgtgcagaaaagtaaaggtgaaacacatcaatcctaactgctttttcagtttttagctctccttcgtggatttagtgttctgatagatggaagtgctgtttcagtttttagctctgtatttcatgggtttagggttctaatgagtggaattcctcccgttgccacagaacaagcgagcctagatgatggagaaggagaaccggtttggacaggatcaatccaattactaatgggcgtgcaactactactgcgacagcacagggaagtgtatgcatatgtttaggttttcagattaaaattttgattttacaaatgtttcagtacttcgactcaatgccctgcaaccaatcttgtattcaatccaatttaataatttacccaattgagtttaggatagtttaacaaatcaatcgggagttcaactatgaattgtttcgctgtttcaggtcttcagacttaactgaagtttcaatgtcgccgccagatcaccattgttttcggtgttttaggtctgactaataatttcttttgctgatcagacatggattgatgacctccacataaaaatgcatacaagtctaggctttatgtggagggctccatggatactaataactccaatgctaacatatcttctgaagaatgaggatgatggttttttgaaaggtaaggtatatttctgtctccttagctttccgagatatgctgtatggcacagcgaaaaacatctgattctttccgtcaatatttaattgacaaatatatgaatttcccctatttgttggactaatatgtgtggtgcaatatttacaactgttagataaattcccaggtaacatatgagtgtagctttcataaagctcacttcagattgtttattttcaagatagctgaacgtctgaaccgtcaacttgtctcaagtatgagtctgtagtaggtttcaaatgtgaaggttttactatagactaggaagatctaattcctattttccagtattctgctttgattgctatttgtcttccaatgcaacagaaaagtgcctcaagccacaatgtgttttgtatatatatagctacaactttgatttgagacatcggagagtcatcatagtttgatcatttaccacactttataaatgtaaaatgtaaaagagtaaagtgcacatgcggttcttaaacttgtaggggtgttttatctaagtccctaaactctaaaaatgcagatccaaatctcagaatttgtcaaagtgtgttgcttaggtcccaatttgtcatagcccctctaagatcctatgtggtgttgacgtggtatgccacaaacacggacgtgacatggcatcatcttgactgacaaatgggaccgacttaaaattcattttccttttttcttctttccttctcatttttctctctctttttttctttttttctcctttctctgtgacccgagcaccccgtgcggcggtggcctacagttgtagatagagaaaggagtataaagggaaaaaaagagaagaatgagaatgagaaggagaaggaaaagaaaaagaagaaggaaaaggaaaatttttaagtgagtcctatttatcagtcaatattatgtcacgtcacattcgcgtggcatatgccacatcagcactttatcttcaagtaagaaatggacaatattctttttttttgtctaaatacaaataataactagagtgacaatatacattttggttgttttgtagccctgtccagataatcaggaccacatgaagcgaaatggatggtttaagtcaagctaattttagatatttattattttgtgtatttgataggagcaatacatgtactttatagcaaagcttgttcctagatgatgttgtggatacatgttgattgatatttttctaatatctctttatcgtttttttagcttagctatatgttttatgtaccattgtcaaagcatattgtatcgctgtcatttggttgtttcatttgcaatattaattgtcaccgtttcagtaaaaaaaaatattaattgtcaccgtagcgttagcacgggcacactactagtatatgagatattgtgtttgcgagttttctgttctctctcttgtgatagcaacgaacgagaagaaagttttgaattcaacgaaatatcatgcatgtttgtttatggctttatgtgagaatcaaggtagcttatacggctgagtacggcactattgttttttttcttctgaaaactagtacggtactagttgactaaagaaaataaaaaaagggctaattttgttgctattggaaaaaaataaataaaattaaccacacgcaatttcaaatctgtacggcaaattaaggaccaatttttttagataataaacaacaattaaacccaggtaaaaacagaaaaaatgttgccctgaaatcctgtgatttcaaaaccaagaacgtatatattttacagcaatctttctcagtgttctttaattacaaatacaaagctgaaccaaagcacatacatgccaagctagattaaggttcaaatcaagaaatgatatgcccaaaacgtatgaattaactaatcatgatgtgatgtgatgtgatgactatggacggacctagctagctagctacagtgctacaccggtggcagcgcctccgtcggcgacgactcacccgccgccggcgcaggtcggccgccgtcgtcccccggcggcggctcgacctccgtccggcagagcgggcacgtggcgtgcgaggccagccacatgtcgatgcactccacgtggtacaggtgcttgcacgccggcagccgccgcaccatctcgccgccccgcaccgctccgaggcacaccgagcactgcgccgccccctcgccgccgctcgccgacccggtgtacgcgaactccgggatcttggccgccacgccagcgacgctgcgcacgtcgtcgtcctctcgcccgccgccgccggcgacgacgacatgcgcgcgcctccggacgtggcggttgcagtagaagacgacgacggcgacgagcgcgacgcccgtgacgaggccagcgcaggtgtagctgaagatcgccggccctttgaccaccggcggccggttctcatccggcgccactggcggcgtactcgtcgtcgtcgacgagccggaacgcgaacccatggtgtggtggcggtgatggtggcctagcttgagctggcccttaattatccggtgatcggtgagagagaaggattatggtgttgatgactaatttctagcgcggaagtgattgacgttattaatactaatagacttgtattgcaagtaactatagttctccggtcaaaatactatattactttgactcgatgaaatgagggtgtagttgccgataggactatagcgcaatacacataaattattataaatcagcctacagactccaatttcctcggggctgcctgcgagtaccgctttaaccaaatgatttggaataattaaatttaaaaatatactgttcattcaattttgtctcataaatattcgggatgaaaaaacctgtgcagaaatataccatcggtgttgcacttccgttgcacgaaaatgacgtggggatgacatcgcgcgcggacagtatcacgcggcgaaagaccatgcggtctcacgcggtaacggagtgagaccgtgcggtctcgcggaatggaagagcgagaccgaacggtctcgcagaagccatcagcgacactgtctaatgggtccatttgattagtgattaagtacctaattaataattaactaatactaattagtgattaattatcctaattagcgattaattaattattaactaatcgctaatgaggataattaaccgctaattaaatcggcaaggcatggtatcgctctttgcttaagcgatagcgttgattgcttgagcggtatcgctgtttgcttgagcgagaccgcgtggtctcgcgcaggaaccacgcaaggtcgttcggtctcgcattttcactgcgcgataccggtcgcaacgtcattttcacgtcattttcacgcaatcgttatgagaccgatggtatatttgtgcaaaagattttgcatcccgaatatttctaacaaaaaaattgaataaactgtatattttcaaatttaattctgatttggaagtcatgggcgtctctcaagtgtaaattcactgctacacaaagcgtttccccaggcgatcaatcgaatttttgcgtgcggagctttggcccgtctggaacaaatcgtctgggaaaatcacgattttcacgtgcgggtggcgcgccagcacacgaaaatcagattttcgcgtgcggtgcttatgccgcccgcacgaaaaaacaaaaaaccgaaaaaaaaattcaaaaaaaaagagaaaaccctagatcgggtcgtcgccaccgccctcgcctcgtcggcggcggcggcatcgccggtcccgcctcgtcatcatcagcgccgcctcctgccggcctcccgcgccggatccgtgatagggggagagcggccagtcgccggatctgggcagggacggccactgccaccggatccgtgcgcggacggccgcgggccgcccgtcgtcgcccgcccacgcgctcccgtcgccgcctgggaggggaggggaggagccgtggcagctcgtcgtccgcgcgctcccgtctgccggggaggggaggggagggcagccggttcccgcgccggatccggggcggggggagggcgg

SEQ ID NO: 19806 - DNA, 30489 bp, Oryza sativa
agcagatgaactgttgacatcaaccgtaccgcataacgggcaaaccttttggttttgccatccttctttttacaatctgtccgccgttcatactctattttgaataactagccaggagaaaaatcactactacactacagattttcctagacaccaaactagtttgtttccaggcggcccataagtgcaatcgtatagaaaaatgaaaaaaggggcatcaggacatcacccgcacacgaaaatagattttcctgtgcgggtgatgtcctgatgccccttttttcatttttctatacgattgcacttatgggccgcctggaaacaaactagtttggtgtctaggaaaatctgtagtgtagtagtgatttttctcctggctagttattcaaaatagagtatgaacggcggacagattgtaaaaagaaggatggcaaaaccaaaaggtttgcccgttatgcggtacggttgatgtcaacagttcatctgctagctaaatgctaaatgtagggttacaaagatagtgtggtcagagatttagagatggactagcaaggaccttcagacagccaaatagaaagattgttactcagtcaagcactggtggaaccttgtgctggaatcccccgacaaccttcgcaaacccctcaaaaccctggtgatcctagtttcctaagaaatttggtgtgagcgaatgcaagaacttttcgccacgaatgatgaggacataactagctcgaatataaccatgactaccttatctattcatcaaacaaaggtgcataagttctatattagatttacttgttatatatttgaacaaacattgccacacaataagtttaattagtgtattttcgtttgcaaagatacttacttagttgaaggaaaagagaccgagcgtaaggaatacatggatgatcaaagaagttgattgggaaccaaaccaagaccttctccaagtccactcctacctgtctatgtcacttttggtctatagaagacaagaaataaagttctacacattttgggttcggatccgggtctcctgatagcatcaacttcaaacggacctagcagctgacctagaaagaattttggggcccatgagtacttgttggaaagcttatagagtctactttcaaatggtttggtcccacgtcataattaccactgagctgtcgggaatttgcaaaacaagccacgtacctcatccagtccgaatctgattagggtctagggccttgtaattgtgtcgtgggctaagtctaaaggtgtgcaccctagggcaaccctaggacgtcctaaatcatatttattccgtagccgtcatagtttagaatcggactttgcttacattatttgtgccattacagtttcgccggtaaatcggtttgttgaactccaaattcgagtgcttaattattcatatgcaattgagttgctatctaccttgttcttgcttgtgttctttgattcgcatgtagggattagccttctcggcgaggtcaactgggcagtgtactgctgataaccagaggagatgtggtgctatgattgtagggctcggatcgtgtgtgtcaagtttccaccaaatcgacagttatcaatatctattggaagatcggaacctagtttcctcatcaacaaagcagcaacgccggcctcaatactagccaagatcaaggaagaagtggcagcatgggtgaaagcaggagccgttaggctccgggagttcgaaattttgggagatattgcctaggggcctattttcggcctcatctattttgataggccctgtacatatctttgtttgtcttttgtataattttctccttctcaattaatatacgaggcaaagcttttgctgtccctcgaaaaaactatataccgcgatattttattaaaacaactatacaattacaatttattttgttatgccgacttatttcatcattaattttatttgacccacgacttatattcttcatatttacataaatttttttattaagattaatgatcaaatgttatgttcataagtcaacagtgtcattcattttaaaatagaatgaataacaatccactgtagtattctagaggattgtatctcttaattaacttaacatactctagaggattttatctcttaattaacttaacattattaaattgtctcacaacatataatgtttcaatatttcatcaaaaacaaaatatatttttccaagttatcaatcgacccaaactgatattacgtttagaatgctttgtatttgggaacataatttccattttccaacaatctagtatccaagtcaattcctagggatttgttctcatccaaaagagttcataaataggaagcggcattttatcccttgagaatgtgtccccttgtgtactgtacttttcaaattcactatgaaaagttatagcaaaattaacaataatgtagagtagtgtgacacctacttccacaaatataaaatccaaatttgatctatagagcaacaaagacaaacatgacagtgaataatgtgtctaccactactagaaaaaagatttttcatagcgttaccctatcattttcgctggtggtcatacgcgaaaaccgctagcaaaaacgtaacgagaggtggggggctatggactgccaacgaaaacaaatctttgttggcggccgagttaagcgggccgctagtgaagatgtagctattttccttgacggcccacttaatgcaccgattttcactagcggatggtaaagagcaacgctgcgaaaaatccaccgcccaccaataattttcacgcttctccgcctctcctcccaccattctccttcctttctccatctctccatccggccgcctgccgggcctcgggagctacgacgatgaagctcgtggcgcgcggtggcttggtcgacgggcggagcttcggtgactcgcgaggcggcggatccggtggcaacgaggcgtgctgacggcggaaccgacaacggcaaggcctgcagacggcggatccgccggctaggcacgcggagggcggactcgcgagacggtgggtcttgtggggccggtggatggctcgttgccgaggaagacgagcggcagcggcgcggctcagtgacaaggaggaggggcggctcagtgacgaggactttcggtggccgggctcgatggcggcgacccacctcctcgtcgacctctgccctccttgtcgccggcgatggaggatgggcacgctggcgattttcaaattttttttttcaaaatctggattccgattttctttttttttttaatccaaaaaatattttcactagcgggtatctttatcttccgccagcgaaaatattatttgtgctagctgttgtcttagccagccaccagcgaagacgattttcgccggcggttgccttaattaagccggccgccagcgaaaatcaatcttctctagtggtttaaccgttcatagttagtacatatttttctttttttctttttttaaacgaacaaccgcttattatgtgccaatttcattgaatatagtaggaaaaaattgtacaagagtagctctatacaggtttcaaagaaaaaagagggctctaaggcactatgttacatttatcttttattttcctctcctcaatgtatggatcgaatttaaactttgaattttccagtacagtatagctagatattcactaatgtcatcaaattcttcagaattttacatagctatttacatgtatttttagaaaaaaaaaagaggacatcccctaaagacaaagcaccatatgcatgcccctctagaaaagaaagaattaatacatgttgcacattgagatcagcttaaaccggcaactgatcaggcggattcttgcccgggtcaagctcacgccggcacagcgggcacgtccggtgagcggcgagccaccggtcgatgcagtcggcgtggtacacgtgctcgcacgccggcagccgccgcaccatctccccctcccgcaccgctcccaggcacaccgcgcactcccgcccgccgcccccgctcgccgccgtcgcgccaccatcctcggagcttccaactacataagcgtaggccggggggagggcctcgacggggaacggggcaatggtaccgccgccacgcgcgcgctcggcggcggcgccggtgtcgtcgtcgtccgagcggacgcggtctctgcacaggaggcagcagtagacggagaccgccatggcgaggaggaaggtggagaagaagatggacatgaagatggccgtcgacgcgatccatccgcccggcgaagcgctggccgcaggcggcggcggcggctgctggtagccggtcggagcaaagccgttcatgcctgtgcgcgctgccaagaaatggtgttcagaggggagctcgagactggaatttgagagtccattggaattttggctgcaaaaatttaaagttatttgcaaaagatcagtgaaagactactggattttatcctattattatcaagtaaagtcagaagagggatcgatagatgtatctttcatcttccattatatatatcttaaaaataaagacaagcgaattaagctagtagagaattagagattcgtcatgtctgacctaatccgtgactacatcttttgtgtaatgtaatgtaatgtagcttggcagagagaacatgagctgatgatctcaattagcacaattcgtaaatctctaatctcttacgtccctttcgtgattcatattttcaaactgaaacttacatatatatgttgtccaaacgtttcttatatgcacaggaaaattctcatgtttgtgggtcaaacctgttaataaaatcagctagtagcttgatgcccaagaatatatgtatcgacattcgacaaacgtaatttgttttttattattaggatactaataattgacaacgggagagtaataatgcatagggatgacagtcgacaaaagacacacggccaagaatgctaggctaccaaccacatagatggtggaactgtacaagtattaataaagacattaactaaatctcatcaaaaggcaaagaggtcaactgtatttaggaccccagagaaatctaaaagaaattgaaaaccaaccgcagactattatagctttagattattttttgagaagcgcttctatgcttctcaaataaaaaccagcacgaaaactaaagcgcatcaatggcgaggattagaagtagattataacagagtgatccctattagcgagaggcaattttgtccttgcagaaaaactgagcccatatcctatctgtgggagaattcgactcaacgcgatagattagattgatcacggagcaaatacatatataggcaacatccttccctatccactcaactgacttatagcaacagaatcgagagaatagggaggagtgccgagagatggatatatatggcacaatatgcactaaacccccccctcccgcacagtcgcaacgtcgataggacgaacggtgttactggagtgaaactcggtgaagacaggcgtcggtagacccttggtgaaggtgtaagcatattggcaggaggtaggaacgtggagaacacgtatggcaccgaccgctaccttctcccggacaaagtgtagatcaatctccacatgtttagtgcgttggtgctgcacgtgattagaggagagatagacatcattgacattgtcacaatacaccaaggttgctttggggagtggcgtgtgaaggtctaggaggagttggtgaatctagcttgcttctgcaacaacatttgcaatagccccgtattctgcttcggggctggagtgggaaacggtgttttgcctcttggaagaccaagacaccaagttttcgccgaggaaggatagcatacccggatgtggacttccgtgtgttaggacatccaacccaatcaacattggagtagacaacaaggtcattgtagggagactgctagatgtgtatgccgaagtctgagagtctcgcgaacgtagcgcaatatcctcttgaggcgcagtgaggtgaggatcgcgagggttatgcatatgaaggcacacctgttggacaacataggagatgtcacggcgagtgaaagtgaggtgtgctattgaatctgacaaccacggtcctgggacaaagatccttcatagtaaagccaaagaggtcaaactcgatggagcaccaattatcaataacaaagcgacggacataaataagattcttaatgataactagggagtcaagaatatctttaagagtaaaggaacggttagggtgatgaagattagtttgaacaatagaagtgataggtatagtagagccgttgccgacaactatgtgggagggatcatgagaggtgggtgggtgggtgaaggagaggctatcggcgtccgaaatcatgtgtgcggtggcacccgtatccatatacaattcattcgtcggtggttgttgcagcatggtggtgttgaaggcactggttgggaagcctggtcccattgggagggggcccctgggaacgaactcgtgggctgaattgtcggtggagcctggactgcttggcacatgccgacgtgctgcacagggtagtgcaccggctgaaaagtccgctgcacagggaggcctagaggcggcctagtgagaatggcgcccgcaaacggcgaggtaggctgtgggccgagcaggccacgacccagaggctccagccacatttgaattatgacggcccatggattgtgcagggagggcactcttgcaccgagctggcctgggaggcaccaagtttgaaccgacatatataggtgtacatggggaagagataagaaatgattacatatatggaagaagtccacacaaatcaatcatatcctaatatgactctagttaccatatactctaacatccccccacaatccaagcatgagcatcgcggacagttggaatggagaagaaacggacaagagtgctcaacacaaatgatactagatgggtaccccacgcgttgcagcgggagaattgtgtgataatatagtagatatgagttctctttcttacctactatacgattttttttcatgtgtttatatattttgtatctttatcaattatcctaaggatataaatggtttggttgtatggtgtgccttttggggggaagagatgcaatttacactcttgatgaatcatccaaaggctaaaaacaattgaggtgatgtggcttcatgagagaagagagaattagcattaactacacttagtggggatgaactttatagatatataggattcctttgtgccgtagtcgatgtagccaaagcgatggatgcgaggggcctgtgatcgatgtagccaaagttggagagtcgatgatgtcgaggtagcctagccgtggggcgcgcatggggtgtcgtagagtggtcgtgggtgaggatgcactgaagacgatgacggtgacgcgatcgcgacagtcattgaggaagatcacaccggagatgtcacgcaggtttgccagacccggagacaactctggacaaacgcgcgcaacgatgttgccaatactgcgcaggtgttgacggtcgttatagaccaatttcgactgccaatatatctagaataaaggagaactagcaatgcttgcatgcatatttgtttaagaatagtctatttccacttgtacttcgaacattatttgtatacagtagatcttcacataaatggtggagaaaacgatggaaaataaccgaacaattaatcgaagtccaacggatggcagacttatggatggatgggcttacaaacccattaaaacagctgcaattgggcctaatcaccatgcctatggacttaggatctatcaagcaaagtctacgcaaaagagccagattggccagcccaggttcagctgaacctagggttcggccgaaccgccactgtggctgttcgtcctggccttccacgtggacgtccaagatggcctcccaatgacagttgcatgtcatttccgacaattccaaccgtcattgacagcgtatttaaggacttaactctctccattccaaagtgcaccaagaaggatcaaatccaagaagcttctagtttatttacattattttagtgctagtggagtagaaatagaatagtttctttgctcttcaagtcttctggagattttgggtatgactctagtagctcttctttcttttgtaagactttactcattaatgaaatattcttctttatgtagtttcggtctgttacttcactcatataattattcgagtaccgactttagttcatattttatctcgtaataattatgtagctagcttactggagatatgcaatggtgttggtttaatgtttatttatatgattgttctatgtcacctgcagagatgtggagcactatttagtaatgtaagcacgatgcttagattattagataccattaaatggtgttatatgtcacgggtctgtagaggtaggtcgctgatgatgacagctcagtacgggtattcctccacgtgcgtatataggactaagagaattccctattgtgggtactactccgtagtgattacaggttggatggccatgacgggttgttgtaagaaactcggcaaccaggggtcgtttctcgatacaccaggagggcatagttaggggtattggccgtatgattgtatactacgaagtgtagactaaaatgactatatactagaagtacataaatgattcttttcttattctttctccacttagcttagattatattttaatgagagtattctggttagttccttctgtgtgccaactcattctacccttaaatttattaacccttgcatagactttgatttatacaagtgatatagattattagcatagtaatctcttatcatatcttcccttgggattaaataaatactcccgggtgaaatgctacaacggtatatccgtgcgcttgcggatgtatctgtaaccgcaaagtatatcgagaatatttcggcgccattgtagggaattatatttctagtgaagtcattaagaaatatcaacacagtcataggtgctggcattgggaaaccctgactttgactctgatatagattctagagtttgcacttgttgctggtggtacagctactgcatctgttgcatccggtgttgcgttgcatctgttgcatcaacggggccattgtctgagtctgattagccatgacttggggtacagacggatttccgagaggttgaggtggaaagctcataggattgtgctaagttactccacgaaactgtctggatcctcatctacttacactgtccctgatgctgaccatctgttgttggtagaagagagagacgagatgagagagattactaaagataagaccataacccacttgactactgatctgttgtgactagacttttattgttcaagttgattaagcaaacaacctagtatagtcacatcctcaccaccgatacaaaccatacccctacacacaagcaaacaacacacgttctagcagctaccgacactactcttcagggaaggattgggttcaggttagctccgggaaaacttcacttgatccacgcggaacaacgactctggactgatcttctcgctcgttgctgcatgaatcttgaggcttgacttaactttcaggagtagatttgtaactgacggtttatcttccaagtttgataactaaaagagttggagaggaaatgaggaaaattcgataaaccgttttgcaaataaatgccgaatggtgagaagatacatttttcaaataggattttttttgagggaatcacaatggaggaggcctccacagtatagattattattaaaaagaagagttatttacaagagacaaaagaaggagaaaagaacaaaaggacaaaattacagaaggtcaatccatgattgaactagaggatgatgagtttccttgagcctaggtaaatgtaaactcaaatctagctttaaactccttttccaggaaagaaccccaagctgaattccattgaaaattaggttatttctctccttccaaatattccaagtagccaaaagcaaaagctctataaaacagggactagagatagaagcactctatgattgaatcatacgatgaaacccctgggaagtgctccaattccaacccagcacactccaacactgcatactaaagctgcaagtaaagaaaagatgttcccttgtttcccttatattctgagagcagcaggtacaatagatagttgcattatcaggaacacattgctttctatctaggagatcacttgtattaactctatccaaaaagaagagctagcgaaagacctttattttcatattaagtctacttttctagatccaaccaaacgtaactggggagtcagtgaccgaaagttaagcttataaataggattttcagaaaactagcccttagggttttaccatttgcctcaccctacagtcgagttggctctgataccattttgtcatgcccagaaatttaacccaaattttcagactgttttgtgcataaatccttgtccaagaatcaagccagggtacaaaaaaacaacaagtaaatatacagatccaaacataaataaagtgtaaatacatataaaagaggcacttagtcctcacataaaaaagaaagcagcagcagcagaaaaggcgatcctaaaggggcttaaactacacaccacaggcaaaaactcaactggggtataagcctcggtcctctaacttcgtcttcagctcaaaagcactacacttatgaaaagtgggaataaaagtaaggctgagtacaaccaccgtacttagcaagccacaccaatgatacattcgtggaaggggagacaaagggaggtttgtggctatttgcataaaggcagttgtaaacattttagttgaaaacaataaaactgtcaaataattaaggcaagattaaatctccagtgaacaacgttgcaccacgttgaacaggcccaaccaaaccgcctgaactacagcagttcattaagtcaggttactaaaggtgtgagactaatcacggcgaagctgatcgattgcccataaccgtgggcacggctattcgaatagttttactctgcccagaggtgcacaactgaaccaacaagacacatcccaccatcttgttactgtgccatgcatgacacgtgaccatgacgagtgattgtgacaagaccctttgcataactccccttagccaaacgaatcacactgcaggttttgcccctactcttaaaataggggtaggcagccccctcttgtgttgcggtgaatctgaaagccaatcaacacttaaaacctgggctgacccaactccatcacgcttaccctcgcctaggaaagtcggaaagggaagtgctatactacaggtccagaagttaccctttcttgcttggggtaagcacggtaagtcttccaggttttcccgtgaaccagtctttaattgccatgggtgcaactagcaaaaccatgcacccacatccctccataaagcaatattttagctggataattatgtccaataaaacatggctagatgtctcgagctcggagctcaaccagatactagagcaaataatgtgattatcccatcaagtgagctagtggtaattaagcatggctaagcatatgtaattctagctagttcaacaagagtaacacaagctagtcaaattatcacccaaggtttgacaaagattggatatgaaataaatatggcacaagcgagcagataggtaatcccatgtaattagcaaaacctgcaatttatttgcaaatagtaaaacattttataaattgggctcaacatgctcaaggggaatgtgtgactttccttgcttctttaaacgatcttctgaactctttcctcacggccgcgatcttccgaaacgacggattctacacgttggcacacaaaacaagagaaaactctaacaaaccaaataaacagtgcatgaaatgtaaacaaacatgtagagctaacttttagatgaattttgcaagttgaatggctcaatttggagttcgcatgaattagttatgaattttagaagttttgagccatttaaattaatttctggaattattctcaatttattgcactaataccatttatggcatcagccgaagggggagccggtgtgacatgtgggtcccacacgtgggtgactcaaggaggggcgggtgcacggtggagcgggtccacatgcgcactgttcacgggcgcaccatgtggcacacacgttgcggccacagcgaacaagcaggcggaggagaaggaggaaggggggggagggctctcactctgccctctcaacggcgagaaggcaacgggaaggcggccgacggcgaggaacagcagcagcgggctcctcaggaaggaagccggacagtgctcctgtggtggttagcgaggacgaagggcgaacgaggtcgccatcgacctgcagaaggagaagaaggggttagggaggggagaaccagcgcggagcggctagaaatgatggccgacgaaggaagcacggggtggagctcaccttgtgtgatgacgacggggtttcggcggcttctgacagcggggaaatgacagccgaggtgcggcataatgctgtggagctggtggaggaaacagcgtggcttggggtggctctggtcgacggctatcgccggttggacgtggcgaatgcggtggcggcctcggtagcatgggaaagaggatgactaggtggcgatttgaggaatttgaatggcggctgtggttgtgtttgggatggcgaagctagcggtggtggcgcagcacggcggtgacgcgcgaccggagatctccaacgagcggcatgcggagcacgggaaagagggggaacatggagaggcagcgcggggagcatttttatagaccgatgggtgacgaggaggatggggagaggccggaaaaggcgggtagagtggggctccggcgacgtgggggaatggtggccctaaccggccctgatttgcagggaaagcgagggagagaaggtgtgttgatgcgaaaaacacgaggcctagaagatctgcttaacttcagtgcatgtccaaaaatcttgcctttaggttcctgagcgtgccagttgatttgatcctgcaatcaataagaaataaagacaaaaaaatagcggttaaatctataaacgatagccgatcggccagccgccgatgacgtaacatttatctttaagccgatgtcatatttaaatcgatcggcagtcatgaataagtaagaaagaactaaatctatttgatcggctgaagatattaatagcatataatgcttctgtcgatatatacctaaatcaagtgattgggatagatcggtcaccgtgccgagacagtataaatcacttagatcaaaatatatattaacaaggagattataagcattcgtagcatagccgatcagatagatctaacatgtatcggctaataccccgataccactctttattaagatattaaagcaaggaaaatatattagacaaagcttaatatacctaaatgcgacaagatcttaacataaagggcggatttaacttgtcaatcaagcatataagatataatgtagttaaatcaggtaagatcggttgaaaccccgatactaccctaatcggcaaccaaaaagcaggctagagattgagattctaatcacgacttataaggtcaaactcaactgatgtagctataagtatgaaaagaaggacgatatctagacaatcaagccgttgggtttcatagggcggtagatatcctatataatctaagtcaacattgatatttaacctaatcgactgccttccaataatggacgttagccgattgaagattagataacaatattgtcgaagattatataagatatatgataactcgatgaattacataaacaagattagagtatcataaagatggaaacactaatcccgagaacacaagccgccataacaagttttacctctagttgaagatcgaaaccgatgcagctcaacccgaaagcaagaactcgtcgaaagtaaacgaaagtaaaagggtggcgatgcaacgagattgtattgaacgtgtgttttttgattacataggttcgggtcatatttatacccgagatacaaaatatgtccttgtcggacacgactcttatctttaacaaactctaagataccataagtctttgctgcagacttttgcccaaacttatctctaaggaaactacataaaatatcctaattaatagatacaattgccttttcaggactcaatccgtgcatggcaattcatatgaagcacattaacacaacccgacaacgcataccgagccacattgtcggaatcggctcaatcggctatctagtccgactcgaactctgccgatcctgattgtagccgatttggactttagccgattcttgctctgtttccggaactatctctatcttggattccacttcggttttatctcgatctccgatacttgaattaccaaatttggttgttaacaaggtggaggtggtggagggtaacgagtccacgcggttgggcgtgagcgttggatcgggagtccacgcggttgggcgtgagcgttggatcgggagacacgcgggagaagtgacgacgtgagcaaagtgggaggccatggcagttgctgtcccgaggtggctggaggttggggatggagttgacgggtgggactatcggagagagaagggtgaaccaagtaaggggtaggtaaagcgaactttggtgagggaaggggcgagcgggctgagtagcgagctgggccggggagagagaagaggggatggcggcccgaggtgagggagcgggccgtgcgggaaggggcaatggacttcgcgcaggcatgtaaagtaggttatgcttgagtaacatgtaaggtggaatatcaatcggatggtacctgctacgcttgaaaagtactatttctttataaattttcttcattgacattgcttagataattttttacaagatatttgtaaggtttgaactatataatatttaattcattactataagcaattaccaatgatcttctttattttctaaaataaagagtgagtccgtaaatacgtaggagacatatatattgtgcgcgtcgttttcctattatatatgtgatttatggtgttctttaaaaaaataactagccaacgtgagtcctaaatttaaagttgatagtagcatatatatatatatatatatatatatatatatatatatatatatatatatatatatatatatatatatatatatatatatatatatatatatacctttttaaccaaactaagtacttctacgtcattgctaccatagtatgtcttatatatgcaataaatatgagaaactcataataccacgatataggatagatggaaggccattaatatctaagcactcaaacatggttatggcaatagaacatacgatggttgttccaattttttattttttgcaaatgtattagattctctctaattgatttaattcaatctctattgacatttttttctacttttctattttattttatacaagtcttattttaggttaaaaatataggcattatggatcaggaattgttggtttaattatttaataggagaaaattccctgtgtacccttgaaacttcacccaatcctttctatgcccctgagatttgctcattcccttccatgcccctaaatttcagtttggatcccttctatacccattccattagttgactgttaattgaccactaaatttctaccataaagtccattttgccctttgctatcaagaaaataacaatttatgaagtatattgatgaagtgtataaatttattgtatgtgactattatatgcatgagtttattttgtgagatattatttaacaaaagtaatattttagtttcgcctcgcgaagggaaaacaaaaataatttttatccatgacaaccctttggtatcaagaaaatataaatttatgaagtatattaatggagtgtataaatttattgcatgtgactatcatatttatgagtttattttgtgagatatttttaacaaaaataatattttagtttcgccttgcgaatggaaaacaaaataatttttatctacggcaaaatttattttatttaaaacaaaaaaataatatttttttaccattaaaaactgcatattttgttagagtagtacggaattttttataagataaatcttgttatgcgagataaaaaatatttttgttaaataatatctcacaaaataaactcataaatataatagtcgtatacaataaatttatacactccattaatataattcataaatttatattttcttgataccaaagggtaaaatggactttatgatatgaatttaacggtcaactaatggtcaactgacggaaggggtatagaagggattggatgaattttcaggggtacagagggaattttctcatttaatagagcaataattagattagaaatttgatgtatatcttaaaaatatggtcttttcagtattattcatagtctggtttgatagctaaaaagtagaaagggggaggaagaatggagagcggagagcgtgagccaaggttgaaggggaccagtagtgttgtttgcatgtgccggggggatgaggtttggggaatttatttttctaattttttttataaataatttaagtaaaccgatgatcatatgttttttcttataatttgtaaggttttttgtaattttgatgactgttaaaatcatatatgaatgtcccctttaatgggtgaagccgacaatatcagtcgaggctttatttctccactgcctttaaacataggtcctgagtcgacatagtcatgccccgcaatgccagcatgaaacataattttaatgtctagttaactatcagcactctcatagagaattgcatcaataattacaaagttaagcactattgtcaatagtggcctctgctggggtggcttcaactcaaccatatgtatgacccttgctataccttgctatacttgtggtagcatagcatgcttggtgccctttaaggaaaaaaaagagggaatgtaggcgacgaaaatatttttccgatgaattttgtgtagacaaaaatttttatggtattaaccagtaatgtttaattttttattgtttagatacaatattctattttgaaaagagcaaggttgataaaaaaagatatagctaaacggatatacgaccgtgacaatcttggagtaccatatcattctttatattttgactaagatatatactggagcatttggtgtctcgtcatctcatctcgtctccgatcactctcctcgtcttcgtttgtcctggtcttcgctctcgctcgctagctcgcttgctcgctggttgagctgtggtacgctcgccatggcgtcgtcgacggggggttggaccacaggctcatgttcacgccgccgccattcaattgagctgctgtcgggaggcggcggggacatgctcgccgccggcgccagcggtgaggcgcggtcgccgtgggggttctccagaggcggagcaagggtgggcggcgggttgcccaatttcaagtccgcgcagccaccgagcctaccactctcgccgccaccggtatcgccgtcgtccgactttgccatcccgccgaggctcggccccaccgagctgctcgactccgccggggatagagagaagagagatggaagatatgacatatgggtccaagggcattttagaactttcacgcgatttctctctcctcttattttaatcggcgtggtgtccattggcaaattaccacgtttatggagtgttttcctccaaaagtgagttcagatagtgtcctaaggctaaaaccatgaaattggagtgtcctatagcaaaaattgcctttatttaattaaagaaatataaaggattataagttagatatatatttgaaaaagaatttaaaatatgaacatttaaagacagctgatttggtgctttatattaatctagtttaaccgtgcaaatttgcggagtaataaattttatttataatataggaaatcctattttaaagaccctatcgttcttacagcgtacatataggttttttttggcttttttatcttcctacataaggatatctgtttgtttttttaagagaacaatacataaggtctatatccctggccgtttttttttgacaaattggcccttttcataaacttatagcgaaactagcccgtgcaaaaaacttcaaccaaaaataggccgcggggtcaacgccaagcctcctggcactcgctggccaagctagcgccaaccgctttggcgctgaggcctgcaagcgcggcggcccatcttttcccccatgctgacgtggcggcagtctcagtgccaaccgccttggcgctgaggtggccaagctcagcgccagccccgttggcgctgaggtagcggcatatatgccgcggtcgcgccgcccctgcccgagccctgcttctttccccccacacagagctagggttcttccccccgcgtcaccctctctcctcccctctaaaaatcccctcaaatccacctcaaatcgaaggctatttagtgggcattgttttcgatattggtttgcaaagtaaatcccctctaaaaaccctaatttcccccaaagttttccctcattttcgtagagtattttggttgaaatcgtgggttgttaaatgttgctcgggttgtgttgtggattaggaaatgtgggtaaggatgcgacgttatagttgtatattgatagtacagaggattcataccatttttgtatgttatgcactattttggtaagggtgaagttgagatggatgtgtagagctgttgtattatgaatattttggggattcatattgattaatgttgatattgaagggcatagatcgtaggaacattgtaaccggtggttaatcgatagaatttttaaaaaatattttatttaggtctggagtacccatgttatgtttctatttttatagcgacgtattataatagaataatgcacatatttcatcggtaatttgatgtagatggatagattggtacgactccattttgatggcagtgtggtagatgaaagtactggtggtagccaatttgaggggatgtctgtcaggcagttagtgttttgcgccaaacccacatttgaggagttaatttcacgcacgaaggatgaattggattggagtgatgagtctgttggtatacaagggagatacgatgtaggtaccggtgcagtgtcgcataagtacatattagatttgaatggagaggtggaatgagaaacatatctggaaatagtcttgggttcacagttcaaatcgcttgaggtgtttgcttggaagaaagagcgtagggaatggaaggaagaattgtttgatctcaatgaaagtccgcacatagaatccctggtctattgtcatgaactgaagaccgatgtgcttgtggtggatcgaaagaagaattaattgaggacgatgtgcaggtaggggtggaaaaacaggttgaggaggatgtggatataggtgaggagaggcaccgggatgtggaagatggggaggtagagaagaaaatttcagatggtggtatggatgtgaatcaagcagataatgagaatattgatgaacttgagaagaggcggttgattttattcattagagaattccttgctgatgaaatttacactcgcgaggagtgtgaggaatctatgatatttaatggattaaacccgaatttgttgtatgctgatttggacaatgaagttgatgagtttgcatctgactctgatgacgatcgtccagtgggcaagatgtcagacgaggagagcactatgtttgagaaaatcattggtcgaaatccggaaataactcaattcgaggaccttagcaatggaagccttgctgttgcagatggtgatccacaatgcgatggagccttcgatgcaatgggggaggaaccgaggaagggattagaattttgatccatggatgagttgaaaatatggttgcagagctactctatccgggtgcaccgcccattccatgttaaggagtccaatgcatctgttaagtacactgtggcttgccttgatcgttactacgaatggcagattcgtgcaagaaagagcgctctagtgtggaagcaactggcaagcacttgcagctaacctcgaggtttataggtaacagattgcaggcatttgttagagcggaaccaacattgtctcctgcagctattgtagaggcagttgagcacatatggcactatcggcctacgtatggcaaagcttggcatgctaagcaagttgctatgaaggtcatatggggagattgggacgaggcataccatcgcttgcctatactactgaatgccatcaaaagtaagaacccaagcatgtatttccttgttgagtctcaaggggagaaatcaagaacggttgatggagtccataggcgtgtttttggtcgtgcttcatggatatttgggctgtcagtggaggcattcaagcattcgaggccagtgttagcaattgatgggaccttcttgatcggtaaatttagaggtgcattgctcacagcaattgggattgacgcagggttacaccttgttcctttggtgtttgccctggtagagagggagaacacgtccaattgggagtggttcattgacatagtgagacgacgtctgattggaccgaatagaaaagtgtgtataatatctgatagtcacgttggcatattgaactccatcaagaatgagattccaagccaccgacttattcaccacagatggtgcatgaggcatttttgtgctaacttttataccgcaagagctactcaggatcaaatgaaggacctcgagcgcatatgtcaaatcaacgagaaagttctattcattagcgagatcaagcgtctcatgggttttcttggggaaggtcctaagaagtggctaacggataatatggcattcaaggctaaatgggccagatcatttgataccaatggacgtcggtacagctttatgactagtaatatggccgagagtttcaacaatgtcttgagaggaattcgaaaactgcccgtgacagctattgtggcgtacacattctcaaagtgcaatagttggttcgtcgatagacataaagatgcttgtgcacaaatcaagagtagacacaagtggctagaaaaaattaatgatatccttgaggagcagaaaaagcgaactttgggacaacggaccacacaattcgattttccatccacgaagtaagaggtcaccgagcaaggtggagtcatggcagctggtgttcaatggggcggacgtcactatgtcatggttgcaagagataacacatgtacttgccaattcccttaagtccaccacatgccatgctcacacatgataaccgtttgtaggctccgaggtttgaatatagaggtgcccccacggatgtgttatgaagcttccaatgaggctatacaacacacctactccccgaggtttgagccctaccaagatccgtctcagtggccaagttatgacggtgaattattcgttcccgacttgtcgttgaagaacgacactcgaggaagacgaaggacaaagagattcaaaaatgacatgggtaaagggtataaaggtgcaggcaaacgacgactagtgaagccaaacaatacaaattccgagccatccaatcaaaatagatgttctatatgccaccaaccagaacataagaaaacccgtgtccgaatcgagacaaaccaaaggatagaccgaagaaacgccgtaggacggggggaggtgatgggtctagaacacgggttgttttttgttgtacatgttcacatgttttaatataaatatttattacaattgtttctttcatatgttttctcaattatgcatattacaattgtaccatttactaatgacttaatgtttaattgcaggatggcgcagtttccgggtctggaggattactacgaggagaggcaccgggctcccaagatagcgagcagagaggttatgcaatacccttttatttgtatgacaatttgtttctattctgcaataatttactaacacttgcattttttttagtctattgatgcaacgcctcaagacccttcgagtcagaggcaacacagcgcacatgtcgttcgacgaccgatacattccgtacctacgtcgggcgaagctgttggcgttcatcaccatggcgcagtggcccatgcctctgtacaacgccgcggcactgacggctcttgtggaccgatggcgcccagagactcacaccttccacctgccaagcggagagctgacggtgacactcgaggatgttgccatgatcctggctcttccaatgcggggccaggcaatagccggtgacaccgcttccggtaactggagggcacgggtggttcagtaccttggtgttgagcctcctgaggctcctgacgggcagaggttgacgaagacctccggagttcctcgtagttggctgcgtgccaacttctcacagtgccctcctaacgctgaccaggcgacggttcagcggtactgcagggcatatgtgttgtacatattcggcagtgtccttttccctgactctggaggagacatggcttcttggatgtggctgccattgctagctgattgggatgaggcgggtacctacagttggggttctggagctcttgagtggttgtataggcagttgtgtgatgcttgccgaaggtctagtgcagatgccaacttggcaggatgtgtttggctgctacaggtaggaggcagtttgtatgatgtgtttcatttgttactctcaagctataaatcctaacgagctacatcttgcaggtttggatgtggatttgcttaccggttggtcgtcctacatggaggcaacatccggcatggccattcgaggatgaggatcgacgccccacagttgctttcctttgggaagtgacaccgtcgcctgtagtaggccctagaaacttggcctattacaactacaccaatgagatggattacctccagcccgagcatgtgagtagtcaattataatatcatcaaccatttgggatttgatagctgtactaactcaaaatttgtttcacaacataggtggaatggatgccctacgagtcacaggagatagctgaacttggaattaatgccatgtgcaacatagagtggaagatgaatacactacggtgccctctcatatgcttctacgcagttgagtactagctttgccaccgggtgatgaggcgttcgggaggcggcaaacgatcccgcaaagattctctacaagcatcaatatccataagtaagtcaatttgcatccgaccatttccattaaaccactgtccattaatttatataactgtattgcgtgtagggtggacaaaaggaaaaacaagaagaccaccggttggattgcttatcatcatacacacattgatcgatgggaccagtttgaagccaaccgcgtggcggatagcgcaatgcacaacaggcaagagttcgacgcatacttagcctagcttgtgaggaactaccgcctcgccctacgtccggcttggacgctagtcgacatagcggacgacccgactaaggtggaggagcagaacgagtacgatacaagtactcgtagaggtagcacgttcgagacgggtccggttcgagaaagagtggtgagtatgggttctttttacttgttttccaatttccgtactttgtgtttataacttctcctacaggcacgagagctagtcagggcagtgaacgatgcgggcgtggcatttggcacgccccctggctcgcaacaagagagcagcgttctttggaatgccttataggtagatttgtaaaattcatgcaccatacacataattggaactaactccttccttctgttggtactagactctacgacagcgttgcaggaagttggcggcacggctgggatgcagggtcgacaatgtcgtcgaaccacctcgacgggccgagcaggggacaagtcgaggagtggctcaagagggtgaacaagaggaagagggagaggaagagggagaggaggagggagaggaggaggaagagcaagtggagctcggtccctcccagctgcaggacgctccatagtcatcacaggggccatctcgaccacagcgcaagagagctcctgtttccgactagaggtacactcccgatcagcctcgcgctccaaggggtaggaagaagtaggttttatttggttgggtttagttcggtaacttgtgtactttatgaaacccacaactatattgcgacttgaaatcttatattttgatgaacccacaactatggttgtgtttaggcttaagtctgtggatggatgtggttgtgatggaactggatgtgtatggatttttgatgtttggatggttatgtttatggatggatggatgtatatgtctgtgaatggatggatgtatttgtgttgatggatgtatatgtgtgtgaatggatggatgtatatgtgtgaaaatctttattggcacatctatattatgctgtgcatatagttaacctgagatggacacattctcctgatggcaaataagtgtcacacggttaaaatggctattttttccagctgatgtattcaccatgtgaccttgatcaaggtgacacaccttttctaatctgtattccttctcttttttcagcttttcctgtcccatgaatcaattgtgatgcaaccatagtaaagtttcaagggtgatcatgtgcttatgttactagtgatgagctgctgtttattgctttgaaaatcatattgttcatggccatttgtattttatatacatgactgactgttatgttagtgttatacaggttcaggctgttctattggtttagtaagcatggctgtacctctattggtttagtaagcatggctgtacctaccacattcgatgaaaaggtatccatgttctgtagaatctctacacaaaggttgtttgaatgcatatgcacttttaaatggcattcctgtcttgtatatgtgtgtgatgtttgtgaatggatgtatatgctgcgacagtggcagtggctgtatgccagcggctgatgaaacacctcagcgctgaggttaaatacatcagcgccattacagctggcgctgagatcccctccgggccacacagagtagctgcttcggcgagcccggctcgggtggctaagtgccgaagctggcgctgagatccccgacccggccgcacagaggggatgcttgggtgagcacggcatgggcggctatctcaacgccagggcactaagcgctgaaattgaatgtctcagcgctattatagctggcgttgagatccccgacccgaccgcacagaggggatgcttgggcgagcccggcacaggcggctatctcagcgccagtgtacttggcgctgaaatccccgacctggccgcacagagcgattgcttgggcgagcctggcgcgggcggctaaaggccgaagctcagcacaaaaggaaatggcgctgaggttggccatcttagcgccaatgtaggtggcgctgagatccatgccacgtaggcgtgggggaaaagctgggccgccacactggcaaggctcagcgccatggtatttggcgctgttctggccaagctcagcgccagtgtaacatcccagcctagggcttaataggattaatagaatactcatatcaacaagttgcaacttcttttccggaagccgatttccaaagaactcaagggttaagcgtgcttggcctggagcaatttaggatgtgtgaccgaccaggaaattcttcccgggtgcgcacgagtgaagacaaagtgtgcagaattcttcccgggtgcgcacgagtgaggacaaagtgtgcaggaaagacatgtgttggtctgtgagggcagtctatgacctataaaagctatcagatgtaagcgggcccggcctgggggaaggcggtttcacgggcgcgtgggtcgcagttgcgcaggcatggtgcgcatggctggtgtggatccgaagtggtcacacagcatggcacatgcgctggcactggacacacggacgtggccaagaggggacgttcctggcctagggttgatcgacgggggcgtcgatctctcttaagggggtgaggatgtaacatcccagcctagggcttaataggattaatagaatactcatatcaacaagttgcaacttcttttccggaagccgatttccaaagaactccagggttaagtgtgattggcctagagcaatttgggatgggtgaccgaccgggaaattcttcccgggtgcgcacgagtgatgacaaagtgtgcagcaaagacatgtgttggtctgtgagggcagtctatgacctataaaagctatcagatgtaagcgggcccggcctgggggaaggcgggacgttacagccaggatacttggcgctgagtccgcagtctatttttggttgaagttttttgaacgggctagtttcgcaagatgtttttgaaaagggacaatttgtcaaaaaaaaaagggtatccccagtatgtacgttaatttttctagtaaataatttctatgaagctgagacttttttaaatagatctaatctaatggtccaaaatagcaggcccaccaatttaagtgaaaatcgacagttagattaaaaagtgccatgtggcagtttaggagcgtttgtaggagtaccacgtggtggcttaggagcgtttataggaagtttcatggacgacttttagtagataacagatttaattaattgactaaatgaactttgtgatattaaaattatttcttgagctccaaaaattcacatgaaattttagagagtattttatagcacggaaaatattataaaaatatttctagccatgattttttaaaggaaatttttaattttctgataaattgacttgattaaattgctttgacttttaatataaatttaggaatacattactaagagatttttaatcccgactgaaaattggtcgtgacgaccatccgcctccttcgcaaccacctcaaacaacccgaaaggccgaaacatctcctccctccccttcaaaacgcagcgtacctatcctcctccaccgccacctctgtcgatcatgcccgtagcacgagatggtggatctgaagccagctaaggggcggtggtggcggcagcactgcagtagaagggagatggcgtcagcgcggtccccggaagggggtgatgggggagggggggtgcaaggtgtgatgcgggcggctacggaaaaggcgaatcctggagcaggaggtggcgaggtgctcttccaccatgactacgatgacgacctaagacagcaaaaatgacagcgatgttggctaaccgatgattcggctcctctcacacgagcacacaagcgagaatgaaaaacataaacacactggactagagaattttttttgctgcacacctgcacaccacagcactcacaagcgcactgctattaatcacaccacaaaacacaagctaatacactgcttaaatagcacacattaagccatgttctggccgcactacccagccaaacactgcatggtttatccactaatcacttccctacatgcaggccacatctccttgcatatagaacaccacactcacacgttcagttgcaggtatctaatccgccgatgcatgcgtccatgcaaaacagactatgacctcttcctgctcctaaactgtagacccccgtttttataacaggaatcaatcgtgtaaatagtaccatttccctggatcaagtagtctggtacacacgagttcatagctgtaataccaaatgctcatacacgagagtctagtgcgaattattacaacataagcccgcaggcattgtcttaaatcatcggaccgagcggtccggaatacatccaaaagcagaaatagataaggtagcggaattaaggcagcggcatgccatcgccacaggcaacgaccgtactaagacctattgagcgccatcgtcttcatctccctcctggtagtaggcatagggatcctctaaagcttcatctcccgcttctgattaattttatattcgcaagggtgagtaccaaccgtactcagcaagccaccacagcaacaatacatatgaaaggggtatttcaaaggatggctagggttcttttgcgcaaagcaagttttgtaattcttttcacaagcctaagacctagcattgactgatcaaattttagtaccagtgtttgtatttaaacaacgacggttctgtccaccatccattgtgatcccaaggatagcttcccgccattgaatcgttatggttttctgaggacgcccaccttccctcttcttaggaagtggctacatcagcataaaaaaaattcatcatgcaacaacccatcccacacaagttaataatttagagactagccaagtgtaatacatgtcccggtgctcaataaccgcgagtacggctattcgaatagatttggtttactcacactgcagtggatgtacactttacccacaccccgcgactgcccaacacatgagccttgtctcaacacatgagacgcgtcacggcaaagcttttcgataacctcgcattggcagtacccgctccatgaacttttcatcctcatgcactctaggcgtacacagtttctagcagtgagaggagttctggcgtacccgggaagggaagattcacacccatgtatttaagttataactaggttcaactcaacactcgacagtcctagcaatggcgacaccattgtagagcccctgccttacacatgagaaaccactatgcatggatactgcctccgcttggctatttactccgctaggtctatccccattcgagaaatgtggttgtacggtgtcgtttcatgcttaacttcatggcttggtctttaattgaccagggacggtactagcctttcccggataccacccaaatccaccgtccgccccggtctaaaacaaaggtttttaattcctttcatgtcatcattatcatggcaatgtggtgctcatatctccacatgccgcatcttaattaccttcacaaaggtaattgcccaagcatataatatttgataaacatgagtatgcaagattctaaagtagcatttctaagcaagtgtcatagttgactagggactcatacgtaatcaaggttacaaagatttaagggtaaacaataatcaaggcatggcataatcacaagtaggatgttcatcattgcatgcaatcttatttgtaaataaaaattgatttcgcaattgggatcaacgtgatcaaagaatagtgatgacttgccttgctcgaggtcttgcgggtcttggccttcacccggatccacggctccctcggtccctatagttacgtgcgtaagaacaatttgaattcgattagaattcaaacaaaatccaaataatgaccgaattgaaaaacgagcgcgggaggtgaattctatataggctactttattcgcgaagtggaattattcttctccctaagatatcttgtaatttatagtcatgtcctaagacacatcgaattattgagttcttaatcacatgtaaattattaccgcgaaattgattccctatggagattactaaaaataatctataacaatccataaggattcatctaattgtttagttcttaaataattaattctataatcaaattctagtactttaggtatttaaatagtaggaattcatctagctatattttcattaatcctataattaaattctaatatttttaaatattttaaatctccccctaatttttccctttttcttttctctctctctcttttcttttctcttcctattttcttttctctctcttttcctttctttttcttttctctctcttttcctttctcctcccggctcctcccttcctctccctctcttggcttcttgctctcccggcggagtcggcgatgaacgcaagggggggggcggggcggcggcttccgatggcggctacggcgacggcggcgacggtggctcgaagcggcagcgtggcgacctaatgcggcggcgcggcgacctaatgcggcggcgcggcggcgtggaggtggtggcgcggcgacggcggcacgtggggaaagcgaagggggaggggaagatgggggatgtgtgtgtggggaggcttggggatagagggaggggcttatatagggcgcgggaggggggcggcggcctcatggcgtcagcagggtggcgcggcgcggggctcggcgcggcgat

SEQ ID NO: 19807 - DNA, 5305 bp, Oryza sativa
cggcgcggcagcggcgacacgacggcggcgcggggcttgaggcggccgggcgtgcgcggcaaaggggggggttagggctagggaacctcgttgaacacctagagtgcaatgaacagtgctagcctaatttaacctattctttataaatctaaatcttgtcctttaattcctaattttccacaaatgacgtttacatatacttgtgttcattctaatcgaaaaattcactctagattgatagcacccatattttatttttatataattttcttgaatttaattagagttatttcttattccgtcacttttaaatttaattaatacaaatatagtcgtaataatattttactcatttctatcctcactaattcttattttaaattgcactttaattatttactttgtcaatttacttcttagggcttatacctaactaattatccattattcacgatttataaattccaaaatcaaaatccaataaaacaatcgaacaaaatcggcatgatgcaatttgtttaaaaagtttttgaaggcccatatttttggagtttagatttttattggtcgaattttcagggtgttacgtaaacttgcgccatgactcgatcgaccaaacacttggccacacacacatgcaaaactaattctaacacacacgtacatacacatcatgccaccactcttggccaccaccacgcagcatgatgagaacgtataccactaactacagtttaacagttatacaacaagattaatttctaacaatcaccccctaatcttgttggctttatttgtgaacacctgtcaccggcttcaaagtaatgttggctcatcatcagcatctgcaattgcaagctgcgccactgccttagtcatcttccgaggctcgtcacactcatcagcgaagtgtccaaacttgccacacctgcagcactcaatcttcgacttgtcgaacttgctgcgaaacttcttcgtgacactgccagaggcctcgtagctcttcttctcttcagcaacaatggcctcccactcagcgcgtgtgagccgttgctcagcccctgcaataagcagctgctcctcccctgcgttttcacgacgtcgccccttggaggacacctcgaacgcccgcaaacatccaattgtctccgtcaccgtcatctccgacacatcccccactgctcgatggtgcttatgagggattggaacttgtcgggaacggaatgcaagagcctctccacgacggtggtctcctccactttcgtgccgagagaacgaatctcattcatgatcgtggtaaccttcaaagcaaaatcattaattttctcactatcaccctcacccatgtacataccatcaagcactctcttgagagtttgtactcgggccttcttgacacgctcttcacccatgttcatctgcttgagggcatcccacgcctccctcgccatttccttctcggatatgaccatcaccatggcctccggcacagcttggacaatggtggcgagagccatttgatccatcttctctcatcggctgcgttgccctccacggcagtccacacaccttgtgcgcacatgaaaattttcattttcaccgcccaaacgctgtagttgttctccccgagcatcgggtagcgtaacgtcacccccgcctcattcacttgctgcacgacgagctcatggccgcctaggctgccatccccgccgttgccgccgctgctgcgacggatcggcggcggcgtgtacacaccatctccagacatggcacctgagctctgataccactgttggctaaccgatgattcggctcctcttacacaagcacacacgctagaatgaaaaacacaaacacactggactaaagaatttttttgtgctgcacaccagcacaccacagcactcacaagcgcactgctattaatcacaccacaaaacacaagctaatacattgcctaaatagcacacattaagccatgttctggccgcactacccagccaaacattgcatggcttatccactaatcacttccctacatatgcatgccacatctccttgcatatagaacaccacactcacacgttcagttgcaggtatctaatccgccgatgcatgcatccatgcaaaacagactatgacttcttcctgctcctaaacttgcgcaatgactcgatcgaccaaacacctggccacacacacatgcaaaactaattctaacacacacgtacatacacatcatgccaccactcttggccaccaccacgcaccacgatgagaccactaactacagtttaacacataaacaacaagattaatttctaacaagcgagggctgtaacagtgacgacaatggcaacgaccatggtgggtagggctcacccttactggtctcagcggcgatggttccggcgaagtcatgctcgggatccggtgaccgcgacaaccaccaccactacgacacacacccgttgaggtgaagatgacctggtgactgctagctccttgactcccgctactttgcctcatgcagatttggagacgagaggcggacctggtgaccacgacgatgatgatttgtgaatgtgaatactctgtgaatttgtgaatgtcaatgctatgcattttctggcctggattggactttcgtgggtcctattgagattagcaggcggcgctaggcgaggagcggtgttggctatgattttttttagcaccgaaaaggattttcgcaggtgcccggacggctgcgatattttttagcgttggaaaagatttttgtaggccaatgacttaagaggttgtctgcgaaaaaacatgaaatttacagtcctttaatgccaggaggaatgccgtcagcatgtgtatatcaattttggccacctgggaaaatatttgtagtagtgatattataagatattttatcctctccatcccatatgtagattcaataagacaaattttactacaggacatcgtgacttcgcggttttagatataggacaccgcacgaagtgacttttaggggaagacactcccaaaagtgatatttgctggtggacacggtatgcattaaagtaataatttctggtttaagaggagagataaatcacatgaaatgtcagaaatgctcttgggctcacatatcagttcttctctctatcccacatgctagcgatgacggtgggcaggtgaggtccggtggcagcggcggcggcgggagggcgaggttagagcggacgcgactagcggcacgcggaggagcgccggcgccagcgcttatggacagcggcggcggccggacaacaggcaaggttcggcggtggcaggtgcgtctggtggagtggcagtgcggctggacggcaacggctgcagcgcgcggagtgaggagggaggggcgccgtcggtggccggcaccgctgtccgggcaccctcccgtcgccacagccaaacctcacttgcccaccgtcgtcgtcctcatgtggcgagcgagagagaagaggagggaaagagaagagagataggagagctgatatgtgagtctaagggcattttgatatttcacacgatttctctctccccttcaaccgtgcggtgtccatcagcgaatattcaacttttgggagtgttttcccccaaaagtcatttcgtgcggtatcctatagctaaaaccgcgaagttatagtgtcctatagtaaaatttgccattcaataacgttcatatgaatttagatataaatcaagcatttacatgtatctataaataaatctatccaaagcctaaagcggcttacaatacattggtttttttaaaccaaaaccaacaacaacgtccgttcaaaccgctcaactttagctaggagtacactcagtatttcatagtattaattttcattggctgaatcgatgaacaaataggaagtggattggcttatatatatatatatatatatatatatatatatatatatatatatatatatatatatatatatatatatatatatatatatatatatacggtgacgctacacagcgccacccacaggcgctgcgcgccacgaaacaaaatggtgccagacacaaacgagtagaggtcagcccaccaccgacaaaatcccaccaacgaggcatccaacccacccgcggagttaaaatttaacttagatacagttggtggtggtggtgcggtgatatcgttgaggagttaatattatgcgatgattcagttggtctgagttaaagtttaacttagatacagctggatggtggggtaaaaccagcggagttaaattttaacttagatacagttaggtggtgggtgcgatgacgtcgttgaggagttaatattatacatggtttcagttgatatgagttaaagtttaacttacatacaattgggtggtgggatgcgatgacatggttttggagttaaaaaattacttgttgttgttcaattctggatgatatgtgattgagtctggtcgctgctgagttaaaaattaactcgcgatacaaaactgcaggacatcgttgtagagttaactcagattgtatgagctaaattttaacttgtgtacaacaagattttaactcaacatatgcgtcctcacaatctataagcgtaagttaattttttgtcagcacttgctccggacatcaacggcggagcgtcatggaggtgtccgccgctgctcctccatgtccttcggtgttcgaactcgccgccgcagaggtcgccgccatgtgcgtggggcgcggaacggcggcccgatccgccgccgccacggctgtagcccgcagtcaccccgtcacgggatccgccgtcgagccgcctgcatccacgcctgacacgcaccaccgcagccggatccgtgtacgtggggcgtggagcggcggccggatgcgccaccccctcgcctcgccatgccatgttggatccgccgacgccgcgccttcccgtgcaggattatccccggatccatcatcgtgccggatacgccctaccatggccagatccacgcgcgtggggcgcagatcggtggccgggtgcgccgcctcgtcgcctcctacacaccgtcaaccgtcgccttcacgcctgcagccgtgccgtaccggatccgccgacgtcgcgcccgccgctgctcggcagaggaggtggtgctcgacgtcgcgccgccagccgtgccatgccggatctgcccaatgccgccaccgctcaccgccacacccgctcgccgctctcatctccgaaaaaataggatctagatatgtggttggttacggggtggatgtccaacactgg

SEQ ID NO: 19808 - DNA, 2683 bp, Oryza sativa
aaaaggggaggggaggagcgcgcctggaggaggggagggagcgaaaaaaaaaaagaaaaagggagaggaggggcgcgccaggagggagaggggaggatggcgcacgtaggtggtgcgggaccgggggagggagggagggaggggtacagaatagttattctatagggggtgtagaatagtcttaccctatatatatatatatatatatatatatatatatatatatatatatatatatatatatatatatatatatatatataggcaatgtatcctatgcacatacctatcttggtgcactcatgcactcggccactgtcggccctttgattctaatccaaaggctaaaaacgtaggtacggcatttttacagaaagccgcctgcaacacctgtgtatgtttgcagaaaacccctcagttcccttcatcttctctcgtccaaacctcctcgatccaagtcgatccccaaatctgctctatcaccttcggtcggggccggcaggactcgtcgtcggcgcctgcagcatggctgttggtgattttgtgtccatctacgcgcagctgaacatcgagctggccgagcaagcagcacagtggcccgtttggccgtcaagcagcgacatgactggggagcatcgtggtgttcaatcgagtaaaaatggcagcgaggctgccatatcaataattaaaataggccatgtccaaccaggagaaaaacaagaagagaaatcaacaaataaacatggacattatagctgaagaatcgagagaaaaaacacgaagagactcgccggaacgacggcctccatggctccatgcggacactatagatggagacgaaccattcagcgagcagctggacagccacgccggctgtgaaggacagcgccgaggcagccgcagcctggcgtgtcggccgatgctagccctagcagcaggattcaatgaaaatcgagatgaatcgtcgttctgttcagccccatcgcacggagatgagatctggatcgaggaggtttggacgagagaagacgaaggaagtgaggggttttctgcaaacatacacaggtgttgcgggcggctttctgcaaaaatgccgcacctgcgtttttagcctttggattagaattgaagggccgacagtggccgagtgcatgagtgcaccaagataggtgtgtgcataggatacgctgccccacatatatatatatatatatatatatatatatatatatatatatgacactcatatggggcaccatggtgcccgggcaacatggtatgaaatacacaaattcatccaaatttttcaaaattttcaaattgtgagtatatacctagttataagtattcaattcatacctatacctagcaacaaaacaactcaaatttaactttatttcacaatcgaatgttgcataactaactaattatatgtttggatgcaatatacctataatcaaaatataacaaaaacaagttcaaattcagttcaaacttgctttgaactagttagtaaagtagttaatgttaatacctaaatattttaaaaaatttcatactcttttgaattgggtatatactcaatttcaacaatggtgcccgggcaccatggagcaccaaacaaatttacataggaatatatatatatatatatatatatatatatatatatatatatatatatatactattctatacccgcctccctcccatgggctaaactcacctctcctcccttccaagaggcaaaaacccacctcccacctcagtcaaaggtcagtcaaaacgcccccacatcggtcaaacccgtgggacttcctccacaacccacctcttctcagcactcgtcatgcaggaattatgcagtaacgtgacagtcattgtgcagtaacaccatgtattacttgcagtaacgacgttaaaatatagttcaaatatagtcatgatggatctagttttgataagcacttttttttacaacattatggtgaaaacggtttttaaaaataatgcatatcttgtgagatattactcttcaaaaattgacattttaaagtttatcctccacatgcagtaacactatagcattactgttactaccgcatcttccgtgttactgcaagagtacagtaacgactgcatgttttacagtaacatagtgtgttactataattgcttaataaagttactgcatgaacatagtaacaaccaataagttatcgatgtttttttcaaggagaaaaagacattgcatgagaggttgtttaagccctattacatacatattttcttacttggagccttcgagagataatggtgattgttttggagtgctttgtgaagaattgggggagcaacgattcgggagaagagggatgattagtcagtctacaacttattgactcttaatagcaaatctacaacccgtctgctgactccccccaccacccaccttttcttagctctcgtctcacaagagtgcagtaacaagacgtccattatatagtaatatcatgtcttacgtgtagtaacaacgatcaaatatagtcatgatggatctacttttgatatgcactttttttaatatcatgctgcaaacggttttaaaaatagtacatcacattagagatattgctcttcaaagattagtcttttgaaatttaactcttcacaagtagtaata

SEQ ID NO: 19809 - DNA, 5953 bp, Oryza sativa
attcctgcagcccatatatagatatatatatatagacacacactatactatactatactacaggggtgcgttgtattaaaacgcaacccaccccaccccctccccataggcttaacgtactaccgcaccgaactaaatcaccagtaatctatttacttagctattatgcgtatattcatattaggatacaaccaaccaaccatcgatcctattttcctggatctgataccatccacttccacgttgtttttcccggatcgagcaagagggagagagcacgggcgaaggttggcggcggcggcatcctccagtggcgggttatgggtgaaatcggtcggagacagcggcgcatctacggtcaatggcgatggcgaacaggttccctccctgtttgttcccccttcccatctcttccccccttcggtctcttctttctcctctgatcctctcccatcctggcaccgacgttcacttgctgaaggtggcacacgacggcatagggcagcggcgcatgagaaaggaggaggcagcgacgcatggtggtggttgtgtcgatcttctccattgtgcgatgcatgaggaaggaggaggcagcggtccgtgcaacatgccaagaaattgccgtgatggacatcgatttaagaaccaggcccgtcgctgacccaagctccttcactccgatgaaaaggtaatggatcttagactaggctttgccatgccgatctgatcctctttctcgtgctttttttttaccttcctttccatgcttatggatttttcccttgctcctgttttcatgtgcatatattcagaatgcaaacgaaagtgcacccaaaatttattgtttccatagatttgcaggtttcccgatcagagcacacacgtttcccaagttctcactgaggtgagtcagatccaacatcaaccttctccacggagccgtgtggactgtggaggacgaggcagtgctgcctggcagacggagcggagggaggaaagccagcgctcagctcctttctcagaaccagtgtaggccatcaatcttgctgtgtgctgatctagctgcatatttcgttgacgatcgcatgcactccctgttcttaatttctctacgcttgtttactctgttagcctttcttcacaaattctagtttctagtttttcatgcctttgactgcaattacagaagaatctttttagttgatactggcatgtcctaccggagcactggcaatcgtatataaaggctatggattaagtgtttttagttgatccagatgactctgtacgactgtacctatctagatagtatcagaatctattctaaatttcatggacaacaattcatgtcctcatgcatcaattaactaggtatttattttataaagagtgaaaattggcatggtttctgctttaagtaagatctcagatcgattgatcatgtgcatgtgtgcctcatgcaggatgaaattaatcatgaaagatttctcggtaattagtcatgccttctatgtaaaattaatattaaatgagtgttcatgtgtccacatgtatgtgtcatcagttcacacagcttgtgaaaattcggtgttgcgacaggaactgaacatctgcatcatgataaaataaataaatcttcaggataaaaatttagatattcacaacttaaatctacaggatgatatgcataacagtgtcccatcgttgtttttctgcattgtcaaaaatcagtacttagcactgccaacaccatcatctgagcgtgcagtaatgctttagttcgtctctattctcaagtgtgggaatattgattgatcttggtttcgatttcgcttaattgcacaatgtttggttgcaggctaggacaaggcctccaaacaaaacttctacggttgttggcacatgcgccatcgtcgtttacgatttgtcctccgccgatccaattggagcagcaacatctagttttttcatttgtacaatcaatatgtatgtgtacccccgagtctttataaacatgaaatgtagctgtaatttatttttggctatattgatttgttggtaaatatgttactgtagtagttagggagtaatttccccacaaaaaaaaaaagtagttagggagtaatttatttttatgagagaagattgaagtaaatttgttgttagagcgatgtgttagtacgtttttatctgggagtaatttatttaccaagagaataccagagtcattgttggtatggctatatcaaaagtaatcaatttactgagtgaagcatggaaaagtaaaaaaaaaaaaacaatggctagattaaaagtaatccatttactggagtaatatttgttgctaaatcaaaagtttttactgctaaattgtgagaaatttatttactgataaaacaccatagtaaaaattgtgtataaccaaagagtaatttatttactgataaggcgacgtacttagtatatttcgtgtgtaataatttatttactaaagaccatgagtgggactgatttattatcaagagaagcacccgtccaaatagtaatctatttactgtgttattaacaagattaaattgtgaaaaataaagagaaatacaggtatttctattgtaaatgatccatcaaggataaaaattataacgatcagtagtacggttccctacagggccttatttaagatgttagtaattcttttactcacgggcttaagcgcgagtaaatctttcacttacaggcccatctagagagggcctattagtaataacgtactcagggtgcggtttagcgccattttcctatatatatatatatatatatatatatatatatatatatatatatatatatatatatatatgtatatatatatgcgatgtatacaattactctgtctcaaaatataataacttttagccctcatcatttgtcccaaaatataacattttctctaccaatattatcttcacaaccaatcataatcctacaacatttattttttccacctacctccacctttatctaatcacaaccttccgccactcacttctacttactttcttaataaccgtgtccaaccttaaaacttcttatattctgagacggagggagtgctaattaatagtatcacctcatgaggacggtgactgttttcttgtcccagtcgtggccatttgccaggacctcccggaacttggggcgctgctccctgccgccgccgtagcggcgcgccggctgcttcggcgtcggcagcgccgagagcgctgccacgccaccgtggagcatcagcacgacgtcccacatggacgggcggtcctctgggtcctcctggacgcacagcagcgcgatgtgcgcgcagcccacaatctggcccatcaggtgtggcgcgtcgccgcccacgctgatgcgcagggacgaccggatcagcctctccgggttcttctcctcgaacaccagcctccatgcctacatcggttttgtacaggccggtataaattttgttccatgtaatatatcaatctacaagacattttataatacaggggctatttggttctctaccttatcaaatcattggtagtaccaaattcttggctgttttggtactaccaatttttggtagggtagagatttaattatacatgtttgaattagaagaaggttctagattattgacaaattgatcattggtgttaccaataactagctgggtggcccgcgcaattttcacggctagcacccaaacaaaatcatatttttttaagtatgattttatttaaaatttattaaatagctatcttattgtcttaagtctttgaaagaccaaaccttatcatcctcgtgtttataattacatagttttttaaagtcacaccagttactaccccttatgtcatctccttctttatttgcttgctcgatctaccactatttctattcattcttcttgtaaccattaaaaattggattttatagtttttagagtttattgttacgtggtttcatttttataatttctaaatgtcatgtcaaacattgccattatactcctttacgacctgtccactgtctcttctctttattgtcattgagattttaaaaatcgaacataattatcgtttgggttcatttttaccttttagaagtcccaccaaaccgtcagcggctttgccattgtactcctctacggcttgcccgctacctcccttcttttattgtcattgagattttaaaatcgaacatgattatcattattttttttttactttttagaagttccgaaactttaaaaattggacttgtagtttcattttttatatatttttagaagtcccatcaaacgatgccactatgcccctctacagcccgtccgccacctactctttattatcattgtgattctaaaaatcgaacgtaactatcgttggaattcattttttattttctagaagtaccatcaaccgtcagcggctctgcaactatactcttatacaccccgcccgctacttctcttttttattgtcattgagattttaaaaatcgaatatgagtatcaatagggtttatttttttactttctagaagtcccggcaaccaccttactcgtttgcttcacggcctgcctgacgtccctccttttaatcgtcattaggatctattcgttgttttattaacaatttttatacgtcgtatcaaccgccaccactctactcctttatagacatgttacataatttatttatcatgtgttttagatggtcttttctttcaataatctttatttttatcacaaattttagtttttataaattgtattcctaattgaaatcttatttttctttttctaatttcagaactttttttaaaaaaaaactttagttaataccgtattgtgttcttttaatgtttttatttttattttcaatttcatttgtttgaaaaatgtattcctatttaaactctcttttaatttttctaattttagattttattttattttatttctaatttcgattaatctcgtattaggttcttatatggaaacttctttcaatattgcttatttttaattccgaatttcagctatttttaaattgtatttctacttgactctcctttccttttctaattttggattttattttatttttattttgaattttgattaatctcgtattgggttcttatatggaaacttctttctatattgcttatttttaattccgaatttcaactatttttaaattgtatttctacttggattctccttttcttgtttttctttttctccgattaatgtggaaatttctagctcccacagcgaacgtggtgcctccttttaaagctgttttaataatgtaatagatttgtcttcaatccaaatccatactattactattcaagatactaataaatttgtagtgcacattttggcaccaatccaaaatgcccacaatcctataatataacaatctataaccgaattagacgctattcggtcctatgttgttattttatgggacggagggagtactacttaacaaatagaaataagtatttactaatccctcttaaattcaaattgtaattacaacatagtagaacggtacaataaatcttgaccaaacctattccatattgtaatacttttgggacggagagactactatataataccttgttcattccttttattttcttaattgaatagtttcaacattcaaataataataaaaaagctttttcccctaaattctttgtttggtctaattttgatcctacaatttaaatataggatagctagaacacatccttatcttttagtaccagacaggtttgatcccttctattgttcaagatggttttggtcgacatgaatagcagagttggtggaaaactgactttgactcaatattaaaaagaatatatttcatatactaaaaaaccttaacca

SEQ ID NO: 19810 - DNA, 20686 bp, Oryza sativa
  unsure (1)..(20686): unsure at all n locations
agtggcctataaagagaacaatgaagaatgtgaatggtgtttgtgacttgctgtgtagtgatctgagggttggtgatggaagtggatcggtcttcatctctgaccaatagaaggtaatgctcctgatccactgtttgcttttatgttctgtcaattctgtcattacacaatgcatacctaatgtcttgtgcatgttactatcaaatgcagggaataattaatgctgtctctaagtgggctccagaagctgaacacaggaactgtgccaggcatatctatgccaattggaagaggcacttcaatgataaagtgtttcaaaaaaaattctggaagtgtgccaaagcatcatgcagaatgcttttcaacttgccaagagcaaagctggcccaactgacccctgctagagctcaagcaatattgaacacacacccagagcattggagtagggcttggttcaggttaggatttaattgtgactctgttgataacaacatttgtgaatctttcaacaaatggattcttgaggctagattctttcctatcataacaatgcttgaaaccattagaaggaaagtaatggttaggatccatgaccaaaaaaaatgttctaatagatggagtactgtcatttgccctggtatacttaagaaacttaatgtgtacattgctgaatctgcattctgccatgctatatgcaatggggctgacagttttgaagtcaagcataatgagcataggttcatagttaacctagatatgaaggagtgctcatgcagatattggcaattgtcaggtttgccatgtcctcatgcaattgcttgcatctactatagcaccaacacactagatgggtgggttgctccatgctattaagtggaatctttcaaaaaaaacctatgcccattgcctgcagccagtagagggcatgactagttggccagatgatcctagagagcctctcaatgccccaggatacatacagatgccagggaggcctaagactgaaaggagaagggagcctaatgagccagctaaacctaccaaagcttccaaatttggcacaattatgaggtgcagatcatgcaagcaacctggtcacaatagcaagggctgtcacatgcacagtggggcaggtggtagcacatctgcagctgcaacatctgctccaggaaatacagtcactgcaaataacaacttagtgttgtcaagcacacctagcagcattgcacaaagcaggaaaaggaaggcagctgagctcagtactagcacatctgcttgccacactaggaagagaacatctcctacaaaaaaggtatgtcagccagtcctcattcaattaaacttttgaaattaacattcatttgctaacaacacttgtttcttttccttccagtcagcaaacacaaacagttcacttgtgaaggttgcagccagtgctaggctggcaactgaaagaggtggttcaaccagtgtgaaacttcaggccatagtgccacactctcaatgttcttcttctgcttcaatgaggatcacttctgagaaagcaagtgtttatgtgcaagctcaagaaccagccactaccaagcccaagaaaacacctacaggtccactgatgctgattcccccatgggaaactgacaagctgtgatgccatattgtgctaactatgcaatgttatgtgctttttgtgtattttggcagactctaagccaactatgcctactgtgaactttatgtaatttggcagactcttagccaactttgcctatctgtttagtttctgtaatttggcaaactgcttgccaactatgctgtgatatgtgcttgttctggcagactgtaagccagctaagctatgtggattgttatcatctaaattgagtgactttgctcaaatgatgtgtcatagcctaatctgatatgagatggtatttactgagctgatctgatgtgatgaattgactcttatcaatttgttatgctaaaatttatgtgcaaagttacgaatactcagccactgcaaaagatgatattcagtcacaattcaaccaaccactgcaaagtcagctcaaatatatgcaatgtcagtgtcattactgaatatcaatcacaattcagccaaccacaaatccattcacttaacttagatagtcaaagagcacagctcagtttcttggcaaaatgcagcaaaatgctttcagctaccagcattttgacacatagattaacacattgcacctcacagctgaactaaaatcatagcaaacaacacaagcatgcatcccaacgacatcagtacaagccaaactctctgtttctctagcctactgttacttgctctcatagcagccatgttagcttcattctcagctgccacaatcctcaattgtgccacttcattcattgctacccctaattctaggcactgctcttctacctttggcctcagttcttcaacacaatgttgcagctcattcttctcccttcttagcgataacacggcttcatgaagatcgttcaacagctccctcaaaaaactacttgttgcaggctcataccagtcaaaaaaatcgcagccggcgccctgaaaacattacatcccaaatcacccaaccatactgccagctcaaacaaaaaccaagcaagcaaacgaaatcttcatcactcacccgattgcggcatcggtagtaccatcgaccagggttgtccacnnnnnnnnnnnnnnnnnnnnnnnnnttcgcaccacatcggcacatcaccgccggctgataatcatagggcccaactcgcgccgggatgggagcacgactgctgggatgcgacgaccccgacgaccggtcactgcaataactcgccatcgcctagcctcacctcctcttgtcgcccccgccgccgccgccgccgcttccgccgccgccgccgacctaagctagggtttcagctcgagaagaggaaaatgtcgcggcaacgcctggaaacagcgaggacagagcctttaaccccgtctattaactccccaatggtggactaaccagtgggtcccacagcgcgacacgtcaacaaaaccgggcaaaaactgagtcaatactgccgagggaccttctacggacggatttagtaattttaggggtacacatttctggtattctagtttagggaccttaaaaaatctcggatttagtaattttaggggtacacatttctggtattctagtttagggaccttaaaaaatctcggtgtcaatttgagggacctccggtgaacttattccatgtaaaaacacgaggcctgggagatctgcttaactccagtgtaagtccagaagcttgcctttaggtgtatgagcgtgccagttgatttgatcctgcaatcaacaagaaacaaagacaaagaaaccacggttaaatccataaacgatagccgatcggctaattgccgatgaagtatcatttatcttggagccgatgtcatatgtggatcgatcggcaatcatgaataagtaagaaagaactaattaaatctactcgatcagttgtagatattaacaatatataatccttatgtcgctatatacttaaatcaagtgattgggattgatctgtcgccatgacgagacagtataaatcacatagatcgaagtatatgttaacaacgagactatatatgttcatagcatagccgatcagatagatctagcatgtataggctaatactccgataccactctatatcaagatattaaggcaagtagaatacaccaaacaaaagcctaatatacttaagggcagatttaacatgtcaattaagcatatgagaaaatggtagttaaatcaggtaagatcggctgaaactctgacgctaccctaatcggcagccaaaggcagcctagagattgagattctaatcatcactcataagattaaactcaactgatgcagctataagtatgaaaagaaggacaatatctagacaatcaagtcgttggatgtttcatagagtggtagatatcctatataatctaagtcagcatcgatatttaacctaatcggctgccttctagtaacagacgttagccgattagaggttagatagcgatattgccagagattatataagatatatgaaaactcgacgaattacataaacaagattagtgtatcataaagatggaagcactaatcccgagaacgcaagccgccataacgagttttacctctagttgaagatcgaaaccgatgcagctcaacccgaaagcaagaactcgtcaaaacaaaatgaaagtaaaaagggtggcgatgcgccgagattgtagtgaacgtgtgttagttcgattatatggggctcgggtctatttatacccaaaaattacaaaatatgtccatatcggacacgtttcttatctctaacaaactctaagataccataagtctttgcagcagacttttgcccaaacatatctctaaggaaattacataaaatatcctacttaatagatacaattgccttcttaggactctatccatgtgtggcaatcatcatgaagcacgtcattctaacccgacaacatatgccgtgtcatattgtcggattcggctcaatcggctaaccctgtccgactaacacatgccccccaagtccagaattttggataatgtttcggatttgccatacgtcgactgcgagagaatattgcacttgccgttttccgaccgttattccaacgctttaaatactaaccgttgtccccgagaaatctcacaccgtttcctccgttttcaccgccgaagcaaactccgtcctctctctccgatgatcccctcggtgcacgaagcgattcccaggcgatttcctctccggccaactttctgcccacaacgatgtagacctccgccagtccatccgccgcatcttcaaccgagtacgcagaggtaagtttccattggctagatcctctcttttcgcatcagattagttttccctttccttatcttgttttcttcttctctgttcttttggatccgtagcaactttccaatctgatcgcagttccgagtttgtcgcataaaaaccactactttcttggtccaatcggcaatcccaatcccactgagtttatcattggtgaaaccaataggatccctttcagattagctaacccgaatctaggtcactggaagaatacttttaaatcttggccagccctcgagaaaacttcacccgagaaaagctggaccacatggtacaagcgtgtatcggctagcaagcaaacacactgggatgagattggaatcggtcaagcacttgcccttaccatagcgaattcggctaaggatgaacccctaatagctgccgccacctatttctcgtccaataccatcaacgcctttttgttgaaccaagggccgatgacaccaaccctgatagatatcaccatgatcactggtctagatgtgacctcatcggctaaccctacgagtctgaacaccaagaatcaatatgacttcaagaccaagagcataggcggttggtctggttacgtggcagcatatatgggccaaggatctgttactgctcaagaacacgtggcctttttgctcatgtggctagaaaagttccttttctgtggatccagttgtggtcctacaaccaactggcaatttgtagccgaggctctagaatcaaaaagacaatttcctctaggcaaaatcatcctcggctacctataccaaatgctgaacaatgcatcgactaagatagtcgtcggctcagtagttggagcaggtggaccatggtggctgctgcagacttggctgaatctggtagtcatgaaagctgtcaatcggccatccgtgatagaagccgaattcccaagactgcagccgattgtagaagatgatggagaagaaagcactcatcgtagatgcatgtcatatggagaatatgcattcacaccagccgatgctggagcgaagttatcagccgagctgctcaaagattggttctgcagcttctatgagggttttcaaaaagatgctcgagtttggtttccttatgaagattcagtgcatcttgatctcccatcagactttagattcgaagatatcaacaatgaaaaatctcaaaaatctaaagaagtcttctcagctgcgattagcccatgcattcttcctgtcggcatacatcaagggaggaacattcaggtttcctatgaattttatcactcgatgagctctgccagaccacttgggatgggtcaactaccaatcggcttgctctttgctgataaaattcaatgccgaggagaaatctcatcaaccttgatgatggatcggctgctgaatatccaaggacctcctttgggcagcattgaaaatatagagctggcaaggttcaggagcaagaactttgacagatggtggggtgaatggaagctgtatttgttccaccaaccggcctcaatatatgtgacagatctctttcctaatgttatccctcaggtaaaccttgacttcattaatttcttttgaacaattgtcagccgattcataacttgactaatcttctcttctgttttgcagacaacagaatcttctcctccacaccaaagcaatagtggcagagatatagagtatgccccaggcctcttgccaaatggtggttgaccaacccctccagttatcagctatcatgcccccaagaccgcaagtctgcttcaagggcagatgatagagccagccgataccggcaggaagaggaaacccagggcaccaacaatcgatccattagttctggctcctaagaagaagactaagaaacaaaaacccaaggtagctgatgatctgcctgccctagatccatccattgagcaagccttggatgaactagagattgaagaggatgttgacgaagctgcagccgaggtaagtgatacagaaagaactccatcggcttcacctaaacagactcctccgactccttctactccagctcacttctctagggtaaacagctctctttaattccttcttccaattgttttattcatagttgattactcataaatcttgtcttttgcagaagaagaagttcgctgtgaagaagaaatcggcagcaacccaatccaaaccaactctgccggtaagattcttctgaaaatatttcagttccaatcatactctatgtggactaacatctattttctttagcctcctcctcctccttcacctcctgtacagcatatgtcaagtgaatgaactccatttgctgtaggaagccacaatattgaggaagcagaacaaccagccgctcctactatcccagtaagtttccttttgacacaaggatttagatcggctatatctatttggcatctaattctctttgaattatttttgcaagccttagccgatctgttctcttttgatatcaaggactacttatagaagaggacaccacaaacaaacccttagctcccttatccgatgatgtgaagaagactcttgaagatatttctcatcagctagaggcatcttctctagacaccttggtggtagattgtggatcaattacgactcggctacacgaagttcaagctctgattcctgaagaactagccgatgtcctcactccagctgcttatcttgaaaagcatcaattcaaactggagaaatgacacgcccagaaatttagcccaaatttccagactattttgtgtattaaatccctgtccaggaccagccagggtacacaaaaagacaagtaatacacagttccaaacgtaaataaaagcgtaaatacttacagaagaggcacttagtcctcacaccgaaacgaaagcagcagcagcggaaaaaggctatcctagcggggcttcagctccactccacaggcaaaactcaactgaggtctgagccttggtcttctaacttcgtcttcagctcagaagcactacacttctgaaaaagggggaataatagcaaggctgagtacaaccaccgtactcagcaagccacaccaatgatgcagacgtgcaaggggaacacaaggacggtttgtggctatttgtataaaggcggttgtaaaacattttattgagcaaaacagtaaaactgttgagtaattaaggtaatattaaatctccactgatcaacgctacaccacgttgaacaggcccaaccaacccacctgaactacagtgcattgggttgatttattaaggtggaactaatcacggtgaatctggtcgaccgcccataaccgcaggcacggctattcgaatagttttactctgactagaggtgtacaactgtacccaaaagacacagccccacgacacgtttctgtgcgctgacatgccaccacgaaataccggaaagaggccgtgacaggacccttcgcataaccccctctaaccgattgcaccacaccttagggttcgcccccgtccacagcaagcaacgggtagcccccctctcgtgccgcggtgaatccggaagccaatcaaccggaaattttcccttaaaaaccattggccgagaatattttgcaatattctttgtgccctaaaatactctctgaaatttcccgtcaattttcggagctcaagagataatttcaaagtcacaaagatcatttaatcaatttaaataaaaagaaaaacaaaataaaacctcccttcctccttgggccattttcggcccaagtccctttcccctcccgcggcccgctcaccctatctccctctctcggccagccttcccttcctctcacgggccgtcgacccgtcttcctcaagactgctttgcgtccctgtgccagcctcctccctcctcccctcactgacaggtgggacccacggccccacccgtcaggcccatccccttcctccggctccaactgtcgccatggctgcccgagccaccccactccgccgccttttctgtaccaccccgccaccgccgcgatgccaccggaggaggacacgaggccggaggtcgctcagagcggcggcgagggatggccagaggcggtaaagatggttgcggctcgggttggcagtggaggtggaattccaacgatggaatggggaaacggagtggagaacgagcttgcccgcaaggcggcgaagccggcagtggaggcggcacagcacagcggcggcgggagcggcggtggcccgtggctggaggcgacgagaggctgttgtggctcgggtgcacggtgaaaccggtgcccgggtggtttattgcagaagcggagcggtggacggggtgcggcaatgcgtggcgaggccggcggcgcaaacggcgcggcgcggggacggcggcagcggccagctggagggtcgtcggcgagcggcggcacttgggatcacgtgggaagagcgggagagagcgcggggagtgcgggaaagttggggaaaagggagaggatggccgggggagtgattttataggctcgggagggagtggctcgggccgggatgggcggcaacaggcatcgaagtgggaggcgacgtggagctcgtggggaggtcaaactggtgccgtttttttgggggaaagtgggggaggagagtggaggaggtggaggggatgcggtttctcttgattcggatgcggtttctcttgatacggtgtacctcttcgattatcctttgctaactcttcctgggttgacggactattaggccatgcaattgcttttccaaatatactgcaatctgaacgtctattggaaactgcctttgatgttgccgagaatttctgccctttgatcataacaacttcacatttgtatcttcggtaaagatgatccgtcgagaagaggttctctgccatacgccctgctgattacacctttcgggacttgattcttgtatgctgctgacccatgtatggaacaatttctaccaacttccgagaaacatcatgatgatttctagaatttatattagttgccttgaactaaggaaaaccatccatgattcataatcacaccactaaggtgtaattattgcatagttaatttctcaaaactgaactgaccgactctgcattggaacagacgcagcttgacaaagatttgtaacgccccgattttctttcgggattaaaaatcatttaataatgcattcctagaaattaaataaaatttaaatcaatttaatcaagtgaaataatgggagaattaaaatttcctttaaaaatcattggccgagaatattttgtaatattctttgtgccctaaatattctctgaaattttcccgtgaattttcggagctcaagaagtaattattataatacaaagttcatttaatcaatttaaataaaaagaaaagaaaataatcttccccttcctccctttcaggctcggcccaaattccttcccccttcccctccggcccggccgcccataaccgtctttgggccgctcggcctgctcgctcccctccccctccaagtccacttcgcctccctcccagccttccctctccctccggctgacaggtgggacccatgggctccgtctgtcatctcctacgtccagccaccccacagcaacttccatggccgctgaaaccatcccactccgccgcaaaatccgccatctcccgtcccccgtgctcgcgtctaaccccacttgcttccccacgtcggcatcccactccgccgccggttgccgcctctcccaggccgccccgttgccccgagccctataaaaaccatccccgtgccatcctctctcgtttcccctcctcacccaagctcgtcgcgctttctcccgcactctccacgccgcccccatctccgcggctctccggcgagctccagccgccgccctcgccgccgccacaccgcgccgaggccacctccggcttcgccacctcacgacgcacatcggtcgtcgctcattttccctaaacaatcactgttacaccgcttcccccgcaaggtcgagccatcgccgcctgtaccacctccagcagccgctcctcgccgctttaggcaccgccgagccgtgccgccgcaaccgccagcatctcccagccgagctccaccccggcccttactctttttcccctatccgcctacgaaacgccgccgccacgctcaccacctctcttcgtcgccattgccgactccaacggcgtcgcgccgcctctccggtcgacgccgacttgcgctgccacctccttcggcttcgcagggacgagggcaagcccggccaccactcttccgaaacccgccctcttcgctctaggtgagctcctcctcatgtgatcgtcgtcagccgccgttctcggtcaccctgcaccaattctccccttcctaaccctcctaccatctctcccaggccgcgctacactgtcacgcccagaaattcactagtaatttcagaacttatttgtgcataaaatcctcgtccaggaatcagccgaggtacacaaactgacaatttaatatacagattcatcaaaaaaaactaaagcaaataatacttactgaagaggcaattagtcctcacatcgaagaaaactacagcggaaaaaaaaatctagcgaagctcaggctccactcccacaggcaactcaactggggtataagccaaacgtcttctccttctggatcatttttcttcaactgaggtttgattgataattacaaggtgagcatatgacatactctgtaagccacacatcaactatgcaagtgcacaaggataccaaagtatggcataatataggctcgtttgcaaaagcagcatttagcaaacatttaagagtagtaaaacagtagagtaattaattatcaattttaatcaacactgcatagcaccccaatgctgcacaggcccaaccatcctgtacaaccatacccggctgtacagatctaactccaaacttggagctaagcaaattattaccagttatagcacccataattattgtgagaggtgtgagactaatcacgaaaaacattgctcaactcgcccatgaccgtgggcacggctattcgaatagttttactctggccagaggtgtaccactgtacccacaagacacagctccacgacatgttaccatgcgcctcaataccaccacagtacatcggaaaggaaatgtgacagtacccctcgcacaacacaactcaccacagttcaccaatcctggatcataatcacccctaaaaaaaaccagaggcatggactccccagcgaccccatggacttctcgccgcttctcagtctggtgccccgcaatgaaccacgctatacgaaaggtaaagccgctacccacgctgggttgaggttggcacggttaatgtctcacaacagtagctcgcgaaccggtccttaattgtcatgagcacgaccttcaaaaccatgtgctcacaacccaccattgtcaagttttaattatcaattaattatcataacacgattaaccatcgtgagctaccattaaatataaccataaataataatgtagtttgattcatcccattagtgagctaatgtttctaagcatggctaagcaattatgtatatagcaattagctgaaccaatccaatatataaggtccaagctaatcaatttattacccatatgaaaataaagtcatcttcggccataattaattgagaaaggctcaccacccgatgacattcgaaaataatgcataagttgaaataaaacaatagctttaagtaggttcaacatgctcaaagggttgtttgggatctgtgtgacttgccttgcaataatcggtcttcaattaatcttcttgaacacttccgacgcactcacgaaccttcgcaatgacggaaacgataagctaacacgtaaaacgaagaaaaagactaataaaaaaacaaataaacagtgcataaaaagtagacaaacatgtagatcatgattttagatgaatttagagacttgaaccacttaattccgacttcatatgaattagttatgaattttacaagattaattccaattaaacctattaaagaaaagactattccaaattaattaaacaatttacatataatttataactgagacataagcctaaaccatcctccggaaattattggaatgaatttagtagacgacatatagtaaaaagaactaatatgccattgaaaagggataacaggatttatattgattttggacggctgagatcaactttgacctagtcgaccaaaattggatggctcggattgatctgatctaaggttttagatggctgtcacgtgggatctgagagacggcgtgacacttagatggtagggacggcagctaacaaggcgatgacatggcaaccatgcgggatcgacgccggcggctctattcggtggtgaggacggcaaacggcggcacaacggcggaaaccgagagcacggggatgaagaggaggacacgacgatccttactaacacttacgcagcgatgaacagcaaaggagatggccggcgacgagaacgggagtgacgacggggtactgatcgatgatggcggcggagtttcagcgacaggagacgacaaccgaggggtgaacgggcttctcctcggtgctgcgaatccaatggaggcggcggcgaccgaaggcgacgacgaacggtgcgagtggagatcaaaccatggcaacaacccacgggttcacggtgacggcaaccttccggcgggatttggcgcaaaagaactggcggccgtggtagagatcaaccttgcggagcagagggaagtggcggcactgatcgggaacggccggcgcgacgggaaaaggcggctggagatggcggccggagttggagagagaaggcgagcgtggggaggcggctagggttagggaaaacttcgggaaacagagggaaaccgaagaggaggccgaggggctgctatttgtaggcaaaggtggaggagatcggctcgagaacggatgaattcggtgaaggaagttaagatttatcccgagttcacccggataaaaacgactgaaattcgtgagatagataacgaattttaagggagttcttggagataagatagaggagatagagaggaatccgtttttgcaatcaattttggaagggaagcaacggatgcatcgaatttgatggaggacacggcggctctcgggaagaacacggcctctggacggctggctggagcttgaagacgcactgtagcaggagggagggcaatacagactttcagctgggcttcattttccaaggcctgattgaaggagggacaagaaatggacttcggaaaagagagggagagggctgcaggctgagaggagactgggccgagagtgagaggacttttcctaattcggcccgaaaaggaaaaggggaatttaattacttttccaattaaattaatcaccaaaatgatctttgaattgttaaaaatacttccaatgctcaaataatttcaagaaaaatcctgaaactaattggacactcaaagtacttaacaacgttataatcagaccatttaatgattaatttattatttaaataattgctgaactgctctttgtattattaaaattaagaattgagctccgaaaaatccgagaaaatttcagagagtataattaaccatggagaatttaatgaaaactaaatccagccatgctttatatttaggaaattttatttcctacatttagcttcacttgaaaattaatgaacatttaatataaattctaaaaataatttattaaataatttatgaaacctaaagcgaaaatcaggatgtgacatgcacctcggctgcttctctgccttcgccggaaaccgtcgggccgccatccgtgccgcctccccgaggagcgccgtcgctaatcctcgtcgccgactgccttcccgtcctcgcctcatcgtcccgtccgctcggtgagcatccctccctctccctctatctccactttgccggccatcgccgtcagcgaccatccggccgcgcgccgccgcctctcggccggctggcgccgctccgccgcccgtggaccccctgtggtccgggtccacggcgtctcctgggccgcggtggacttggtccaccgtgtgccaacccttgtagccactgacgtctggggcccacatgtcggcgccggcctccccttcgatgacgtgagcgactaccttttccctttgaaaaataaatagtaattgcgtcataattcgataataattctagaaatccatttaaatggctcaaaacttctaaaatttatatctaattcattcgaactccaaattgggccattcaacttgcaaaattcatctaaaattaagatctacatgtttgtttactttttatgtactgttttcttggtttttattagagtttttccttgttttgcgtgccaacgtgtagaatccgtcgttttggaagtccacggtcgcgaggaaaagagttcggaagattgttttgaagaagcaaggtaagtcacacattccccttgagcatgttgatcccaatttataaatgttttaccgtttacaaataaacatgcatgtcttgctaattacatgggatccgggtactacctatctgcttgcttgtgctatgtttacttgatatctgtcttttgtcaaccttgggtaataaatcgactagctcatgttacttatgtgacctagctagaactatatgcttagccatgcttaattaccactagctcagttgatgggataattacagtattagacctttatagtatcagaatgagctgcgtgcttgagacatctggccatgctttatggtcgtaattatccaactaaaatgcgactgaatggtgggctgcgggtgcatggttttgctagttgcacccatggaaattaaggaccagttcgcgggaaaccctggaagaatttatcatgcttaccacaagccagcgtgggcaacggctgggcttgtagtgtagctttcgtctagccaatgtacccaggcgagggtgggcgtgatggagttgggtcggccggggtgtctggctgatcggcttccggattcactaaggcacgagaggggggcttcccgttgcctgctggggacgggggcgaaccttgaggtgtggtgcgatcggttagagggggttatgcgaatggtcctgtcacggcctctttccagtatgtcgtggtggcatgtcggcgcatggaaacgtgtcatggggctgtgtcttgtgggtacagttgtacacctctggccagagtaaaactattcgaatagccgtgccggcggttgtgggcggtcgaccagatccaccgtgattagtcccaccttaataaatcgacccaatgcactgtagttcaggtgggttggttgggcctgttcaacgtggtgtagcgttgatcagtggagatttaatattaccttaattactcaacagttttactgttttgctcaataaaatgttttacaaccgcctttatgcaaatagccacaaatcgtccttgtgttccccttgaacgtctgcatcgttggtgtggcttgctgagtatggtggttgtactcagccttgctattatgccccctttttcagaagtgtagtgcttctaagctgaagacgaagttagaagaccaaggctcagacctcagttgagttttgcctgtggagtggaactgaagctccactaggatcgcctttttccgctgctgctgctttcgttttggtgtgaggactaagtgcctcttctgtaactatttacgcttttatttacgtttggaactgtatattacttttcgttttgtgtaccctggctggtcttagacagggatttaatacacaaaatagtctggaaatttgggctaaatttatgggaatgacaagaaagccatgcaaagactagccaaacgccgagaacgcaaagagaatgaatctaccatctaggccaatcggcaactcgtgcatgaagaaaagtccaagcttgatcagctatgtgaggggccaatcaagtctaatattgatcggctcgaagctcgcaagattgaactcttggcacaatttcaagaatgcaacgccaagctggatctggaacacaaaaagttagccgatctcccacaagctgtcgaagaacagaaggcaaggctgtaatcagccatcaaaaatgttgctgatatgaccaagtccctaaaaatcatctctgggaccgatgctcaagatgcccaagccatagaagaagtagaacaaattagccaaagagctatatcggctatccagcgctacttgtctcagtgacatgttgtgtaatagactctatgaatttttgtaatcggctaagaaactctggatctttgtttaactagtcttaatgtgccgattaatataactccatgtttttgctcaaaaattttacaatttttgcacatatatgccccctaattttacaatgacgaagacattgctaaaattataagttgaactaagggcgatatcataatatcggccattgtacatcggtaaaccataaccgattacaatatgaaaaacatctaagggcgatagaacaatattggccatctcaaggcaatgtgaacacatcggctatcatgcatcggcaacaccagccgatcatgcattgacccaaacacttgggtaatatttcttcaagtatttgccatttagcgatcgtccataaacttctccatcgagttcttgcaacacataagctcccttagacaaaacctgatagattttaaatggtccttcccaattcagcgaccacttgccaaatttgttatctcgagtcccaatcgacaaaatcaatttccatacaagttctccttccgaaaaagacttgggcacaactttcttgttgtaatgtcgagcaactcgttccttatcctaggtaacttttgcaagggctcttaatcttgattaaaccaagtcttccctttcatcgtccatgagattataatactcatcggctatcaaatcattttgcaactccgttcttcttgagccaattctaacttcccatggtaaaacaacctcatgtccataaacaagcttataaggagggacttggatcgatctatgaaaagccatccgataagaccataacgcttcggccaatcgagtatgccattgccgaggataatcggaaatatttcgcttaatcaatttgatcaaactcttgttagatgcctcggtttgcccattagcctatgcaaaatatgttgaagaattcaacaatttgatacccatactatcggcaaactgaacaaactcatcggacacgaagattgaactttgatcggttgtaatagtttgaggaatacctaatcgatagattatatgctcttgaacaaattgtatagcatccccagaatcagctttcttcaaaggaatcgcttctagccactttgtaaaataatcggttgccaccaatataatcttatgccctttgctcgatggtggattaatcataccgatcatatcaattcctcaacctctaaatggccatagtttaatgataggattcatagccgacgccggtgccctttgaattgctccaaatttttgacaatcttgacatcccttgtaatatttgaaactgtcgcgtcccaaaacgactctaaaatacatcctcaaaattgtgcatagaataagtaaaatccatgtgaaagcctccaacaattaaaatgtgcaaagttaaaagtcgaataaggcttggaggatttttgtatatttcctaaaagcctaaaatgcgtaaataaattttagtggaattttcagagcacaaataataattaagaagaaataaacaaagttaaaaaggttttataaaaagaaaaaccctaaaaagtcttttttccccccctccccttcttgggccggctcggcccagctccctccctctctctcctctcccccgcggcccatccggccttcccccgcgcgcgcgccgctgacgggcgggcccgcccgccaccctcgctgacgggtggggcccacccgtcatcccctacctcgcgccgcacccgccgcctcgcccgtgccctagcgccgccgccgccgcggattccgccgcatcccgccgcccccgcgcgcaataaagagggggaaatcactccccgtgattccctctccctttccccccacttttccctctctctctccctcggattcgtttggaaactctcccgcaaacttcgccggcgcatcaatggcggccggatcttccgcggccgattccccctcatccggccgttctctccccctcccaacactatataaacgctccccgtgccttcctccaccgtttccgccactcgccgctctctctccccgtcggaatcgagctcgcgccgtcgttccctctctccgccgtcgccgccgagctccggtccgccgccgtcgtcgcctcggactttctcccgcctcggcgtcgcctccttcggctccgccgcgaccttgccgacctcttccacccctccgtttcgcccgccgaccgccggaacgccgccgtccccgtcgacccgagccgcgccgccgcctctctccgcttcggtcgccgtttccgttgtcgccgtcgacccggggtgagccgtggaccgccgtttcgcttcccccttccctcccctctctcgggcgccgctccgccgcgccggtggtcgccggcggcgaccatcggggcgcgggcgcgtcgcctcccgtcggctgtgccggcgaggcagccttcgggcgcgccccgtggctgccatgtggggcccggccgtcagccgcccgctcccgcgggtacggctgacgcgtgggacccacggcgccggccggcgtaagccgcgtgcacgcggtccaccgtggaccgtgaggctgccgcgtgggccccactcccgtggacccggtccgcgcgcccctcccctcggctgacgcaataaatccgattttaaatcaaaatttaaatgaagaaattcgtaaatatccatttaaagagcatataagcttcaaatggccataacttggccatttgaactcggaattggaccgttcaagtctctaatttttccttaagaagccaagaacccatttttgtgctttgtttctgcttgttatatggagtttagtagagtaaaagccgtttcttttccgttggtcgtgtagacgctgcagcttcggaagatccgctcttcgtggaagttgaagccggcgtttgggaaagcgagcaaggcaagtcacatcatctttgaacatattgaatcccagtttgtaaaattatgttgatttaacttattgcattatcgctttatttaaattcccgcgttatcactgttttatttagccatgcctatttacctttgttatgaccttattatttgttattgttattatttccttgttcaccctagaataaacaaaaccccaactagtggacactctactcatggtatcactagtatgattttaggtagatgcttcgcttttaattaggtaaccttaggcgattttacaactctagactttgggaatattcatatcacctggacactatggaatggtttggttattgtggaattggcttcacaccgctccttctattcaaaatccccaaaatggttttaggctgggctcggggtgcatggttttgatagtagcacctcggccatataaggaccggtcttcgggcctctgttgcaaagcactaccgtacttccacatgtcta

SEQ ID NO: 19811 - DNA, 510 bp, Oryza sativa
tattgtacttttcctcttactcgacttaaccagtaccaacccagcttctcaacggatttataccatggcactttaaagccagcatcactgacaatgagcggtgtggtgttactcggtagaatgctcgcaaggtcggctagaaattggtcatgagctttctttgaacattgctctgaaagcgggaacgctttctcataaagagtaacagaacgaccgtgtagtgcgactgaagctcgcaataccataagccgtttttgctcacggatatcagaccagtcaacaagtacaatgggcatcgtattgcccgaacagataaagctagcatgccaacggtatacagcgagtcgctctttgtggaggtgacgattacctaacaatcggtcgattcgtttgatgttatgttttgttctcgctttggttggcaggttacggccaagttcggtaagagtgagagttttacagtcaagtaaggcgtggcaagccaacgttaagctgttgagtcgttttaag

SEQ ID NO: 19812 - DNA, 8294 bp, Oryza sativa
catctcatgattcccactatagaaataactatgaaactgtttatctaaatcggcccagctataaacagaattataaggcagtgaagaaaaccattgaaatgtcgatccagactaggtcaaaggaaacaatctgacccataaagcatcaacagccgatgcctcaccacattgagccaaaaatcggctgacatgctcataagttgatacattgtcctgccctgagaattttgaaaagtctaggactttgtatcggtttggcaatggaaccctctcaaaccactcaggttaggggtgccgatacaaatttccagtatccttcggttttagcccaaactgctccttcatcacatatgcaatcatgtcagcccagggcttttggtgagacgctccttgcatctgctgttgaattggatcgaactagttgaactgaggcagaagctgaggttgaggtgatccccctagttggtaccgaacctgaggtgaatgaggccgatactgaaaattcaaattaccaccaagatagttctgaggcggttgttgcacattatgcatttgttgttcagggataaattgagctccaacaggttgaggtggcttgaacattgctgcaatctgttcctgagtcaaccgattgatgttctgcctagcgtgttgaggttgttctctggtcagcaaataaggattaaccggtggcctttgtgccgatgaagatacacctggtctagaagccgaagccgacgccatcggctgccctggaggtacattggtagcaggctgttggttgccggtcactaaattcctgtactgcggaaacacgccttctggcagaaagactggtcccttagcctgatgctcagcaattgtgccatcaaccacaaacttgatcatatttttcaaagtattgacaagcactcctgattggttgattagagcttgatgaacagtgtactcgacttggtcctagaagttattgaactccaagggctcttctcccccagtttcatcatccttaggttcatcatctttgtcacctttatcaccttgccatccttggatgtacttgattctggatcatcggcagaaaccacctttaccttgtacctctggataactgtgcctgaatgcatctgcttgaatgagtgcaagtactgagtcttcaaattgttaatcatctgctcatactctgccacttgttctggcgtcagcttatctagtgttattgggatgatgttctcagggatgacttctgccgtcggcggtggtttagaggacgggggtttagaagtttgcttgctatccaccatgttgaagaattgttacaactcggtcctaccgggcgtgccaaaagcgtgttgatgcgaaaaacacacactggcctggaagatctgcttaactcctgtgcaggtccaaaatcttgtttttaggttcaaaggtgtgccaattgatttgatcctacaatcaacaagaagaaaagacaagaaaaaggaggttaaatctataaacgatagccgatcggctaggagccgatgacatatgatcaatcattgagccgatgttattggcattagaccagcaatgaagaataaagcaatataaaactaaatctactcgattggctgtagatatcaacaatatttaatccttctctcaatgtatatttaaattttgtgattgggatagattgaacagtatgtcgagacagtataaatcacttaagtgaaaagatacattcagataatgattatacgaacgtttatagcatagccgatcagatagatctagcatgtatcggctaatactccgataccactctatattaagatattagaacagacaagatatattaaacagaaagcctaatatactttaactcaataagatcttaatataaagggcatatttagcataacaatcaagcatatgagacaaaagtagctactctctaagagatggtagatatgtgctaacgaccaaatttggtaatccaaggatcggatgtgaaggaggattcaagacggagttcgagatagagactgtcccggaaacagagtgaggatcggctggagtccgaatcggctacgactaagatcggcagagtttgagtcggacagggttagccgattgagacgaatccgacaatatgacacggcatatgttgtcgggttaggatgacgtgcttcatgatgattgccacacatggatagagtcgtaagaaggcaattgtatctattaagtaggatattttatgtaatttccatagagatttgtttgggcaaaagtctgccgcaaagacttatggtatcttagagtttgttagagacaagaaacatgtccgatatggacatattttgtaatttttgggtataaatagacctgagccccatgtaatcaaactaacactcgttcaatacaatctcggcgcattgctaccctttttacttccgttttgtttcgacgggttcttgctttcaggttgagctgcatcggtttcgatcttcaactagaggtaaaacttattacggcggcttgcgttctcgggattagtgattccatctttatgatactctaatcttgtttctgtaattcgtcgagttatcatatatcttatataatctctggcaatatcgctatctaacctctaatcggctaacgtctgttactagaaggcagccgattaggttaaatatcaacgctgacttagattgtataggacatctaccactctatgaaacatccaacggcttgattgtctagatattgtccttcttgtcatacttatagctgtatcagttgagtttgatcttatgagtcatgattagaatctcaatctctagcctgcctttggtcgctgattagggtaacgtcggggtttcagccgatcttacctgatttaactacctttttctcatatgcttaattgacatgttaaatctgccctttatattaagatcttgttgcatttaagtatattaggcttttgtttggtgtattctacttgccttaatatcttgatatagagtggtatcgagtattagccgattgtaataccctgaaattaaaaataaaataacatgtttggaattgggccgaatcaatttgggccaagtcgcagcagtccagcccacctcccccacctaataccctagggagaggcgactcccaccttcccagccgacgccgccacacctccccctcggcacctatggaacttacatattcctttctcccctgttagccctactccatggatctccaagaaccatagccctaatcaagaatctgattggaaaaacggatcgaggaagaggagaggagcaggaagagtggtgagttggttttcccatcatattctctcaagttctccaaaccctaggtgaggcttaactctcctgtgcagaggttgtaggttattttagggttgtaattcggcgttattcgaaggttagaggatgggattaggtgttgtgttttggattagtgtttctaggccctgtcagctttgttgtgtctctgtatttcgctaattagaggatcaaaatgattttgctgcgaaagtttataactaggaagttgtagagtttttccttagctttccatattggtaaagtacactttgattggcgagtagaactccagatatggctgttttaagtgtggcagtctgaattcttgggcagattctgaagcttgtcttgatttgagctttaggccatctaaatggcagaataaaaatatgggttctacacgaaagttgtaggtctcattctgtagatttccaaaatgtatttatttgcagtcatacaatttttatatttcgagatataaaggtttgaagcaacagtattgtttatagtccaagcggcgtttcttgtttttgcgttttgaggtcttgaggccgtagatgcatgttatttactgttatatattcatatttgagagtgtttgctgaggctttgattgtgattaggtggtggtccttcagatcgtgtatgataccaacccttcattggaggcaagtgaatgtagctgtggtttgctacggttttatcatgttattttttccaacctccaccttgacactttaatacctacaatcactataattccatatgtgcaaatgattattttatgtatcttgctctgagctatctccgctcggctaactatggttaatgtggtatgcttttagtgagagtaattattatatgtgatatcattggaaggatttgtggatgtgttatctttcctctattattgtattgcattgcatttcatatgcatttcatttgaagttatgtcgtgaacctatggtcgcgaccgtaccgatacagcatcgtgtattgtcgtaacacgatgcagcttcacaccttgttgggtgtgaaggcaggaatatcattgcatttgcatcgcattgcactttggtattttggggtatggaagttatatactctattgagttcatgagagggcttctttctcctgaagtctttgcagatgtggtttatcctccttactcttgaacctatgaacactagatgtttgcctttatatttaatgttatgttcctttgttttcttataaatatattttaatgatttggtaggttaaataacttgataaaacaattctcttgctgagatttattctcacacccctacagtgttttcaggtgcttaaagtgatatgctcgcttgggggaaacaggagtagaagcacaactgcattccacactgccaccttaatctttcaagttgtcatgattttgataataaaggaactgtacccttgttaagttgcactagatgaatctgagagttgaaattagtttatttcatccctgaatgttcctttctccttgtttttttgtggatggctacttgcaatgctatacttatatttgacgcttccgcaatgcttatgttttaaaggagttgcagtcgaaatttctccttctttgttaaatgtatgtctatttagtagcatcccggtgtcattgtagtttctggggtgttacaccgatacatgctagatctatctgatcggctatgctatgaacatatatagtctcattgttaacatatacttcgatctaagtgatttatattgtctcggcatggcgaccgatctatcacaatcacttgatttaagtatgtatcgacataaggattatatattgttaatatctacagccgatcgagtagatttagttctttcttacttattcatgattgccgatcgatccacatatgacatcagcttcaagataaataatacgtcatcggcatttagtttatggatttaaccgcggtttctttatctttgtttcttgttgattgcaggatcaaatcaactggcacgctcatacacctaaaggcaagcttctggacctgcactggagttaagcagatctcccaggccttgtgtttttacatcaacacgcttttggcacgcccggtgggaccgattagaagttagaatcacaacagcgttctctcatggctgagaaactaccagcatcgccgtcctcagctagcaaagagggtcctcccaaatctaggatccctaagcttggtgggtctgaagttaatgagagcaatatcgtgcccatcactttggacaagttgacacccgaacagaagaaggatcttgaggtaatgatgcagcagacacagaggtaatgatgaaattctttaacccatttatggagactcgccaaggaacaatcgttcagaggtacaagatgaaactagttgctgatgttgctgggacaagttcttccaaggatggagaaatacaacaggtctcagatagtacgactcaatcaggtgataaaggtgctgcagatggttctcaaggagttcaaggtgatggttctcaaagagctcaaggtgatggttcttagggatttcaaggtgagtgaaagggtcaattaggcctagaggggggtgaatagactaatttaaaactttatgcggaagctaaaactgagttagggtcggaaagtctgattcacagtcagactatccgaaaatatcagatagtctgatgttggatcagattgtctgatccactaaaagaacactacaagtagatcaagtgcacaaacaagagtatggcgcaaacagcgactagatttatagcggcacaaaaaacaaagctaaataatgggagaagagatatcaccaaaaatgaagttcactgagttgttcccggagttcaaatccttgaggggatctactctccgttgaggagctcactaagagccgggtctttgctaacccttttctcaagaggttgcactaagcactcctccttccactaaggggtatctctttccttgtggaggcgagatccggccttcacaaacttctcccggccaaccacatgtagatcggtggctcgggagtgacacctagccgtctaggagtcctcaacctccaagcgtaacaaacaccacacaactcttggtcaaccctagtgctcaagatcgagtgaaacacacactaggccctcaaaccccaaatccacaaccaccaagatccaccacacaaagaacaagaggggatttgagagagggagagagagctcaaagatccaaagcaccttagcaccaagctcaacccaaagtgaatgtgaatgaatgagttgggtaaccctagaaaagggttaggtggggggtattcatagaagcccccaaaatgtggccgttgggagagaatcttttcatcccacctcggaaagtccgaggtgacatcggatagtccgatgtttttgacccccaagcaggccagagacagagaacgaaattctggagaatttcggacaatccgatcgatcggatagtccgatgtcatatcggatattccgttatttttgaaccaaaaatttcaaaaggaataaaaagcaattcaaaacagagagtgaagttctgagaaatttcagatagtctgacgtatcggatagtccgaccttatatcggatagtccgatatattttagccaacactcagacccaagacagtgagcaaagttctgtgaaatttcggatagtctgatcaacatcggatagtccgacagacataaaacaggaacacttcaaataaatgattttgagtactagtggttttcccattaaaaggaagtggcaattctttttattgtaaggcatcctaatactcaagaacacaagatatacatggattagaagacaattaccacaaaagatgctgcaatacttattgtgttgacatccactcctttttctccttgcatacatctcaacaaaaagcattagttaccctctaattatgttgtcattaacaccaaaataaatgtggggtcctagatgcactttcaatctccccctttttggtgattgatgacaacacacttagaagtaataaaagattaggattttggtggagctccccctaaagatatgctagaaatgaaataggagagctccccctcaatctatgcactagattagaaatgacaatataacctcatgcatatgccaatgacaagatatttcacacatttgagcatggataatagataattgcacataacaagacacaaaagcccaaggttcgactagccatcaagaaaggagatagattagagatttttgttgataggtggttctccccctttggcatcaaggcaccaaaagggaaaaagaggatcactcatcctcattagaatcctcgccctcctcacttgactccttagcatagtcaccttcctcctcctcttcttcttcctccataggagccttgccacgatccgcacgagaggagcttgcctcagctgcaaacgggtcctcaatcacatcctccccactgtcctcaacctcagaaccatcgggggaacacggcaaatgggcgttgcgaaggaggttcttgatccgtcgagtgtccttcttccttgctctgcgttccttggcttgccaagctaagatggtcttgcataagttgaagatggacttgaagaacctcaaggacgagttggaatccggcttggtgacggtagcggagggaccggcacgagaagaagcacgagtggtttgtccagccggcacagcagcagccttgatgggacggacatggtaaccggtatgtgccacctccttgtgaaacttcttcttggacataatctcaatcatcttcataatgtaaggcccatagccaagtcctcgcttagggcttaggcatcatggagataagccggatttcttcaaagatgaagtcaaaggcgtcaaagagctgtgggtgagccttcatcttgtaaagc

SEQ ID NO: 19813 - DNA, 30881 bp, Oryza sativa
ccttctccactaactcggctgcggcgaggaggaagaggagcaccacgctccacattagccacttgagctgcttggtcagaggcttgagcttgcgcgtcaatggtatctttgcgggattcagacatacgccgtatagcatgacgagccttggaagagggagagcgacctcgagaactcattgacccacggcgagagtaaacttgattcttgaactgatccttgatcatgaggatacactgatttagaacagaggataatgattaagaagaagtggaagaagaatatttaaatgtgaagcaaggagaaatttggactgggccaaaaggaggtcggatagtctgatttgacgtcggactatctgatgtacattggactatccggcggcatattagacaatccgacggccttttgccctagaccaacaaatctcgattcacacaaaaatatccaatggaatcaaaggatcttctaggtactagatctaggcactaaaacaagaagattcaccgaaggaaatcttgaaataatataccatgagggagatagaggaaaaacaaggaaatacctcaagaaccaccaagagaatcactggggaacaagtgatttggaaggagttgagggagggaaaccaccctaaagagaaggaatagcaatcagagactctgaaacgaagatttttggtggcctagaactagggttttgagaggagaagaggggtggagagagaaacgactgagacaaatgactgaaggggtaaaaaaaaagagttacccccggggaggttaagtccccttgcccttggccccacgtcggatagtccgatttgaaatcggactgtccgattgtggccggatagtctgacttgatgtcagacagtccgacatcctttgtggcagagacaataaaggatggctcaaggaagattttttttttcaacaacatttttataggatgaactcggctagactattacttggacaaatgcagcaaaagaaagaaaactaggcaccctcaagagagggaatgtacgaatctataggaaattgtgcaaggaccaagattcattagagaatgagatccccgtacacatagattcaagttatcctcatagattatgactagtgtttattcatgaattgaatgttcactttgtcatgatgtggcaagcaaacctattctagtaaatgaaaaacaaatgcatgcaaaagatcaagccacattccgagaatccaagatatttagctcacttctcaactcacaaaacctagcttcatctagaggcttggtgaagatatccaccaattgtttgtcggttcttacatgttggatgtctatgtcgcctcttgtggaatggtctcttaagaaatggtggcgaatatctatatgcttggttcgggaatgttggacggggttattggctaacttaatggcgctctcattgtcacataggagtgggattttggacacatttaggccatagtctctcaaggtttgcttcatccaaagaagttgagcacaacaactccccgccgaaacgtattccgcttcggcggtggatagggcgacggagttttgcttcttggaagatcaagaaacaagggacctacccaagaattggcaagtacccgatgtgcttttcctatccactttgcacccggcataatccgcatcggcataaccaatgagatcaaacctcgctcccttaggataccaaagactaagattaggtgtgtgcactaaatatctaagaattctcttcacggccacaaggtgacacaccttcggagcggcttgaaatcttgcacacatgcacacactaagcataatatcgggcctagatgcacaaaggtaaaggagtgagccaatgatggaacggtataccttttggtcgacgtctttaccttgctcgttgaggtcgaggtggccatttgatggcatgggagtgtgaattggcttcgcattctccattccaaacttcttgagcatgtccttcaaatactttgtttggcaaatgaaagttccttccttgagttgcttgatttgaaggccgaggaagaacttcaattcacccatcatggacatctcaaaacgtttggtcatcatcctactaaactcttcactaaaagacttgttagtagaaccaaatataatgtcatcgacatatatttggcacacaaaaatatcattatcatgtcttttagtaaaaagagttgaatcggctttcccgatttcaaagccgttcttcacaagaaaattgcgaagacactcataccaagctctaggggcttgcttaagcacgtagagtgccttgtggagtttgtacacgtggttgggatacttcggatcctcgaagccaggtggttgctccacgtataccaactcgttgataggcccgttgaggaaggcgcttttgacatccatttgatatagcttaaaattgaggttagtagcaaaagcaagcaatatgcgaatcgactcaagtctagctaccggcgcaaaagtttcaccgaaatctaatccttcgatttgggtgaacccttgcgccactaacctcgccttgttccttattatgaccccggcctcgtcttgcttgttgcggaagatccactttgtgccaatcacattttgccgaggtcgctccaccaaagtccacacttcattacgggtgaaattgttcaactcctcttgcattgccatcacccaatccggatcatttagagcttcttccacccttagaggttcaagagaagacacaaacgagtaatgctcacaaaaatttgcaatacgagaacgagtggatactcccttgttgatgtctcctaagatgttgtcggtgggatgatctctttggatactttggtggattcttgggcgagctaagttgatcggtgagggtggcacttgctcgccttcttcaccttgatccatgcttgaggtagagggaacgtcggcttgggttgatgtaggtggctccacttgtgttgaggaagaggcttggctccctaggacgcacgttcccaagagccaatcttttgattgcttcgcttggatcctcctcttcacctaacacatgtgagtcaacttgctctacttgagagccattagtttcgtcaaatgtcacatcacgcgcgatttcaacaataccggaggttttgttgaaaacacggtatgcgcattcatttgacccatacccaagcaagaatccctcatccactttgggagcgaacttagaggatctagccttcttattaagaatgtaacacttactaccgataacacgaaagtaagagacatttggtttattaccggtaagaagctcatagggagtcttcttaagaaggcggtgaagataaaggcggttgatggcgtggcatgcggtgttggcggcttcggcccaaaaacggtccgatgtcttgtactcatccaacatggtcctcgccatctcaatgagagtcctattcttcctctcagccactccattttgttgaggtgaatatggagccgagaactcatgcttgatgccttcttcatcaaggaaactctcgatgcacgtgttcttgaactccttgccattgtcgcttcgaatgttcttgatcttgaggtcgaactcgttttgtgctcttcttgcaaacttcttgaagatagcttgtgtctcactcttgtcatgcaaaaagaacacccacgtgaagcgtaaaaagtcatcaacaataacaagaccatatttgttacctccaatgcttagataagcaattggtccgaagaggtccatgtggagaagctccaatggtcttgtagtggtcatcacattcttgacggggtgatgtgctccaatttgtttgccggcttgacatgcgctatacaccctatctttctcaaattgaacatttgttagtccaaggatgtgattgtgctttagaagcttgtgaagattcctcataccaacatgggctagcctccgatgccaaagccaccccgtgttggacttagccactaagcatgtctcatgtttggctttacttgaggaaaattcacaaggtaaagctttcccttgagaacacacttaaagactaccgaggaatcattccttctatagacggtcacatcaacatcggtaaaaagacaattgtaacccatagaacataattgagaaacggacaaaagattgtagtttagagattttaccaagagaacgttggcaatagaaagatcattagagattgcaatcttacccaatcccataacgtttccctttccatcgtccccgaagactatgttatcttgtgaagtgccatttggatcaagagatgaaaacattgattcttctccggtcatgtgattggtgcatccactatcaatcacccaacttcttccaccagtgacatattcctacaagggatcaatttctagttttaggtacccatacttgcttgggtcctctcatgttagtaacaagtgccttaggcacccaaagaactctcttgatagaaatattcttgccccttgggcctacatacttagcaacaacacgaccactagcattcttcctaagaacataagatgcatcaaaagaacaatgtgaagcacaatcattaggaaggatacttttggccctaacaaagttgctaagaccttggggcctcttgatcatcacactcttgtccacctttccttttggtggaggaacatacccaagaccctcatggttgaagttgtccctttgatagcctaggtactcttttagggccttactacccatatggcacttaagtaggccattgtgaaggagtcccataagcttctcattttgcttttgcaaagcactcaaggaaatagagttagtagcacaagcttcaatatcaatatctttgcatcttgcacaaggttcattgcttggggcaattttggagcatgatgccttgctagggagagagacactattctttaaggtttcaaacttctcttcaagagagaggtaagctttatccaagccatccactctctcttgaagttgagcgtttgccacctcaagattagcatgagactctttggtttgcttgtaaagccgtaccaaagcctcatttttctctctccttagcaagttcgcacttgagttcatgagatcgctctttctcatgaatgagcaattcctcttgcctctcaagtgttgcatattgatcctcaattctcccaagcaactcactcaagtgtggtatggattctgtcacgcccggaaattcactagtaatttccgaacttatttgtgcataaaatcctcgtccaggaatcagccgaggtacacaaactgacaatttaatatacaaatccatcataataataacgttacacacttacaaaagaaaagaaaacagcagcggaattaacggtctagcgatggcttcagctccactcccacaggcagctcaactggggtataagccaaacgtcttctccttctggatcctttatcttcaactgaggttgattgattattgcaagaatgagcatatgacatactcaacaagccacacagcaaatatgcaagtgcacaaggataccaaaggatggcataatataggctcatttgcgaaagcagcatttagcaaagagttaagagtagtaaaacagtagagtaattaattaaaaattttaatcaacactgaacagcacacccatgctgtacaggcccaaccatcctgaacaaccatacccggctgtacagatctaactccaaaccaggagctaagcaaattattatcaggtattaacatccataattattgtgagaggtgtgagactaatcacgaaaaacattgctcaactcgcccataaccgcgggcacggctattcgaatagttttactctggccagaggtgtaccactgtacccacaagacacgattccacacatgttgccatgccccgaaataccaccacggcattgcaaagggggaaatcgtgacaatacccttcgcacaacacaactcaaaacagtgcaccgttcctggatcataatcacccccttataaacaaggcatggactccccagcgacccccatggacttctcgccacttctcagtctggcgcactataatgaatcatgctatacaaaagataaagccgttgcccatgctggcttgtggttggtacggttaatgtttcacaacagtagctcgcgaaccggtccttaattgtcaggagcacgactctcaaaaccatgtgctcacaacccaccattatgaagttttagttggcaagtaattaattaaccaatcacgattaaccatcgtgaactatcattaagccatccttaaataatagtgagtcataagttatcccaatagtgtgctaatgtttctaagcatggctaagcaatcataactaatatctagctgaaccaatatataaagcccaactagtcaagttataataacccaaggtatcaaggaataaagtaatcaatgcaaattggccataacaaaggaataagttcacaccacccggtgacattcgaaaataaatgcacagttgaaataaatagagaatttaaatataggatcaatatgctcaaaggattgtgtttaggatctgtgtgacttgccttgcaataatcggccttcaagtaatcttcttgatcacttccgacgcactcacgaaccttcgcaacgacggaaacgacaagctaacacgcaaaacgaagaaaaagactaataaaaaccaaataaacagtacatataaagtaaacaaacatgtagatcatgattttagatgaatttagcaacttgaaccactcaaaaccgagttacgatgatttagttatgaatttccgaagatttaatctattagaaaaacgggaaaaagaaaaaccgatgacgtcatgctgacgtcatcaatggcagccgactcggatggcaagctcgccggagatagagcgaccggctgcggatttggaggacatgaacacgtagaggacgacgagacgaacccaacgatactcaccctcgtgccaaacgacgaccgacgacggccggcgacgaggaggcgacggcggcggctcgggttgcacggggcggcggagctccgatgaccggcgacggaaaaggaagggtggccgagcttcccctcaccacggcgcacccaacggtggtgacggcgaccggcgacgacgatggagacggcggcgcggcggcactggagatggccggcggcggctgtttgcttggcggcggtggcgacggagctacggagcacggaagaggacgggagagggggcaaacgaaagaggaggactagggggtcctatttatagccttggattgaagagatcggactcctcccgcaagaaatcgatccgggaaatcaaaaactcggttttggagataaactcaaaaacgagttcgattcggataaaatactcaacggtttgctccgattcttgggggtaaagatagaggaggataagaggaatatttcccctcaacaaaattggagaaaaagagcaacggggaggcgagatttggaaggaagaggcggcggcactgtgcacggcacggctggctcgggctctgcctgagttggaagatgaacagtagcgcagggagggaaaatagacttttccggctaggctgagaggagaggaggcggctcaggttgggccggcggaagagagaggaaggaaaggaaggaatgggctgaaaatggcccaagctgaggaggaggattttattactttcccaattaaaataatcacttaaatgatctttaaattattaaaaatacttccaatgctcaaataatttcaagaaaaatcctgaaaatacttggacactcaaagtacttaaaaaaattacaattagaccatttaatgattaatttaatatgtgggtaattactgaaatgctctttgtatgattaaaaattaggaattgagctccgaaaaatctgagaaaattccagagagtataattaaccatgaagaatttaataaaaattaaatccatccatgctttatatttaggaaattttatttcccacatttaacttcacttgtaaattaatgaacatttaatataaattctgataataatttattaaataatttataaatcctgaaacaaaaatcagggtgtgacagattccttggttatggatttaagcaactcatcatccataacttcatcctcaacctcatcctcctcgtcactaataaaatcaacattaaatgacttgagaggagaaggtaccttaggctcctttgccatgaggcaaatgggagcatcctcatcactttagtagtcgaagagtcttggtggtgatgaaggcttgacggcgaacgtggcgactccttctccatcacttgagcttgactcggagtcggagctgaaaatcatcccaaggtgagcttggccataatgttcccgcttgctatgcttatacttctccttcttctcatccttcttcttatcttccttgatgtgggaaccatccttgaggtgagggcaatccgcaatgaagtgcccgggctctttgcacacgtagcacactcttgcggaatgtcttccacttgacttgctggagtgatgcttggaagaatttcccttgaagaagccgcttcgcctcatgaacttgccgaacttcttgacgaagagaaccatttcttcatcatcgatctcctccttgctcttgctcttgtggctctcttcttcttcttcctttgccttcaatgccaagtcttccttcttgatgcttgtcgttgagctttggttgatgtattggatgacctccttggactcttgcacaagaatgtcatgggcaagaatgcgtccgagcaaatcatgaggtgtgagagtcttatagtccggacgctcacgaatgatggtaaccaaggtagagttccttggagtgattgctcgaaccatcttcttgaccacaacctcatcggtcatgtccttggagccaagtcccttgatctcattgacgatcttgctcaaccggtcatacatgtcacttgggctctcaccatccaacatcacaaatctctcaaattgccccttgaagatctccaccttggactcacgaacactatccgtgccttcatgcaagttccgaagcgtgtcccaaatcactttggcactctcaatgccatccacacggttgaactcacttccactcaaggcactaagtattgcattggcggcttgagcgttcttgtgcttattctcgtcgtcctccttggtgggatcttcgggattctgcaaaacatagcctttttcgactattctccaaatagatgggttaatagacttcaaatgcatcttcatcttatgcttccaagcggcatagtccgtaccattgaagtacggagctttgctgctataggtactcacataagatgtggatgtagttggatagtgataaggaaacttagctcccttatcaccatctttgccttcccccatttggcccgacatgatccctccaagcggttaagcctaatttggagattaggctctgataccaattgaaaaggtcaattaggcctagagggggggtgaataggctaatttaaaactttatgccgaagctaaaactgatagtctgatccacagtcagactatccgaaaatatcagatagtctgatgttggatcagactgtctgatccactaaaagaacactacaagtagatctagtgcacaaacaagagtatggcccaaacagcgactagatttatagcggcacaaaaaacaaagctaaataatggaagaagagatatcaccaacaatgaagttcaccgagttcttcccggagttcaaatccttgaggggattctactctccgttgaggagctcactaagagccgggtctttgctaaccctttcctcaagaggttgcactaagcactcctccttccactaaggggtatctctttccttgtggaggcgagatccggccttcacaaacttctcccggccaaccacacgtagatcggtggctcgggagtgacacctagccgtctaggagtcctcaacctccaagagtaacaaacatcacacaactcttggtcaaccctagtgctcaagatcgagtgaaacacacactaggccctcaaaccccaaatccacaaccaccaagatcgaccacacaaagaacaagaggggatttgagagagggagagagagctcaaagatccaaagcaccttagcaccaagctcaacccaaagtgaatgtgaatgaatgagttgggtaaccctagaaaagggttaggtggggggtattcatagaagcccccaaaatgtggccgttgggagagaatcttttcatcccacctcggaaagtctgaggtgacatcggatagtccgatgtttttgacccccaagcaggccagagacagagaacgaaattctagagaatttcggacaatccaatcgatcggatagtctgatgtcatatcggatattccgttatttttgaaccaagaatttcatcctctcacagagactcaagttccattgaatttcttagtctctggatcattagatactccgatcatatcggatagtctgatttaaaactcactcaaaaggaataaaaagcaattcaaaacagagagtgaagttctgagaaatttcagatagtccgacgtatcggatagtccgaccttatatcggatagtccgatattttttagccaacactcagacccaagacagtgagcaaagttctgtgaaatttcggatagtctaatcaacatcggatagtccgacagacataaaacaggaacacttcaaataaatgattttgagcactagtgttctaccaattatatgcatgtggcattcctcttaatagtacggcatcctaatactcaagaacacaagatatgcatggattagaagacaattaccacaaaagatgccgcaatacttattgtgttgacatccactactttttcatccttgcatacgtctcaacaaaaagcattagttaccctctaattgtgttgtcattaacaccaaaataaatgaggggtcctagatgcactttcagtgagaatcataatcaagatggcaacacggcacagctacaatttaacaacttccaggataggattgactatgccgtgcaacatgctttaattaatcaatcttgggtgttagtcaatactttgtcaaacatggtgaagtcgatggttgattgctcgatagctgagtatcaggctacaggaccggtttatttgccaggaggtgttttcccaaactatcggcccttggtcactaataatcagccagctgttcagccaattcctcacagtgcaccatcggctcaaccgacagcaccagtctcggctcctgcaccggctgcaccatcatcggcaccaggtcaactaattaatccttggttgttggtgagagaacagccatagcataatggacaaaatgtgaatcggctaactcaagaccaagttgctgctatgttcttaccagctcagcctactgttgacacaatctagcaacaaccgattcagcagatgccaccaagacagcaggttgtgtagccgattcagcagacaagaccgaggcaacaggttgttcagccgattcagcatcaaggtttggtgaatgcatcggctgggttcggaacacctgacaattagctaagacagcacgctgcgaatcaagttgtcccagagcatttggttcataatgtgcaaccagataaaatggtggtacctcaagttattcccgaacatttggtgcgtaatatacaactaaactttcagaattatcaagggggcaatttgaattatcagtatcagcctccatcaccacaagttcaatatcagtaaggggggtcgactcagccccagttcgctcctcaatacaatcaattcgagccaatgccacaacaagcgcagggagtgcctcagcaaagaccatgggccgatatgattgcagatgtgatgagagagcagtttgggctcaagccgaaggatgctggaaacctgtatcggcatccgtacgctgagtggtttgagagggttccattgcctaaccgattcaaggtttcatatttttcaaaattctcaggacaggacagcgtttcaacctatgagcacgttagccgattcttagctcagtgtggtgaagcatcggctgtggatgctctgagggttaggttgtttccattgtctttgtctggatcggcttttacttggtgttcttctttgccatgtggatcaatcaacagttgggccgatttggagaagcattttcatagctatttttatagtggggttcatgagatgaaattgtctgatttaacagcgattcggcaaaggcatgatgagcctgtgcaggactacattcagacgttcataaagatgaggaataagtgctacagcttgagcttaactgatgctcagttagccgatttggcttttcagggcagctccaatcaggaaaaagttctcatccaaggactttgatagtttgtcacatcttgtacagaaggtaaccttgcatgagcagatgtttgcagaagccaggaaaagctttaagaaggtcaatcatgtatgtccctatatgtatggatctgatgatgatgatgatgatgatgattctgagatagcagcagccgaatgggttagaagcaagaaggttataccatgccaatgggtgaagagttctggaaaagaagaaagatatgactttgatatcacaaaggctgataagatctttgattttctacttctggagaaacagattcagcttcctgctgggcacacaatcccatcggctgaggagttaggcaagaggaggtattgcaagtggcataattctgggtctcattctaccaatgattgtaatgtctttagatagcagatccaagcagctattaaaggaggcaaaatcaagtttgatgactccaagaggccgatgaagatcgattgcaatccttttcccatcaatatggtacacattgctggacgaactgccgatgcaggaagagctagaggttttcaagtgaattcgactaagattatcgataagtattagaagaaatatgacaagcagcaggtgtcacgaccggaaataacccaacgggcgttccttacgtgcgtgcattaatccttgtcccaggaggcaaggtacaccaaaagttgatacaattcagagtttaacaagcggaagcgtaaatagttaatttattacatgggcagcgaaggcccagcacacacaaagacaaacgagaaacagcggaagactagggcgacgaccacaggcacttgacggcaggcacgagctagacaccgaagccttcatcctccaggaactcctcttctgggtttgggaaaaattgagcaagactgagtacaaccaccgtactcaacaagacacacccacaagtgcagaataaatgcaaaggagtacaaaggagttacactataaagggttagggttgcagtaaacagcatttaaagacattagttgctcagggctattttgcaaacacgattctagtactatgcaatattatttatcaaggccgtgaacccacacgaacctgccttaacccaaggcctacgatgattcagaccgaactggcaacccgaccctgggtcccagctcgtcccaagccaacccaggccaaccattccacattttagttgttaagcaggttttaagaattaaaacactaacttgggtacattgctcggcttgcccataaccgagggcgcggctattcgaatagattatactctgatcagaggtgtacatctttacccacaagacacatcttcctcacgtgtaaccacgtgccacataccaccacggtatacagacgaaagacgtgacatagtttccaacccatcctagccatagacaagagtaccgacccaatcccacctacggccggaacccccgggacaggcaggcaggactgagcccctagcagcaggacaccggccctgtgccatgacatctcgactaccgggccgcagctcgtgtagccttcatttgtcctagagatgtccatcgacccccgacttcttccatctccatccgtgtacttttgtttataactagactgagccacaaactaagccttacccactagacatgtggaagtacggtagtgctttgcaacagaggcccgaagaccggtccttatatggccgaggtgctactatcaaaaccatgcaccccgagcccagcctaaaaccatttttggggattttgaatagaaggagcggtgtgaagccaattccacaataaccaaaccattccatagtgtccaggtgatatgaatattcccaaagtctagagttgtaaaaccgcctaatgttacctaattaaaagcgaagcatctacctaaaatcatactagtgataccatgagtagagtgtccactagttggggttttgtttattctagggtgaacaaggaaataataacaataacaataataataaggtcataacaaaggtaaataggcatggctaaataaaacagtgataacgcgggaatttaaataaagcgataatgcaataagttaaatcaacataattttacaaactgggattcaatatgttcaaagatgatgtgacttgccttgcccgctttcccaaacgtcggcttcaacttccacgaagagcggatcttccgaagctgcagcgtctacacgaccaacggaaaagaaacggcttttactctactaaactccatataacaagcagaaacaaagcacaaaaatgggttcttgacttcttaaggaaaaattagagacttgaacggtccaattccgagttcaaatggcgaagttatggccatttgaagtttatatgctctttaaatggatatttacgaatttcttcatttaaattttaatttaaaattggatttattgcgtcagccgaggggaggggcgcgcggaccgggtccacgggagtggggcccacgcggcagcctcacggtccacggtggaccgggtgcacgcggcttacgccggccggcgccgtgggtcccacgcgtcagccgcacccgagggcgcgggcggctgacggccgggccccacatggcagccgcggggcgcgcccgaaggcggcctcgccggcacagccgacgggaggcgacgcacccgcaccccgatggtcgccgccggcgaccaccggcgcggcggagcggcgctcgagagaggggagggaagggggaagtgaaatggcggtccacggctcaccccgggtcgatggcgacgacgggaacggcgaccggagcggaggaaggcggcggcgcggctcgggtcgacgaggacggcggcgttccggcggtcggcgggcgaaacggaggggtggacgaggtcggcgaggttgcggcgaacccgaagaaggcgacgccgaaacgggagagggtccggggcgacgacggcggcggaccggagctcggcggcgacggcggagagagagagcgacggcgcgagctcgattccgacggggagagagagcggcgagggtcggaaacggcggagggaggcacggggagcgtttatatagggttgggagggggagagagcggccggatgagggggaatcggccacggaagatccggccgccattgatgcgccggcgaagttagggggaaactttccgaacgaatccgagggagagagagagggaaaagtggggggaaagagggagggaatcatggggagtgatttccccctctttattgcgcgcggggacggcgggaggcggcgggattcgcggcggcggcggcgctagggcacgggcgaggcggcgggagcggcgggaggaaggggatgacgggtgggccccacccgtcagcgagggtggcgtgcgggcccgcccgtcagcggcacgcgcgcgcggggagggggccggatgggccgcgggggagaggagagagagggagggaggtgggccgcgccggcccaagagggagagggggagggaaaagaaactttttagggtttttcttttttataaaacctttttaactttgtttatttcttcttaattattatttgtgctctgaaaattccactaaaatttatttacgcattttaggcttttaggaaatatacaaaaatcctccaagccttatttgacttttaactttgcacattttaattgttggaggctttcacatggattttacttattctatgcatagttttgaggatgtattttagagtcgttttgggacgcgacagcaggagaggcgttatgaagaagatgatggcggttttggtcctcattggggttgtgagttctttagattttgctggaatgaaggtatgaggctgccatctattgaagactgtcctgggtgtagcaatgttgcagaaagttcaagccaatcgtataatagaggcaatcggctaaggcaaacaagagttcctgttcatcaaagattgagtccagtgaaccaagactgtgaccaagaggacagtgaagacaggaagacccaatggtgtccttctggtatttttacaaataatcagaagagaagggttcaaaggttgaggaatagggaacgtttttaggaggttgagcaagagatcaaccatcggctgaagaaaacgaattcgaagcaggaatggcgcattaagaaacaagttcctacagccgatgaagtaaagagattggctagaggaaaaagtgttgtgactgcctcggttaacatggattttatactacctgcggaatttgggatcaagcaagccgatgttgatgaaattgaggaagaatcggctagattgattttatcaccagaacaagcagtctttgagaaactggaagggacagagaatcggcatcttaagccattgtatgtaaacggctatgtcaatgggaagcctatgtctaaaatgatggtcgatggtggggctgcagtgaatttgatgccttatgctacatttaggaagctaggcaggaatgctgaggatctcatcaagacaaacatggtgctcaaagactatggtggcaatccatcagaaaccaaaggagttttgaatgtagagctaacggtcagcagcaagactatccctacaacattttttgttatcgatgggaagggttcctacagcttgttgcttggaagggattggattgatgccaattgttgtattccttcaaccatgcatcaatgcttgattcaatggcaaggcgacaagattgaaatcgtgccagccgacaggtcagtcaacgttgccagtgccgatttagctctttgggagatggatggtttcgattgcttatctggaaaagtttgggatggagaatttctaaaagtatccgattgtgatatacagccaattgaagatggagagcccaagttattattttgagggcatcgtggagggttcaaacgtctataacaaggatacagtagatcatctcgatgacaagtaagaacagggtttcttgttggccgatgatttggaagaaattgacataggtccaggtgatcgaccaaggccgacatttatcagtaagaacttatctccagaatttagaaccaagttgacagagctcttaaaggaattcaaagattgctttgcttgggagtattataagatgccaggactcagccgatcgattgttgaacatcggctacctatcaaaccaggggttagaccacaccagcaacctccgagaagatgcaaagccgatatgctcgaacctgtcaaggctgagattaaacgtttatatgatgctggttttattcatccttgccgatatgccgagtgggtttctagtatagttcctgttatcaagaaaaatggcaaggttagggtgtgcattgatttcagagatttaaacaaagctaccccaaaggatgagtatccaatgccagtagccgatcagttggttgacgctgcttcagggcacaaaatattgagtttcatggatggaaatgcaggatacaatcagatcttcatggccgaagaagatatccatcagacagcttttaggtgtcatggtgcaatcggcttgtttgagtgggttgtaatgacttttggcttgaaaagtgctggagctacatatcaacgggctatgaattatatataccatgatttgatcggctggttggttgaggtctacattgacgatgtggttgttaagtctaaagagatagaggaccacatagccaatttgaggaagtttttcgagagaactaggaaatatggccaaaagatgaacccaacaaagtgtgctttcggtgtatcggctggccagtttttgggatttcttgttcatgagaggggaattgacataactcaaaggagtgttattgcaatcaagaaaattcagcctccagagaacaagacggagttacaggagatgatcggcaagataaatttcgctagaagatttatttctaatttgtctggaacattagagccttttatgccattgttaagattgaaagctgatcaaaagtttacttgggggctgacggagctcgtggctcctcaccgggagaccgcgcaggcccccctttgccagttcggccgggggcttagggtgaaatctcaagctctcgctctctctgtatgtggaaatatcgtctgccagccagaaaacacgagacaccgacgatctatacaggttcgggccgctgagaagcgtaataccctactcctgtgttttggtggatctgtgtatgaatgagctacaagtgtcagctgacttctcccccgttctaagctcataatctgggaaagaatcaaccaaccccctctctatgggcaaggtcctccttttatacttcaaggggataccacatgcacccttctctttccaaactggactgttctttttctcttgaatgggcggagatcagcacggttgctgtccgaatgacgctccgatgggacagcccacacctacctccacttccgccgggggtgagcgcgtcgtgggagcatggctgtgcgctgacgatatggtcagtgtcagaccggtcgcaaatcggtcattcttgtccaccgcgtgtaatcttggcaacgtgcatgtttgcccttcttcacacaacattttgcttgtaatggttaggatgaagcctggcatatatcgatcggggctaacgtgtcatctctaagagataacacgcttaacgccggcttgagacgagtgcctagaggctttcgtcttgacgggatggggcatggcgtgcgtcagaccgccagtcgccacctaacccgtgatctgaccggtctgtgactggtcacagaccggataaagggacgcgccgtgctgcactgcgtgcagcgtgacacgcttgaccagactgcaataaatgctgttaggtgagcacagctgtgctcacttatcccatatacgtggcgcagacttcctaaagggggtcggggtgccccggccctcggggccagggcaagcgcaacccgaccccccctcgggggaaatcaggaggagggcggacacctcaccctcgggcccgacgtccccgaaggtgccaggccacgtgggcgattgtgtctgcctcaagcctctagtcatgatactcccggtcccatatcaccgacagtagcccccggcgttatgccagagcaatttcccttcccaagggaagcggtcaggtgtgacgccactcctaaagcctggtgacaggtgggaccggtctgcatagttgggcaaaatccccaacggtcccagtccatgcacattggtattggtaactttggttgtccataatgggcggtctattcaagactgccacatcacttgagcagcgcgcgaatctgggtgagcagatttgtctcgcccggagatacggtaacgccgcttcggttggcgagcgtaattaacgcgcgcacgatacaatccgtttcgattgccacaaccgcatatccacttcaagcgccgtaagcgggcgaatgggattagtggaagcgtgggcacgggaaacgagggagcaagatagcgagatacgagggagcgaggtagtgggcgcgagaaacgaggagccaggcccagcgatggcaagggtataaaagcatcgagaaaaggatttgctcccttcctttcgccattgttcctcttgccttcgctgcctgagctctaactctttctctaccacgccctactttcgccacacgcgctcgttcccaatcatctcttcctccaccgccatggcacggggctctgctctgctcgacggcagtgtactgccgccttcccgcatcgtgaatgagaggcacgccggactgccgcgccgcttcatgccggagtccgccaccggtcgggagattgtgatgctgggcgaggggcgcccggcaccagactacccggggcggtccatcttcttcctccccttcgcaatggctgggctggtcccgccattttctcatttcttcatggatgtcctggagttctacgatctccagatggcgcacctcacccccaatgcggtgatgacattggccatcttcgcacacctgtgcgagatgttcattggggtgcgcccctctcttcagctgttccggtggttcttcaccgtgcagtcggtgtcaccgccatcggtggttggcggctgctacttccagccgcgggggccggtgttgaaccgctacatcccctgcgtcctccgcaagaagtgggacgactggaagagcgactggttctacacccccctcgccgacgaagcgcgcctccgacttccgagccagcccccggcgcaggtctccagctggcgggcgccggtagatctgggggaggagtacgacgccgtcctcgaccgcctggcgggcctgcgatcccaggggctcaccggggccatggtgtacggcgattacctccgtcggcggattgcgccgctccaacggcgcgcccggagcgcctgggagtacactgggcctgaagactacatgcggacccaccagggagccagatgggattgggctcctgaggacttcaagatcgtagtccaaagggtgctgaatcttagctccgcggaggcgtctcgccttcctcaggagatcctccccctctgcatcgatcccgaccgcgtctccattctaaccattatgctgggggtcggggcctcagaggagagagcccctaagggccacgacggcgcgggcgagagtcgcccggggaaaaaatctgccccaggagggggtcgtgcttctgggccccgcgtcgggggctcggggagcagccgccctgccgacgccccggggaagaggaagctgggaggaacacctcccccatctcctccccgagggggcggggcagtgcgtaccagcggtcggcgcccggagggggctgcgccgacgtcacagcccgagggggagcgcaagaagaagcggctccgcaagatgggggagacggaaccagcccggggaaacctaatttcccctccaaggtggtcattcaaccgaccccctcgcaggttcgtctcattctcattgcgaccacctttctcccaaagagaagttttttcttacccattttgttcgtcttttggttttttcttctgcttcagcgatgtcccgtcgcattcctcccgccgccccaagtccggccagtccgaggccgaagatccagcggccgcagaggagcggaggcgggagtctgaccggcgtgaagccgcagcccgccttcgggaagctgaagaggccgcccgggaggccgcccgggttcgccaagcggaggaggctgctcgggaggaggccgcccgggctcgccaagccgaagaagctgcccaggaggaggccgcccgggctcgccaggctgaggcggcagctgctgctggcgcgtcactcgggcccactccctcgggcggccctcaggcgacatcctccgaggcggctcgcgacgaggccgcgggcgcatcgcctgggcctacctcaccgggcgacgcccaggaccaaacgggcccgggggacatccccgagcccagcgcatcctccggggggccaagccgcgtcgccttttctccaaggcggcttttctcctcttctctcgtcgccccagtgagcgccgagcccattatgcaggccttggccgccgcaaacaccgcggtgctagatggatttagcgcccaggtggaggccttgcaagcggaacgagcggagctcgaggccgcatgggcgcgtgtcgaggaggggcggcgctcggtggacgccatggtggaggtgggccgtaaggcccaccgccgccacatctcggagctcgaagcccgcaaggcggcgctggcggagatcgcccgggaggtggaggaggagcgagaggccgccctcgtcgccaccaccgcgatggtcgaggcgcaagacaccctccgtcttcagcacgcaagctgggaggcggagctgaagagcaagctcgacgccgcccaaggggttctcgactccgccgctgcccgagagcggcgggcaacggaagccgaagcggcgtcccggcggcgcgaggaggccctcgaggcccgtgccatggcgctggaagaacatgccggcgccgtggagaggagcttgatggaccgcgaggccgccactgctctccgggaggcgacgctggcggcgcacgaggccgcctgcgccgaggaggagtccgcgctccgccttcgcgaggatgcactcgccgagcgggagcgggctctcgaggaggccgaggccacgacgcaacggctggcggacagcctctccctccgcgaggcggcgcaggaggagcaggcgcgccgcaaccttgaaagcgtccgcgccgagagagccgcgctggagcagcgggctgctggcctcgaggcgcgggagaaggagctagacgcgagggcgcctatcagcggggcggccgcgggcgaaagcgacttagccgctcgcctcgcggctgccgaacacaccgtcgctgacatgcagcgcgcgctggactcctccaccggggaggccgaggcccttcgcttggcgggcgagatcgggcccgacatgctctgggatgcggtctcccgcatgaagcgcgccggtcggcaagcgggcctctggggaggccagacgtcggtgccccccaccaatctggaaggcctcgctccgcacctcaacaggatggcttgggttctcgagcgactccccgaggagcttgagaagaccatcaaggcatcctcgagggacctcgcccggggggcggttgaactcgtgctggcgagttaccaggcccgggatcccaacttctccccctggatggcgctggaggagttccctcccgggaccgaggacgacgcgcgcgcgcgggtcggggacgctgccgaccacatcgtcaacagcttcgagggctcggcccctcggctcgcgttcgcccccagctccgacgaggagggcgacgccagcagcgaggacggcggtggcgacgaggccggcgacccgggcgcatatgaatgagcccccaggcccccgccactcttatcttttttcttgttctttcttctaaggccttcatgcctcttttttgtacaatctaacttaatctgcaatgagaaatgatgaaaaatttttgtgttagttttattttgctatatatatgagttgaggatgatctgtgccatggtccttttgcgccttagcttgaaataagggctcgcgcccaagtcccggtcctcgaatggctcgggtcggggctagtgcctggggagatccgcatgtcgagactggccaggccgggaacgtggtgaccgaggggtatgggtgacccgattgtgggtttttgccgattcccccccggagttcaccacgccccggggcacggctcggttctgggccccgtttggcgattttagctgaccgaaccgagcccccgagggcaaggttgagcacgagtgacattatttcaagtcaagattcttcaaaaggaaaaaacggcacagacacaacctttaggaaattgaaactgcttctattgaaatgctgaaaggaatatatatgcatgtgtggtagcccccggctaaccctgcacacccgagggggggtgcggggttagcccgagccaaaacctgacacccgacccccccccttcaggggtagaagcgacgaaggtgttcaatgttccacgggtttggcagctccgtgccgtcgcccgtggccagccgtaccgagcccggccgggggacaccgatcactcgatacggaccctcccacattggtgagagtttgctcaatccagcacgcgtttggacgcggcgtaggacgaggtcgtcgacgcagagtgatcgggcccggacgtggcgctgatggtagcgccgcaggctctgctggtagcgcgcagctcggagggccgcgcgccgccttcgctcttccaagtagtcgaggtcatctctacgaagctgatcttgatcagcctcgcagtacatggtggcccgaggagacctcagggtgagctcagatgggagaaccgcttctgcgccgtagacgaggaagaaaggcgtttccccggtcgctcggcttggtgtggttcggttcgcccagagcaccgctggcaactcctcgatccatgaatcgccgtgcttcttgagaatattgaaggtcttggttttaaggcctttgaggatttctgcattggcgcgctccacttggccattgcttctggggtgggcaggtgaggcgaagcagagcttgatgcccatgtcttcgcagtagtcgccgaagagctcactagtgaattgggtgccattatccgtaataatacggttaggcactccaaaacgggccgtgatgcccttaataaatttaagagcagagtgcttatcgatcttgacaaccggataagcctcgggccacttagtgaacttgtcgatcgcaacatacagatactcaaacccgcccggggcccgtttgaacggtcccaggatatcaagcccccagacagcaaatggccatgacagtggtatgatctgcagggcctgggccggctgatgaatttgcttggcgtggaactgacacgctctgcatcgccggaccagatcgactgcgtcattgagagctgtcggccaataaaatccttgacgaaaggccttgccaaccagggtgcgcgaggcggaatgggctccgcactcgccctcatggatgtcagcaagaagctcaacgccttgttcctgaggaatgcacttcaggaggattccgttagccgcgcgccgatagagggtcccttctaccagcacatagcgtttggaaatgcgttgtacgcgttcactcccttcgcggtcctcaggtagagtcttatctgtgaggtatgtttggatctcagagatccaagcaatcaatctaagggagcttggaacactctcttcgggtcccgaggcctggactccgacgggcctcgggggccggtcaggcgcatccgtctcccctaaggggtcgggtcgcgccgacggctgggtaagcctttcttcaaaggcgcccggtggggtctgggctcgcgaggacgcgagccttgagagttcatcggcaatcatattatcccgtctgggcacatgccgaagctctatcccgtcaaaatggcgctccatacgccgtacttggcgtacgtaggcgtccatctgtgggtcagagcaccggtactccttacagacctggttaacgactagctgggagtcgcctaataccaagaggcggcggatccccagtccagccgccactctgagtccggcaaggagtccctcgtactctgccatattgttagtcgctcgaaagtcgagacggaccaaatatctgaggacgtctccgttcggagaggtcaacgtgacccctgcaccggcgccctgaagagacagagaaccgtcgaattgcatcacccagtgggcggcgtgaggcagctgtgaggggttcgtgctggcctcgggcattgagacggtctctggagccggggtccactctgccacaaaatcggcgagggcctggctcttgatagcgtggcgtggttcaaagtgcagatcgaactcagaaagctcgattgcccattttaccactcgtcctgtaccctctcgattatgcaagatttgaccgagggggtaagacgtaaccacagtgacccgatgcgcctggaaataatggcgcagtttccttgaggccatcagaatagcgtaaagcatcttctgggcctgtgggtatcgggtcttggcgtcccggagggcctcactaacaaagtagacaggccgctgcacctttcggcggggccgatcctcctcgttaggggccgtacccccggggcgttcttcgtccaagtggcccctcggggcgaactcgtcttctgcgctgatgacctcggggtcggaggatgacaggagcggccctcccacagtggcctcggggccgtcctgggggtcggggactcctggcatcgtcggacaagcgggcaaagggccaactccggtcgtcaggggcctctggcctccgttcggctcgggggcctcttctccctgctctttcctgggtcgagtcagcacagggttagcctcggggccaaagggctttaagtgcagccttccctcagtggccttggggccttcctgagggtcgggggcacccagcaccgtttgacaagcgggtggagggccgactccggtcgtcgggggccttaggccaccgttcgactcgggggcctctcctccctgcctgctcccgggccaagtcggcacagagcgggggtgcgcagaatgaggattgtcctcatcgcgctccacaaccaacgctgcactaactacttggggggtcgccgctaagtaaagtagcagggactcatttggctccggggcgactagaaccggaggagagctgagatacgccttcaactgggcgagggcattttcagcttcctccgtccaagtgaacggccctgagcgcttgaggagcttaaacaagggtagcgccttctctcccagccttgatatgaaacgacttagggcggccatgcaaccggtgacgcattgcacgtccctaagtttgctgggggggcgcatccgctcgatagctcgaatcttctcggggttggcctcaatgcctcgggcagagaccaagaacccgagaagcttacccgcaggtacaccaaacacacacttatcggggttcagttttatgcgggcggagcggagattctcaaaagtttccgctagatctgaaagtaaggtctcttggttgcgcgtttttacaaccaagtcatcgacatacgcctcaacattacgtcctatttgactacccaaagaaattcgagtagtacgctgaaaagtaggacctgcattctttaacccgaagggcatttatgtataacaataggttcctacgggggtaatgaacgcagttttttcctcatcctccctagccatgcgaatctgatggtaaccagagtatgcatctagaaaacacaaaaggtcgcactccgcagtggagtcgacgatctgatctatgcgaggcagggggtaaggatccttaggacatgccttgttaaggtcggtgtagtcgatgcacatccgaagcttgccgttcgccttgggaacgaccaccgggttcgccagccactccgggtggatgacctcacgaatgaacccggcctccaaaagtctagccacctcctcgcggatgaaggcttgacgttccggggcttgccgccgcactttctgccggaccggccttgcgcccggccgcacggcgagacggtgctcaatcacctccctggggaccccgggcatgtccgctggtctccatgcgaagacgtcagcgtttgcccgcaggaaggagacgagcgcgtcttcctatttgccatccagaaaaccaccgatccgtgtggtcttggatgggccgtcgcccaaggcaacctccttgaccgggacctcgtcgcaagtggccatccgctgcctcggggcggtgggggcagaggggccaagcctctcgtcaccaccctcgggcttggacgcagcagcgaggcggtccgcgcgctgctccatgcaagcaagcgcgactttaaggtcgccacggacagagatggggccaccggggcccggcatcttcatctggaggtaggcgtagtggaccgccgccatgaacttcaccaacgcgggtctccccaggaccgcgttgtagggcagactgaggtccaccacatcgaagctcacccgctccgtgcggaagttggcgggtccaccgaaggtgaccggtaggtcgatgtgacctaacggccacgtgtgccccggcgtcacaccgatgatcggttgtgacggctggagcaccatccccggggccttgatagcatcaaaggccgcgggggaaaggatgttgagagccgctcctccatctatgaggacacgtcccaacttcacgttgcagatggtgggggaaaccaccatcgcaacctgccctccccgggcaatgcacggtgggtggtcggtctggtcgaaagtgagagcaacctccgaccaccgcgcccgacgcatcgcctcatgggtaggggccatggtcagaagctctcgcttcatagccttgaagctccggcgagagacgtgagcacatgctcctccatcgacggtggcaatggtggctccaggttcttggaaacctagatcatcatcaccatcatcaatgtcaacagcgggggccttcttcttggcctcacttcgccgtttgtcggaaggaaccgccggggacttgccgtcacggcgttcctgcctcctgtcctcctcccacttcctcgttcgctcagccaagtttttgactgcacgacagtccgcgagatcgtggagggaggtgttgtggacggagcaccacctgccggcggggcgctccctgccgggagtaccagcctctttctttttgtcgctcgcaggcctcccctttcgggtggcccgcggagcgccctcgacggcgaggacatgaccctcgtcgccggaacggtccgacctcttcttcctcctcctatcacgccgccctgtctgagcggcggatccgggggcggccgaagctgccactccggaaccggaggagttccaggtccacgcttcctccttacgagccactcggtccgcgagctgaaaaagctccgcggtagtctggggctctttggaagcgatcttttcgagcatgcggttgtgccgcacgccccccctgaacgcgtagatcaccgcgtgtgcagggatgcatggtatagtgttgcggacttggcaaaaccgctgaatgtacgagcgaagcgactcatcatcgcctcgctgtactgcatgcaagtccgcttcttcgcctgggcgcggatatgtgccttggaagttcatggtgaactgttggcacaaatcttcccaggagtggaccgacgcgggtggcaggttcattagccaaccccgcgcctgtccttttagggccatgggaaagaagttcgccatgaccctgtcgtcacccccagcggcctcaatcccggtcgtatagacctggagaaactcggtggggttgacgctcccatcgtacttctcggtgatggtgggccggaaccttgggggccaacggacattccgaagactcgccacaaaggctctacagccaacaccaccggccgggggcacggagggctgatcttcacgtccatgtcgaggtgacactctggacgaggaggctccctccgttgcacggggagtacgccggctattacaccggcgcccgatgttgaggcgggcatccggctccccatgctgatcctcccgagtcgacggtgtagacgagggagtggcagccgaatgacgtgcagccgccgccgctcgccgcgccctccgccttgatgacacggagccggtggtagcggcgccggaggtcttggtggtggtggcggaccgtccaccagcacccaggcgctgctgtgccgtcatgaccaagttggccacgtcttccagccatcgttgggctggagactccgggtcatggacgacaggcgggtgtcgtaggagcgcgccagcagcttgaagcgcaccctgaggcgtgctgccgtcgccgtagacgaggaggcgacgctccccgtctcgccgttctcctgcatcacctgcggccggtgacgccgcggacttgtcgaccctctcaagcgcctccccctgcttagggctttggcgcggaggaggtggaggagtacgagctcgacggcgtggattcggctccccgtcgtcgccgctcacactcggcgagaggtcgtgcgtttttccttgctcggccattaggctgaacaagaaaaacttggggcacacggaagagtctgagagctctgaaagcacacgctgagccccctacctggcgcgccagatgacggagctcgtggctcctcaccgggagaccgcgcaggcccccctttgccagttcggccgggggcttagggtgaaatctcaagctctcgctctctctgtatgtggaaatatcgtctgccagccagaaaacacgagacaccgacgatctatacaggttcgggccgctgagaagcgtaataccctactcctgtgttttggtggatctgtgtatgaatgagctacaagtgtcagctgacttctcccccgttctaagctcataatctgggaaagaatcaaccaaccccctctctatgggcaaggtcctccttttatacttcaaggggataccacatgcacccttctctttccaaactggactgttctttttctcttgaatgggcggagatcagcacggttgctgtccgaatgacgctccgatgggacagcccacacctacctccacttccgccgggggtgagcgcgtcgtgggagcatggctgtgcgctgacgatatggtcagtgtcagaccggtcgcaaatcggtcattcttgtccaccgcgtgtaatcttggcaacgtgcatgtttgcccttcttcacacaacattttgcttgtaatg

SEQ ID NO: 19814 - DNA, 1664 bp, Oryza sativa
accccccctcgggggaaatcaggaggagggcggacacctcaccctcgggcccgacgtccccgaaggtgccaggccacgtgggcgattgtgtctgcctcaagcctctagtcatgatactcccggtcccatatcaccgacaggggcagagcaacagaaggctttggatattattaaggaatatcttagctctcctccagttttgatttctccacaaaaggggatacatttagattatatctatcggccggtgagaagtcaatcggttcagtcttgattcaggagcttgacgggaaagaaaaagttgtattttacctaagtcgtcggctcttggatgcagaaacaagatattctcctgtggaaaagttgtgcttgtacttatatttttttgtacaaggttaaggcattacctattgcccaatgaatgcactgtgatatgcaaggccgatgtggtcaagtacatgttatcggctccgattttgaaaggaaggattggaaagtggatattttccttaacggaatttgatcttcggtatgaatcaccgaaggcggtcaaagggcaagctatagccgattttattgttgatcatcgtgatgattcaatcggctcggttgagattgtgccatggactttgttctttgatggatcagtatgcactcatggttgtggtatcggcttagttattatttctcctcggggggcatgttttgtgtttgcctatactattaaaccttatgcaactaacaatcaagctgagtatgaggcagttttcaaagggttgcaattacttaaggaagttgaagccgatgctattgagattatgggggattctttgctagtgatcagtcagttggcatgggagtatgagtgcaaaaataatacattgatagtttacaatgagaagtgccaagagttgatgaaggaatttcggctggtgactttgaagcatgtatctcgagaacagaatattgaagctaatgatttggcccaaggggcgtcgggatataagccgatgatcaaagatgtcaaggtagaggttgccacattaacagctgatgattggagatatgatgtacatcattatttacagaatccatctcaatcggcttctcggaaattgcgctataaagctttgaagtataccttgttggatgatgagctgtattatcagacgattgatggggtgttgcttaagtgcttgagtaccgatcaggctaaggttgcaatcggtgaggtaaatgaaggaatttgtggcactcatcaatctgctcataagatgaagtggttgcttcgacgtgcaggatatttttggccgacaatgctggaggattgtttctgtcacgaccggaaataacccaacgggcgttccttacgtgcgtgcattaatccttgtcccaggaggcaaggtacaccaaaagttgatacaattcagagtttaacaagcggaagcgtaaataattaatttattacacgggcagcgaaggcccagcacacacaaagacaaacgagaaacagcggaagactagggcgacgaccacaggcacttgacggcaggcacgagctagacaccgaagccttcatcctccaggaactcctcttctgagtttgggaaaaattgagcaagactgagtacaaccaccgtactcaacaagacacacccacaagt

SEQ ID NO: 19815 - DNA, 3612 bp, Oryza sativa
agaagtaattaatcacatcatccaagtgagattgaagttctgcctcattatctcattatctgttcacctggtttttgttcctccgtgcctctttcgaacgtatccttcaaggttcacatgtgtggtcaattagaagcattctacaagtattaatagtatgtaagtttggtgttatttgtacttacaatgtgtagcactttaacaagccggtgtccactgctcgtagcttatagaggtaaaaaagatccgagaaggccactgcaaaataattttgttgccccaaggatggttcttggtcgtggtaacctactatggacgtgtccctcatcttgctcttggagtttgttttctccatgtagtatctatgcagcacttggcaagcagaacccattttggctaactcatggtctgcaaccaatggcacctgttgctgaaatgtacctggagcttgttttttggagtaacgttgacctccttatccagatctagttgtttgggaggtaactacggctcttgtgcctttctttttccttttgatctatctcttgcatgatgcgcccttctttgcaccatcggtggagatgaaatggccttggtgttttgcggaggagggtgaagtttggccatttcaccgaagtccgtaccatggctctcaaatggagcttcgatggccagaggaggtgaagggacttttgtggaagaatctgggcgaggtggagctggagctaaagttgtcctcaaagtgaccttgatgatgatgaggtcttttagccattggatgaagataccacgggattggaagttgccagttcatccaatcagcattcaccatgtcaacttgtactttgacatgtctagccaccaaatctgcaccgcgaactcttgtttatggagtaggtttgtatggttagccctcggcagcatgacaacagaatgtttgtgtaaccctaacttgtaggatgcattgggctacgccctgcatacaatccagaaaaaaatattagtttaagttgtacgaatcacatcagctacaacgagaactactattcgactgagacaggtggatgtcattctggaatcccagttgacaaacaactacttcgccgctgcaggggctcacttgcacttcttctggatgtccgttgtcctcgttcctttttggctagcatctcttcccttatcctagcctcaattccgtgtaatttttcattgaattcatggctaagttcactattgacggtccttaaatcataatatcagaccgtcaatacctgcatataatgaaataaacacatggtatccaacttagtggtaggtgttattactaatcatttccactagtgttggtgaaatatatgtatgcaggtaatttgaggagaaaacacatccgtcatgtgacaaaatgcacctccgcgcattcaggacgcgtttagacggattagaggcccaataagtcaataaaaaccatttagaattgggccaaaacatagcccaggttgtttggggcccattaaccaacctcccgaccgaaggagaggccgggaggagagtttttgggttcggccgaacctaccagttcgggcggaccaatcctggtgcttcctgtcatctgctttcacctggacggctcgaatttctctcctaaggcggttgcagcgtgttttggtcatttcccatacccctaaccgtcatttggagcctatataaggagctcttcatctcacttcaagcacacacaactttgagctgaattacaagaggctctattgtatcttttgtacattagaaataggtagaaagcgaggggaagctctgaaggagtgcccggaagtttggcgctcatccgacttctgcctcgacgagtgtagcttcctaggaggaattctgaaggagtactggagtatcggtgagtactggagtactggccgagtagcttcctagatggctacgaaatcagtcttggctttatagccatggttcgagagaaaaccttctctggtagtatcggtgaaaatccatacctccatcttcaggactttgagctagtgtgttcgtgcctatctatcgtcggcatgacacatgatactcttaagtggaaattgtttcctttttctcgtagagatgaagctaagcaatggtacactctatctgtcaagaaattccactgtgaatgggaggagcttaagtgcaatttctgccttactttctttccattaacccgtgtaatcaatctttgagtagacatcctttcttttcgacagaatgagaaggaatatctcggtgcagcctaggccagtttctcactgttaactcaatctggcccagacttgtcgttacccgaccacgtgttgttgcaacattttcggtacgggttagacaaggagtttgccgaaaatctcaatatttctgccggaggatcgttcgcacacaagacaaccgccgaaggaagagaactcttagatttgatcttagagaacgattctttcggccgaagcgaagccgtcccgaaggtcgagattattcatgaggaacctctgcacgtggagttggaacccgactcaactgtcgaatcctcatcccggtcgcaggagccggaggaagaagaaattcatcctccggaaatttcattccaattcgaggaggatcttttcgaagattattagaacaccttgaattattcctgagagaagagaccaccgaccaaggtcaattctaatgaacctcttgataaatctatgcttaaagagacggtgaagaggttgaccatcatcatgagtaacaaatggttaagagaaggagagctcttatctgaatcgattcagatccgatgcccctcctcaaccattatgtgtcacattggaggtaattcggtccgtgctctgtataatccctctgttggtgccaatattatgtccgcaacctttgcattcgattgcttaggggacagatcgttggaaccaaccgtcagaaccttccgaatttccacaaactctactaccgaaggtttagggattatctctggagtgcccacacggcacaacagtgttgaggtcatattagattttcatgtgtttgaaatatatgatttcgacatactcatagggcatcccatagaaaaactcttagatgtgcccgaaaccggtgtccttaacctgaaaataggaagaattgccacctccgtccctatgttgcaatcaaccaattctttgatggagtctcttcctgttcctgagccaattgagggagtgatggctatttctccattcgagaccctagagtctattttcgatgaatccatcgaagaattcaatgaaggggaggatgaaactggagaaacgatggatctgccaaaaacggatctgccgtcacgagccccaattgagctaaagcccttaccgtcaagcctaagttatgcctttctgaacagcgatgcggagtctctagtcattataagtgacaaactctctgagagggagatggcccgacttatcgccattttagaaaagcatagtgctgcttttggctattccctccaagacttaaaaggcatcagtccgaccctttgcactcatcgcattctcttagaaccgtctagcacaccatctagggaac

SEQ ID NO: 19816 - DNA, 1677 bp, Oryza sativa
acattcaatcattgtttggagaatttagataaggtcttacaaagatgtcaagaaaaggacttggtacttaattgggaaaagtaccacttcatggttcgtgaaggaatagtcctgggacatcaaatctccgaaaggggagttgaggtggacagagcaaaaattgaagtaattcgacaacttccacctcctgtcaatgacatgggtgtccgtagcttcttgggtcatgcggggttctacaggcgcttcataaaggatttctccaaaatcgctagacccctaactgccttgctagctaatgatgttccggttgactttgatgatgagtgtatgaaatcctttaaaatccttaaggaatcactcatctcagcaccaatcatccaaccctctgattggtcgctgctgtttgaaatcatgtgtgatgctagtgattttgctgtgggagctgttcttgggcaaactaaggatagaaaacaccatgctatcacatatgctagtaaaacgttgacgggagctcagcttaattatgccacaactgagaaagagctcctagccgtagtgtttgccattgagaaatttaggtcttatttagtgggggctaaggtagttgtttacactgatcatgctgcactaaaatacctgcttactaaaaaagatgcaaaacctcgggtaattaggtggattcttctactccaagaatttgacattgaaattatggataaaaagggagtagagaattatgttgcagatcatttgtcgcgtatgcaaatcactaacatgcagaagctactgataaatgactatctacgggacgacatgcggttgaaagtcatagactctgacccgtggtatgcaaccatcgtcaacttcatggccacgggtcatgtaccaccggtagaaaataagaagaggttgatctacgagagccgcaggcacttgtgggatgcaccttaccttttcagagtctgctcagatggtctactgcgaatatgcgtttcgacagacgaaggcatcatgatcattgagaagtgtcatgctgccccatatggaggtcactatggagcattcaggacacatgcaaagatctggcagagtggattcttttggccatcaatgtatgatgacacaaagtaattcgttcgaagatgcactagatgccagaagcatggagggatcactgctcgagatgcgatgccactgacacacaaccttcaagtcaagctatttgatgtatggggcatcgacttcatgggaactttcccaaagtcctatgactgcgtgtacatcctggtggccgttgactaggtgtcgaagtgggtagaggcagggccgcagacgccaagcacgcccgccggatgtttcatgagattatcttccatcgttttggaactccgcggatggtgataagtgacggagggtctcattttatcgataagaccttccaaaactgtttgcaagaacttggggctcagcaaaaaattgccactccgtatcatccccaaacaagtggacaagcagaaatgagcaacaaacaaatcaagaatattctgcaaaagactgtaaatgagatggggtaggcatggaagaacaagctacctgatgcacttttggcatataggactgcttataagatgcccatcggcatgtcaccatactaacttgtctatgggacgacttgtc

SEQ ID NO: 19817 - DNA, 25562 bp, Oryza sativa
  unsure (1)..(25562): unsure at all n locations
gtcacgctgcgtgacaacgaaggtaacatctttaaggtaaatggccattgtttaaaagttttccttgatccgttagaagttgatcatgacttggatgttgtgaatcttgtctcttttagcttctacccggagtctttaggtccccccttgatccgttagttttcaatgccatgagtccttaggcctccctctagttatcttaggtctagctttcatgataaaaataaaaaaataaaaaaaaataaagttggctccttggtcttccaaccatgtgagccctttttgcttcactcttgtctttctttttcttttttgtgtccaataaagcctctcatatacgaagacaagtgtgggggtgatcttgcacatcaacgccgtaacaaaagcaagatcaccccagacgagctatgacaaaccacacacgggaaattgatgcagttagacctagtgaggggtcagccaaatctccagttcggctaaactatctctaccaaggatcattttctattttatacagagcgcatgtttgcacaatttttcctttggacatccattctatcttgagtttaatttgactatcaattctaaaatatcgaagataattaaactcaaactagggatggtacaattagagttcatggtctccctgaaaatagcatgcatgcctattattctttgctcattacttgttgcttgtggtgacttatccaatagggaccccatgctatctaagtaattgatgaatgagatatagtctgatgatagaaattctgctcttcatgttgcacacttgggaattttataaaatgaaaaaaaacttgtataatgatgctaaactgctcattgatatttttattcccacttgagccataggttgatcattaataattagcttgctacatacgctgcttgtcattacattgagcgttgtcaagttttgtgaccctagtgaaatgcttttcatactttcatggtcaagatcacacacattccacatacacccacctattcttgacttctacactgcaagttagcattcctcatttgtcattcatttcatccatcaaataaatactcatacaagttctttcaaaaaaaagttgagagagaggcatggctatgcaaaaagaaagaaaaaaaatgctcatacaagtattgagcatgatgatgagaaaaaaaagaaaaagaaaaaaaagagatagccatgcactcttgaaattttcaaagagaaataaatggaagaggatgtatacaaaaggagttattgattcattttttttccacccacaaatttaccatacacatacacatacacatgcacattcttgaccagaaagtatgttttgtatttccgtggatccattatttgactttgcaatatatgtgatgcaagtaatgctctactcttttccataccctgagctccacaaaagccttattagatggtaggaaaagaaaaggcacaatcatatgccttgtgaggaatcatacactttgagcgatcgaaagaatcaatggaggagcaaagcatagttataattttgtgttacctcaaaaaccacaagttgttcttcatgaaaaattagggtgacttaatgtcaagattgttccatttctcaattgctcaagatcgcatggtagacactataaagatcgacaagtacaggtatggctttgaataatttgtttgcatgatgattagttaggaagtcataactctgttgtagagtccatagccttcactcgggatgagcaaaggttaagtgtgggggtgttgttgacggtccttaaatcataatatctgaccatcaatacctgcaaataatgaaataaaacacggtatccaacttagtggtaggtgttattactaatcatttccactagtgttggtgaaatatgtgtatgcaggtaatttgaggagaaaacacatccgtcatgtgacaaaatgcacctccgcacattcaggatgcgtttacacggattagaggcccaataagtcaataaaaactatttagaattggaccaaaacatcgcccaggttgttgggggcccattaaccaacctcccgaccaaaggagaggccaggaggagagtttttgggttcggccgaaccaatcctggtgcttcccgccaactactttcacctggacgtctcggatttctccccttaggcagttgcagggtgttttggtcatttcccatacccctaactgtcatttggagcctatataaggaggtcttcatctcacttcaagcacacacaactttgagctgaattacaagaggctctattgtatcttttgtacattagaaataggtagaaagtgaggggaagctctagaggagtgcccggaagtttggcgctcatccgacttctgcctcgacgagtgtagcttcgtagtaggaattctggaggagtactggagctgttggtacactttgctctaggttcagagaacttcttctattaagtaagcattcgtgttcctttcttatgttatttaattacttagtctgagtaagatatatttccatctttgcaggttcattatttagtatttatactaagtgctctagtactaggactccggatagagaaggaatttcctgcgcaagtattagagaagtaattaataacttaggcctggtgtctaggttagagattacctttgtttgttgtgtatcccacggatttgtcagaggtagacggcaggtggtgacagccctgaattccgtcctagtaatcctccatgttcgggtacatcatagagctatagccggaaccacactgacagaccagcaggggtcggtgcccgtagcaacagataggaaattacctttgcttagcttagataattaaaacacagagaaagtcctctctagcctgcctacctatagttgttgtccttggatcgtcttagccctaggtagattacacacattccctgagtttgatatccttttggggtcacccgaaggtgaagtgctacagcggtattccgtgcgcttgtggatttatctttggtcgtaagaaataccaacattcacccatgacctcccttacaatatgttctctaagatgatcttctgtctgttccttagtttgtttaacctcccttacaatctattctctaagacgaccctctctttgttccttagtttgtttgcgcttcctgtgttgtgcgttgtacttggccatcccaatgttccaaggaatgttgcatcctgtccctctagtccggccagcctgttgttggtatttcttaacgatattactagaaatatgaattcccagcaatggcgctagaaatggtcctggtatatatatggtttacagaaagaatccgcaagcgcacggatttaccattgtagcatttcacccgggagtattctaaggtatcgtatttatttaatcgcaagggaagattgtaagagagaactatgctaataatatatatacatgccacttacataatcaaagtctaagcatgggttaaaatatttatatgggtagagtgacacgaagcaaagcactcatatttcttctttaatcatttctgaactaagtggaagaagaaatagaaaaaacaatcaattcctataattctaatatacactcaactttagtctacatctactagtatacaaccatatagccaataccccctaacagtgccctcctggtgcttcgagagactaccccgggttgccgagtttcttacgacaacctaccatggccgtccaacctaggctaaatacggaggagtaccctccctaggaaagtttcttaggattagatactatcgtggaggaatacccgtactgagctgtcacaattagcagcccacctttactgactcgtagcatataaacccagataatgatacttagtaatctagacaccctgtctacattattaaatactactctacatccctcgagatgacatagagcaaccgagtaatcggacattaaacccacaccattgcacctctctggtaggctaactatatgactgtaccaatacaaacataaagtaaagacaatacttagatgaactaaagtatcgagagcatatgaagaagaattgatccagatctacctatcaatagtacattgttctttacttacagatcagaacaaaaggtgagctcatttctctctaagtctatgtgtgaaatatatgagaatttgatgctacataatatttcgcacttgagagattggaacccttggctggcataaacaacatgtgggtccagtcggaggtgaccgttgtagcggcgtacatgaggaagatcaattgctattctgttcatgaagttcatggagaattctgcattgatgagaaggctttcaacatgaatggcttatatactaggaaaggttatcaagtccactttccatcggatcaaacggcatgtcattccgagctttctaccaacggcaatctcaagttgaagacatcatgtgcgggtagaacgggcaacgcgcaagtaacaacaatggtgatgaacgtcggctttgaacggcatgtttggatggagttatactatcctatggcccatcttgggttgggaaggagtccatctataatttctccatggattgaagccttccaaagcaaggagtttctagacaaggaagaaaagattcagttcggactcggtttgggccagcctggatataccaggactaaaacgcccgtttctgtctcgtccggagtccgttttggacgtgtgagcacttgttgaaaagctaacttcatgacacacttggtggatagggcctaggacacaaattccttctggtttcacctcaagagccaaatcaaattgacggtgctgcagagaggtttctatattgtgttgtatttgattcgtagttagtttctaacacatgtaatggctatatatgcctttgtacacgacccctgagggcagaccaagtttaatcaaaagaaaatttgcagcaaatttagtcttgttcttcttctagagtatttattccgtggatgacaaatgtggtatatggtggaatggagtgtatgtgtcacgcctagagattagacaacccgaatcaccggctatctgtgcatttaacctctatccaggcatcaagcagagtacacagatgataatttgatacagttccacgtcttacaaaaatataaaaaaactcagaaaagcagcaaaaaaactaaagaccatctaaacttattcttctcagcaaagggaagcttccaccataatccacaggcaaaacctcgacgtctggcacaagcctaatcttcatagaactcaccatccgacaaattctctgcctctgggattgggaaaaataaagcaaggctgagtaccaccaccgtactcaacaactcataccaaggggaaggtatcatgcaaggatattcaaaggaatggctgataggatatttgaagtaagaagcagcatttataaatcataagttgaaagcagtaaaatagtagataattaagtagtattaacatcatcactatccaacgctaaaaccatgttatgataggtccaacccaaaccacctgaactacaccagttcattaggtcaaattattaaggtgagactagtcacggtgagctggttgaccgcccaataaccgcaggcacggctattcaaatagttttactctgattagagtgtacaactttactcacaagacacgattccacacatgttaccatgccccgaagtaccaccgagatactacaaagggggaaatcatgacaaaccctccatatagcctcccctaaccaacacacccacctccggtttcacccccatccctatacaggcaatgtgcagtccctgctcgtgccaaggtaaatccggaaggagcatagaccaaaatccaggtccatctgtactccatcactgtcgtaggctctccggaccttccattataattgagagatgaaatgaataactaaaatcatcaaacaagtacaatgaaatatccgacgcctcaagagaggaatattggagacattgctgggcctttagcctgccagtcaacttttgcctgagatgtgctcgtcaaaccactcgaaggcagcgaccagatgtgttacacattcaggagacttgacaaaaatggctaaagatctacaacatctcaaatattcttaactcatactcatgtgaatctagctcccaggatgtgcactagactcacactttcatctcaatcatagatatacatagcaaacacaattaagatgaaagtgattataaactacatctactttagttacattggccgaccggccaaataaataatagaacaacggaagcttgtctacccaatccacaagtgcaccgactagcggtttaccctagaagaagcagtcgattacctgcatcactcaaagactaagtctaaacctgcaaacaaaaggttaattcaacagcaagagtcagtacattatttctaggacttgcctaacactctacttgcaaggcatataatcaaagaaggcatgatatggttctttttagcataaagcaagttttatttgtataaaacatttccaaatcagttttgctttcaaataaatttcagcaagcaagtacttgacatattgggcatcaaagtagtcattaatcatgtataaatatacacctcattgccatccatggtagcaaggagatcattcacaaatctcatcacattttgaagttaaatttcagaatttagaagaataaacacaagtctatactcaatacatatccacacgccgctcatgaccgcgagcacggctaatcgattagttttaactctgcagagtttctacactttacccacatgatgcgaaataataatcatgcaagagcatggcacgcgataaataaatacccgatttattacccgcatcaaagcttttccaaaattcatgatttagccttacaccagcacgatacgtgttcctccatcctagtcatactggaaatatgacctagaaccgttaagtggcgggcccacgccttaaacttaatgccatggtggcggacacaacgggaaccctccacgtggcacaataccgttgtattggacacgcttagtcacctaaactaccacttcggggtaaatatgaagctcctctaaattattcaaactcatacacaccggcctaccagaatgtaaggctaaaccataaataatttactaagcttgggctatcccatactagcacatgtggttgtactgtatacgaaatgaactgacattgagtgaagtccttaggtcggtttgggcgcacactctccccctatcggtacacatctaatcaccatatatgcaccgcttgaggcccaaacctaaaatccatgttttccaccattttatttatcgaaataataagtattaaagttctgtccagattatttaaaaatcaattttcatgtttgtaatgagcccataatgacaaggaagaccattctaagcatggctaagcattatagtaacctagtgtcaccaaaactcatatataaagtggtatagtcatattgctcctaaggttatgaatgagggatatagatatatgtggggttaaggtgataatgcaaataataggagtttgtctaacgagtttaacaaaattttaatttattagtgtacaatcgacatgaaagatttgcaaacattttcaataacctctaaaacataggttcaaagtgatcaaagagagggagctgggacttgccttgcaactgaaaaatgtcagcacctaattcacttcttcaccgtttaagcaatcatctatacaaagtacacattatgcaattaaacaccgaaatatgcgaaaattccaaaatgctctaaaatgcttgatttgtgcacaatggataggtactggtataatatgaatttaggtgaaagaatttctattttatctctttttatttgagagttatgaattttagaagtttgctcggtatagggtagtatttatttaggtactattgtgaaatgctgttgtaaggtgattcttattaagtttatgtttgctgaggtgaagatatgtgttttctaagactaacacatttggtttcataatttagagttaatatgaattctttatgtattttacaagttttagtgtgttctaggcatatagtctttatgtgcacatggctttggagatttagatccagaacttgctctaacttgctagtgttgtataaaatgagtattttagttaactaatctaatcttagttcataattttagagtttatattattttactacacattttataaatacggatgttttatgttagttacttaacttatcaaccaaaagattgttgcatgagctaagttcatctaagttttggtagatggggatggaactatggctccactggtcctaacaagttttattttgatttatttggagctaccatgcatatatatacttattcatatgtattgtttaaccactattatgcgtttagtacctattcttccaaattaaggtttagagttatggtctgtacaaccaaattaaggtttagagttatggtctgtacagagggtgccataattcactctactaggttgaagtatattacttgctggttctacagaaatttggttcacttcatttagactaaagatgaattttctacaaattttacaatttaaggtatgctccatgttgcttattccttacataaatgcttaggggttcttattatactgtaagtatgtctttttattttataacattgaagtgcacaactctgtaattctatagaacttgagtttactcaaaaaggatctaagatgaattttatataaacttctaaatttcagcttatgcaaaactagttattttaaagataatagttttagaggcatttgatgtaaagtatgtatatgttttattttactttgtttttagggaacatgttggtggatatgtagaaactaagttttctctaaaatgagttgaaatgaattttgtttgcattttataagtttgtatatgctttatgtatgatttatcttagaccaaatttagaggctacatttgtactgtgagtgcaagtttttatgaaataacactaatttcatgattcgatgagttaacagtaatttgtattactctaaaacgagttgttttcaatttgttaacgattttacaagtttacatgtttttctgatgaaaatataaagctttaggcatttcatttagatttttccagaatttaaatagattgggtccacaggtcagtctcaagccaatatgcagaaaggcccttagtgtttcaggaaatcaacccgcagtcctgtgactgttctgtgtgtgaggtaggttttacaaagtagtacctagagttttgattcttctcaatcgaggtccttagattgagctgacacagagctagccatggccgagctcattctcgagctcgctggcggcaaacggcggcagatctcggtgtgcaacctaaggagaaaatgtaaaggggttcaaggtgaggctataggtggtattcttgcaagcattggtcatcgaaattaatggcgacggcggtgcgagcggcggtggttctcgggtgacggtgcatgtggagctagggcattgatctaaatgtttatctacatgcatgtgcctctatgggatcctaggatgcttaccgagcgtccaaagaaacttggcgaggtccagatagcgatgaccacgagcagaacgactcggcggcggcaagaacctccaggttgaacggcgacggctcaatcggctccaagaacaatcatgcatgtatgtccatgaggttattgaggccagagagatggtgtgtgcacgagtaatcgaataatggctcactggaggaggcggaatcgacaatggcgacggcgaccggaggtgaagaagacggtgggccgatctccgcacttgttgcgccattgcctgggattttttgaggggttttgaggaggacttcaaggagaagatgttggcgcgacggctcggcttggcttggtctacagcggttggaatgacgacgagaacccgacggctggcactcggtgttcgctccggagcaacgatggcgaggtccacgttcccgacgatccgcggcaccaaatgggatgaaacttagaggaatgaaatcagcttggagaggtgataatggaacgcaagtggaaaggcgacgaccgcggcacaatgtcgacggcgacggccgtcgtcttcatggccgatggcaaggatgagggcagcggaggcgaggcgatccctctctctcgatttggtctacacagaagtggtaatggagaggaggcgatgcagctaggaagagttgaaagcgagctcggcgttttgaggatggcgacacgtcgtgtacacgtgtcagccacgcccagaacgcctctcctccctctctcacgcctgctggtcggttaaaggagttggacggggagagggcaagcccaagtggctgccaagcgggcccaggtcgtggtaaactaggtggaagagagaggtgtgggtagaaacatgggtgagtttggtttttggacgaatttccggaattattttcctcctctaactttgtagcttcgtaacttaatgtgtgataacttaatgtgtggaccacattaactagtgttgattttactggaggtagatgattatacctagattccattttatttggttgcacttaaaaattatggatagattactcacagaaattaggagaagaggggctctttggaaactagtttggatttttaggagacctaaaaatagaagataaattctggaaaaaaaatatatttatttattataattaacctagtatttgaataaattattttccctatacgcttccatgcagctaaatgctcttttagacaaagtatggttttagctgattaggaattataattagtctattatttgagtggtttgactgatttattcgaggtataaaatttagttatgaaattataccaaaattacagtgagttgtatatgttaagtagagcctacatgaattttcccacgattttatcttgcacgaattattttagataattcgcaagacttatgtcttatatgtgtttccctttcctaaatgcatgtaaatgtttacaaaagttatatttggactctcaaaaatggaaaagttagcttccaactattttgactggaaacttttaaggtctaaaatttggatatgttataatcacgcccacccttgccaacggtgtgttagctagaaaagatatacttaagatttagcctggagcgcatctggcatgtggttagtacgagtatatcttccagtgattcctgagaaccggtcgttaattgtcatgggcacaaccaccaatcaaatcatgcatgtgcccacgacccaccattatagcatattttaattaattaattatataccaaggtggtataacatcatcataaaaattaaggactaaaatatagtgaatcccattgtgagctagttgatcttagcatggctaagcattcctaaaccaatcatctagtcaaattaatatcccaggctaccgatgaatcagggtattcaaaagggctgagtatggtaaattccatcccacatgacattataaaacaatgcaattttaagagaaaagcagggattttgcaagtacgctcaatatgatcaatgatatccatatgacttgccttgctcttgagctgacggaacctcagcgaccactttaaaataaactggagcgacggaactgctggagtctaaacgacaaacaaggcacacaatgaatacaagttaaaagctactgaaacagcaaaagaaaccaattttaatggattcttgacgtttaacgaatttactgcaatttgaatgggttaaaatggagctcggatgaattagatatgaattttacaaggtgaactcttttattactaataaccgaaaaaccttaatcatttgacatagattattgcccaaaaggaaatatgatcaaaggatagattaacattggtgagcgaaccttacgagataccgactcaacgagtcaaatctacgtgacacgggaccatccaaatgatcaaccgaaaccggcgaacgaaaccggcggctctgaatggctctaaactaaggaacgactcaacatggatgaacgaacgaaacacggggcgacaccttgttcaaactaatgagcgagtgactcaacaatggctgcggctaaatcggtaggctagacacgatttagggtaaagcctcggtacggcaaacgataggccggtaggaatttgtggttgcacttaggtgttggtatttctgacgatcataaataaacccgcaagcgcacggaatataccaatatagcacttcacccgggagtattcttaggtatcgatttccacagggaacgtgtgtgctaactccggttcaggttcatccaaagacacgaagctatggataggcaaaggatagagaggtttcaccggtgaagaacaatgtctacggaaagcttaacttcaatcctaatgaggtacttcgggcactggccagctcactgctcccagatatcgctgtactgcacacccggacagggaggacttagtgatattgagggctatcaccacctctacacccacctcacacctactgtgggatggggagcaaacatcggaaatcaactacctagacaccgcatctacgcagttaataactactctagtgtttataactcactaaagcaatcactatagtttagttgattatagtgaacgatgatcccacactctgaataggaactaaccaataaataattcttaaagagcaaaactaaattattcaaaagatatttcaattataatcagagtaataaacagagcagaaagaataagaggaggattaccgacaactccggagctcctccgaaatcttctactcaactctctccctaatcttgtataaaataaagtacaatagatcctcttataattcagctcatgcttcaagtgtgtgtttacaagtgaggatgagaggggtatttataggtagagaagtgccttgggagtgtggagatgctccaagcattcaaagagcatcttctctcatgtgttgccaagtgtcccattctgatgacggtttctaccggtattaacgccataaccgtcaaatggaagtggagcactaccgaactgaacttgggcctaggccagcagcctctgtcagggttcggccgaaccctagccgactccattaacgccgattttcggcgtggacattcattttgggcccctcattctattggtatggatggaaggcccatttggaggtgtttaattgggtttctgggtccaaaactccatatgttcatatacgcttttgattctcctcctccttcaggtatatttcttctcaacttaggtagtttgtcacttgcatacgaatatacacgaacactcgtggaaattgttagaaataaaccctacaactatgttggatgtttatatttatggttttatgcagatattgatggcttaaattttgtatttaacagccgtcaacaaacccacacacttagctctttactcgtcccgagtaaaggttaaggattaatatggaataaaatttcccaaaatataatacaagtacacaaattattcttagccatatctgcacctgtgaactttgagtatctaacttaccatcttgggtaattgataaatggaacggtcatgactcaagtccttcatgttcctcctgtcaatctcttggggttttcatatattttcacaaagtagctatactcctcaatggactttctctcaaatcactcatgtggtttgatttgtggatcttcaccaaggcatgtttgtcaaaatgtctctattctaaaaggctagataggtggagcttggtagggatcaattggggcatacctgcatcacatattgcaaagccaaaagaccggacccaaggagatagcaagtcatactctctgatcaagaatgtgcatgtgtgtgatatgtgtacgtgtatggcaaattctgtggatggaaaaaggaaaataaaagacaacaactcctttcgtatacatcctcctccaattttctctctttggaaatttgagagagtgcatggctatcttttttcttcttttttttttcatcatgccacatactttgtatgagcaagttttttttctctttctttttgttttcactgctccatacttgtatgagcaaggctttatttctttttcttttgcatagccatgcctctctctatctttttttcttttgaaagaattttggaggaaaaggcataaatgacatggagtttttattttgtggataatagataaaataaataatggaagagagatgctagcttgcagtgtagaagtttagcataagtgtgtgtatgtggagtgtacgtgatcttgatcatgaaagtatgaaaagcatctcacacgggtcacaagaatttgacaaagctcaatgtaatgccatgtagcctaaacatatatcaggattttgtaatgagaatcatatatggccttggtaggtaataatatagtcactgaggagtattgctcgaaaagaatttttgattttcacaaaataaatcccaagtatcatgacagttggacatgaatttctattgtcataaccatatcacatatatcaattacttatattagcaaggttccctatgatagatggttgttcacaactaacaagtgttagcaaagaataaaaagtatacatgataaatcattggaaaattctatctgttgagtgttaatgcttcaattttcatttggagccaaactaaattgtgttcaattttctaccaaagtttaactcacaatcatgggaggtgtggagattatgggtaccccatacccacacgatatggttatccgactaattataggggataacttgtatctatggaatatgtaacggatcatgacatgggtattacggtattacgtttccttgtatattatggaatggcctaaagtcctggtttgctaattttgtaaagtagatttagcaaaccgatactgcattggttaaggtttctatcttgtaatcttgccccccatgctatataaggtggacaggaggtcctctaggggggcatattcacatatgatcatcagatcaatactacacctggcggattcaaattcccaaataggagtagggtattacctctcatcgagagggcctgaacctgtttaaatctttgtctccacatccatccacttttaggtctcgtgcgctaccccattttattgttgccgaattcttgtttcgacaggaggataaggaaggacacctacaaacctgactacacggtgaaggatgacagcaccgggctaggcaaggggcgagagaacacttggttcggccaacccagctaggacatggttctggctgctgagttttgtgcgtgtccgtgggacaatgttcatcatgttgtccaccggggtgaaataccggtgagccaaattttattcaagtaactcaaggcacatgaagtgcctaaattttttttttatttattttcatattttttcatggcaacaatggaggttatgggtaacttagcagggtggagatatgaggcgcggatgcacaaggtgtttcagatacttaccagacggatcttaccaaacttagaactgaattgaatgcaacgaagttttgcatttgttctacttggttccctgtgcaacaagcttcacagctttctatgataccaaggagcgtgggattggtgttggagttattgtacaccgctccttggttgtcactttattccctgcaaaaggttagtggacaacaaatactagagggactacaaagaattggaaagattttttcatagcctcaagattaattgttaacatctacgctaaaaaggaattggattcaaaacttaggaagcatggatcccacaaatttgccataattttattttgtcttcattttttttcttcgagagacatttcttttattctttaaaacattttttttaatgttttattgttcaccaaattttcattaagcaaaaactcatacaggacttacagataaaattgcacgatcataacaaaggagcaattgacagtatacttactttgcaccttgaaaggtgatgtgttactctctttgcatgtttgcaatttattgatttgtttcccgaaccctgacttacctctagtgtgaattgaacttgaggactcacccatgaatttgaaaactttcctgcagggggttagtccacaaaagatatgcatctgaaagttcattaagcaaatttgactccatgtctaatttgattaaagcagactatctaaacctatagatgtcttgcgcaaacacccaaaccagagcatatgcaaatagacacaagaaacataacccatgtatgctcaagcctcattcaaataaagataagtatgagtaaaagatgtggtgaatctttcgctaccttttgtatacctaagtgtacttaccgccagcacgatgtgtatgttgaattctctggagcggtgctatggtcgcatgtaattgtcgatctcccatcagtcttgatgcggattgtggcaagggaaggctgatgaggacacaactagctcgcatataaccatgactaccttatgtattagtcaaccaaaggtgcatatgttctacattagatttacttgttatatatttgaacaaacgttgctacacaatgagttttgtgtgttttcgtttgcagaggtagttgcttgggcgaaagaaaagagaccgagcataaggaatgcatggatgattgaagaagttgattggggaccaaaccaagaccttctcctagtcttctttcatctcaccacgtcacttttggtccatagaagacaagaaataaagttccacacgttttgggttcggattcaggcctcctgatagcaccaacttcaaatggacctagccactgatcaagaaggaattttggggcccatgagtacttgttggaaagcttatggagtctaatttcagatggttttggtcccacgtcaaaattcctaccgggctgccgggaatctgcaaaacaagccatgtacctcatccaatctgtatctgatttcggttttgggccttgtaattgtgtcgtgggctcccaagggggtgtgcgccctagggcaaccctaggacgtccctaatcataattaatcagtagccgtcgtcgtttagagttgggttttgcttagattattttgttaagaacagtttcgctgctagatcggtttgtggaaccccaaattcgagtgcttaataattcatatgcaattgtgttgcaatctatcttgttcttgcttttgttcttctattcgcatgcagggattagccttctcggcgaggtcaaccaggtttaggcacggttgataaccagaggagacgtggtgctgcgattgcggggcttagtagcgtattcgttcagaagccagatcgagttgtgtcgcgactccgcccaaatcgattgtttatcaatacctatcggaagattaggacctaactccctcatcagttggcactttgaccacaccaactcaggcgagtggttcggttatgcacacaactcgggtgcatgaaccttatgccttgaaggcgtgttccattggtagaatgctgtagagacgtagggtgcatctctttttgggcaaatatgcaagttccaactggagtggagtagcaaacacctagaaaagaagagggcgtctcctcttgcttgtgtgcgagtaggtgctgcgggagcgagaacttgtgcacaactaggagtggatgaaggctaaccaaggcggcacatgagctcaagagaggggctgggtgcagccaagaagaataatagctactggcgaggtgtatagccagaaaagactcgcacataatgcggtctttgatctagatcgtcagccctcttgctctcttcctcttctcccattcttttttttcttcttttcttttgtctctcttttctttcttttttttttcttccacacttttttcagcaaggtaagactaacaccagctttaaaccaagatggcctaggttgacgaaacccgccaggaagagcttgtcgacctccctgcctcacacttggacttttgtgtcatgagacgtcaaaaaccaagtatgtgagactgggatcttcataaagtgtgttccaacacatgaacagttgatgtagctcccatgttcttaggcatcgtacgtctctcgttcttaatcttcacctgaaatggttcttgcttttattggaaagaaaacttactaagataatccggggtgtctcccggtagtgttttgtttgtggtcacaagctcaaccattgagacatcatgctgcaagattagtgtgaatacaaatacgagatttgcagtatttatgatagttaaaagcatccacaaccacacttcaaaacatgttagaaatgagggtcgtaaggtggttgtggtccttgtacaatgaagtggtactaattggacagtactctggggattccttatgagagcatgtatcttggggaactttgaaagagaggctttcatgctcatttgtggagttcgcatcctctagagttgatgtctcaaacttgtccttggcctgaaagttctccattgaaagaacggggttgtttcttgacaactgtcgagaacaacatcttgagggccaaagggacaaggctttcgctcgattggaggttgtgatggtggttctatggagtgtaattcaaaagtctcgccagaatcttctttttcaatgaaacaaagatcatcctgttctagaatagattcaggggacacatgaatctatcagggggatgcctatcaaggttttgtcataatcgctatgaggatcatccctgaatttaggagtgcaacctggagcttgatttctttggaatccggagatggctccaaggaggactctttagtcagactttatgatattgcgggcttagattcaggttcggcaaaagaaggttccntccttcctgacacnnaaatgcctctggacggggctcaacacactacccggcaaaggaggtattttccgatatgcgatcgagaatttccttgccttcgcgggagttttgtgcatgaatgaccctccaacagttatgtcaaggtagaatgcagactccctatctaaacccatatggaaatgttgcaatagcacgtaatcaggtatagaaagggttgggccagactatactaaattagtgaatctggactaggctgcacaaatcgattctctatttatctgctgaaaactcagaatttctacacgaagagtagtaatacgggttacagggaaaaatgggaggcataacctgtctcgcaatttctcccagtcactgtttgcacacccgacggtaaatatgtaccattgtttcgctctcccatgaagtgagaatggaaataatttccaccgaacagtctcttgcttcatgcctcgaattcctgcagatgatgtagcggttttcctggcctaaaccatagaaagatttctccctaaccatacggatgaattcgagacgaatttcattgccaggtgttaaaataggctccgatgaaggaggtggctcgtaaaattcgccctgaggagcagataattggaaaatagattgcggctccatcggttgagaaggtttactggaatacttctcggggatagcaggggtaaaggtagaagtaagaaaaataaaaaggatacgaggatgaacaaggttcggagatagacaacaatcgttccccagcaacggcgccagaaatgcttgctggtatttcttacgatcacagataaatccgcaagcgcacggaatataccgatgtagcacttcaccgaggagtattctcaggtatcaatttccatagggaacgtgtgtgcttactccggttcaggttcatccaaggacacgaagctatggataggcaaaggatagagaggtttcactggtgaagaacagtgtctacggaaagcttaacttcagtcctaaggaggtacttcgggcactggccagctcgctgctcccagatatcgctctactgcgcacccggacagggaggacttcagtgatattgagggttatcaccacctctacacccacctcacacctaatgtgggatgtggagcaaacaccttaaatcaactacctagacaccgcgtttataactcactaaagcaatcactatagtttagttaattatggtgaacaatgatcccgcactctgaataggaactaaccaagaaaaaattctaaccgagcaaaactaaattactcaaaagatatttcaattaaaatcagagtaataatcagagcagaaagaataagaagaggattaccgacaactccggaactcctcccacttcttctactctactctctccctaatctaatacacaaggattagattggaaaggaggaatcttagtggaagtaggattgggagagggggagggagttggataggagggggagggagttagacaggagtgggtggggtgcagtggcgcgcgcgcgacaatggagggagggaggcggcggccgagctaggagagggggagatggggaggaaataaaagaaaggaagaatggattaggactttcccaaataggaaaaatcaattcggtgcggcagcttcgaattaaatatatgatgtggtctcgctcattttttaaggccgttttaggaagagaatggaaacgatcccgcaaacaaaaacagacacggttcgccatgcaaaacgaaactacgaacagagaggggagtgaattaggcacaattcacgaccaaaggcacaaggaagaattattattaaggtgatcttgacacttttaaacttagcaacactgcctgacaattctgattattaaatatattgttaattagggttttctcctggttaaccaaagcaatttctatagatcatttattagtgacttggaacctaagggaagggaaaactccaggtgtgacaaacctatcccccttaaacagaatcttgtcctcgagattcggaagaactggtgaagagatggggatgggtggctttcaactcatcttctctttcccaagttgcttcatcttacgaatgatggctccactatagtctgcaaaacctgatcactttatttctggttctcctctcactggtctccaaaatacatgtaggcttctccacataagtcaaatcctcctgaatctcaacattatctggacttgctggttcctcaagcacacttaggcatttcttcaactgagatacctggaatacatcgtgaatgctggccatgttaggtggaatttcaaactgatatgccacttcacctctacgttcaagaattcggtatgacccgatgtaacgttgcaccattttcccttggtctgaaaacggtgcactcctctgagcgacataactgtaaggtacacttgatcaacaacctcgaaactgagctctctccgatgattatcggcattgcttttctgacgggattgggcaatcgtcaatctctccctgattgctcttactttcacttcggcctaactcaacacttctgtaccaaacaactgacgttctctagtttgatcccaaaacagaggcatacgacactttcgaccttaaagtgcttcaaacggtgccatgtacaaactagcttgataactgttgttgtatgaaaactcagcatacagtagattcttatcccaagatccaccaaaatcaagggcgcaaactctcaacatatcctccaaaatctgatttacttgctctgtctgaccatcggtctgcagatgatatgctgtgctaaagttcaaacgggttccaagttcctcttgcagcttatgccaaaactttgacgtaaactgacttcctctatcagacacgatcttcttcggcacaccatgcaaacagacaatcctcgaaagatacaactctgctaacctctttcctatataagttgtatgaaccggaagaaaatgtgccactttcatgagacgatccactattacccaaatagaatcatgacctgatgatgtccttggcaatccggttataaatccataccaatttcttcccacttccattctggaatctgaatagactgcaaacctgctggtctctagtgttctgcttttactcgctgacatacgtcacggagtgctacgaattctgctatctctcttttcatactgaccgaccaaaacttctccttgaaatattggtacatctttgtgcttcccggatgaattgaatattggatctggtgagcttcactaagagtcaactccttcaactctttgttgtcaggcacacacaatctttcacccatccatatcgttccatgttcatcctcagtaaaatctcgggctttatccactcgcatatttttcttaagctctgctatctctggatattttgcatgcgcaacgagtgtcggctgtgcttccaaagcggcaacaaaaccatgttctacaattcccaaattcagacgttctaggtcttgtatcagttgagtacttacttcttctaagcatgttgcattgcaataatttttccggcttaacgcatcggcaacgacattagctttaccaggatgataatctatacacacatcataatctttgatcaactctaacaatcggcactgacggagattcaaatcgggctgggtgaagatatacttcatgctcttatgatcagtatatatatctcagaacgattaccaatcaagtagtgtcgccagatcttcaaagcatgaaccactactgctaactccaaatcatgagtcggataattgtcttcatgtgtacgcaactgacgcgaggcgtaagcaacaactctaccttcttgaataagcacccatcccaaaccttgacgagatgcatcacaatacacttcaaaatcctttctctgattgggcagaatcaaaattagagcggacactaatctcctcttgagttcctcaaaactctcctgacactgcgaagtacgaacaaacttttcctctttcttcaacaactgtgtcattggcttggcaattctcgagaaattctcaatgaaccgacagtaataccctgtaagtccaagaaaactcctcacttgcatcactgtcttcggtggaatccacttagtgactgcttccacatttcacgaatcgactgctactcttttagtggtaataacatgccgaacttgacttctttcaaccaaaaatcacacttgctgaacttgggatacaactaatgctccttcatcttctccaacactacgtgaagatgattcccatgttcttccttagactttgaataaaccaagatatcatcaatgaaaaccacaacaaactatccaggtattccatgaacacattattcatcaaattcatgaagaatgtgggtgcattggtaagtccaaacgacattactatgcactcgaacaattcatagcgagtcgtaaaagttgtcttaggaatatcctcctcgcgaattctgaactgatggtaacctgatcacagatatatcttcgaaagcacagttgctcccttcagctgatgaaacatatcatctatccttagcaaagggtacttattcttgatcgtaacatcattaagcgctctataatcagtagacatcctctttgtcttgtctttcttctcaacaaaaatcactagagcaccccaaggcgatgtgctgggtcgaatgtatcctttctgcaactgctcatccacttgcttcttaacttctgccatttcttcggctgccatcctgtacggtctcttgtagatgggagctgtacctaggaccaaattgatacggaactcaatgtctttctttggcagcatagctgtcgactcctccaaaaaaacttcagaatactcacaaaccacaggaatgtcttctaactttgggacatctttcatgacttcatcctgttgttcactttccacttaattcaagcttacttctttcttctgaataaatggagattgaattactaccacttctccatttcaattaaccaacgtaattgtgcggcttgcacaatcaataactcctttatgtcttgtcaaccaatccattcctagtatgacatctaggtctttgcactccagaaggataagattggctagaaaaggtgacccttggatttctatcatcaaagaggaacaaaaactaactaatgttaagctattacttggtgtattaactttcatgggagtactaagttacacttttcttaacccgtgtacccaaacaaatctcttggatataaatgaatgcgtagcaccagaatcgaataaaactgtagaaggaattgagttcacagggaacgtacccaaaaccacttctgacgctgcttgagcttcctttgtagacacatgataaacacgagcttgaacgaccttgggtccattgcgcattgttttagggcacttatttgcaaaatgtccggtatctccgtagttgaaacacataaggggcttttgttctgacttcttctttggctggtggggctgcaaagcttgagactgggcgggcgcggaactggattatggttgttctgatttccactgttgcctcggctgaaatttcctagctgatatggcctgtgctatcgaacaatcataatagtagaaccactgtgctgtccataaccacagcgatgcttctgctgtccaccttgctgaaacctgaactgcatagctttcctcttgcgatctatcttgttacgttgatcttcctaacgaatggtcctgtccacaagtctctcaaaatcagcatagtctttagaaatctcctggttagtcaatgttgacggtccttaaatcataatatttgaccatcaatacttacatataatgaaataaaatatggtatccaacttagtggtagggtttataactaatcatttctaccagtattgatgaaatatgtgtgtgcagatattttgaggagaaaacacatccgtcatgcgacataatgcacctctgaacattcaggacgcgtttacacgaattggaggcaaaataagtcaataaaaaccatctaggattgggccaaaacatagtgaaggatgttgggggcccattaagcaacctaccggccgaaggaggggccgggaggacgtttttctagttcttgaaccaatcctggcacctcccgccatctggcttcacgtggacggctcggatttctcccctatggcggttgcagggtgttttggtcatttcccatgcccctaaccgtcatttggaacctatataaggaggtctccttctcacttcaagaacacacaactttgagctgaattacaagaggctctattgtatcttttgtacattagaataaggtagagagtgaggagaagctctggaggagtgcccggaagtttggcactcatccgacttctacctcgacgagtgcagcttcctaggagaaattatggaggagtaccggagctatcggtacactctgctccaggttcggagaa

SEQ ID NO: 19818 - DNA, 4597 bp, Oryza sativa
atatatatatatatatatatatattgacggagcgtggggctcctcaccgggagaccgcgcaggccccccctttaccggttcgaccgggggcgctgagtgaggttcttcaccctcgatatgtggaacgttcgcgagagagcaaatgcacaagacacgggcgatgtatacaggttcgggccgctgagaagcgtaataccctactcctgtgttctggtggatctgtgtatgaagaagttacagagcaaatggagagccagagagttcaagctctagaacccctctttttccttctcttctggttctctttccctcctccccttaggtgggcaaggtcctccttttatatctcaaggggataccacatgcactactttctatctacccttcttttgagtggggaccaaccctatcttcaccaaatcttcgactcgcgccttcgcctggaagctaaatcaccgcttgcccttgagtgatgcccagcgccgtcactcgtcggacacaggggatcactctgtcatttcttcattaataggaggagatctacaatggccgctgtctgaatgaccctccgatgggatgggtcatacctacctccactccgccggaagcagatgcaacgtgggagcacggttgtctgccgatgacgtgaccggcgtcagtccagtcacagaccggtcattcttctccaccacgtgtcagtttagcatgccgcacatctgcccttcttcatacagtgacttccttgcaatggttgcgatgaagcctggcatgaatcgagtcgggactgacgtgctaactccaggagttaccacgccggctccagctagggacgagtgccaagaggctctcatcattccgacgggacggggcgaggcgtgtgacaggccgcctgctgccacctaacccgcgatcagaccgatctgtgaccggtcacacactgcgaccggtaacggaccggatatgtgtgcgccgtgctgcattaaatgcggcgtggcgcgcttgtccattctgcaataaatgtggtttggtgagcgccgctgtgcccacctaacccacacacgtggcgccaataccacagggggtcgtggcgccccagccctcggggccgaaacaggagcggctcgaccccccgagggggtcaggccacgtgggtgactgcggctgcccaagcctctagtcatgatactcccggtcccatgtcaccgacatatatatatatatatatataaagcctccaaaaacccctctctctcatcctctacacaacacacgcgtgcgcttgccttctacacgcacgataatgcgatgcaccagatcgaggcaactaagtgatttcataaggtgattacgatcaccacaacgctaccagtttgtcaaggtggggacacatcaaattatcgatggataatgattgtttgttaataaagtgaaaacaaattaaacgtgtgttgcagaaggaaattaattaagtccagtgggttaagtttttgcagcatgcaactctatgtaagctaaaacaaagggttgattacccaattgtagttataatacagtggagtcttcctgtttttcctttcaatctagattttggattttcatttgcacgtttcccaagtttctaaatgatgcgtttcgggaaaacaaattctatatattttgttcttaaagcgctttttctataacagggtgaaactagaacgtaaattaccctatgtcccgcacgtatataatatgtagttaatgttctagccacatgtacggttaatgaagaacatgctttgggcaaatcattttgtactctacgaccatggatgagaaaggagcattgtggtgttgccctttatgttaactaaacaaatagacaaatattgtctatatgactttcacgagatgattggtaagtggaggacactactgagcaatgagtggacatagagtaacgataaatagcgtatagctatatataagctatggcatgatgtgtcactttttctttgattccgagtaataacaaaggcaccagtaagtaaggagaaaaaaacaaaataagcaaaccattgtttttaagtaatcatattttttaactaagttttgttaattatgatgataaatcatactggacttattgattataatttacatgataaaactatagtctttgatataattggattacatgacaagagccactttactacagaaaacttcaaaatttataagtacactacacatactaatcaatttatacaatttttgatattttgcattaccaaaccaagcaattgtgtgggtgatatgtatcctaacatacctttaaagttcttcaaaactgtggaagaaaaatgaaactgttgtacttcgacagagtaaaaaatatacaacatttaatctatccttaatttggttgtcactatatcatgtgccttcatgagatgattcaatccaaagaactttgatttccttggtctcacaagttttgcttatagccatattacacattatgtgtacggatggtacaaatgataattagctatgtcagtttattattaagtcaattcaaaagtcatgccaccttaatacatcaactattcaaatgtcgatgaatggtttttaagatgcgtgtgaccttgagttgcccttaatttatacgacatatatcctatcttactataaaattatcccccactaactccttaagcttaacatgcaaagatgccacatcatcatccactaacaagataccacatcatcattcactaattaacaagatgccacatcatcatccactaacaaccatcacatttaaacatcatacaaacatgctatatctttatagtttttaatttaatttaagaacttttcaaatacaaacatgttaaattatcatccaacataattcacataatatttcaatgtatatctttattatgttttatgatatcctatatacttatatagttcatcctcacttagttagtgcttaaatgattaatctatggtccaaattatctttctcctttttttttctctaattaagtcatatcacatcaattgtttttagcctttagatgattaatctacggtccaaactatctccctacttttcttcttccataaagtcataccaccttactttttatgtttgaatcaccattctacatactatttaaatttaagttatcataaaccatattaatttacttaatctgatattatctagctattttacacgttatttttttattgttatcatactaaattcccgcagcaatgcgcggggtttcacctagttataaacaaaatataatcttacatttaaacaatattgatgcccgtgcatacacgcgggccaccttgctagttagtttaacaaagcagaagcgtaaataatatttttattatatgagcgagagaaggcccaacacactagggcgaagaacataggcatgagcggacttcaactagtaattaaataatacttagtgttctgctctgaccgattccagttaagccaatcaacacctaatcccattcggctagtttttttggaagggcgggtgatcgtggtgcgcaatcggtccacgcccgaagcgcacacgactcccgccatagctccgtcccctccgatagtgcaacttataacaaatacttcctccatcccataatatagtaacctaggactatatgggacatttcataggacaatgaatctagacatccttctatccagattcgttgtactatgaaaagtcttatccagtacaagattgctatattatagggcagatggagtatattttagattaattttaaaaaaatgtttaaaacaaaaaaaaaatcaaatgcgctaaaaatatacatgggtatagactttatacatcgaaatttatacattgtaaactttgcaagtacaaacctttttaataataaaaatatttaaattcatatatgaatttgaactggacatataaacttttgactgtaaactttaagtgtgtaaacttttggaatataaagtttggatgtggcttccctgttcctctttcctgttccttgccagatgactatcacttattggtttgtattttctagtagcctccacacccttgcgcctccttctcagccacgtatagatagccaaaaggcccgaggcccgacggcccggcccatggcacgtcattttggcccggcccaagcacagcacggcccgacggaggtcgagcccgcgccggcctggcccgaccaccgggccgtgcctagacccctctaccgacacgttgggctggcccggcacggcacgataggctggcagccagacccgatacacaacaaaataggggagtaaaaatagacatattatatgccatggacgaaagaatagggatgtgtgtatatatatatatatatatatatatatatatatatatatatatatatatatatatatatatatatatatgtcagcccaaagaggagggaggaaaaatagacttattttaaaaaaggcccaatgttccacccgtgccttcgggccggtacggcacggcccgacagctggtgggccgtgtctgggcgggaggtgcatcccatgggccgg

SEQ ID NO: 19819 - DNA, 8556 bp, Oryza sativa
aatgtcagatccctagaatgtatagtttagtaacttgcaagtgtaaattgtttctatacttaatatattaaataaatcaattgaacatatagggaaaatcagtgtcatattgctgaatcggcctcccttgatgcaatccttgactttcttgagtcagtaacagaggagtatgaaatgaagtatgtgtggatgcatccagaacagcgctatactctgatacgtgtaaaaaagcgtggttattgggaacctctagatgatcctaaccaagaaaaagtaatggaaaaagatcagcgacaataatcaacgcaagcagtttcttttaagaaaaacgattatgtgatgagtataccattactgtatgtatgtactggttgtggttgtggttgcgctcgcatctctacaggttgaggatgcggtgattgggctgagacatcattgatcttctttcttttcctccgtgatgaagctctgtctaagccgccaataggtcttgctgatccacgaatttcctttttcttaagtttaatacctaatggcttcataggcttctgattttctttcgcacctgcaaagacaaattacaacatgcatatttcaaacaaaaaatatgtgtcgggtctcaaaactaataacttggatccgactgagattaatgtaccaatccttggatcagtaaatattgatacatgtaatacaactgaattttcattgcatatgttaaattttacaatactatgggttttacaagagtaggtactcacttaactatacttagacctaatgttatacaacggaaactttaatatattttaactaggaatgaataaactctagggattttctaggttatcggggtcatcatagtaatagttataggggtccttctcttgacccaaatctgaaaaaaggagtaataggagcaagggtgagtatttgcaatactcagcaagttattgtggaaacatgtcatgcattggtataagtatggaggggttcttttgcacaaagcaatagtagacaatctggtcaattaaagcaagaatttataaaataaattattcaagtttctaaccaaagtaccatatgagtcccgatgctcaaatccgtgagcacggctattcaaatagtttcataatcattctattgcagtagatatacgctttacccgcaatccatgacttgccaataaacattagcttagttatgaccaagtcattaggttactaacaacagtggcacctattccatgaactctagtccccatgtgctttgaacgtacgttatcagcaatgtgaagagttctggtgtttccggggtctttagagaggattgattgtatgacactatgtcatcgcaatcagggtttaaataaaattttcccttgctcgcatagcgcgcaatatatttacccttgctcgataaatataacattttccctcctcggcataaacttgcctcatgctcgtggacttaaaaacaagaaccactatacagaggtaccactttgttaattaacataatagctaggtctgtaccaattcgagaactgcggtcatacacgttcgtttgtcacaagtacttggtaacatttatggcgactgagacagtactagccacccgaaaatcaacccattcttacgtactgtctcaatctaagtataaagcattttaatcagattgtaagcaaaataagcaaagctaaattatctgggtttctatggttgagttatgcatatataaaagagaatatttgaatagaagggctataaataaataatttataaaatataggcttaaatgagcaagaggtgaacaataacttgccttgctcgatgtcctaagattgactaatattatctagtgtgtcagaaaaatcctcaagacctagggttaaatatataaaattcaaattcaaaagggattcgaatgaagtccaaaaataggaaaaaataaaataaaatgagaaaatagtaaaaatagcctcaaaagatagagaaagattttagaagaattttggtccaagtttcactagaattggttttatatttcaaaagatatgggcttctaaagattaggatctgaattaaatctagaaattgtgaaatagtagtgtgctggggcccacctgtcagtaactttctttcccttttctttttctctccttctttccggaaatgcttatcatcatatgtccgggcaaggaaaaaaaatcggacaccccaacagagtggtaggtgcatgcagccagcatgcatgcaagtcggatagatctaaaatttaaaatttaaatgatcttttctgttgaactatttatccgaactatgaactaattataccattagatttgtgacaattaactctttataatgagatctcatatgactatgttccgatgatttttttattccaatgtttcaataagtatttattgttgtttcactgattcatttataatgttgcacgtggtctttttatatgtttcagtaaatatattttttattttttaaaaatttcaacaaaataaattattttcaaatatgttgtatcatattttttatgtttctctagttgggatctaatgtttcatgtaatggtggttattgttgcagtctgtaaattttatatagttattgttgcacgctatatttctatatgtttcagcaaataattttttatgttttaaaaattacaagtggacgtttcaatagtgatataaattttaacaaaatcaatgtttacaaatatactgtatcatacttttttttatgtttcactatttgggacataatgtttcatgtaacataggttcttgttaccgtttgtaaattttataagttacatatcactggaacattttataaagtgggctaaaacattcgcatctatgaatggtgcaacaaaaggttgatttttctagaacacatatattttcttaatcaaaatatattcgtgtaagatcttcttataaagatttaattataataaataaaatggtataatcaaattatagattagatacatattttagttgaaaattttgtttaaaatttgattaaacaaaaagaagagagagagaatgtagagtcaaacatatatgtgatgctgtgccaaacctctgtcacccctaccactcgctgcaccgctacttctcgctgcaggcatgcacacatgcagtatgccatgcaaatagataggcagagtgtgagcggcgtccgatatttggagaaataacggacgtccgattcctagcttgctcgccttctttctctcgtcttcttctttcttctttcttcttccagccgagcaactgagaggagggggaagaaggggcgccagggctctggtggctgggaggcggcgacgccggcggccggtggtgtttcagggagcggagcacctagggtgggcagtggccggcagagggagttaagggaatggtcggaacggcgagagcaagactgtgaagtgtgaaccggcaagagagagagagagagagagagctccggtggggcttgacatgggacgaaaaagaaggggaaaattggaaaaatgggttcgccggagtgaggcaaggctggtggtgagaggatttggttagtggtgctccggtgagggagatcggccgatggtggcggcagctggtcttgaggaagagagataaagacagagctcgaggggctcggattgtgaggaaaaagaaggggtttcgccggctatttataggcggcgaggggcggtggtcgatggcggttcaggaggaggtcgacggcttggccacggcgacggcggcgcaaaggaagaggagatggcgccggctctgtactccgattggatgtcgatggcggcgcgcacacgtggtggctgaaggggatttggacggcggggagggggagcacggcacggcggcggcggcggcggcgcaaaccgtgggcggcggcgctcccatggcgcacggcaacgacggctgcagcgcgtgtgtggcgtcacgcgcgcccacagagaagtgaaaagaggcggctgcctcttggaccgacttgggccaagacagggaaaagggccggaagggagagaaacggatttcagcccaaatgaattatttaggaatttttgaatattttggctaaggagaaggaattaatctaaggcctttgaaatgttttgcaagggttttagtactatggtaaggtctcacaaatataagggtgaactaaggaagttctctaggttttgaatttgaaagaaatttgctagaaaataggttaagggaattctaggggcaatacttgaaccaaaatcaagaataaaaggggaaattttaaaaaggattttgattttgctaaattagggttaaaatcaagtcaaaagctagcatgatgcgtcaaattttaattttataatttgaggatattacattgtgatccaatcataggactaataattactttatagaattgttaaacgaaccttctgaagacaagctctctaaatctggatttcatctaatttcaagcatttctctatgtcttctgccaatttttcagcacaattagtagatatggaatatgtttcttcaaactatctgcacaatgagaagtatcaatctgataactttattctattatcatcatgcgtgttaccactgccacttatatgtagtacttttgcatcaattgtccatctttttagtatatacatttgaggaaccgatatgatgttattgatgtcaagtactttcagggcatgagagcacaggatgccagcaaattcaaacttcttgcagctgcatttgacactagattccaatggtgagaatttaacaatgagtctttcttaagtgcagtcagcataaagctacataaaggtaggcacgaccaatgagggagcgccacccgtcagctgagtaaataatgaggttaatttaccccaggggtattacggtcatttggacaccggcgtaaactctaatcgttagtttactctagtcgtgattccacaccggaggaacgtacgcagtgttagagttcgccggagaggacaaaggaatccccggaaagctaagaggcgagtggaatgttcaattatgtgctagtttttatggtttacgctctatatcgcgccgctattgtagatcgcgtttagagaaagccattgcatcggcacacgtaaatagtggtacaaatgatctaatgtagaagatcctagctaaaaccaagcaattgtggttacatccgtttacgttggtctacaaatagaaaatacaaagtacatagccacataagatcgatagcactcctctggtatacaatatgagaacgaacaaattttatggtaggccaggctcacctaaatttagcaggtaatcctctcaaccgtgtactgaataacgataggagtaaatcccaaggtcagtcaattatgaagcccattttggcagtaaccgttttatataatagtcctttatatttccactattacaagccaaacacagcatcgattttattgttagccccttattattatccaaaatattgaaaatgtgatatatataatttataattttgtcaaggtcttgtcctcgggtcaccaccatccacagattgcggacgtaaacacatcgattctactcatacgttcaacgtgcctgtttatgtgcgcaatcccatggtgtgcgtaaaccatccacgtacgttgtgaacgcctagcgttaaagccttgtaggcacgggcaggggtgaaccttgtaggcacctagcgatctctgcgtacgcatagagcgtgcatgactcgcgaaatagcatatcagccatcacgcacgtgtaaaccgtgttgtaggcggtacgctctatgtacgtttttacatctgaaatcctgacgtaggcgtaatgcacacagctcgggcacaatgatgttgtatgggcgagacgtgcgtgaaggtttacacgtacgcgtgctgggatcgcaagttgcctacatatggttcatgtctgcccatgcatcgtggacgtaaactccttcttcgtgcgcgtacattaacctttcgagagtagcatggatgtgtttacacccgagatctacacatgggcgtgtagcatgtagggcacctcgcgatgcccacgtacgcataaaccgcgcatggcttacgccgaattgataggccggtccttagtcgtaccatacgcatgtgcgcgactgcaccttcctcgcggcctatttccctgcatcctgggcctggcttgcacgatgggcctaatgagctgatgggtgctggctggctgggctggggcatgggggaggggtcgatacatccaacatccaaagtacttaacaccagaaatatataactgctagttcaactatgtaaactacaatgtacttgcattttttctgcttcttcctcggtggcaagtctccagatgaactgtcgtcctcgtcctcgtcttcgtcgtcatcatcatcatcatcatatgatgcgagcggaggacttcatgttggcatttcagtcgtccgatatgtaagcgcagggggatcgcgagttgcctacatatggttcacgcgtgcccgtggatcgtggacgtaaactcatcattcgtgcgcgtaaattaattaaccttgaggacagggaggacttaagtgctcttgagggttgtcaccacctttacacctacctcaaacgatatgtgggatacgcagtcactggaaattaactacctaaacaccacgtttaagcaattaactattactctagtgtttataactcactaaagtgatcactataaataagagaataatagtgaacaatgatccagtatacttataggaactaaccaagaataattctcataaagtaaatcttaattacttagaaggatattactattaaactagagtaattaaaaaggtacaaaaataagaggagaattaccgacaactctggaattcctccgacttcttctaccttactctatcactaatctagtatataataaagtacaatagagactcttatagttcagctcaaacttggagtgtgtgttgtgaagtgagagagtgaagtccttacataggcaggtaatgacggttataacaatgtaaaatgtctgaatagccccgcaaccaccagcaggacatcatctggagcgttcatgccaaacctcaggatcaacggtggagatcagggttcgaccaaaccctggcttggcccaactggcccaagatttggtctgggcctcctcgtaagtcccttatccatttccatagtaccaactcatgtatggttgaatttcttattcagttaagtcttaatttcctcccaactttgatggtttattacatgcatccaaatatacaccaacactcgtggaatatggtaaaattaaatcctaacactatgttggatgtttcattatctatatattatgcgggtatcagcagcataaaattggcatttaacagccgccaatagtaagttacttttatcatatatataaattactttataatgctctaagttgattatttttattattgttttataagtcaattctttaatttatggactttaaatttaatttttacataggccatatttttctctctacaacgaatttacttctaatgttgtaactacttaccttctttttgtgctaagttacttttatgattgatgtaaattacttttcgactttattcaatttacttttagactttattaattttactttcataaaagcattttcttataaatcttctctacattttacttgtgaatttactttacatggtttcttattttaactcagtcacaatataattacttttactacattacatagagttacttatgttgcatagctaaattatttttataatttaaataaattatttttaaattaataaattattttaatatattcaacatggttcttgttttgtagagtacaatgatacaaatagatattgaaaataatacgtgatttaaaatatataagttatcaaataggtcaaatctaaaagtaatgtatatatatgataaaagtaacttgcatctataataaaagtaatttacaacatagatttttttatgagaatataataatgtaaaatcttgttgtaaagatttaattgtaacgaacacaacagtataaaaatgcatggactattgagtgtactagtagcaaccaaagtgaggttgccggatatgcctaaccagtcacgttcaaattttatgcgtataaatttacctaaaaaggaaaaatattaggtgctaaaaaggaaaaaactaattagcaaattcggttgtcgtgggccgtaggcatccgatccggtcttccgtttataggaaataactagacagagatgtatatggaagtcgggctgggagaatgagctgctgccgaatcgaccgaccgagtccgactcgttctaggacacctagcttgctccaaactccccatatatgttgtactcctactatatcggagaaacaaaactagctccactcctgcccagccaagaatcaccgatcctgccatggccgacgccgacgccgacgcgtgcc

SEQ ID NO: 19820 - DNA, 2874 bp, Oryza sativa
tgatgctccggaagatggtggtgctgtcagatcaaaactgaggtcggacgatggcgtcatgctggccgatgctcgagacgacgaacaacacgccgcaacatccgactccatggccggaacatccggtggcgccgtcacgggaggaggacacggaaagcttcttcccgacctcaacgtcgtcgcaaccgtggcgcacgacgacgaaggccgccacgcacggggcgcaccgcggccacaagacggcggcaccagcacgacgacgacgatggtggccagcgccggcgccgagcgcggcagcacgacgggccacctgccggccgccaccgccgggtaccgtcgaacgctgatgctcttcctggaggaggaggacgacgacgccgtggaggatgagcagcagcagcagcaggcgccgccgctgccacccgcgacgtcgacggcgacgacgacgacgaggacggcggcggaagccaatgtgcagcggcagcggcagccaccgtgttgtacatttgtggtgcacccgtgcgcggtgcacgcgaagatgcgacacggcgcggcctacgggtgcggctgccgtgtgaccggcgctgtccggagaggcggttaccatctgccgaggcgtgcagtacatactacgactactggacagtagtttatatacgacttgttgctccctcccgtcctcacaagaatgcgattgtagcattcaaattttgtactgtacaatagagaatataacaagagtgttgtacttcccatctacctatcatcgttctgaaacttctttctcatcttacctcagtcaccttcctagcctcaaccacatcttacgatttaactcaagggagatatagtcatttatcttccctactaatttatcttctgaatggtgcagtcgcctgcaaatttgtaatctatcagtcgatcccctgccgtcgattctgcattaagatatgttgcaactatcgggctggtgggaaagactttctggatatggacccaccgaaatgaaagctctcaattccttaactccttttccctcactcggctccaagttcgtcacagccagttcctaaagctcaacatgcagatgtgccacatcatcacccactaacaattattatctagagtatcttagatctcatgctaacatgacataccatttgtatttttgttgtatgtttagacctcagcatgcaaacaatgtcaaattaccatcttcacattatttttacattatttaaacatatacgtctatcacttttataatgtataacatgcatttatccatacatatcccacagcaaagcgcggggtatcaactagttttgaaaagacagtcgccgttgtttggcaactcgaggggaagggatggagagtttacacaagagaattgatgatgagattaagatgggaatttgatgtttaatatctcaatatcttgtttgcttgaggtggcggaaattgatagggagtttagttggagattaggtgattaatgaaaatgaatgggaatttgatgtttaatatctcaagatcttgtttgcttgaggtggcggaaattgatagggagtttagttggagattaggtgattaatgaaaatgaatggctaagatttgtttaggcaaagtaaaggaagaattccctcccaattaccaacccctactcatgtatcgaaaaggagagagttccttcctcaattccccattctcatccactggtggagaaactatctttcgtcggtcggccgaattccacaatagtcccggttgcaataaaaaccggggctaaagatgatctttagtcccggttaaaaagggtaacaggcatatttgatctttagtcccggttggtaacatcatctttagtcccggttcaaatgctgtcatggaagaaagaatatatagaaatttagtttatttgctaaagaaggttttataaaatagttgagaaggaaaatatagtgaaagttaatcttaaataatagaaaacaaactaaaatgaaaattaaaagaagtacaacacattaatattagtttaaaactttagaaatagtaaataagaattatttggtgtaatattttataatttttgtatgaataatgatatgtctttattgtatgactgttgaaagagtttgtaattattttataattattgtatgactgtcatttttgtacgaataattatttgtgtacgattttttttcatctcatgtagatggatcggcaatggatgtacgctgaccggcggtccaaagagtttattgacggcgtgcattatttttttagagtggccgaagctaacaggcataagggtttatttgttgtccatgcaataagtgtaagaatcagaaggagtattctgcatccaggactattcatttccacttgtttgagtcggggttcatgccaagctataactgttggacatcctacggagagcaaggggttgaactggaagaagatgaagtggaagacgacaatattccggactttgctcagtatgctggatttgaaggaaatcaaacaggcgaggaggaaagggatgctgatggtaacgacgttgcggatgatcttggtcagatgttacaggacaccaaggaggactgcgaaagtgaaaaggggcctataaattggacaagatgttaaaggaccacataacgtcgttgtacccaggttgcgagcaggggcacaaaaagttggataccactctggagttcttacaatggaaggcaaaaaatggtgttagtgacaagacatttggcgatttattgaaactcgtcaagaacattcttccggagggaaacaaattgcccgagacaacgtacgaggctaagaagatagtctgccctctaggactaaaagttcagaggg

SEQ ID NO: 19821 - DNA, 1917 bp, Oryza sativa
attcctgcagccccagaattatgtggtgcaatgtcttgtcagttttgagttgatatttccaccgtcatttttcaatataatgacgcatctgctttgtcaccttgtcaaagagatcggtattctcgggcctgcgtacctacacaacatgtttcctttcgagaggtacatgggcgttctgaagaagcatgttcgtaaccgtgctcatctagaggcaagcatcgccaaggggtatggaacagaggaggtcatcgaattttgcgtagaatttattgaagaccttcgcccaatcggggtacctgaatcacgccatgaagggagactacagggaaagggaactctcggaaggaaagcaataatgacggtagacaacaatttattccgtaaagcccatttcacggttctgcaacaatcttcattggtagctccttacgtcgaggagcacttggctctagttcgcgccagaaacatcagtaagtccgatgcatggattacacggcatcacattgatactttccctgcttggctacaacaacatctgatgggtaacgagacgatcaaccaacagctaaccttcctggcgaggggtccatctggctcgttcgcgacattccagggatatgagatcaatgggcacacattctacacgagagcccaagacatgaagagcacgaaccaaaacagcgctgttcgtatcgatgccatgggacacgatggaacaactggcacgtattacggtgccatcgaggacatatgggaacttgactatggtcctctcaaggtccctctgttccggtgccaatgggttacggtaccagtacttgaacgaggaagggaacgtggagagggatgcggaggggaaccaggagaggaacgtggagagggatgcggaggggaatgaggaggaggaggctagtggaagtcaaccctccgctggacagaagagggcacgcgggcaacgaggtgccgcgaagaagctagagggtcggcacatcataacggaagtagacgaagacggccgacctagtgccccggcagaagcagccaagaactacgtacgacacagtggttgggttgtgcgggataacgtgcctgttagtgcggtgtactggcgcagaacaagggcacacggagatcatgagagctttgtcccagattcggagaaagagatgctgtggaccacaatgctcgagacattcacccttcccgcgggtacagaggacaaagtgaaaaggtggactctaaagaaaatggcagaatagtttcagagcttcaagggagatctgtaccagaaatacatcctgaaggggcagacaccgtacttcgacacattcccgaagctaagggatcactgggacaagttcgttgcatataagacaggtcaacaagggcaggcgatgacggaaagaaacaaagaaaatgccgccaagaagaagtaccatcaccacttggggtcaggcggctatagcgtcgcgatgccgaagggggaggagatggaggcaagcttgtttgagaggggtatcgaaccggccaccgctaaatggtcggatcgatcgaagttctggtactatgctcacggtggaacgctcaacccagttgatggctccctggtcttcagcgatcagatacgcgaggctgcgcgtcgactaacagacgcagtggaagcctcttctcatggcacattccgacccgacagagagatggacaagctgtcactcgtcctgcagaatcccgagcatccaggacgaacacgagggaaaggggtgattccttggaagattggattcaaggaggacatccacacgtacaggagtcggataaggagcaagagagataccgaggcgaagattgcagatcttgagtacagggtatcgagctacgagctcaacatgcaaggggaggtggcaaggaaggttgatg

SEQ ID NO: 19822 - DNA, 2353 bp, Oryza sativa
cacaagccacgctattatattatggcgcaagcggtacatcatcatccctgggcgacaagcggcgtctcgtgcaccatctcctccgactccgccatctcctcctcaggctgctgcaccgtctcctcctcatgctccagcaccgtctccaccttaggctcctgcatcgactcctccttaggctcctacactgactcctctgcaagctcctcgtccggcaccttccaagtcaagggccccccaagctccaccacctgcccccacaagggcaacgaaaaaggcgaaagttgacgcacgcaagaggtgacgcttatgtggcatcagaagtcaggacacaattgaagcctcgaagttcagaaaagaagattcctatagacccgagtgtcaggaacttcttcaggggtatgtctgcacctgccaaggaggccataaagctatcggactatgagcgaacacttaagaaagcatcctctggaaagtctaaaccagtccctcagcttggagagcaaccataccaggagatcgagccgttggtgaccggtgaagattttggaatacaagagtttattaatgacactgggctaactacggatcaattgctacgaggcgcaccaatcgaaaaggcggaagtgaaatacatgtacaaactcggtaagccgcttgtcaagcctgagcagctgcagtccctacccacacaaatgtacaaattccatcaactgtacatggagatgagcgccaccggtagagagatgatcggagcgaggatcaagggcacagacttcttgcaaggagatgatattctctggatcaatttcaagggtatctacaaactataccagctggacgctctcgacgtctctattatgagttgctggattttgtaagtatcgttcagttagatttcttattacgtttcctttaattaattaggtccttgtatataagtagactatatatattatatacttccttctatcgttgtagaatggagattcaaagggcccgacggcggggggttttcgatactagattcatcgaccctcggaaagtaaacgtcacaatgctcgaccagtatccgcaagccacagaggacaatctcgtccatctcctgaaggcgcagcattacaagacgttcatactattgccgtacaacacagagttagtttttactgtcttcctataccaaatttcattcccgtacaaacatgctaagtgtttcatatgtaatgcatccgatgcacattgcagattccactgggtccttttactcttcgacttggaggcctgcaccgtcaacgtatatgactcaatggataaaaaagagtctacgtttgacaaggttttcgaacttatagacaggtactgtcataagttcctatgttaattaagaatcttgttataattaattgctactacgaatcatagctttaaactccatgtagggcttagtatcggttccgtcatttggtccgcggcaagtggagagaaagacttaggcggaagtttaattttcctgtgagtacacatgctctacatttatattgaatctccaattcaaatacatacaagtgtatattaattagatctctcgccgtttgtcatttatttatagtgcgcaaagcaagcccagggaactaacttgtgcggctactacgtgtgcgagtattgccactgccttgtagaccaaatcatcaccacaagagagctcaatgtacgtacaaataaattcaaaatttcattgtgtacgtatcgatttgttgtttactaattaatttcatacattcatatagtttattcgtatgagggataacctcacacacaaggaatttatcgcggcggttcaagaacaactcatgggattcatcgacgaacaaatccttgatctcaagggtgaattctactacgacagaaatacaattcataggtccttagcttctgagataacgactactactacatcgaaatcgtagctagctaggacattataatggattgtaattaatccatgtctatttttctatatgcatgtacacattttctttaatgtaaatatatattttggtcatatatatatatatatgcacataaaatgttaagtgctttcatatatatatatacacacacacacacacatatgcatttgcataacatatatatgtataaatacatatatattatgcatgtatctgtattgaaacatatataaatatcatatatatatgcatggtttatatatatatatatatgtatatatatatatgtgtgtgtatatatatgtgtgtgtgtgtgtgtatatatatatatatatatatatatatatatatatatatatatatatatatatatatatatatat

SEQ ID NO: 19823 - DNA, 6562 bp, Oryza sativa
tgtttatcaatattttttttggattgttgtggaaatttgtttcgatcactgacatacggacgtacgttaagaggggacatgtttatggatatttgtctatatgcatatgtgactatggaggtaagttggaccgacgggaatgttggatcctttgagggggtgtcttagacatcctagtgcaattaagatgtggtctatatttttttatttgaaggatttgacatgtgttgtccataagcattgtgtgcacatgagtagtagtactatcttgctatttaagcaagagtgtagccaacctgtaatgcattgtccctccaaccatatcattttttgttataaaagtgtaagtgaggtgatatttataagtaagcgtgccaattggatggaggttgggttgccttgttctgaaggacgggttgttacaaattgtacactaaaattacttgcatcatgtcgtcttaaatttatgagaaaaatatcattttaaaaatactacatgtttttattttaaaaatactacatgtttttattttaaaaatactacatgtttttattttaaaaatatttagcatcttaatttaaactttaattttttcttgtatactaaatatgtctgtgtagattttacgatatattaatataagaaattttctattaaaaatatgataatatgacatctttatctaattaaacaaatactcatatacttctatttacttctactacctctatccataaatcgaaggatttaaattttatatcctaaaatataaggaattattaatactactcgttccatccagccattcttcatttaatttttatccaacattacactaaccatcttctaactctctacataccccttatttaatgagccttatttaatgatgggtatcttggtatttttttttcattcctccttgatttctactccctccgtcccagaatataagaagttttagagttggacacaattattaagaaagtaggtagaattaaataggaagatgttatgttgggtggagaagtggaggtaggtgagaaaagtgaaaggtggagaaatgtgattagttgggaagggaatgttggtggtaatgttgttatatttgggacaaatcgtaagtgctaaaagttgttatattttgggatagagggggtataaaattttaggatccattataagacggagatatatagtaataaaaaagagtttctcatttatagacggattaatttgtacctttgtagattgatttagctttaaatatttgtataggtaaatagaaatggtataaaagttgagaaatataattaagttggttgaaagtctttagatgttaaatggtatgaagtaattagccaaccagttttattaaaaaaataatgtggatattttttgggggtaatttttaggatcttcttttattcagtggttaacttaattgttgtaaggaaaacaaagaggcgagagccagtgggttcatttcgtccgtgaggagggaactggatacatgtgttgtacatacgcactctgacggcttgatcgatcggtaggttttttaatacatagatctaacagtttaaaataaggtagatcagtttgggtaagacgactttagctcaataatgcatactcttgccatagttactataatgtagccagttgagatccatgcttggcacccttcagggtatgagtgagagaaaatggaggtgatgaaaatagtttttttttatgtcttgagttgatttattatatagggtatacataatttgtttatggtgttaatcgatactactaaattttagtggtatatatataattttatcttttaaaaattagcagggttgatcattggactctacttcgaaaaatataatagcttcggtggtgtggaccacgtaaaaaaaatgctcaaactttgatccttttctaacatacaagttaatataggttttattttttttcttgtattatacttttaattcatcaattcatgtttgtggggattaatattggataaatttattaaaattatttgtgctaaatgttaatactattttgctgggacgacataaaaaagagatacaatgttgttacatgtatgtttttcttctagcgaatagtagtctcacgtatggacgtttgttttttctttatttttctttttggacaaatatttgtttatcataggaatagagtgtgcgtatttgtattcataatgtgcgtctgcacgcatttatatgagctcttgcgattgccttttaaattgttagtaaaaaaaagtatttttaaaaatttgactggaagagggtggagcaacgggtggcatgagacggcgccgtggcaaggagtgatcactacgtatatgctcaatttagaaaaaaaaaaccttagatctagaaagaaagagaaaacaaccatatgggacaagtcatatacacactcttcttttttttcctttttatatatcttgcgtaggtatgtacataggagttgtgtatgtacgtaaggagtgattagatggtttttagacagagggattattatcatagatctaatttaatggttgaaaaataatagatcaccgattttgtgtgtaaatcgataaatattatttttgttttattttacattctttctaattagagcatcacatggcatcttagaagcatttgtaggagtatagaaatgctattactcatagtcacaatctacctgtagtcaactattgtttgcggtggattagttgcattctctacttacctataatttgttgatagttgcatacttagaattgccctttatctttggtgtttgattacatacatactcattagatatcagctaaccggccgttaggtgtgttgtgtacgaatacctcttaagtaatatgacttggtgattagtaaatagtgacttatgtataaaacttacatatattgggataattgagaatgtacaattgatattttaggctaggattggcagagtatattgcattctacatattaagtttttaatacctaagtaataaatttaagacaatgttgtaaagtgcttataagattagctactccctatttaatttatttggctgaaattatttatttggtttttatctcaagagagtgaaaaagaaaaagaaaaaataaaaagaaaggaaggaaggggaaggacgtacactaacgatgtacgtacgtacatgaacgtacacgtacgcgagtgatcgacatggatgtgtggctttctgaattctaaagatgaattaaatatatttagtatttttagatgtaacggttaaaaatatgggttcaccaaattaaatgaaaatcaatggctagatattttaaataccacgtggcgatttaggagcgattgtaggaagtttaatggatttttagtatataatagatagatagataattggaagataatagatagagtagaaattcagatgtgaatgcatttctttctattctaggaagccaatgtataccggccgggcactgttacagaattaagtaaaggatcagaagaaaagcaaatattcagattaatcactccaacaaagacattgtttttttcttcaccggcagcatgcagatacttacagtgtcattttatattggaccactctatcagggatagaggtagtacgcttttgttcagtgtggccctttagcatcagtggcccttaagaatcagtggcaaaacgaagattactgcaaagggccaagaaaaccaaaacgccaccgcgacggtttgcaggccgacgattagcgccgccaaaatgtcccctctagacagcagcgcgagcgtcatccagccaagcatccaaacctcgaaatttatgtagaccagaccaacggcagcggcggcgtagacagcgatgacgagcttaggggcgacccgtgccagcatcacgtacgtcgccgtcaggaaggcggcgcccacggacctgacgctgctgtgcaggaggcccatggagagcttcacgcagcgctcgcggaaggcgaagtcgagcggcgtgtagccggcgtacatcaggctgaaggtggccatcccggagagcatgaaggcgagcgtgttggcgacgacgaacgcgtcgaaggcgcaggtgccggccaaggtcggcgttccgcggcgttcgccgtcgtcgtcggaggaggatacgtagcctccgggcatcgtgaacgttgcggcgaaggtcacggtgacgatgagcaccgcgccgatggtcaggttctgagctgcgtctttgtatatcgtggaaagctcccccctctcctccttctcaactcgcttttcgtttaagctgtcggttgggttgtcacccgatggatggttgccggccgtatgggtcagggacgaagacatcatacactgtggattctgcagcaacgtacaatctgtcttgttaattggtgtaactatctactctctccgtttcagaattaaattgcttcaagtttgactatgtttatagaaaaaaaaagtgacattttcaacccaacacaaatatcttatgaatgcatattcaattatagatttaatgaaactaacttgatattgtaaatattactatatctatatacaaacttgattaaacttgaagtaatttaactttaaccaaagtcaaaacgacttgtaataaacaggagtagacacatatactacagtacagtacgtacgtaccacgggataattcagacctttcagatggttcttaaagcgtgcaagatcaaccggagtataccccatgttatttttcacatctagcagcacccgcctgtcaatcagtaggaagaagaagatcattatgtcacaaacatggacggcctgatgcagcgcggtgttgccgtttccatcctgcatgttcatgacggcggatcgtaacccaggtgagaaacgagccaacgcgaccactgacggacacaggttgtcgacggccacatggaggaaactccggcccgtgccgtctcgcaaacccgcggaatcggggcagaattcgatcatcaacctcacggcaaataatccggctacaccgcccaatgcagcagccacatgtatcgggtatgatccctcgtcgtcaggctgatacacacaggatctgtcgtgctccagtaggagcttaaccatagcccgcatcgataaacgattggtggatgcggcgaaatggagtggagtcctccccttttcgtccccttgtttggcgaggccactgttccatccgagtatcatttctgtcggacctgaaattaatttggaattttcattcagccctaaatataaacctgaaacttaattggaatttttttataactgttgataaccaaaatttgacaaactaaaacatgtagagagtttagggctccaatcagggcgaccgattggatggaaaaaaaaaaagaacaatctaatgttgcagttaaccatggatcaaaatattcgctttcacgtataataaaacatcaaattttcaacaattaacatatatataatcctataagattttgttgaaaatatttaattgtttgtacacaaatgaaaccaaatatgattgttattgaattatcctagttgagaaatccaaagagtaacctttggtgctagttgatcttgttgagtgatctttgagagattctagttctatccaatccacccgctatcccactccattcagttgatccgtgtcatatggtaccagagtttagggtgatggctagtcatcatcatcatcgagagaactccgacaatgacaacgccaaaggggggttaagcagggggaccctatctcaccacttatgtttgtgctagctgctgacctccttcaatcaatgatcaagaaggcacataaaggaattttcactatgccgataacaaaaccagatggtaaatttccagtgattcaatatgtagatgaaaaagacaatccaaaaggaaatcttttgtcagaaagggatcttacaatcttttgcccaatcaacaggtcttaaaataaactatcacaaatcttacatgatacccatcaatgttcctaaggaagataaggaaattttagcaggaacatttggctgtaaaactggttctatgcctttcacttacctgggactcccagtgggaacaaccaaacctagaattgctgagtttgcccctcttattgatcgagtggaaagaaaactaccttgcgttaattacaatgttcttaaaccatggtcagaggttaagcttggttagctatgtactctcctctatgccaacaaactatatgtgctcacttaagctacccgaaaaggttattgaacatatcgatagaggcgtgagacataatttatgaaggtaatcttctaatttaaatgtgggacctcagtccttagcagcatgggacatggtatgcaaacccaaaaacaaaggaggtttaggcatcatcaatttggaataccaaaatattgctcttctaatgaagcattgtgacaaattttacgataagaaggacctttccttagttgagactgatctggaacaagtattatcatagtggtgaaccccaccagg

SEQ ID NO: 19824 - DNA, 9105 bp, Oryza sativa
tctttcaatccaagcaaatgtattccctgtttttctcacatctacagcgatcacttgctatcaaaatgatctggaagagtaaatgcacagtagtcttcctaactgcttttgatgaatagactaaatacgagataaatgttgcaagaagcacaagtaaaactccagagtggaacaaactgtgtaatgtgcaaccaagcaagtccagaagatgcccttcatctgtttttcacctgcttgtttgcccagcaatgctggcaatttttgggaatccactgggatttcaaccttgaatttatgcacatgattcttacggtgtgtcgagacttcgcgcaaccttttctcgttgaggttataggacttgcatgcgcaatatttggacgagaagaaataatcttatgttcaacattgctccagtttcctttctatcctggaaaaatggcttcaagggggattttgatcttcatatgcatagagcaaagatatctgataaaccactctagcaattatggattagctcacttttttaatccaatttttattttccttttttctctgctgctcctcccctctacatattcctgtgcattccccccttttccattttgtattttatcctttcattaatattaatgtagtaggagcctcttcaactgttttacgtcaataaaaagtagtaagcctgggaattaaggaggaaaatgcagtaggcaaagatgtccagtgttttcgatacaagaactgaggtcataggatgcaagattgtccaaacagacataggcctcgttttttttttctccaacaaaagttagatgaaaatttggatattcgtggcatgcttttcaaaccgctaattaaatagtatgtttcgtgcgaaaactttatatatgaaagttgttgtaatatatcatataaatctatttttcaagtttataataattaaaacttaattaatcttacgttaatactatcttgttttaatcttcatctacagcacaaaacaccaccatactcttgccatagatggcagaaagtgtaatgttggccgtaggaaaaaggttttaccagaatgacatcccgtacgtgagatttggtaaaatgctacttttgaaatttacgcaacactctataatgcatttttctcctctttaggtgttttttttcctgtcttgcattgtgaatgaacgaaaatgcccctcgcgctgtgttgaactgtttagaggggatcgttctcttcctctccacccgcagtgcaccaacgagcttgagcagcctcgcagccgacacgatgccttggtaccagctccaccacgagtacaatggtgaattagtgatgttgttatttagcacaaatacgtttctaaagcacatttttttataaaaaaaaaattccatctagaaacattcatccgaagaacttatatcaaaaaaaatttttttgtccaaaaacaactttcaccgaagaacttttttcccaaaaaatttcatatgaaaaaatgtgtattcttaatgcacatgagccaaacaacaatcctaatactatggtgtgtctaggagaatgcattgatacaaaatttgaatatggagtgaactgagcatagctcatccggtaaggtccctaatcactctaattgaaaggttaataccaaaacacgctgtcactgggccacgtaattagaaaaataatagccgtccgatatgaaacgcgagaaagaaagccgttcgatagagtaaaggaaaattcctgatggtgagtttgtgacacttcaggagctatatgcttcgaccggaacactcgcacagaaggtctcacatgatgcactgatgctcacataaggcggcaagaaaagaagagatggcgagatgaggaggtgacgacgacttgctgccttgccgccgctaggctctctcgagaactgtcacagcactactggagaaactatctttgttggtcgacccaaatctacaataatcacggtttcattaaaaaccgggactaaaaaggatttgggccgccaaattgagcctcgatgcctatgatttggcaaagaagctcgggatcatcagggtttgctgcctctcctcgatcgctcctatcgtcgtgtcgtacgtgctgccgttgtcatcaccatcactgccactaggcacttaaggtctgtgtcttctccatcttcctcgcacaaatccaatccaggtgaccaaggagctcaaggatgggtctaggcgcagcctggagccggccagcttcattcttcttccccagcatagatccaccgctgcaaaactcgagctgtgcctgctactacaggacacgagagggatggagatggaggcagcaatgtcctagatgctcagccacagcctgttcctcccagcctgctaatagctagatgcgcagcaagcaaagcaagagaagagaatggggacaggatacataaagacgggtcaaattctcttgctggacaatataagggcatgcacaactctcttcgttgccatgcaagtaaaattgatgacgtggaagagagaggggaaagaaaaggaaacatagttgctacgcatgacaatggcttaaagtcgactcttaacatttattaatggaaattttgttgcatggggatggacaaaaggaaagaagggtagtaaaataatattttggtgcattaatggttaagagtttttgttgtctcaactattgtaggaatatagtctacaagttatatgtattaattgagagaacatatcagactctacatttgtacatgccctaatggtgcatacgtaactatttaaaaacaaacttttcaaatcaaaattctcaatgatattaaaatattacttcttttatctcaaaataagtttggtttttacccatcgcacacataccaatacaaatcaaaagactataacatctccactttatcaaagcttaatgcaatttttactctatttatctactttccatacatttatcatgtactttcacaaacatcaattcaatgattactaaaaacaaacttattctgagaaggaggaagtataagagtaggttaagggatgcatgatggagtattggagaggacggtaagactatcactaaatcagcattaaagaagaccgttatatatagtcacatagatagaaaggggaaacagtggagaagaagatgaatagaaactctaaccttaaccattgcacactcactgttttgtttagctcaaagctcatgcagcagcgaagagggcggatatggtcgcgcaaataaagaataaaacaatgatggtgaaggtgaatataaaccctaaccctagccgatgcaatcattgtcttgtgcagctaaaagataggtttcacatttcagattacaagtctatttacaataatattacaaataacatgtttcaaaattcaaccaagagggaagcaatgatcacgcaatatgtttggtaaaatattggaaactataataattttctcaagtacaaatcatgataaatttgttaatgtgatagtgacacttctcacaaagtatattattagtggataattacaaaatttaagctaattacttagaaaatgtataaacaggtctaaacaacataaaaactaacaattctaataaagagggaggtcatagtcgcgcaaatatgcgacttataatagactagtttggtgtgaaacatgtatgctcatctggtaaggtccttaatttgtggtgacacatgttcacccaaatttaagtcctagacacatgtcgtatatattagttcagtctttaaatgtcaggtgtgtgtatgcatatataggtatgagtgtgtgctaatttatatgattacatttgtctttaccaagtttcgaaaatctcgtgttttggcgggcctacatcatgttaggactgacatgagtcggtatatgtgtcgatttaataaaacgacggaaatacctttatctctactattgtaaaaattaaagatgtttttatcggtacttttggtacgccatccgtgtttgaatcggtttttaagttcaatcgctttggaaatatagatccgtgtttgagtcggtttttaattttgttcgtttttagaaatatagaaggagtcgtataagaaatctctttacaaacttgcatgctaacttgaaatgatcgaacccctaattgcggcttatgattttataaaaagaatatccaagtgaattcctacggtgaatttcaccttagctaaaccgtacaacaataataagattaaaatactcttcacccgttgtaacgcacgggcatttttttagttagaacaaaagctagcttatgtgcaccttgaaaagtaggagtataatcattaaccaacgacggagatattacggaactaatttataatccggatcggctaaaactcacctttgccaatgagcaccgcgacatgcaaagcgtttcggccttgaggtccagagtaggacagctgttcgtccctctcgtgcagcttcttcgcaacctcaaaccgtcgcagtgagatggccaggtacagcggcgaggtgcctccttcttctcctggaacacgggcaagctccggatcgtgggagaggagctcgtcgacgacgagatccctgctgttcgagcggatcgcctcgtgcaaggccgtctcaccgcgcttgttctgcgctctcaggaggagctccaccgccgccctctgtctccgccgttcgccgccgtcgtcgtggtcgtcgtggtcgtcgtcgccggcctcgtcttttgccatggcgatgaggcggcggaccatgttaacgctcccagccctggaggcgcgatggaggggcgtgtcgccgttgctgttgcgggcacgtatgaggtgcctggctgccccgtggatcaccccggcgcagtcgaggaacacgtcgtcgtcgtcgtctccgcatgccgccgccaccgccgctgccgccacgacatggagcgcggagtccccttcgctggtgactccctccaggagcgtgttcgcagctgcagatggcgccgccgccgcaggccggtcgacttggaggacgacttgtggcggtggctgtgctgtgttcacggcgaggaggcgttttagggtctcgatgtctccatgtcgagcagccatgagcagcttaggattcatggtggccggcgcagctggtattgcgttcatctttgagctagctagttagcgctctctatgctgcctctctgtgaattagacagtcccttttcttatacaactgacggtgtctttagctaatccaagattactataagtgtgataaccaacaagtgatttgtttacaactatcctgttttaggacaagggacaaaagtaaacttgttatatatatgtatatatcatcaatcatcgatggctacattcttcaccataaaatactgaaaaaacaggaacgcatcgttcttatactcgttcagttatgtttaaactagggccgttcaactgatagctatagttgataagtcattaagtcacatcacaataatttgtaacaacaaagtcgcactcacacaagtcgtatatctgtcttcaaattaaggaccacttggaggtcgggagtaaaattgaacttattgcggcgtgacctcgaagacatgccaatatatagagaggttgggtgacaggaaggaacaaaaattacaatttttattgtaactaggaaggtagtccgcgcattcgcgtgggcatgcatcgtatgctaagtttgaaatagttataaaatctaaatgttaactggagaacatctgccacgatttctccatacatttttttcatcggcattaattgtttcataattttctaacctattagctgtatattggactatcatctttttatattcttcctcatcatttgaaaagaaggtagacttattatctttagaaaacatatcatcacaagtaaaagtaaggtgttttttaattgcatatatattatgatagtttattatgggataaattggggactattagggaggacaatgagaagagtcagggagacagagaagatagggacgatcaacaaaagaatatattggaaccgtgagggtatcattgcatgttttatttagtggagacacattttttattaagtaatttgtatacttaaattatactatcaaattttagtagtatataaacatttttcgtcttttaaatttgatgactgtagttggttatttgacacattgaaaaaatagactcaaaacacgtcatagacacattgaaaatacgtagaacatcgttatcattgttatcatggatctaatttagctacatatatgtttctagattaatacagaatagcacatttgatatcgtatttattgaaaaaaaaattcatcactgtcttgatgcatagcatatcacttctataattaaaatatagttaacataggtcttaacttattaatttaatcacaaatattataaatattcaaaccagttggaaattagatacacagttaaacagttatatttatttgaatgttatttttaagtagttaaccacggtatactcttgctctatgtacgtacactatattttttaactaacttatgtgcgtacacttagagagagcaaaaaaaaaaaagttcgttatttctggatcgctccaaggccgaacataggcctgttattttacaaatctaatttaactatctgacataaatagtggatccatcatctttagttgaaatcgacggacggatatttatcttttttttcttttttgtaacttgggagttataatctatctaattaatattttttatttatatattaagtgttagctagaaaaatatgaaaggtcagttagaaaataggagaggagaagagatacggaggctggatggagtacggattatgtacgtgcgcaaatacggtgcggggtgttgtacaccggatttttttaatagagatataatggttaaaattaaagggtccacctattcaaaggaaaataatgattagatgtatttcttttctatcagaatttttaagattttctctactatattagagtgccatgtgacggtttaggagcatttgtatagcaccacgtggcggtttaggagcgtttgtagaggatttctcaaatttatttgagatccacgtagcggtttaaaagcatttgtagaaagtttaatgtactagatagatttagaatatggtttaaagaacattgattggatatttatatagatctttatttaactaaatatatttatatttgtgaagtaatatattttatctaaaatcatattttaaaaactgttgatttttatggaattatgtgttttctatcttttttttccatgtgtatgttttttttttttttggttccagcaagattaggaaaggtcatgtacattaagtttgtacgtatggaaagatcagcagtagtatcatacaaacacatacgtacagatcatgaggaggttattattttttaataatagatcaatctaatggtgtaaactaacgggaccatcaatttaagtgaaaatcaacggtgagattagataatgccatgtggtgacttgggagagtttgtagagcgccacgtggcggtttaagagcgtttgtataggaagtttcatggattttaggatataatagatagatagattttggcacgggcatgctatattccatgggtacatactgataatttgttgtaatttattattctattaaggtggttgtaatatttactcgaaccactagcatgccgtacattctagtgggatgaatcatccgggattcatttactcgatttttgctgggtgttttttcatttgctcgatttttttttctgggggagattttttcctggtttcctcgtgctgcagttatattttcagctcatggaagaatcgggcatttaaccaagtatattttttatttcttgcattctcttcctgtcttccacctaaatagcttttttggtgttccgttttgttctttcgtagttaattatttgagagttctgatagtgaagaggtcgaattgagacctcctctgcatccttttttttccccagttgtttgatttttggattaatcttggatttcaagaagtgaccgaagtcatacactttgagattcttcagaattacaactccgaaaattactttggaacacgagttttggtgacgttaatcaaagctctgcaaatgtcagtctcagattctattctgctgagcagtctgacaccttgactttcttgtggaatcttagggtctgtttagattcatggactaaagctagtctctatcccatcggatgttaagacactaattagaagtattaaatatagattaatgacaaaacccattctataaacttggactaattcgcgagacgaatctattgagcctaattaatccaccatgattagcctatatgatgctacagtaaacatatgctaattatagattaattaggcttaaaattttatctcgcgaattagctctcatttatacaattagttttgtaagtactctatgtttaatacttcaaattagtgttaaaacattcgatgtgacaggaactaaagtttagtcgctggatcaaaacaccaccttaagaaacaactcctgcaagttatttgacaaatttgtcttagtggagtgaaggcctagtaaaataccagtataccaccatggaacaatttggtgctgattttatttttaaaaaaaacttcaaaagagaacagggagttcctgttttgtatttattaagaaaagatttggtctagtttttaagggaaattaggtgctaaaatatagttatgtgcaaatacgcgtgcgtccttattgttttgactgaacttgaaaaactgtaattctttcatgaaaaaagatttgtctcctttttaatcattgtcattacagtttaatcactctgatattagcagatttcaggaattagctacctgcaagattccaaaacattctgtatttggagcaggtttttcttgtaattagctacttagctgcacattttacgtatatttcgccccacattccaaaacattttacttccactactacagaagtggtctttccatgcgggcgaaaaggattttc

SEQ ID NO: 19825 - DNA, 3861 bp, Oryza sativa
tcaggctacaaagcgagagtactgatctaaagagtccaacccttcatccgtatctggtccccttacttttatagtccaaggagaggctcacattattataaatctactctttgtcttgtcttatcagcaatcttgtcgttgctggctggttcctatcacaatatttaagaaacccttcgagtcgtgcaattcgtattacctcgggatctgtctgagacagttgggctctcgccagtgtgctcgtacatggtgcatggtgggcctgacgagacccgacctgcccgaaatagcgccacggttgcttctttgcccgtttggctaaagcaggtggtgcagggcatgtgcgacgcgtgtccaaggcgtcaccggtcctaagtgactcagcgcagatgttttgtccacgccctttcaactctagactggctggggatcccccataaacttgtttcatttatggcggggcatgctacttcacagctggctgtggagcacgcccaacttcccggcaagttctgatgccgcgccctcccgcgtttaaagaagaggtttggttattctcggatgagcttcttgaagatgtcgttgatgaaggaatattctaagattatgtatcttgtatgtctcgacactcctctaggcagaggggcgtgagccctacaaggaccaaggtgagcccgaggcccggaacaaggctgggcccgaggcaaacctcagtttaaacctttatgtttggtatgtctcgacagtcctctttctcgagtagtgcatgaattgtgcatgatgagtttatactcgaggaggaagactaccctgtcgttgactacgtgttgattatccatgccgccaagtcgataatagctagataggttacccaaatattatacttgtgtgatccagatgaataaagagcaacatcagctttggccaacaggagtataaaaagagtaaatttcacaaaactacagatactatgaacaaactaccacaaaactacagatttaaggagttatatcacaaaactacacatttagcactaaatttatcacaaaactacatatttaagatgaagtgtcacaaaactacacgtttagtaactaaattattataaaactacaggtttagaaccaatttaatcacaaagtaataatgtttatagctccaccataacaatggtgctagggatttaaactccaaaagttgtagttttttgataagttcaatattaaatatgtatatttgtgatacttaatctaaaatctatagttttgtgataaatttggtgctaaatgtgtagttttgtgatataactccttaaatctgtagttttgtgataatttggtcaaaatacctgtagttttgtgaaatttactcgtataaaaatccttgtctccatctcttttacctcaatcttgcatatacccttataccaattgtcagggttacgggttaggcataccctttacccttcgatatacattacatatcggtacggcatacccacgcgcatacggatatttcttgcgtacactaaggaaatccttcacggagtctacggatgggaagagtcctactcggacaagactgggtcatcaatgtatcgtatagggtctattatctccgagttctacttggaaaccgcctgacctgcgatataaaagggaccccccggggaggacctgaggcatcgaatctcagagccaacacaaccctcacagcctacgaagtcggagcctgcaaggagccgaatcaccggggatctagtcgagccaactcgaccacgatctcgccggatccgtcaagttccattgttccctttgtaacctgttttttccaccatataatcccacatcaactggattagggctattacctaccaaggggcctgaaccagtataatcctcgtcttttgtctgcttgatgtcgtattacgtagatcattgtatcaatgtaccccaataccctctatatccggtctacgggtaccacccgtcgacagtggcccgccaggtaggggtattggctatcgatgatgtcggcacatcagcgcgcaccaatgcagaagcggagaatcaattgaccactccagcccagcacatcagagccgtcaacgctatactgagggaaaccccctacgatcccgttctgaaggacgatcttgcgcattggacagaacaattacgggaatcagtgaccaacctcagcaacgcattcgaagaggccgctgccgcagcgcacccagagcagccaccaactggcgatgccaatggtgaaaaccctgaatggagggaatcgcctcagcgacctacccctccacctcgcggcactggcgatctctgagatcacatcaacggtcgccgagaggcacgacgcacatgagacaacgagaatcattcccgacgtcatgtctcttcacggcgccatgataacaaagatcgaggagaccgctcaaacgaggaccgagaccgtgataactgccacaaccaccacgatcacaacgatcgcgaacggcgggtgccagacgatactagtcgaggacgtcaccataacaatgacgatgatggagaccggcgccgagacaacagcgggagacgacgacaggattctcgagatccaggccgacatcctcgtaatcgtacgccggagccaagcgacccatcgtcatcgtcctcgtcttcctcatcatcagacagacatccacgaaggacacacgatcgccgacaaccaaccgcccccagcgctgggtgtagggctttcagtcgtttcctgcgtgatgtctaatggcttgagagattccgacctggagcaatagaaaaatacgatgggagcaccgacccagaggagttccttcaagtctactccacagtactctacgctgccagagtagatgacaacgcgttggcgaattatttgccaactgcgctaaaaagctctgcacgttcatggctgatgcatcttccaccctactcaatctcctcgtgggcagacctatggcaacagttcatcgccaacttccaaggaaccgacaagcgccacgcgatcgaggacaacctacatgcgttgacacagaactcgggtgaatccttgagggaatatgttcggcgcttcaacgagtgcagaaatacaatccccgaaatcaccgacgcttctgtaattcgcgccttcaaatccggtgtcagagatcgctatactacccaggagttggcaacaagacgcatcacaactactcggagattgttcgaaattgttgattgatgcacccacgcagatgacgcgctaagacgcaagaatgacaaaccgaagaccgggggagagaagaaaccagccacagacgcgtctgagtcaagcaagaagaaaaattgcaaaaatgggaaaaggaaagctcaagcggaagtcctcgcagcagaatatgtcaagtcccaaaatgactctaaaatacatcctctaaattatgcctagaataattaaaatccgtgtgaaagcctccaaaaaaattaaaatgtgcaaagttaaaagtcaactaaggcttggaggatttttgtatatttcctaaaagcctaaaatgcataaataaattttagtgcaattttcagagcacaaataataattattaagaataaacaaagttaaaatggttttataaaaagaaaaaccctaaaggtcccctttccctccctcccccctcttgggccggctcggcccatctccctccccctctctctcctctccccgcggcccactcggcctctccccgcgcgcgcgccgctgacgggcgggcccgcccgccgccctcgctgacgagtggggcccacccgtcatctactaactcccgccgctcccgccgctccgcccgcgccaagcgcc

SEQ ID NO: 19826 - DNA, 8056 bp, Oryza sativa
gctctctctctccgccgtcgccgccgagctccggtccgccgccgtcgtcgccccggaccacctcccacctcggcgccgcctcttcggcttcgccgtatcctcgccgacctcgtccacccctctgtttcgctcgccgaccaccggaacgccgtcgaccccgtcgacccgagccgcgccgccgccttcctccgctccggccgcctttttcgtcgtcgccgtcgacctagggtgagccgtggaccgccgcctcttttcccccttctcttcccctctctcggccgccgctccgccgtgcctatggctgccgccggcgaccataggggcgcgggcgccgcctccggccggctgcgccagcttggccgccctcgggcgcgccgagtggctgccacgtggggcccggccgtcagccgcccgcgccctcgggtgcggctgacgcgtgggacccacggcgccggccggtgtgagcccgggtgcacccggtccaccgtggaccgtgaggctgccacgtgggccccactcccgtggacccggtccgcgcgcccctccccctcggctgacgcaataaaccctttttaaattaaaatttaaatgaagaaattcgcaaatattcatttaaagagcatataaacttcaaatgaccataacttggccatttgaactcggaattggaccgttcaagtctctaatttttccttaagaagtcaagaacccatttttgtgctttgtttctgcttgttatatggagtttattagagtaaaagccttttcttttccgttggtcgtgtagacgctgcagcttcgtaagatccgctcttcgtggaggtggaagccgacgtttgggaaagcgagcaaggcaagtcacatcatccttgaacatattgaatcccagtttataaaattattttgatttaaattattgcattaccgctttatttaaatttccgcgttatcactgttttatctagccatgcctatttacctttgttatgaccttattattgttattgttattatttccttgttcaccctagaataaacaaaaccccaactagtggacactctactcatggtaccactagtatgattttaggtagatgcttcactgattaattaggcaacattaggtggttttataactctagactttgggagtattctcaccacctggacactatggaatagttggattattgtggaattggattcacacctccccctctattcaaaaccctcaaaatggttttaggctgggctcggggtgcatggttttgatattagcacctcggccatataaggaccggtcttcgggcctctgttgcaaagcactaccgtacttccacatgtctagtgggtaaggcttagtttgtggctcagtctggttataaacaaaagtacacggatggagatggacgaagtcgggggtcgatggacatctctaggacaaatgaaggctacacgagctgcggcccggtagtcgagatgtcatggcacagggccggtgtcctgctgctaggggctcagtcctgcctacctgtcccgggggttccggccgtaggtggggttgggtcggtactcttgtctatggctaggatgggttggaaactatgtcacgtctttcgtccgtataccgtggtggtatgtggcacgtggttacacgtgaggaagatgtgtcttgtgggtaaagatgtacacctctgatcagagtataatctattcgaatagccgcgcccttggttatgggcaagccgagcaatgtacccaagttagtgttttaaattcttaaaacctgcttaacaactaaaatgtggaatggttggcctgggttggcttgggacgagctgggacccagggtcgggttgccagttcggtctgaatcatcgtaggccttgggttaaggcaggttcgtgttggttcacggccttgattaataatattgtatagctctagaatcgtgtttacaaaatagctttgagcaactaagtgtcttttaatgctgtttactgcaaaccgtaaccctttatattataacccccttgtactcccttgcatttatcctgcacttgtgggtgtgtcttgttgagtacggtggttgtactcagtcttgctcaatttttcccaaacccagaagtggagttcctggaagatgaaggctttggtgtctagctcgtgcctgccgtcaagtgcctgtggtcgtcgtcctagtcttccgctgtttcccgtttgtctttgtgtgtgctgggccttcaccgcccatgtaataaattaactatttacgcttccacttgataaactctgaaatgtatcaacttttggtgtaccttgcctcctggcacaaggaataatacacgcacgtaaggaacgcccgttgggttaattccggtcgtgacagaatacgcgaaccctcccaagcgtccagacccacagagtagcgacacaaagaaagcatggtgccccatacacaagacggacagacatctttggaagattgccttgttttcaaaaaatcgctcgagaagcacattgcatttgaaaaaggcaagcgagtacgcgtggtcgaaaaggacgcggaggcggttcctcaggaatcggattcagcatatccagactccgacctcgacgtttcagacatcttcggaggttccacaacgtactcctcaaagcgagaatacaagaaagtggaacgcgaagtctgttcgacatggcagggggctgcacccaagatgaagtggtctgagcagaagatatagttcttggaagaagaccaccccaagaccgccgtcatcccaggacgatatccgattgtggtcgaacccactattcggaacatcaaggtcgcgcgagtcctcatcgacggtggcagctcaatcaaccttcttttcaccagcactttggacgcgatgggaattccgcaaagcgagttgacaccaaccgatcaaccctttcatggaattactccccaatcctcgtccagaccattgggcaagattacgttgcccgtgactttcggccaagccaacaacttccgaacagagcagatcacctttgatgtcgctgaattcgatacagcttacaacgccgtcattgggagaactgcacttgcgaagtttatggccgcatctcactacgcgtatcaactgctcaagatgccgggaccgaagggaacaatcactattcaagggaacgcaaagctggcggtacaatgcgacaaacggagcctcgacatggtcgagcaaacacccagcccacccgccacgactgagccaccaaagaaagtgagcaagacaaacaagacgccgaaaccggagggtgcaatcaagatcgttccactctccagtgccaaccccaacaagaccatcaagatcggggcgacactaagcgagaaataggaactcgcgctcatcaccttcctccgcgataatgctgacgtgttcgcttggcagccattcgacatgccgggggtccccagggaggtgattgagcacaaacttatggtgcgacccgataccaagccagtaaagcaaagactgcggagatttgatccagaccgaaaacaagccatacgagaagagctcgacaaacttctcaaagctgacttcatcagagaagtacttcatccagagtggctagccaatccagtcatggtgcagaaggccaacggaaaatggagaatgtgcgtcgacttcaccgacctcaataaggcatgccccaaggatcacttccctcttcctcgaatagatcaactaatggactcaacagccggctgtgagctattgagctttctcgacgcttactctggctaccaccaaatcagcatggcaaaagaggacgaagagaagacagcattcatcacgccattcggagtattttgctatgtcaagatgccgttcggactaataaccgcagggaatactttccagcgcacggtccagtgcgcacttagcgaccagctcagcaacaatgtcgacgcctacgtcgacaatatcgttgtcaagaccaagacaagcgactcattgattgacgatctgcgggaaacgttcgacaacctccgacaatatcgcctcatgctcaatccagagaagtgcacgttcggagtaccgtcgggcaagctgctcggattccttgtctctggcaaaggaatagaagcaaatcccgagaagatcaaggcaatcgagaacatgaagtcgcccacaagactcaaggaagtacaaaagctaaccggatacatggaagcactgagcaggttcgtcgctaggatgggagaatgagggcaacctttcttcgctctgctgaagaaacaagacaaatttgtatggacacaggaagccgaagagacattcgttgcactcaagcgctacctatcaaaccccctgtacttgttgctccccaacctaatgaagaattattcctctatattgccgccatgccatattccgttagcaccgtcattgttgtcgagagagagaaagtacaacgaccagtctactacatcagcgaagctctccacgacgcaaagacaagatatccacagatccaaaagctactttacgcggtcatcatgacatcaaggaagctacgccactactttcaagcccacagagtcacagttgtctcctccttccctcttggtgaagtcgtgagaaacagagacgttgttggccgcattgcgaaatgggtagtcgagctgagccagtttgatgtccactttgcgccacgaacagccatcaagtcccaggtactcaccgacttcgtagccgattggactatgcctgataacaaatcagacaaccaagtcgacaacgaaacgtggacaatggtgttcgatggtgcactcaacagccaaggagcaggggcaggatttatcttgacgtctccctccggagatcaattcaagcacgcgatccacctcaacttcagggcgaccaataacacagccgaatacgagggactactcgccgggataagagctgcagcctcacttggggtcaagcgactaatcgtgaaaggggactccaagctagtcgcgaaccaggtgcacaaagattataaatgctctaaccccgagttatccaagtatctcgcagaagtcaggaagctagagaaaaggttcgatgggatcgaagtccgacaagtctaccgcaaagacaacatcgagccagatgacctagcacgacgtgcgtccagacgacaaccgctcgagcccggcacttttctggacatcctgacaaagccattagtgaaagaggtttgcggcgaagttagctcggacacccccgacattagctcggaggccacaaaggcagaatgcgccgttgccgatatcgagaccacagacgactggcgcatcccactaatcaaattcatcaatagcgaggagctgcccgaggacgatacagaggccgagaaaataacccgtaaagcaaagatctactgtatggtcggcaacgatctatacaagaaagcgccaaacggggtacttctcaaatgcgtctcatccgacgacagcagacacctcctccttgatatacacgaaggcatttgtgggtcacatgccgccggtcggacattagtcgggaaagcttttcaacaagggtttttctggccaaccgcccttaaagatgcatgcgacatggtccagcgatgcgaagcctgtcaattccacagtaaacacacaaagctacccgcgcaagcgctctagactatccctctgacttggctgttctcgtgctgggggctagatatactcgggccattcccacgaagacagggcggctacaggttcctattcgtggcgatcgacaaattcaccaaatggatcgaagtagtacccacgggggaaatcaaggccgacaacgccatcaaattcatcaaggggatattttgcagatacgaactaccgcaccgcatcataaccgacaacggctcccagttcatcagcgctgatatccaggattactgcatcgggctaggagtcaagatatgcttcgcctcggtctctcaccctcaaagcaacggacaagtcgagagggcaaacggtatagtactacaagggatcaaaacccgcgtctacgacaggctcatgtcacatgacaaaaaatgggtcgaagaactcccatcagtactatgggccgtacgcaccacatcgacgacgtctaacaaggaaacacccttcttcctcgtgtacggctccgaggccatgctccccagcgagctacgacatcagagtacacgagtacataagcattccgacgaggaccaggaagagcagcgaaacatcgatgtaaatctactcgaggaacatcgcgaacgagttgccattcgagcagccagctatcaacaggccctccgccgttaccaagagaagcgcatccgagcacacatactttcgatcggcgactacgtcctccgacgggttcaaagccaagcagggcgaaacaaactctcacccaaatgggaaggaccttacacgatcacacaagtcttgcggctaggcgcattcaaaattgcagacagcgagggtcgcaagttagcaaattcttggaacattgaccaactacgtaaattctatgtatgagtcaataccatccgtacctgtaagacaccttacagtatcaataaagcctattcttaggcccacattacaatcaaagtgttcccgcccgatgatcccttactctgatgacacctagcgttgaaacctatcctcatgtccctttacgccgtcttgacaaggcctccgaagaacctaagggatcttcggctggggacgcccagagccgataaggccttgttagatcctatagagatgaaagaccatgtaagatctggtcgtgtaagagttctcgccgtgcgtattaaccaagccgcgaaatcggaaattaactttctaacttcacggctgggggctaggatcagagcttattcaaccaaggcaggtcaaaagtccaagagccttatcctccgagaaaattcctccgacgacaaggctgggggctagagagagtgtacgactcaaacgattgactaaagtcgtgaactgagaaaacactcttacacacgacatccggagtaagaaagatttgtcaaagatagatttcttttcaatttcacaaaatacttcttacggtttttacacaaatccaaagttatattacacctttttcctgagatatctatcacagggtacgaagattaccaagaaggccaacgccaatccatagactggaacatcttctccgccaacggcgccatcgacctcgccaggtgatctatctcagctggagttttccgagaacgaacaaaaccctcacggagaaaatcgaggtccaggcgcgggcgatgatctcataggcaagccaacacgtgccctccggcatatcggctcgatcaacgacactcctgcttcaaggcctcgtcgatacgtttgccgacgccatcaagttgagtacaggccccattcagccacgagatgtacccagccgcggactcctcgggatccccacgaggtactcggagctctctacaaaccttggccatggatgtgcagcaactcttcaaatacgagttgaaccacacctcacgacctcggagcatttccacagcctgctctttcttcactgcaagcatagtcctctcgagttccgctacttcaaattttgtcttccaatattggatacgacaatcctggccagcaagagcactctcgagatctgcttagtgtgggaacgactaagtcaggctacacgtctcttccgagaacataggggatctagtcggagaagcaaaaagggatggatggaccactaacccaaggaagtggtcgccatctccgtccccgtagcaagggtttggtctacattgtcgggcgacgcatgtggttcgaatgtgagagctggaataatcgccggtgactcgggttgcccgcgctgctggacatccccgtcatcaacatctctacaagggacaaaaagctgtcaagatcaacatgcaagagtaagctagaacaataactactcgcacaaaggcggttaagatccagttttatacagggctgcaggaa

SEQ ID NO: 19827 - DNA, 2646 bp, Oryza sativa
ctagtataggtgacccgcaacgagccacggatttctgacagattgttcccgagctccgacatgtggtgctcgagcccctgccgttgtcgctcgttgccggccaccaactccctcatcttcttgaggtcttcacgagcctccgacaactcgtgtgccagccggtcagcccgctcgtttgccgacgacgccgtcaacctcgcctccgcaatcttgcgaccgatgccacgagcactagcctcgaggaggcgtcccatctcgacatagagctcctcccaagtgaggacggtagccggtagaccacggccagccgcgggatcgctgactgggccgcttggtgtcgcctcacggctcccgggtacgagcacgacatccgtcgaggccgcagcgggcgatgcgccggaggtccctccggactcgtcttgcatagccttcgtccgtgccgccctgtgagacggccatggttcagacaacactcgaataaaatcatggaaacttaagttcgtctacttacttctcgccaaccgtcacaaggcgtcgtcgttgtggaggcgggggagacgcgtccgaggcttgaaaaacggtcgatgcgaagtaaggcgaaattcttctggctgtacgatctgacgactggatagcttaccgagggggttgatgccttgcgacgatgtccgcttacagaggagaacttcctcccctttgtccgaacattgccaccacttgtagtagcagcagcagcatcagacgcctccttggcgaccttctctttcagagacaccgccacctgatgttccgcgagcggcccgatgatgtcagtcagaggaagagcctacgcttaatcaagtcacaatgtgatctcagaaggaaaacgcagaatgcctatcgagtacacttacattgatggcagcatcacgttcggccgcccttttctcacaaaggggaacggggatggtactcgccgttgtcggaccactgatcatcacctggccaacacgatgttccacggcttcactgttcaggcctatgaatcgagaaccaaattttgataaatcaagaggaacgcgaacatgagtatgtcaggataaatgcgagaaagataccccgaggagaaacccgggtcgcgtcctccggtctggaatagtcaaaggctggatgggctcgatcctggagcagctggatccgcttaccaacgaagtctgcagcgacttcataccccgacaagcctcgtactcggagatcgtcgataatgtcgataaacgactggagagagcgggtcaaagggggctttgcggtccaagacgaaatcttgtccggttgttcctcgggaacaacgaagacagggttcgaatctttgatctgaaggtagaaccacctagtccgccatttgctgcgagaagaagggcactggaaggggatataacgcgacttcaggccatcccgaagttggaacccgacgcaaccagacatgttggactccatccaacgcagctcgtagtagaagcgaaagagatcaagaaagggctctaccccaatgtaggcctcacaaagatgagaaaagatgctaagaaaggcgatagaattggggttcaaatggagaagagaaagaccgtagaagttccaaaccaagagaagaaattcggaaggcggagggagaaaaccgcagagaatatagtcttcggtcacaaccatgcgacctaagacgggctggggattagtacctcctgcttccctttccatggttccgcgaccgggatgggcgccgtcttcctgaagcttcttcagcgacgcactggtggaggatgatttgccgaggtccatcgttgatcggagatcgccgaagaaagggctcaggtcgatgaactagggtttcttgtggcagcggagaagacgcagagcgcttacaggcgggatgttttcttcacaataggcggacttcaaaatggatccccaaaattcctttaaatagacgcacttccgacagtacgaattccaaggaaaggggagagatgcccgccggagatttctgggtccgttacgcgcggcagttttttggacttcagtttaaattcactcatgaccgttgggcttcacacggtgttctcgactacgtcctgtctctacagtcctcacaccgggaacgacaatagtctcgacacaagaagtcgcgaatggttacacgagttcatttaagcagaagtcggggggctactgtcagggttacaggttaggcataccctttacccttcgatatatattacatatcggtacggcatacccacgcgcatacggatatttcctgcgtacactaaggaaatccttcacggagtctacggatgggaagagtcctactcggacaagactgggtcatcaatgtatcgtatagggtctgttatctccgagttctatttgtaaaccgcctgacctgcgatataaaagggaccccccgggaggacctgaggcatcgaatctcagagccaacacaaccctcacagcctacgaagtcagagcctgcaagcagccgaatcgtcggggatctagtcgagccaactcgaccacgatctcgccggatctgtcaagttccattgttccctttgtaacctgtgttttccaccatataatgccacatcaactggattagggctattacct

SEQ ID NO: 19828 - DNA, 5652 bp, Oryza sativa
cctcaaacgtcgacaatatcattttttttgtttcatgatatgtactgataaaccctcatgtttcattatttgtttttttttttactcctagctcgattgtcccaaaaaaatatatagaaaattacttaataattctcgcagcaaagcacgggaaatcacctaattttcttaataatcatgtctaacccaaaacttcttatattctgagacggaggtagtatttatttgctaataagctggtagcttatactcggcataggaccaaccgacgagggctaaactatggcatcatctctgtgacttgagaggtttagggttgatgatgacagaccctggtttcgcgcgaattggtgcagtttttgcatcttggtgtacatggagtgagtcgaatgcatcgattggttaacaaagatggtgaaaaccacgtgagatcaaaaggggatatataataaactcagtttccgttgttatttttctggtggatggaacttcagaactcgcgaaacacatcgctccatctgccggtcatgtgaaatctaatctaatatagaggaagtgacaagtgaggtgtttaatggaaaaaaaaaagataacccaacccttttcttctccatttttgaatgcaaaattattgccaaaatatttaaaaaaaagaaagaaagaaagaaaaggaagtcaagcaaaaagcaatctaacggccgggctatttggtaatgttccgtagatttatcattctttcttagtcaagcttatcaaaggtgaggccatcaaaatccaaaccataatttagccaccaaattaaagctgtcacaatttacataaattcttatcatacttatggatgtcaactaaaatatgcatctaacatgattatacttatataacaatgcataagtatgataaaatgtagcaatctgtggctatcaactaaaacagcctctaaaatcttctagtatagatgtcttcccatttcatttcttaaatatgattcggtttgaaagggaattaaagagaatcgaagattaacagaaagggcatttggttgccatcccatgtgcacagctacttaggagtacacattttggaacggaaatatgctcatttggccgcaaagaacaaaaaaaaagaaaaggaaaaagcacgccgactgacagccgtaccccacatacaccctctgctcatgccctgccccacatgtcagcctcacgccgcccgtgggccccaccacaccgagcaagtccaccttcctttccaaatcccagaaaccgaagcgcgcagccgcaagccaaaatttgagggatttttatctctctctgttttcttttttttaatttaaatcatcattccgttccccccatctccgcgtcccacggtttcgtattcgcgaaaaaatcttacccgccagcgagcgcgcggccgtggcggcgatcgcattggcggcgacgcggcgagctccaatcccctcctatggcggagggggagggctcctcttccaggtgagcgcgcacgctgccctcccctccacaccccgcgcagcacacgcgggcgctcgctgctcgggtcaagtctgatgcgtttctttgttcgttttgggggggttgcgatgcgatgcgatgcgatgctggggggtttttggtcgcaggaggtgggcgttgggcgatccggatgtcgtcgaggtgtcgccggaggcggcggcggcggcgcgttggagctccgcgcgcctgaagcggaagcgcacggaaggcctctctgctctctttcttcttcttctactttcttttcttttcttttttctttttttctttcttttttttatttttgcgtctctgaatcttgcaagggtttgggctgtctctcggtagggaggttccaatacgcgcgtgtatcagcattgggaagaggattggaaatggcctgattctttttttttcttttcttttgggtgccataatgtgttgtatgcctgttataaaacatggaacttgcagtttgttcattcttgattgatcaatggaaatccaattctgccatatagatcaccgcattggcttctgtagtgattccaccaagtctattgtggtggctggttgtgttcgtgtaatttatctgtcaaatgacaagatataccccatgctgaatgtggagtcgttgggtgtaatccaacttatagccattaggcatatcctctcatgaaagtagcaattgtttactggaaagccagcacaagtcatacatagttcactttgcattctgaagtatgtttttgtatcccatttccctttctatgtgtcttttgattgttcctgggaattagtttgtgccacacaagccgtgttacgacttttaaggtccatttcacgaaacccctccgagaaataacagtttcgttattgcaactttgagtaagatgcgaagaatctaatatgctatatgtttaatcaacagactgttgctcacgaaataattgatctcgacgccaatgatgatcctgatggagttatgataatttgtgagaaggcgtcgagtcacaagagtaatcattctgttagtcatccttcggattggccaaagcatccaaaggttaattcattggagtgtttttgtttaccattgtttagtgtgctatgctaacagttgatatatctttctccattgagtaattctagagtggcttggctgaggatgttcctggtccaagccatcaacctggcacgagcacagttctaccatggggatgcacaactcctgggagaccacggaagcataaggaaattaaaaccgtggataataaaattgatgagaagtataaggcatttaagcagtttgatactgttaccgaccacagtgatcactattattcaatgtcaggcaaagggaatgttcctgaagtcaagaaggtatgagtttgcacgtgcacgtgctctatcttcacttgatctctgcaattaaatgtaatcattgttttttggcagccatccaaggactgggtgaggcggattcaacatgaatggaaagttctggagaaagatttgccaggtagagctctctgttcttttatggtttatttactccagatgttgcacatttgattaagggagtgctcctttttttccccatactattgttcttcattcctctttctgtacacgcacattaggtgagcaaaagctctaatacatgtttacaataaaatatgaatccgtttttcataatgcatataatgaccttgagtatattctctgtaacttctattggatgtagctggatgttaaaactgaaatgcagtagttcatgtcctgactgcatctttcctccatattgagcaggtacaatttttgtacgagtttatgaggataggatggaactacttagggctgtcattgttggaccggcaggcactccttaccatgatggacttttctttttcgatgtatatttcccttcccagtatcccaagaaacctccagtaaggatttgttaataatgtcatatgcatccataaagctttgttattccttctctctattctgagcttgcatgtgtgacatataattggctattctttcagctagtgaactaccgctcgggagggttgcggcttaatccaaatctctatgatagcgggaaagtctgtcttagcctattgaacacttggtctgggcatgggtgtgagaagtggaacccatccaattcaaccatgctgcaggtcctagtctccattcaggccttggtgttgaatgcgaaaccttattttaatgaacctggttatgcagcttctgctaacacaccccagggggagaaaatgtccatggcttataatgaatcgacatttctcctatcctgcagaacaatgctgtattctcttcggaatccaccgaaggtatgactacactacgcttacatgttttccttcctatttgttgtggatatatatgttctattctttttcgcatccaataatctttgttgtcatttctgttgatgaagaatgcctaatcgttaactgtttccattgtaatggtgtaaataatgtgtctgcccgtttggtgaagaagattaatatgctgaattgttgataaagatgggtgtgatgaacctgtattgttttgaatggtctattttgctttgccatgcgttgatgcctgagttccttacataaagctgctgaataatccgggtgcaacttttgcagcattttgaagacttcgcaagggttcatttttgcaagtaccggcgcaatatcctcgtaggatgcaaggcctacatgaatggtgcccaagttggatgccttgcaggaaacggagtgcaggatgttgatgaaggcgacaaaagctgctcagcgaacttcaaaggctccttgaagacgttatttgatgaactcatcaaggaatttacccggataggagttcattgccatgaattccagcctcagagggtgaatcctgggtctaccagagccaaggcggacaccacattgaggctatgataatagtaacgataggtggtcaacatgaggttgacaattttttttttgtttcttggggatcagagatatagttgttggtgctatcctcagaaatcaggaggataggagggcaaaaggcctgcatcagatcatgtccaattatctaaaccatcatgcggttagttggtttttgtgtatatccctgttaaacatgtgggttctattcatctaagaacagtagtttaccacattcatcaaagggccatgctggtgttacctgtttaccttttgtttttgttttttttttttttttggtcaagcaaaaaaggctgtttacgttttgttcgccggttttggtgtccgcattgagcgtgaagattgtttatccccgccgaagaaggcgatttgctggagctagagataatgccggaaggagagattaatttacaaattaatcttagtccatagagtagacgatagtcaatcgttaggattggcttaaatccagacgatagagatgaggccaaactccagagaatcgattggcacatggattaggctgtgataactgataagggtttgtaacttgttccccgcactaaaaacaagacagctcattagagtattaattaagtattaacttaaaacaaattaaaagaatattaagttaatttttaaaagaaactttttatacaaaatacatcgcttagtgcttactagctccgtcccaaaatataacaactcttgactatgaatctagacacatattattatccagatttatagttaaaaatatttatattttggcatggagggagtacctgtgattccaaacacaacccgtagagagtagagatagtagaggtaagcagtgttcttgtgcttgaataagttcacattaggtcactctattggtcacccagtctaattttcatcctcagtccagaaaaccggatacaatacatccctcaactttacaaaaccgtgcagacgagatccctcggcagtattatatctggttttggatgacgtggcgcctacgtggctggtttgactagatcctcgtcccacgtggtattgacgtggcgcttccgtggcaattggatccctgaaaaataataaaaaaaacatgggacccatatgtcagctaaaaaaattaaatggtggggcccacatgggccccacat

SEQ ID NO: 19829 - DNA, 3797 bp, Oryza sativa
ccgccatcactgcctgcatcttcgtcttcctcctcgctcccaccgcgcagcaaccgcggcaagcagccggcgacgacgacgtggagatggccgaggggaggaacaacaaggtcgccgacggtggcgggttcggcatggtgctgctggagatgctgacgggaatgcgggcgctagacacggggaggccggcgctgcagcacagcctcgtggagtgggccaagccgtacctggcggaccggcggaagctggcgtggctggtggacccgcggctggaggggcagtacccgtccagggcggcgcagcaggcggcccagctcacgctgcgctgcctctccggggaccccaggagccggccctccatggccgaggtcgtcgcccagcgccccccagtgctgccacgccgtcacccgctccagccgacctcctcgtcgctcagccgccgcccgctccagccggcctcctcgccgctccgccgcccaggagcgggagagagataagagggggaggaggatagagagaggggatagagagaagatagtgaggacgacatgtgggtccacatgggcccactatttttattattcgtgtgtgcagctgacatgtggccccacaagttttattattatttttttatctaattgccacgtcagcgccacgtcactaacacgttggacaaagacctagtcaaaagaagccacgtcggcgccacctcagacaaaaccggagtcaaatactgtcgagggacattatttaaacggtttcgtaagttggggatccgttgtacccggttttgcgattaagggacaaacattggactgggcaataaatagagggaaccaaagtgaacttattcctctcgtgctgggccggacttcagtttaggcctgccgaagtacctaattgggctctctgggccagattatctgtaaattggagaacaggctccttgtggaaaagcgttagcttgagggggggaatttccaatttaactcgttgaatctgattggcatccctaaatcaaaacagatagaacagttcctccaagtccaaatattaaaaccgtgtagaatgactccgcgatgggcacactcgaattagtcttttagcatgtgaatccatgctaaactgggtagggaatcaaagattattcgtccaaattggttatgaccgtgggatatttcaaagcgatgaactgagcattttcgactatatatttccatgtcactcgagaaactagctcacattcgtatgattctaccgccgtatcgataaagcgactagccataatatttttattatggctctcatttcttctctctgcctgtttatccccccccccccccccccagtgctggaaatcaagcaatatccatattcaggaaacatatattttacctagcatctcactttccctccacagggcaggacaaaattctgaggtgactcattatcagtttttggccaaacttttcacatagagcaaaaataaacctgtggctgaaactgggcttactactcacatcacaaattgaaccatgcacataagtctcaggggcggttcaggtttatgccattttcaacataccatttttttttcaaagttaccaaaaaaatatctgcgtttagtttgttgccaaatttgataaatacataagaaatcctgccaaaattttagcaagataggctgcctatcttgctaaaattttggcaaggtttattttggctataatctgaacaggccctcaaatgaaaaaaaaatagacatataaaatccacacactgcaagaatccttttatctgcatgcaactccaattatgcgtatacaatacacacaaattggtctccatcaagtgttccaatcactcaccctatcagaaaagcttgagatatagtatgaatctatgcaatatttgtgctagtggtgtctatgcaatctttgtgctagtggtgtcagacccctcacgaaatccatgcagagcccacaaatgctacatcctattgcgttgtttgtggcgcttcggattctgacaaccacatgatggtggaaatttggagaagctggagaaactagcttttgacctctaaaaacaattaagattgagaattgaaatagatatgattgattgaaatggaaaaatatgtgagaaaaaactaaatttgaggtagatgtgattggtcgagtcgaggaagtacaactctatattttcattttgatgaattttaaactccttatcacggagggaggatcctgtatccaagagcgccgcaaccacaaaaatcagaagggtctcactctaaaacctcatgccgtgccgtcccattgtacggcgcctcctccgttcgctgaagagacacccagtgagcagtccatgagtgaccgatcgatcaacaacaattgattaactagataattattagtgattaacggcagtaacagcagcaacatgaaagctgtcagcccatgctttacatgcatgctgattaacaatgagcttgaggcacaatgaagttgctaattgcattgagtaattgtaaaggttgtttgattagcatttgtctcttctctgggcagataatgctgctggatggctttagcacatggaccctgatcctgtctactgcagtaggtaactataggtgcatgttcttctgctttggtgaaaagaaatggaaggaggttaattaatggagtcatggagagcaccatgattcgataggtaaatgatactctactacagtctacacactccatgttctgcttgattttgaaatgaaatttccctggatcataccatacttgagtcccctgttggatgatcctcatgcagaaaatgtgagggggaagaaggaagaagtggaagatacgatgaagaacagcaagagggactgaaaggaacaagaggatgagtccctcctccaaaaagatcctgaatccacccctaaccataagttgtcagcataaacttgcatgtttgaggtggattccaaaacttgaccaaactccgattaatcaactttcacgttccataacttggtttaaatttcggtctttctagacatttttgcatttttgtctccttctatgcattgataatttaaagcctgtggccggtgtcatcgctaaaagcggtaaaactccaaatatgtatcctacacgcgtggagtgccacctttgattccctacgaataatgaattttcgaagaggaaaatgtgtcattaattgtgagatattttcttggcatatgatttagttgagtattaatttctatagacttaaaaaaatgtgcttacggaaaatgagaaaattgccgtaccttgtccaaacgaagtcaaccttaggccccatttggcagtgagtttaggacggtatagctccggttccttttttttttttttgagctgggcattcctaacacataaatttatagatctacgattataacgataacatttaaataaattaatttatttctattaaaattttaaacatatatagttaatatataactttaaatctatctagagctatgccaaacaagatgtaggtgtggcaactttcttgttctctgctagcatgcttcacaaattgttaaacggtgagttcttttgcaaaaaggaaatactttgtatataaatgttttcttaaaaaatcaaataaacctaattttttaagtctgtaataattaatatttaattatcatacattggcttttctcattttgtgtcgtgaattatcgtagaacacccaaaacaaactactcccttcatcccataaaacaaactaataggagacgt

SEQ ID NO: 19830 - DNA, 2802 bp, Oryza sativa
tgaaaacaaaaattttttttagttgatttaaaattttggtgaaattgttgtatgaatatcattaaattttatttttatatttattaaaaaaggttgaattttcagttttcaatttttcagacaaataatcttatcttcttttttttaaacaaatgaatctttgttcatgttgagaatcaagttttttttttttaaaaaaataagctagtgtataagcaagcgagtgggataatatagtcattttgaaaaaaaaaaatcaatgactagttcacattgaactatgtaagattgagatctttccccagttttcccaactcatcttccttgtttttcgtccgcatgctttttaaattgataaatggtacgtttttttaaaaaagtttatatacaaaaattgctttaaaaaaatcatattgatccatttttaaagaaaataattagctaatacttaattaatcacgcgttaatggatcgttccgttttccatgcgtaggagatgagtttctaacccaaatcaatgaacacagcctaagaggtcaaataaattgatggtaaactcagggatatataaagaatttcttcttttaaagaagcgtaaacctcatttagattgagtgcgtgtagaatctttttcctgagttcctacaagaaataatattgtactcctacgtatcgaagtcatgcgaaactcatgcatggccttttcacgtttttcttgttaagaaaccccaaacaacaagcttctaaattaaaacgagcatcgcatgggctgtgtaatttggtcgcatgattgttatgttgggcattaatattttcagcgtttaaagaaattaacttgacaagctaatcactttcaaaactaacgatatactaaatcagagaagtagagagcgtaccacaaatgaggataggcatgcatgattgaagatttgaagagcacatgagaattatacttcgcttatttcagcataactaaaacttattattattattattattattattattattattattattattattattattattattattattattattattattattatataaccaatatctttgtctcgctggcaatacgattccaagctgtgtgtatttttcacatcagtttttttacacatattgtaacaaacctaaaacctttgtgtatttttcacatcctaattcacgctgacaacaaatcgacaaccaaatttaatttatagtgtcattgtccaggttcatcagtagaaaacaaatctcgccaaaccttgcaaataaaaaaacaaaaaaaaaagaaacaaagtactcatccggatataattataattaactcggcaatttggttcgacgacgtgatgaaaaagccgcggcgggcgcgggcgtgcgcagctacgcggcgtgggtgcgggggttaaacaagggaaggggtttttggcgtcactcgcttctctctctcccctacgcgccgccggcgagatgcggagcctcgccgtcgcgagccccctcccgcccgccgccgcggttcgccgccggccacgcgcatccgcctccggaaggttcgggacacatccctctctctcactctcacggccatcccattccgccgcgttgtgtgtcgttgttcgttgctgcgaaatgggtcgcgtgcgtgcgtgtgtgggtggtgggacggactcgcagaacggccgtcgcatttcaggtggacgtcgcgcgggtgggtttccggccgtcaccggaggggttgcggtcaccggcccgatcgccgcggctagcgcctcgtcctcctccggagagaggccgcaatggatgtggctggcgtgcttgcagttggttttgcatactcaatcggagatttgagatgttcgagtgatgggaggtggtgtagggaaatccggctgtgggtggtgttagagttggtggatgaggccgattggttgctcccttctctgctttgatgggatttattaatagttcatgaactgagagttctgcgtttcatctctctcgacgtaactgtggaatttctcgtacaaactgtttcagaattcagattatgcgatagttttagcctttgcctgtgcagagtgcagtcacggaagaagaaaacagacgattgatttcttagtattagtgccaaccatgcaaattcaggataagccatgagatcttcagatttcatactgttggcctcccaagccataattggtacaagactgatggaattcaattttttcctaaataccagtctccataagttgtgaaacaaatggtgggtcaatgaaatatttgaatcaattgtaatctggtgggcttcaacggagattagtttagtccatgtcaatttcaatcaactcattacatcatttttagataagatattgcattgttaacttgctgttactacttgttcactccatgcaacgtcttctgtacaagttttagcttatcttcttctcataacattgatgctatgctgcttggcaaatcttcagggaagtgatttcacaatgttggaagtgtgagataaatcaggaccaacctttggggaactccctaaggtagataattcccccttttgcagtgaatgctgctgtacattaataaagtacctttcaactagaactatgctgtcatttgacaatttcacttgctgtttagttgtaaaagtcattctcagatacagttgcattttcactgcttgctgtccgatcttctaaaagttattcaatacaatttttagatacagttgcatttgcactgcttgctgtccgatcttctaaaagttatttaatggggtgcaggaat

SEQ ID NO: 19831 - DNA, 2155 bp, Oryza sativa
ctgtccgatcttctaaaagttatttaatacattgttcctggaacatgtttttcagtctagtctgggacggagggagcagtaattaacttctgaagtcttgtgttatcatctgcattatgttctaggagtatatgataacgatatttcttcatcagttaatattccttttatcttgttactgtcttattcaggataggtcactcacaaggtagtttgcaaagacatggttccaggaatttgctcgcagctgctggtatatctgctttccaccatgcaagactattatttgattttcttatctttcaagaaattaaattagcactgccttatcttttctggaaatatttataatttatttcttaaaacgtggctgttaattcagctattagttgaaaaatatggattggtcttcattttgactaaccagggtgctttagtgatactttttattgttcagacttgctcaaaggcctgggtatggcaaggcacaagacttgccctgggccaatctaccttaagcttgatgcctggaaaaaaatagtttatctgcttttatgcaacagtgctagtttatattatgccatattgcaatacatacatagtttccttcccatatttggcttgcgggtgcctcagtttccaaggtcaacctgggtcagtttttgaatagctcatttcagttaatctgtttcaattcaacacaatactgcaatattagcctctctctttcttgtttccatctcagttttcaagttcatatagtgctattggtgtcggtagtctataacattctaaccttattttaccagacatttaaccatgttaatttattacgtctctctgcatgcatactttttgcttgcagcggctatttcaattgaacaagctgaagtcagtacttatcttccaaaaggtgacatgtggtctgtgcacaagtttggtggcacctgtatgggaacaccccagagaattcagaatgttgctgatattgttcttggtgactcttctgagaggaagctgatcattgtttctgcaatgtccaaagtcactgacatgatgttcaaccttgtgcataaagctcagtcaagggataattcttatgtgactgcactggatgaagtttttaataagcatatggctgcagcaaaggaacttcttgatggagaagacctagcaagattcttggctcagttgcattctgacatcagtaacctgagagcgatgcttcgtgctatttttataggtttgagctttatccatatccatgttaatttattttaagttagaagtcttgttttcggtggaatatgtgttgttgcatggctcataggaagtttgtttgcttgatcctgagctaaccatgctttgacatttacatcagaagcaccatcgcttgatagtatttatcttttatcagtgtttattttttgaggcctatgcatctgttcgaacagtgacgttttatccactgctgccagaaacttgcagtgaccctgctacatctagcctaaattagggggaaactatcatactgtttccaacttcactgcagttgtttgagtatatatgcagtaacatgagtgtcatgatttttttagatgtttaatacctttgtttgtttatgtatgtttcagctggacatgcaacagaatcgttctctgatttcgttgttgggcatggagagttgtggtcagctcaaatgttgtcgtatgctataaaaaaggtgacgtaaaaaatatgcctgaaacatttttacaaatatctctaaggttcaacaaaatggattttgcagatggtttattcattctgaatcaatatttcctacactgcatggattatgttaatggacaactaaactacaatgatacaataacatttgcacatactaataccctctctttcaacaaaccagagtaaaatgtgaagttagtatcaggggtaaaattaagccttgaagtctgaagaggctgttctgactttccaaaagttcagttacaaatcctgcagcatatgcagcaacaacatatgcttttgtagttcagaccttgtcttaatatattacgtgcaactgccagtctgccaccatatgatgctgtagttcagtaggacaacttggttaatattagtgtgtaaatgttacttctccattcttaaa

SEQ ID NO: 19832 - DNA, 662 bp, Oryza sativa
tctggatcttctccaggggagaccacgacgcgtgcggattcggtagaccagccgcgacatccgctgtgcgacttgtccgaccaccgcaccgacgtctgcgacctcgccggcgacatccgcatggacgccaacgcctcggcgttcgtcgtcgtcgtcgacccggcggtcggcgcggacgggccgacgtacaaggtccggccgtacccgcggaagggcgacgccacgagcatgggccgcgtcaccgagatcacggtgcgcacgaccgcggcgggggcgccgccgccgcggtgcacgacgacgcacgcggcgccggcggtcgtgttctcgatcagcgggtacacgggcaacctgttccacgacttcaccgacgtgatcgtcccgctgtacaacaccgcggcgcgctactgcggcgacgtgcagctcgtcgtgacggacggcaacgcggccacgcggcggtggctcgccaggtacggcgctgtcctgcgcggtctgtcgcgccacgtgccgcttgacctcgccgccgaggccgccgccggcggcggggaggtgcactgcttcgggcacaccgtggtcggcctgcgcgcgcacggcgagcccatcatcgaccgcgaacgcagcccggacggtctcgggatgccggacttcacgcgcatcctccgccg

SEQ ID NO: 19833 - DNA, 1036 bp, Oryza sativa
ccccttggatcgtgcccccaatcgccgggaacgcgcgcgttttctccggccgctttccatggccgccggccgccattcccgtcgccgttccgccctctccagtgctcggctcgcttccctccgctataaaatgcaaccccctcgctccgttctatcgttttagccccctcccgcgatctcccgtggtccctagccctctccccgccgtcctcctctctctcccgtgccgccggccgcctccagccgcctctccctcctcgccggagcgccgtccggtcgcgccgtcgcctcctccagcatcgcagtggcctccccttccccggcttgccctccgtttcccgcggagacccccggagctgcgttcccgccgtcgcccttccctttcctccgcgccggccgcctccagccgcctctgtctccctgcctgagcaccggtcgacgtcgccaccacctccctcggctccgcgacgccgctctcatccccggcatcacctcctcctcgcccgaatttcgccggaacaccgtcgcccgcgccggcctcaccttcctcctcgtcgacgtctcctccggcaacccctttcgccatgcccgtgcgtcagccggcgctgccgtcccctccctcggcacggtgacgtagccctccacctcgtccacccctcggtttcgcccggaagccgccgcacatcgccgcgaacctctccatccgcctcgccggagttgttcggccgcccgtccctcctcgcccttgcaccggtcggccacacctccaccatcttcggcatcgcagccgcgacgtcgtcctcggcatcgcttccccttcggccgaacaccgccggtatccgtcgtcgtcttcaccgttcatcctcgcccggttcgtcgtctcgcggcgccgcctccgtcgtgggcatcgctgcggcgtgttccacgccgtcctcgcctccgtgcagccgctgccggctgccctcgtcgcctcctcgccggtcccggtcgtcgtcgtcgtcgccctctcgtcgttcccggtcgtcgtggcgttcgt

SEQ ID NO: 19834 - DNA, 6622 bp, Oryza sativa
ccttcctgtcttttccaggctagcgcttacacatgttttatagttgcaaagcttaattataataatccgcaaatctccatatgacagcattaaacttcggatgaccatgtcttggtcatacgagctccgaatcgacccgttcaagtctcttaatgtttgttataacctaaagaaccctgtgctttctttttatgtattgttattgcttctttataggcttgtagctttgcttgtgtgcttcgcgtagtcttcgtcgttctggaggttcccgaagcgtggttcgtggtcgtcgccgaaggttcggaagtccgttctctctgagcaaggcaagtcacatcatccttgaacatattgaatcccagtttataaaattattctgatttaaattattgcgttatcgctctatttaaattcccgcgttatcaatgttttatttagccatgcctatttacctttgttatgaccttattattattgctattgttattattaccttgttcaccctaggttaaacaaaaccccaactagtgggtactctattcatggttccactagtatgaatttaggtagatgcttcgctgattaattaggcaatattaggtggttttataactttagactttgggaattctcatatcatctggacagtatggaatggttggcttatgttggaattggacccacatctccccctctattcaaaacccccaaaatggttttaggctgggctcgaggtgcgtggttgggtttggttagtcgtacctcgggtactataaggtttaagctcgggcctctgttgcaaagcactaccgtacttccacatgtctagtgggtaaggcttagtttgtggctcagtctggttataaacaaaagtacacggatggagatggacgaagtcgggggtcgatggacatctctaggacaaatgaaggctacacgagctgcggcccggttgtcgagatgtcatggcacagggccggtgtcctgctgctgggggctcagtcctgcctacctgtcccgggggttccggccgtaggtgggattgggtcggtactcttgtttatggctaggatgggttgggaactatgtcacgtcttccgtccgtataccgtggtggtatgtggcacgtggttacacgtgaggaagatgtgtcttgtgggtaaagatgtacacctctgatcagagtataatctattcgaatagtcgcgccctcggttatgggcaagccgagcaatatacccaagttagtgttttaattcttaaaacctgcttaacaactaaaatgtggaatggttggcctgggttggcttgggacgagctgggacccagggtcgggttgccagtttggtctgaatcatcgtaggccttgggttaaggcaggttcgtgagggttcacagccttgattaataacactgtgtaactctaggatcgtctttataaaatggctttgggcaactaagtgactttaaatgctgttttctgcaaaacttaacccctatattattatccccttgtactcccttgcattaattgtgcatctccggtgtggcttgctgagtactgtggttgtactcattcttgctcaacctttcccctcttcagtaagagaagctttggagaagatgttttaggtgaagtcctggcttataccccagttgagcgcctgtgaagatggagccgtaggcccgctagtccgctgctgtttatttttgatggtcaggccttaagtgcctttgtaataatgtaaatattattgatataataaagatgtgccttttgtatcatgtttgtgtggtgtaccccggcttttcctgggacggggattaatacactagcgttcgggaaaatgcaattttcccggtcgcgacagcttctcctagtggttaacagccgatctcgtctcattttcaaccctcaaccatgcgggtgcttctccctctgtttctttttggttaaccagttcaaaccttagatcaagaacgaactgatgggagaagaagaaagaagatgcgatctaatatttttggggcaattgcacatttgaccctatttagaggtctaactacaccctgttctcgtcactttgctcatttgaccatccctttaaaaaacgaagctacactctaaccctcttatgttcaggacatttaacggtgttaacaaaagcttaaaatatcacttctacccttgcttatttgaactttttcttccaaattcattgccctttgagattagccctgacagttggactgtaaagaataccgacattgtctccttctaaatgacatggaatgactcggggggcggtatttatccgaattacttcggatgaaagctctgcctcccttaaccattcgtcaatcattatatatgtcagctcccaaacagtttcccttaggaatccaagttccataggatcgggaggtggcaaaggaacaagtggtttctttttgctaaaataactcagggtgttgtcgtaatcttcatcaaagccatccctgaatagaactggagcattatccagagtctgaatttcttcattctcaacggatgatggctcaggaactgcttcatcagtcaaatcagtcgaagtggaaggttcaggttgcgattcaactattgatggttcctctatcttagacgccaatgcctctggaggggttttatcgcattgtgtcatgaaggaagtattttctagaagtcgatctagaattactttttcttctgacggagttttgtgcatgaatgatccttcggcacatactcgggtatagacaagcttggttcagaccacactacattagtgaatctggaccaagctgaaccgattgattcgttattgatctgctggaaactaagtatttctactcgaagggtggtaatacgagtaactgggaagaaggcgagacaaaacctgtcttgcaacttttcccaactatcgtttacgcatcctacgatagatgtgtaccattgcttcgctctctcttgaagagagaatagaaacaacttccaccgtatagtttcttgcttcatgccatgagcaaatttactcgaagttccgctgatgatggtaggaattttccagatcgagaccagaaaaaggtttttccctaatcatactgattagttcggggcgaatttcatagcaagctgtaaaaatcggctccgatgaaggaggtgactcatagaattcgcacctaggggcagagagctcgaagagaggttgctccatggtcgagaagaattgaataggaatacttctctgggatagcaggggtagaggtagaatagaaaaaggtaaaaagaatacgaggatgaacaagattcggaaataatcagcaaccgttccccggcaacggcgccagaaatgcttgttagtatttcttaacgtcacagatagaatctgcaagcacacggaaaatactaatgtagcacttcacccggaagtattcttaggtatcgatttccacagggaacggataattgcttccttgtcaggttcactcaaggacactaagctaaggtgggcaaaggacagagaagatttcctggtgagaaacagcgtctagggaaatcttaattttaatcctaagatacttcagtcactggcaacccgttgttcccagatgtcgctctactacatacccggacagggaggacttaagtgcttttgagggctgtcaccacctctacatccaccttaaacatactgtgggatatgtaacaataactggataataattacctaaacaccacgtctaagcaattaatatctactttaatgtttataactcactaaagtaatcaccatcttttagttggttatagtgaacaataatcccgtacgctgattagaaactaatcaagaggtcattctcacaagtaaaatctaaattacgcagaataatatttcaattgaaaacaaagtaattaacagaataaaagaaacaggaaagaattaccgacaactctggaagtcctccgacttcttctactctactctcttcctaattctaatatacaaaatagtacaatagagcctcttataattcagctcaaacttggaagtgtgtgaagaagtgaaggagtaaagttccttttatagggcaggtatgatggttggaatgatgcgaattatctgaattgccccgcaaccatcatcaggagagcatctggagcgtcccgccaaacccttggagatcagggttcggccgaaccttggctggcccatctagccctcaattttggcctatggactcctcctgtcctaccttatccatttcttcaagttttgagcaggttctctgatattttaatgaagtctaaagcccctttctggtatggatatgttccttcttcgcttagtctgattttcctcccaactttggtggcttataacctgcatcaattaaacaccaacacttgtggaatatgttagaattaacacctatcactatgttggatgttttattatctgggttttatgcagatgttggcggtataaaatgagcacttaacagtttccaataggcattgactgagtcctaggggtgcacctagggtgaagccgaatgatggagcccgacgggtttgccaccaagctcactatccgaccacgtcatcactatgggcgaaggccactgagtcctaggggtgcgcctggggcgaagccatagggcgaacctcctgagcgaagctgaacaatgaagaccgaagggttcaccaccaagctcactatccggccaagtcatcactgttgacggtccttaaatcataatatctaaccatcaatacctgcatataatgaaataaatatggtatccaacttagtggtagggtttattactaatcatttccactagtattgatgaaatatgtgtatgcaggtattttaaggagaaaatacattcgtcacgcgacaaaaggcacttacgcacgatcaggacgcgtttacacggattggaggccccataagtcaataaaaactacttagaattgggctttggtatagtacatgatgttgggggcccattaagctacttaccggccagaggagaggccgggaggacgttttttctggttcagccgaaccaccagttcggctgaaccggtttggtgtccgttcatcgccatcttccacgtgtacgctcctggtttcgtccaaatgacggttggagggcacaatggtcatttcccatacttgtaaccgtcatttggagcctataaaaggaggtctcctttacacttcacgacacacaactttgagctaaattacaagaggctttattgtatcttttgtacattataaataggtagagagtgaggggaagctctggaggagtgcccagaagtttggcgctcatccgacttctacctcgacgagtgtagctttctaggaggaattctggaggagtaccggagctgtcggtaaactctgctctaggttcggagaaacttcttttataaagtaagcactcgagatcctttcttttgttatttaattacttagtatgagtaagatatatttccttgtttgcgggttcactgtttagtattcatactaagtgctctactagtactctggataaagaaggatgtttctgcgcaagtattagagtagtaattaacaacttagacgtcgtgtctaggttagagattacctttgtttgttgtgtatcccagggatttgtcagagatagatggcaggtggtgacagccctgaattccgtcctagtaatcctccacgttcggatacatcatagagctatagccgaaaccacgctggcagaccagcaggggtcggtgcccaaagcaatagataggaaattccctttgcttagcacagataactaaaacacataaaagtccactctagcctagccagcctacctatagttgttgtccttggatcgccttagccttaggttgattacacacgttctctaagttcaatatccttttagggtcacccgaaggtgaagtgctatagcggtattctgtgcgcttgtggatttatctgtggtcgtaagaaatactaacaatcactatgggcgaaggccatgaagtggagcaggaggccttctcctgagtaggaggtgcctttgactaagggcttgggaggccctgcggcccatgggggcctttctgcattaatgggccggtccaaggaaatcaccagatggtacataaatacaaaagacactgtgtacccagtacccacactaatgtctctatcataagggtatccctataaattcccctgtagtaactaatccctagggccatgcaatggggagatcccaaaaattttcttaccaattaatacattgcttttactattccatcaactcatcgagtgaaccacgtccttcgacatgacgcagttgtctttcgacactagtaacaaatatttgacaaaactcaaaatgataacaagcagtatatgtataaaattttatcattaagatcaacatatggcattggtaggaagggaacatcaatgaggagaatgtaaaactatttattttcttctttttttgtaaaattcccaagggttcatcatcaagagtaagattcatatcatcgggtcatctcttattaatcaataacttagataacaat

SEQ ID NO: 19835 - DNA, 2864 bp, Oryza sativa
agggttctttccatcctgcgctattaaatataatgttcatcctatagcacataatggagggttgataacagaaccctaaccgtgatagcatttttgcggacaaagtcgcttatgcgatggcatttcatgaaactcacacttctcaatagcatttcttggaattgggcgcttgtcaatggtatttcttggattttctctttgttaattgatggagttatttgttcttgtgactcaataatacaaatggtgtaggatcgaacataattaaccaagcctaccagaggggggtgaatggtagattacgtcagcggaagtcaaataatcgaatcttactatatcaaaacacaccccaacctcaaaagccaatggaacacatgtttggtggtctatccgacctactaggatcggtctgaccgaactctaaccagtctgaccgcaggtcctctcgcggtctgaccgtcagcttgaaaatagcatgacagcgcttcggtaaaaacacgatttctcttaagccaaccgttggctcgagttgcagaataaactagacaaaccaagaaacaactccaccgaagggattttaaaactaataaacggtttaagagaaaacaccctcacaattcagctgtctcagaatttcagcaaatccgaacaaaacctaaaacttaagaaaattcgaaactagcaagaaccaatcaacgaaactttctagatctgatctatgaagtattagaaaggttttggatggattaacttgaacaaaatcacatcaaaacgaactatcacaagttaatgccaaaaccaaatataaacataaaacttatgaaatcagaatagatcgtcaatgtcttgatgattgaatatgatctttattgctcaagtatattgttcacatggtgcagccacagcaccctttacaagtttcttccgaaaccctatctattctctcaaacttagcttactctagaaccgatatagggaggaggcttcatgcttcctctctatttatacataaaaatcctcctactcaaagtagaagtaccactcctagtcacactaggactctatccaaattacaatctcctaaagcctgctgcctcacagccggctacagccaatccgtgtcctagccaacccgacatggacacatgtccgtctcatacgaagtcccggtcggcctcggtctcctgccatggcgccactcctgccttggactcaccgagccaacacacatgtactccgtatatgcatgcatgcttacatgtactgccaaccactacagtacacttgcatgcatcaatcaatataccaacatatgcatgctacagtaccatgccgtactatagcaccatatactcttctccaattccttcgtgaacaccgacgcttgcacgcacacctcgtgaagcccgttacgaagatctctcccatacgatgtctatccacagtatgccatctcgtatccaacttcgtcacccggtatccttgacagtctggacctcaactcctccctgagtttagtcccgatccccaccgttaaccgaagttgacctccaagaatcctgactctaatcaccttctcacatggtatcccgaccgcactagacctctactcctctctgagcatagtcccggtcctcaccattaaccaaggctgacctcaagccatctgcacacaataagacaaaacaaccgtttctgggcacagatatcacaacctgacccacattagtcacacgcactcacaccaacattcacagatactctcaaaccaattctttgattatatcatttgcatagccaattgttcatcacaaatattaatcatgacaatgatttcacaaatggaattagaacagttcgaatttatttcattatatgagtgcatatatagtttagttttgacatatcacatgtttatgcacataccgccaacacacgcctcttacaggaaaacacaacatcacacttccaagttgtgtgtttactgtccatgtcacctcctgactagttgtagtgatataggaaaaaaatttttgttacaatttcaatactggagctcataacaagacacgtcagcagtaagacttccatcaaggcacaaacctgcaacaacgggatggcagagtagttctgagctctgcgcacattcagaatgctacagaagaatccatgggcaccacacctagcccacagtggacgcgcgtgctgcactatcttccgcaataggttggtgcacaacgttacgcacaacagtgaaaatataacgcagaaggcaccaattcctgtgccataaaccttggctagatcaagtcgtgctagccgatagaggccaacactgtaattttcagaatttccaaaatgtattttcagacaagtccgaaaatttacagaagcaaatctcagtttcgcagccatttttggagtttccaaaatcttttcggagtttccgatattttttcggaatttccaaaaagcacatagtaaaacgatcacaacttttcgctcgggagtcccatttttatgatcttggactctatggaaagctcactcagaggactacccaattcaaccaaaaacaaggtctaaaccaatcaaaggattggttaaagtttgggtttctctcaaggtagcactatgataggtcactttgagcaccaagacttacacaaacacctcggcgttgatccctcttaatagtacggcattcctaaactcaaatataaataggaagagaattatactaataggaatgtcttatttccatctttcttttattttcttaagggacgcccatgtcgaaaccgtttcaccatatattcttcaaatgattgatgcggttacttgtagcttcaaatggtctcgca

SEQ ID NO: 19836 - DNA, 616 bp, Oryza sativa
gaccaggcgttgggaactcaagcaggcgcagtcgccctccaacttgatggcgtcattggggcctgcccggcggcagcctggaggcgaacgttgtgccgcttcactgcaccccggggccactccacctgcatcgcggagacgacgcgggagcaggagggcggcgacggcggcggagacgacgcgacatcgcgcgcctgccaactctgcgcctctaataaagccacaagccaccggaagcttgacataacaaagtcacagcaaactcagcgcaagcatagtataaccaaccaaaccaatcagccatggcgtgaaggctctcgctgctgaccgtcgtgctggtgatggtggccgtgttagcgagcacggcgatagcgcagagctgcgggtgcgcatcgtactagtgatgcagcaagtgggggttctggcattctgcggcaccggcagcgactactacggcacggggtgccaggcgggtccctgcgacgtgtcgaccaccaatgacgtgtctgtggcgagcatcgtaacgccggagttcttcgcggctctcgtcgcctaggccgacgacagctgcgccgccaagggcttctacaccgcgacgccttccatgtcccatcga

SEQ ID NO: 19837 - DNA, 1510 bp, Oryza sativa
gaacatgggtttcttcatttgtaatacgccgaatatgttcttgaataaccgggtcaaacttagccaacgtttctaccatgcccaagaaatttccattgctatcttcatacagtttgctattagaaccacggaatgctaaaagattatgcttagctaggaattttacaatggcaagaattctgaacaaaacctttctccaatgatccttctctttcttaagttgtcgttgggcagatttatcaatagtttgatccttctgcaatctgttacgcaattcgtaccaattggtcatatttaaaacatgatctggacttgtttcatgttctctaagtctagaactcaaatgcaaccaatcattgaacccctcatttgttaactgacctttgcgatagcgatactctcttccttttgtaaatgatttgcaatagaagcataatacgctatcaagttccttggaataaacaagccaatctctatcatactcatctccgtttgataggtttctagtgtagaataatgcagaaaaccctctagacaatctatctttaggacctttctgaattgataagtcccttttaggacctaattgagcaagaatgtcattaggttcaacaacagtggtttctatctctgtttcactatcattaggttcattggcaacatcactatcaagtgtctgatcaccggatggaccttgtgattcttttgtaatatacctaaacatagcccctctctgagattgagttagatcttctattattttttcttcttatgtttcataaccggagtcatattttctattccgatttgttgaagacatatcttcaaaattaaaatacaggatgtaaggacaaaaattgatttagcgtatatagtagatgaaccaaaaacttaataatccatatactacaattagggaatagggattacattaacattacctgattaggacaggcgactagccgactagactaggcgtaggggacaagggcgccggggctcaggcgctgtagcctgcagccggcagggactcaggtaggcaggtaggctgggcgacggcgttaggactcagcgacagtgcggtacagtggcaaagcgccagacgccaacagagggataggcgagacatcgttttctttctgattggcgcgatgccgcgatccagagtgccaacgtgcaatcccgctatcgaaggtgaaacgacaaataactgattttcagggttaattgggctatcagtttacttattttatatatatatatatatgtatgtgtatatatatatatatatatatatatgtatatatatatatatatatgtatgtatatatatacatacatatatatatatatacatatatatatatttcaatcaccatgtaaagtttggacaaattaaaacacatcaattgagccctacctaaattttttgtaacttctggcttctctccattgattagaaccgagagaataagtgcagagatgtaaactgtacatttgttcattggag

SEQ ID NO: 19838 - DNA, 689 bp, Oryza sativa
tgagtgatcagtaacagaaagatgcaagtactactcttagtcatggttttagtagttaggagagaatgggagttagaaaaaaaaagttaccaaagtggagttgatgcatggagaatccattgaaaaatgacataagagcagtccagagaaagaaatatgcgacccggaaccaagggaagctctgcagatatgttgaattcagtgggtaattgtcaaattaaccattcattcattcataaaattacttgactgatcgagataagtagttatcaacttaccaagctattcagggcagcttcaccaagcaagaaaacggcatttaccgagtgcattcctatcaacaactgtcgaaacatagtaactgaatttttagcactgtattggtcaaagtatgagatggcaggtagggaaggcctgaagcatgtaatacttacaaaatttagattgtaatctttgactgtaaggaatgggaagatgatgaaccaaaacacacaatctgtaagcatcactgcgcctgcatttgtctgtcatggcagataaaaggtcagatactggttcagtaaaaattgctagtaaactgtaaaacttacataaattactcagttttctgtaaagtttgataataagagcataaatccttaaaaggatattcacaacgattatgaattaatgaatatacccattctttt

SEQ ID NO: 19839 - DNA, 1375 bp, Oryza sativa
tagatgtgacacagtccagattcattatattagaatgtgttatatctagcactaggttggttttttataggacgcagtgtctaaattccatcccccaccaccaaccctaccatggtctgttgcctcccagtttatcccgcaaaagcctaaagagcccctctgaattgtccccatcgtcaccccgaggatattagagtttatgttaaatatgtgtacgtagttgtttatgatttaggacttagagttataagtataaggaaagaagtaaagtcggaatatgtattagaatatctcttaaatagagaggttcacctattgtcttgcatggatagtataataggcaaatttaattcgattgagatttttaaggattttcatataactaaaatctagcaattcccaaattataaatatattggctgcatttggagcaatagaaacttaactgaagtttttttaatacaaatctatattgttttttaattttaagaaaagacagattttaagaaaattgtgcatgcagcagactttctttagaattgtagttctgtaaaatgttagtgagttagtcatcgttggagcaaatttaatctaaatcaaacggcgagatatcaagtactagtaaatctttcaaaacttgacaacaaaacttgagattgcgtctgtaccttcactgaagagaacagcagcatgtaaaactgttttccctgcgggcccacaatacgacacggcacctgcaggcccacacgatgcttttattgtcagttcttggacaatgtcacctcttcgtaatgcgatggccaaatagaggggagaaatatcctcgttgtctactatttgcgccaatccttcatcttgcgaaaccaaatacttgacgatctccgtgtgaccgagtagaatggccttatgcaagcatgtttggccctccaaatttctcgcacgcagcagattggtagtaaaattggacggctctgtgatacatttcgctctttccacaatgagttgaaccatttctttactctccgtggcagctgcacagtgcaggggcctatctcctctcttgttctcttgttgtagtagcataactatgagggctttgtcctcctgcccttccaagatggatttggcaagctcgaaatggcaaaagcttgcagcaatgtggagcaccccgtccccgtcaaccgtcacaccccggatagagtatggctcaggtggacctctatcactagtaactgttgatgttgcatctaagcgcaatggactccgcataatctgattctcttgctcatcagaacggcatgaggacttgcaatctaaacggaaacaagaacggcgggatgatgtgctctcaaaaaaaacacaagaacagcaagcg

SEQ ID NO: 19840 - DNA, 2000 bp, Oryza sativa
acacttccaagctatgtttaactgtccatgtcacctcctaactagttgtagcgatattggaaaattttttgttacaatttcaatactggagctcataacaagacacgtcagcagtaagacctcgatgaaggcacaaacctgcaacaacgggatggcagagtagttttgagctctgcgcacattcagaatgctacggaagaatccacgggcaccacacctatcccacagcggacgcgcgtgctgcactatcttccgcaaaaggttggtgcacagcgttacgcacaacagcgaaaatataacgcagaaggcaccgattcctgtgccataaaccttggctagatcaagccgtgctgctaacgcctgcaggctaatcatggacgacccaatgagcacccctagtcccaagataagagcaaaggtgcgtcctatgacaccgggcaagatgggaaatccagcaatcgcaaataaaaggatggcacatgcagagatgctcagtgagtctccactgagtttcttaactttctgaatttgcttgagctgatcgcttccttgagttgcattgttgttgttggtgctggtgttattgttgtggtagatggcttgcacattcagaaagatgttaagcgccgcattgaaaagcagagccgcgcatgtggccatgaccgcggcagatttgctcagtgtgtcggagaatgcttccctgtcagccttggcttgttctgggatcttgctggacaaatggtccgcacggaaagtaccaaaatcagctccagcagcgagcaaactattgcatacccatcgctggtgacccttcagaaatgtcatggaaagtaacttcataagacatgaaaatccatgttcccccctattaatgaattaatctatatttttcacattaccctgcttctagatatatttcataattcatagacgatatgatgtacatgcatagcggtgtgatgcgtgtgcatcttcgatataattacgggaaaaataatagtaattcctaccatatggtgtaattagttgttaacatacatatccatgtcatcacacctaagattacttctggtcttacatatttgacattcatgacaagattcaatcatacttttgaaactttaaccatacattcttacattagtagaatatgtttataaaatctaataagtttacaacatagtgtactttgagaggtaaatttacagatgctacttttgtaaactaagcatttgagcaattgatcatggtttaagagtttaaagattgactgaattttattctatacatcaaatattaatgccaagaggaagtacctttgaattactttgtagagaatatgtgaaacaccaaccaaattagggaaattctacaacaatttttcgttgttctagttgcccaaggtacataatttgtagtgaactttgcagaaatggaatatgtttaaaaacaaatctcatttcagaaaaagaatacgagtaaaaatgcaaaataagagaaagggagggtgctaataggacatactggccaatatgtggcatacgtcagtccgcttgttttgttcagtacggcatgatcaagaggcgtatacccatttctgtttctgatacttaaagagacattcttgcatcccatcaaaatgccaaaggtcttgttatgtcccttctgtacagccaaatggagtgctgtattcccatcgtaatccttcatattcagaaccattttgaacatttcattcgaacaaacaaatcgcaccacatcatggctttccgtttggacagcgatgtggaggattgtctggccagaagcattgcatgatgactcacagccaggacacaattttatcagctgatcaatgatgccaagcgtgccatttgcagcagcaatgtgaatgggcaatgagccctctgaatcttcacagtagcctgacgatggatccttcttaaggagaagttcagtaacagaaatgcaactgggttcagtagtatacttcccgtctg

SEQ ID NO: 19841 - DNA, 4975 bp, Oryza sativa
ccttaactgaattgaaatagcacaacccatatgatgtacggtaatgcagactaagacaagtacagtaatgcagacatgatagttttggaatattcattctatgttcaccaatattgtgccaaataccattgtcatacaaaatgtttgggtatttgcattgtttgtgatcctccttccttgcaatcaattatttccaggtcgaagtcattcgtgggtgcagcattcttgctgctgttggcttgaggatggccagtactcctggagtcagtgcaatcctttttgatgcattagcaaaggtaattagagtgttgggttgattgaattgagactttattgtttctgggactgatttatcctgtaacaatggattcaggcaaatattaatgtacgagcaatagcccaaggttgcagtgaatacaatattactgttgtgttgaagcaagaagattgtgtgagggctttgagagctgttcattaaggttcttcctctccaaaaccactcttgccgttgggatcattggaccaggtttaattggtggaacacttcttgaccagctgaaagatcaggtatcttttgttccttagtcttatctctctcttccttcccttgtgctgtggctgcctccattgtgccacttgggtctaggaacaactcaattaggtctgcaggccgtcaccctaaccatgcccattacattgggtatgacaagatttcaagagcataatatacttgacccattttgatcctagtatgatcaagactcagtataaaccattcatgttacaaaccctatacaaaaagtgatttgttttggctttatctcacagtggagcaatttaaagtttgacttcacagcacttctacacttttactgatttagatacttatgcaggctgctgttctcaaggaaaatatgaatattgatctacgtgttattggaatatctggctcaagaacgatgcatttgagtgacatgtacataagtgaaccctctctctgtgtctaaactcaatcttcctctattcctcaatacagtttcattggtaaattctcttatatgatagactaaaagagggtgttgtaccattatttggtctattggtctttcttttcaccattctcgtgaatgtcaatgtcatcatgtaattgtcatgctttgttgtccatcagattctgatgctccctcattgtgccaccctaataatgattaacaggaaactattttttgatgtactgttattgagatatcacgttacatttgatggacagtacttgcttttgtatgataacatgcctttcaaatttccaggagtcatatccaattagtaaggcatgagtttttcaagagtttgaattacatattgaccatcattcttatgtttttttttccttgccttgctgaataaactgctttattaacttaatagcttggtcatcactattttttagttttgctggtatattaaattttgctcaaatctgcttgtttcattggttttgtttggcttctttgtgtagaggggtagacttaaaccagtggaaagagcttctacgaaaagaagcagaaccagcagatcttgatagttttgttcgccatttgtctgaaaatcatgtatttccaaacaaagttttggtggactgcacagcagatacatacgtagcatgccactattatgattggttgaagaagggtatccatgtcatcacgccaaataagaaagcaaattctggtccgcttgatcgggtaattttcttactggcaagacttgtataggcatatattgttgcctttttattttgaaacaatctgttttttagttgttcaataatcgccgaccgagtctgggtagctagttggtttttacttcaataagaattccccgtgttcaagaaacctgcagtgaagacgaactaagagtcggaattatttgttcatgactgatcaacagataacttatttctaagaaaatccatgaagtaaatctgattactagcctgttaatttcatacatagccactggaaacttaagaaatcaatgtgcatctgtcgtgtagcattgtatgctgctgggttgtttatccactatgaaatcattttccccctttgtttgcagtatctgaaattaaggactctgcagcgtgcatcgtatactcattacttttatgaagcaactgttggtgctggccttccaatcattagcaccctacgaggtcttctagagacaggtgacaagatattgcgtattgagggcattttcaggtgcgtttatgcttcagtaatgtaccagaattaaacttgacaatattgtaattttactaaaccacaaaaattcctcagaagtttacttggatagaaattcatccttttgtgttccataaattagacaatgttggctgatacagtgttgattgttccattgcagtgggactttgagttatattttcaacaattttgaaggtacacgaacttttagtaatgttgttgctgaagcaaaagaagctggatatacagagccagatccaagagatgatctatcaggaactgatgttgccagaaaggtagatactggtttactttggttagaatttcaatggttactctcattaaaaagaggatggcactcaggatggggcaattttctggttttcttcattcacaaactcaaaagccataccatcccgggaggaggtcggatacatatatatagccatagctggctggatggctgcaagctaattgctgcccacactagtctaaaatttgaacgcgatgctgtcctagagagcatccaaactgaataaagcataaagcagatgctagatgctgtcctagagatgctaaagcaaaaccgaaagatgctaaaagcaaaactgaaagggtgctgtcctaaaagggaaagcaagagaaggtccacaagaaccaaaggccacaaggcttattccatcattctccccctaagtcttatgcgtcgtcttgtgggaaagttgggccatcccgatcctggagcagagctcgaggaacttgatcctcccaagaggcttggtgagcaagtccgcaagctggtccttggtgttgatgtagctcgccttgatgctcccttcctccaagtagcttcggatgaagtggtacctcactcggatgtgcttgctccgttcgtggaagacggggttctttgccagggccagagcggacttgctgtccaccctgagctctaccgctccagtgtctctgccaaggagatcaccaagcagtcgagcaagccagagcgcctgggtcgaagtggcggatgccgccatgtactcggcctcgcagctggacagggccaccacctgctgcttgaccgactgccagctaacgaggcactctccgagaaagaagagaatcccgctcgtgctcttgctggtgtcgatgtcgccggcgtggtcgttgtcgctgtacccgatgaagtgtgccttgccaggacacctcgggtagtagagaccgtggtcgagagtccccgcaacgtagcggatgatcctcttcacagcctgctggtgttccgtcgtcggtcgctgcatgaaccgactgacgtagccgacggagaaggccaagtccggccgtgtgtgggtgaggtagcgaaggctccccacaagacgccggtactgtgtagcatccacctcctccgccgtgctgtcgcggctcagcttcagtctctcctccatcggagtgagagctgggttgcaattggtgagcccagccagctcaacgacgcacttggcgtaggcggtctgtcgaagcgtcatcccggagtcgtcctggtgcacctcgatccccaggtagaaggagagaggccccagatcactcatctggaaggtggccttcatctcctccttgaacgccgcgacctccgcatccttggtgctggtgatcaccaagtcgtcgtcgtagacacccaccagcaaggcatttcctccattgccccgccggtagatggccgcctcgtgcgggctttgctcgaagcccatccccttgagcgtggaatccaacttggcattccacaccctcggtgcctgccgcaagccatagagggccttgtgcaggcgtagcaccttgccctccttgccggggatcacaaatcccggcggctggtgcacgtagacctccttcaagtcgccgttcagaaacgccgacttgacgtccatgtgatggacgccccagccttcctgagcagccaacgcaagaaggagtcgcacggactccatccgtgccacgggagcgaaggcatcgtcgtagtcgatcccctcctgctgcacgaaaccgcgtgccaccaagcgagccttgtgcttgacgatggctccggcttcatccctctttagcttgaatacccacttaagggtgatcgcgcggtgaccacgagggaggtcagcaagctcctaggtgcggttctcctgaaccgcgtccatctccgactgcatcgcggcacgccatgccgcgtgtttctcggcctctgcgaaagaccgaggctcaccgtcgtcgcacgcaaggtgcaactgcgcctccaggtcgcgaggcaccagtcccggcatcggttggtcgccgagaagatcctccatcgtacggtaccgtagctgctcgccgtcgtggtacgcgtcgatgcgctccccgtcgtgggagagcggagtagcgaactccaccgggctgcgctcaacacgagctggcgtcggagtagacgtgctcggaggagtggctgctggtgctggagcatgtggggtcaccggctgggatggtgtcggcgaagagctcgtcgttgctggagccgttgcagagggagacgagtaccttcggctcatcaaggtggagaaaagccgctgcggccggtgccgctggaggtagctcgatgcttgcatgagccaggagcagagccggctcttcctccacccgtgcgatgtgggcctggccgcgtcgtggctgtcgacagtctttggcccaatggc

SEQ ID NO: 19842 - DNA, 665 bp, Oryza sativa
ggttcgctcaattcatcacaggtatgctcccatacatcttttgtgcatttgtactaatatgttatgtttgagtatatatgttgcgttttagttttagttccatatattttagcacatctgtagcacacagcacatatgtgtagatccagagcatagaatataatagtatgaattgagacatagacagtagtgttaattgtaagatgtagtttagtttgatctggagaatgtaacgtaattttagaaatttagagaacaatattgtagagaatgtaacttagggcgtagtacagaaatgcgaggttaacgcagttattgttttcatcaggcacaatgtcaagtaaggtcacatttcagatagttcacggtgaaggaaatattagatttggtccagatggtgttgatctgtcagattttgtaatgacatctaagggcatcgataggcctgcggagagaacatttcagtcaatttatagttggttgttgagaggatttagaatagaccaagaagtctacacaatgtcagtgtcagttgtagtgagtcgtgcaacagaaggttatttttgggaactaatgccgatggacagcactgatgcttggagacggtatgtggaaatggcttttgaacggtcatggcccctcgttatatttgtgtcggtacaaga

SEQ ID NO: 19843 - DNA, 1588 bp, Oryza sativa
catcggttgatgatcgaacaaagagtgtgctgcaaagagcctttttctcattgggtgcttgcatcaatgcttttgtgcattgtcgacctgttctatgcatagatggaacttttatgacaggtaaataccgaggtcagatattgacagcaattgggtgtgatgggaacaaccaggttctacctatggcttttgcatttgtagagagtgagaacactgaaagctggtactggttcctagagagagtgcacattgcagtggtgcgtatgaggcccaacgtttgccttatacatgatcgtcatgcgggtatgttgcgggctattgactacttgcagaacggttgggatgagaagggacttccagctaagtggcctgatgttcggagtcggtggtgcatgcgtcacatgggtgcaaatttctacaagcaattcaagaacaagcatcttatggagctctttaagaggctctgtgcacagaaccaagagaagaaatttaatgagttgtgggacaagttggatgagttgacaacgaagcaaacagatgagcaatctcgcagtccactagttgaaggtgacgagcctcccatacctcttggtgcattacatgatgacccaccaacaatgagaaggaggtcagggtcgtccatcagaaatttcactcagtggattgagaatgagcctaaggagaagttgtctctattgttcgacaccgatggatctcggtatggcataatgacaaccaatttggcagaggtgtacaactgggtaatgcgaggagttcgggtacttccattggttgctattgttgaattcatccttcacggcacgcaagcgtactttagggatcgatacaagaaaattggtccgtccatggccgatgacaacatagtgtttggcaacgtagtgacaaagtacatggaagataaaatcaaaaaggcacggagacatcgagttgttgctcaaggcacacaagtgcatcggtatgaaataatgtgtgttgataggagcaggcgtggtatctatcgcaagcaagccgtgcaggaatgtgtcttgaaggcggatggtggatgtacctgcagttgtatgaagccgaagcttcatcaccttccttgctcacacgttcttgctgctgccggtgattgtggcatatctcccaatgtgtacgtctcaaattatttcaggaaagaagcaatctttcatacatggagtgaggagatatatgggttcgggatctcaggatcttacacaacgctgagtgcccaagttttttatattccagatccatctaagttaagggtgaaaaagggtcgacgccaaactagacgcatcagaaatgatatggatgagtcagaagcaggtgggaggactttacgctgcagcaattgtgatctgcgcggccatacttacaagaaatgcccgaagaatgcagaagttccaagcggcgcagatgctagtccatctggacaggcaagtgatggtaggcgaccacctggtgaaggaacaacaagcaggcgcgcaaggccaaggcgtcgtcgcgcagcaggcgattccatggtgtaacaatgctttcgatttaggaaataaaatgctgt

SEQ ID NO: 19844 - DNA, 3249 bp, Oryza sativa
attcctgcagcccaggacgtgtcgtacctgctcgggctaccgctggcgggagcagcagttggtcccgtggacggtgtttttgggtggaaggaggatatcactgcgcgcttcgagcaggtgatgcgccttccacacctaggaccgaccaccacccttcctccgtactctacagtcgggcctagcaaggcttggttgctccagttcactgtaagtaaataagttgttattatcatacgtgcttatttgcgaccgaatgagtgttttgtactaacatttcattcttaattgtaggcggaccttctacaccctgacgctgatgattactcggtccgacgctcccttgaggcgtacctgttgtggttgttcgggtgggtgatgttcactagcacccacgggcacgctgtggacttccggctggtccactacgcacggtccatcgcggatgctcagccacaggacgtgccgcagtggagctggggttctgccgtgctagcagccacgtaccgtgccctctgtgaggcgtgcacgaagactgacgcgggagcgatcatcgctggctgccctatgttgcttcagctttgggcagccgagaggtttgccataggtcgaccagtggtggacagcgcaccctatggggttggtcgcagcgcgcagtggccagaggacggtcccacgatggggacttactggtgtcgacgtggggttagtgcaacttcgctgcgttataagtttatcagtcatcttttttttttcttcacataacatgtctaattccgatcatgtttattgcagcgtcgttacgctcacgtccaggtgagacgtggttacccggacttcgtgttcgagtttgaccgtctccagccgagcgacgtcatctgggagccatacacagaagaggtcgtcgctgcgagagcaccgctaggactttcgtccttgtgcacacgcgaccaggcttactggctcaccatcctgccgatggtgttcgacattttcgttgagcctcactgcccgcagcgtgtgatgagacagttcggacttaggcaggtgtttccgggcaacgtgcagccgaccgtcctccctgcgaccactcgtgagttcggattgttcatttctaaatttttatgataattacttcatcgagccatataatttacctctcttcacaggttgactcgacggggacagctagcaggcgcactttgggctccacgtgtacagcagtacgttgacgactgggtgttagctacagaggaggtgatcaacgagctcttctcacacacggaggagaactaccgtgactaccttcgttggtaccttcctcgcactcgtgcgcgtgtgaccttcactccagacgccccagagccgcacgttgccgctgtcacggacgcgtatcccacgcaccgtgaccgagactacttcgtggcggtacatccaatttgtattacttcttacaattatttcatttatcttgcataatataggacaactactgaatttgttatttccatcttgcataggctgatgccgcacgggatatcagtgccgatatcaccgcagtccaagtgaggttgaacagaggtttgcacttgactgacgttgagcagagggtgaccttcgaccggatgcaggagaagatgcgtgcggtcatgcgcgtcttctcctgtcgcagcgccgtggacgtcgtacctccagctggtccggtacaaccacggcctcgcgcgcctaccgtcggagcaggacctcgacctacggcacctatttcgcacggtactgctcagcccagaggtttcttaagttttgtttctgtttttgtacgaaaacatcaccccgtcgtaacttgatgatccatcctcgcaggacctcgtttgccttcgagcgcccctagcttcggattagtgcgacctacagcaccggtttcgcacggtacagttcagcccagatattagttcatttttgtttcagcttttgcacgattatgtcaccatgttttaactgcacgtttcctcatcgcaggacctcgtctgccttcgagcgcgttcgcaggcacgaccggcgcttccacgagctccgcaggggcgttcgccacctcttcgggcgcgttcgccagctcttcctctcacggagcgtcgatccctcgcccacacggtactttactttttattaatactgttaaatacctgtacgaaactgatggtccttgtccagcaggatttgcagccgggatcttcggtactggggcctcttcgtctcacgccggtaggactggtcctactagccagttctacgacgacgacttgcacggtgcagaccaccacgacgtactaggctcctctcagcttggaggagctccagaggcacacactcaggagcagccagaggtcacacctgtacaggcaggacgggttggccgtgccgtacccccggaccgactcacgtactcccacgggcacattagggcgcagggtaggagggacaggggtaagaggcctcgtcagtagtgttctacctcttcagtccttatgtgaccgtttcttttggcttacaaacttgtaaagcagtactacttttgctattactactgcagtactacttgtgtttgtctcgtctacatagttcttttcattcatatggtgctagaacaacttatgctcacgacaacacactttcggcgctgcacggtagtgtcagatccagtagcgcgcacagtccacaacagcacacatgaaaagcggcagctcgagttatcactatcaactttcggcgctgcctgtttacataaagtgaatcacgcccacgcgtgatcgtcttgtcacatctaatgaataatgtatctcattgagttcacatatattgcagtgaaaacgacgctatataattgacaatctgaaggcaatctcttcatatcttctttcccactagcacacaacacacgaaaatggaagcctattcattggtaatacgtaatctagatttgagattatgtagaacattcttcactacaattttacattttggcagcaaaccaaatatgatcaaatgcaattttaccttaccaaatatttggtcgtgaagaaaaatttggcactaacaatccaaatatgccctaaaaattaataaaatatttgtacggtaacaaaatatttgtacggtaacaatccaaatatgccctaaaaaataataaaattgtattttaccagtcttggagattttaatcttgtatagttttcaatataaaaagatttgataact

SEQ ID NO: 19845 - DNA, 5634 bp, Oryza sativa
tctaaaataccaagatccctattcttctttggcctcaataatcagcgccctccccctgtctcgtacttcagagagtctggcatgagcctgatccggcgagtagcgatggtggcgacagcgatgatgaagagaccgagtcccatgggtggagtagcggctgatgatcgacattgctgcatgtagtgtcggtaggatttgaggaggtagggcatcactgcatggtgggagaaaggacatagggagggatggaaaggtagccgaatacagatatgggacaaagatttctaggcgctgggagactgggagggagggcggagggagacaagatgaggattctaggcgttggtgcaacagatcgatggggacggggattcattggtcgaatataatggcaacaggtagagagaggataatgagagaagaggggtggtctctttgacgaggtgtttctcacaagtcctgattggtgcatacacgctacctgcattgctacacatacttcgggtcacgaagggtcatacctgtgtactctttcattgatttggagttcggatgagaggctgtgcacacgacgtgtgtagtgggggcaggagaacattggtcgtggactcgtggtcttacgatcgatctgtcaacttgatgttttttctatgtattccatatatattagtggcgaacctagcactaaaatttacctatggtggatcgattgatatgactaacgtattacacatttaattgatgagttaaatataattatacacaaactatatactataactgtcagtaaaatattaatttgccactataattctatatttgtcatgtgatttttataaacgaaaatttaattttctcatattgaactttttttttctacatgctgctaccttttgtgcctatgctttatagccttggatggtcagtccaatcaacatttctttatgaaagtagagaagtagtaaaccattgttacacttaccaaatcagatagccaattaatcatgtgattatcatctaaaatcaacatgctaatgaccaatggacaaacacctacttgctttgccggtggcctagctatggccagacatggcatgccacaagagaaggtccgccactgatatatatgctagattataggaatgtttaacgaattttgtcgacttacatttggaaaaacaaggtaaactttcttatgaggaaattaaaactttgacctcatatttttcttaaaaataaaacaaccaaaatttgaaacgttcaacccaaatttcaaaacttccacttcaatgtttaaaactttcatctcaaaattttaaactttctactcaaatttgaaacttcaaactcaaacattaaactttcaacccaaaatttgaaactttaaatccaaaattctaaaacctttaacctaaaaatttaaacttttaacttaaaatttcaaaactttcaactcaaatttcagaactttcaactctgattgcaaaacttttatctcggatctcaaaattgagttgaatgttttaaaattctgagttaaaagttttgcattctaagttgaaagtttttggattttgagtcgaaggtttaaaatttggagccgaaagttttaaattttaatatttgagttgatttttttgcaattccaatttgtaattgctcattttattgaaaatgtcattaacaatgctaactaatgtgattaacctgaattaagtggagtaagtgcgtacgtcgggtttcgctcgtcggcccacatggcggggttgggctctgcgctagtttcgctagtaactgcatgcatgcaagtctcgcgcgggaaggaaggaggctctcataggtgcgagcaccttccaaaaacaacgtgtatgccccaattagtcacccccgatgtttcttgtctctgagccttatgggcctgacaggtagggcacatgcatcgtgggcgcatatgcacaaggaaaaagtctaatatggctccctcaaatataggtcggatcttgtttgtatttctcaaccaaaaaaccaaatataacgactcatttactcctaaaaccatataaaacaactcccttgattgtttttaggttgtttttcgctgacgctgcatctacataacaacgcagtctataaataaatcaaaagagagacatggatcccacataaaagcaactacaacttcttcttcctccctcactgccatctctcctctgtcctatgagcactctagttgggagccgttgccgccccacactggccgcccatagcacgtcgctgctcggagggtgccctccacctcctactcctgtgcatgggcatttgcgctgcctccgagccggtggcaagggctctgtgagcattggtgatggaaaggctacttgcctacctttttaaaaaaattagccctaaatacaagcatgggtgtcaagtttaaaatttggatccgaatgaacaagtttcatcactagaagcctaatcagttgcgctgcatttgttttgcaaacagcaataaaccttgtgtgggagcgctgacaaacacctcgctttgatgcgccccctcggttccatttgtgagattcctttacattagtaccctttttttttaccaagccttcacactagtacttagtccctgtttagatgggactaaaactattaagtccctatcacatcggatgtttggacactaattataaatattaaacgtagactattaataaaactcatccataatcttggactaattcacgagacgaatctattgagcctaattaatccatgattagcctatgtgatgctacagtaaacattctctaattatggattaattaggcttaaaaaaattgtctcgcaaattagctttcatttatgtaattagctttgtaagtagtctatatttaatactctaaattagtgtctatacagagactaaagttaagtccttagattcaaacaccaccttaatttaggatcctaaagttaagtccttagattcaaacaccaccttaatttaggattcggatcctctgcattaccgcaggcaggcacagtagctacagtgataagtgggggaacagtgttttatgtaagatcaacgtgtgttttgatttttattctgtgatgaacaattggcatctgtgattattggttttgatatttggagattatcgtcgaagtggttttggagataatcaattttcaggagatgaacagggtttgctgttttgtcgggaccggtcagaccaggcggtggttgccggtcagaccggctcatgtgtaacggtcagaccggctggcctgcggtctgaccggccgacgctgtgtcggttttggtttcaggttgtttgtttggatatccgtgattgtttcatggttatggcttctagatggatactatacatatgtaatactgttgtttgctaacaatgagtcaaattggagatagcttggtctcggaatatggtttctttgattgtttcatgtgtaggtgactcgatggctcgggagagaatttgcgttgatggaccgggagccggcttggtggtaagacgatgtccgtggtggtcagatatcatgcgggatactaaggctagagttgatgcacgtggttgatggagcttccatatggcatacgatggagatattgtgtgcatatgggatacggagtcgaatttggaaggagtccaaatttggtgcgattggttatgtaaagtttctttcttgtactagagggtttcctaaggtgtttagtactcttagtatgagtttggttcgtggctttaagctgcctacctcatgtataaatagagggggagcgtgaggcttcccggtatcgcttttatattgctttgagagcaattgagttgctagtttagctagggtttcgagtttagtcgagatttttgtaaggagtgctgttggtgcactttataaacacaaagagaagcaataaagttgtcatctactttgagagttctttgatttgtgtttcaccgggtttcggcggtctaactggcatctcaccggcggtcagactggcggcatcgcggcggtccgaccggcggtactagggcggtcagaccggcggcggcgacatgagctggcgattgatctcggcggttcgactggtgttacaacctcggtcagactgacgatatccaggcggtcagaccggcgctactacttcggtcagaccgctaaaagtttttggtttttgggtataccaaccattcacccccctctggttggtttagttcttgtgattcgatcttacaagtggtatcagagccacgtttgctcttttcgatctttaccgatcttgagtttttgccatgcctacttctaataagttttcaactaagccccatgttttcgatggaacggatttttctcattggtgtaataggatgcaatcttatattatggctgagaattaagatatttggagaaaagtttctcatccttatgtgattcctgaagttattaatactactgctgcaaaaactgagtttgaactaaattgcaaagctcgcaatattcttttgagtgggatttctcgttcggattatgattgtgttgctcatcttcaaactgctcatgagatttggattgctttgagtaattgtcatcaaggtacaaataacattaaagaacttcatcgagatctttgcaaaaaggaatacattaaatttgagatgaaacctggagaagctttggatgactatctttcgaggtttaataaaattttgagtgatcttagatctgttgattcttcttatgatgctaattatccacaatctaagatttctcgccactttttgaatggtcttgacatgtctatttgggagatgaaagttacatctattcaggagtctgtgaacatgtctactttgactttggattcactttacacaaaactaaaaactcatgagatgaatattctttctcgaaaaggtgattctaagtctagtgcttcggttttgtcttcaacttctttggatgttggtgcttcttcatcgaagtcttctgttcttgctttatttaatgccatgtccgatgatcaactcgaacagttcaaggaggaggacttggttttgttatctaataaattttctcgagctatgaaaaatgttaggaacaggaaaagaggagaaccgaatcgttgttttgagtgtggtgcaattgatcatcttcgctcgtattgtcctaagcttgggagaggcaagaaggaagatgatgataaagtcaaagaggatgacatcaacaagaagaagaacacaaaggagaagaagaaacattgcatgcagtggttaatccaagaaatcatagcagcttttgatgaatcggaaggtgaagatgagagcaaaggtaagcaaattgttgatctagcttttattgctcgtaatgcaagttgtgatgttgatgaatctgaagatgataatgaagaaaagcttagttataatcaattagaatatgctgcttacagatttgctaagaaagttcaaacatgttctattgtgcttgatgagaaggataacactattgagattttaaatgctgaaattgatagattaaaatcttcgattcgtgacgatgataattgtcaatcttgtgaagttttattttctgaaatta

SEQ ID NO: 19846 - DNA, 10757 bp, Oryza sativa
  unsure (1)..(10757): unsure at all n locations
ttgacaaaaaatgtgttgaaaaaaatacaaagttgctttttgtgcaagttctttggtcaatgcttcatgtgcaaataaggcaaaacaagacaatggtgttttgatttctgaagattgttcaaagtgtgttttgaatgagatgaagttgaaaaatactttagggcatgttaaacacatggaagaaattgttaaacaagatgaggtgttttcttgctcaacttgtagaaagcaaaaaaggtcttttggatgcttgcaaaaattgtgttactcttactcaggaggtttcttatttgaaaagttctttgcaaagattttctgatggtaaaaagaaccttaacatgattcttgatcaatctaagtttagcacacacaatcgtggtttagattttgattcttatgcttatcatgctagacatcctcctactgttttgggtgttgctaggagaggtgaaattttgattgaatctgagcctaagaacactgtgtttaaatctgctggcatcatgtcttctttgaatgcatcttcttcgaaatcaaatgttgtgaatgcaaaaccttctgttattgcaaaaccatcaatttcaaaaccatctacttcacaaacttgtcgtgaaaagtacacttgttctttttgtggaaaagatggacatttggttggtttttgttttagacttgcccataaacacaaaaaggaaagcgaaattgcttttgcaaaacgacgttggcaaaaatcgggttttaattcgaggaccacggttagaccgacactgatcagtcggtcagaccggctagcggttagaccgcagttgaaccggcggttagaccggttgccaggcccggtcagagcgcaggcacaacggcggtcagaccggcctcggggtgattttgcacgaaattcaaatcggacttttgtgaagcaaaaaggtaagttttctggtaagtctgattctgattttgtaagtgcatatgtacctactggttctagtggtcgtgtgactcagtgttggattccaaaatttcttatttctaaccccaacacggaggcctcgacatcttctcattcgtaggtattttggcggcatactccccatgagtgttcaattttgagatgacgattgcgttgcaaggtaacatcactttatttttggattgacataattttgatctactctcttgtttattagctttttcatgctagtatttgaggttgtagttttggttaatactattggatgtatgtcaattcttgagaattttggtgatatcgttggtaattggatgtttttttcaaaatctttgatttcttcttgattttttcggggagaattggaggttattttgagttagtgctttttatgaattccttttggcatgatttgagggggagtttgtacctcatggttttatcaagcaacgatgtgacaatgaaaaaattaataaaagagagctttgtttatacatatgatattttcttatgcatgctagcaatactttgaaggtttatttgtcttttcatgagatttagattttgcttttaaaggagatgatgcatgatacttaaattctatacttgaattaagtaaatatgcaatgttgatgctagcatatggtttgatttataaatgctctatatatatgctttattgaattgttattcctcaaatagctttaattgctcattgtgaaaagagaataaaaatatgaaaaaaatgaataccgaatccttggaaacagtcttgacgacaaggacgtattcgatgtgagcaaaataatgggtgccgaatccctagaaaccgtcttgacgacaaggacgtacccggaataaaagagaaaaatataagtaaaaagtctcgagaaaaaaaaaggttaaaaaattctcttgttttgtgctaaagctaatttgagaaagagtgataaatgcaataggtatatgtgtttagtgtttatttttcaacctatgtgcttgttaagatgttgcattataaatcatatgaaatcatgaattttgattgttgattcaagcttaattgtaaaatctttggttcatggttatactttaatgcatgcttgttatattatagatggattcatcttctttttattgcaacacatgacatgatatgctatatgtatgttaagctcttatactttaataaacataattcctatgcttgatgaaatcattgtcaaaagggggagaagagatgagttttggaggaaagagatgagttttgggggagaacatatgagttttgggagaagagaagagtttttaagacgagcatgtttttggttcaattggaaatttctttcttttaaaaagggggagaagttttcttttggatttttgaacttttttttatttttccaaaaaccaaaacatttttaatgggtttgccaatgtgttcatcaagggggagattgtaagatcaacgtgtgttttgattcttattatgtgatgaacaattgacatttgtgattattggttttgatatttagagattatcgtcgaagtggttttggagataatcaattttcaggagatgaacagggtttgctgttttgtcgggaccggttagaccgggcggtggttgccggtcagaccggctcatgtgtagcggtcagaccggctggcctatggtctgaccggccgacgctgtgtcgatttcagtttcgggttgtttgtttagatatccgtgattgtttcatggttatggcttctagatggatattatacgtatgtaatactgttgtttgctaacaatgagtcaagttggagatagcttggtctcggaatatgatttctttgattgtttcatgtgtaggtgactcgatgccccgggagagtatttgcgatgggccgggagtcggcttggtggtaagacgatgtccgtggtggtcagatatcatgcgggatactaaggctagagttgatgcacatggttgatggagattccatatggcatacgatggaagtattgtgtgcgtatgagatgcgtagtcgaatttagaaggagtccaaatttggtacgattggttatgtaaagttttttttttgtactagagggtttcctaaggtgtttaggactcttagtatgagtttggttcgtggctttaagctgcctacctcatgtataaatagagggggagcgtgaggattcccggtatcgcttttgtattgctttgagagcaattgagttgctagtttagctagggtttcaagtttagtcgagatttttataagaagtgctgttggtgcactttgtaaagacaaaaagaagcaataaagttgtcatatactttgagagttcttcaatttgtgtttcaccggtttcggcggtctaaccggcatctcaccggcggtcagactggcggcatcgcggcggtccgaccggcggtattagggcggtcagaccggcggcggcgacaggagctggtgattgatctcggcggttcgaccggtgttacaacctcggtcagaccgacgatatccaggcggtcagactggcgctactacttcggtcagaccgcgatccatggatttnagggtaacttttatttccgctaaaagattttggtttttgggtataccaagcgttcacccctctctagttggcttagtttctgtgattcgatcttacattttaatgcacagaacagtaccgttacagtgatgatttactgtatatacagggatgaaagtactgtgtgccactgtattggttttactgtagcgaacgatctgattcgtccgtccttaatcggacggcccacaatactcctaatgcctggtactgtagcaacctctgaattttctcctccacagcagaggatcggaattccttaatttaggtattcagaggagcatttataaaagtatatgcaatgccaactgggcatgccattttgccctgcctcggtcagtgcaaattttaaaacatgcttcgagttggttaaacaaaaagaaactataccaaactagataatgatctgtcgagaatgctggaagagattgaatcacatgaacgtaaatgaatgtattggcagaaaatggcgttcgtaaacacggcaatttctatgtgataatctcatgttcttaaaatatcccaagtccccctaaatcatagcaatctatatttgagagctcaggttgatgtgttggctagaaaatatatatagccggacactaacaaataaacgctataatatatttgaaaaatatttctatttatttatatgaccacatctggaggaaaataaagaaaattcaatgtttccttgctacaaatgctaatattacttaaaaacatttatacaaaaaaaaaacagcctaaaatgcactacacgcaccaaaaaaaaattcagagtgaaaactaacaaagcaatatacaacatcaaatataatgtaaagaactaatattagtagaaaatataaattacataagcatttaaatttctatattgtttctaaaatacaatcctcagtggtgtaaacttttaattcaaaaaaaagtttataatatgtaaatttataaaaatacaaattatataactgaattttgctataaaggtgttgaaataatttcataggaatattttaagtgaaatcccttaaaggtgtattctggaataaagggttgcataaaagtttcataaaagcgagattttgtttgctttgataaagccaagtaagtggaggatactatttggttgtaattttggatacttctcttttagatatctttgcattcccattcattattagaaagtccagaatgttgattgggggttgaagatagatttgagaagaaactgcatacatggaagggcaaaaacatgtcatatggtgggagactagtcctttaaactcggttctttcaagcattcccctgtttatgttatccttcattgaaattccacgaggtatgcttgaaagattggattattttaggtcacttttttttatataatgatgaccgaaaaagaaaatatagactaactaagtgcaaagacatatgccgatcaaaatatcaaggtggactaagtgtccataactttgatatcaaaaatagatgcccgttaagaaaatgcctctttcggttggttaatggtgaaggtgcatagcaagaccttttgcgaaataaatagggtgaatagccagttcagtccttcaacttttgctcaggggtcgaattagtccttgatgttttataatgtccaaacaagaccctaaagattatcatgcggcttaatatagtccttagacctacttaaaacgccatgtggacatgccaagtcattcgtgcatgtaagataacatttaaatgtccattttaaccttcattttttatcaaataaagaaaagaaaaacaagaagaagaaatcataaaacaaaggaaaatgccaatttttttagctatcaatgctacatatttttgccaatggccaaaacctttttttttgttttttctcaatagtttttctttatttactataaaaacgtaagggtggaatggacatttaaatattgaatttgcatgcatagatgatgtggcatgtacacatggcatatgtttagagggtccaaggactatattgaatcacacaataaacttaaggtacttgtttggacaatacgaaatgtcagggactaaattgatccttaagcgaaagttcaaggatcatgtcgggtattcacccaaataaatacttaaagggtaaatctctatggtatgtccaacaagacatgtatttctcagttctaggcaggtgtaatgaaggtgaaagaccattttcttaggtttgggtattttagatatggcaataggactgacataaaattttgggaagacacatggtttggatcgtgtgctctcaaatatcaataccctacttatacctatgtggcttgaaagaagctatctaccgtagcagaggatatgagcacaaagccattgaatattcctttcagaagagccattgttagccaaaatctaatcgagtggaaaaatttgatcatcaggttagctaatataactctgtcaaatgaaaaggactgttttgtatggtcacttcataagaatggctaactttcggtcaactctatgtataacatgatcatgaactccaatattaggatccaaaataggattatatgagacttaaaggttccacgaaagatctaggttttatgtggtttcttcacaagaaagtaattctaacgaaggataacctggttaaaagaaaatgagggatacaaacattgttctttctactacgcacaggagaaaatccaacatcttttctttgagtttcatgttgctcgatttgtttggagatgtgtgtgtgtgtgtgtgtgtgtgttttcttttaattaatatccttccaccccataatgctaaaatatttttgggatttggcttagaggggtatctaggtccataaaaaatgattttaattggagctaatggtcaatttggcgttgccataatgatagtttttcatggtaaataattatctaaccctatccatgttatcttcatgtcttcgtattggctgcacttttgatctacgatgctatcacagggagagtaggatactatgcgcaatggtgttacactcttggaatcagtagccaagggtctcttatttcactatgggtggcgtagttccattagaattgctagctaaaaagactatgtggtttaacgctagtcaatattaaaggggagttgaggatatatttatctcatcaccttatgtcttatttttatttttttatctttacctttttttaacaaacttatggttatatgtcttatgacagaagtcagagatgcaatccattttcattatttagaaaaattagcaagatttcatgtccagatgtaaaaagaataagaccatactatatgtctacacccctcaaactattgcctaaaaacaccctcaactagtttacacccctcagctatcagtactggttaatataccccttgctgacaatataacccaattttaattgatccccccttatttttaacatccaaatatatgttcttgtacttgttgacatttatcagtaacttggtgtcatacaagtaaaaaaaaatgctatttttatattaaaatcataaaaatcataatttatatgctgtttttaagcctgttttgacagttgaggtgtgcaataatctagacttattcctattaaaaaattgttttacagaaatataaaataatgttaaatattctaagtaatttacatgacttggaatcttctttgctcaggtcttcttatatttttctttattaagctacaaggacctcatggtagtaatttacaagttaagtccttcctataatatagccttgacatgtttgaccaaaccttttcccaagaggtggcaactgcaaacacatcgggtaaagaaaaaaaatgaagaaagaagcaactgcaaacagatagggtgaaattaagagtacattaatctgcactgatctgacacgtagtatagtaaagacatatgaaataaaaaaattatacagtgtagaagtttgctatctcattctcatttcaagtgcttctatttataaagtctcaagctttcctgcctacctcattccatcctcctgcgctctcaagctttccttcctagattctgcattccgatttccatttcacacattcaacgtcaaggtattatagctagttactttagcctttcttaagaagaacaactcacaagtaagtgccattcatcacaccgtcgtacactatgtttggttttgtttgaagggcattttgctcctcatggtcttcaaacttaagtgccaacacttctgatattaccttagaagaatatagaaaaatcagcttgtctattaggtgttctccaagagacccaaaaaaaggatctcctcttgcatgttacaccttttacctttgttttaccttgaaattcatacattttcaattgcaatagcccaaaagatgttcttttaagccaattaaaagaaagaaaaaactgccacacttcagtgtttccagagtttctcttgggataggtggattactctctctcttttcaaaaaggagctgtactttcagttttgcacaattttctcttcgaaaaagaccctgcttcaatagttttggggcgttattttaccaatttgcagcctgaggttcaatgataatttcagaacaagttttgcagataaaagaagatagattattactagtcctcttcatttgaaaaacagagaaaggagaactttttgccataaatggctcaggagtaccagacaatgccttcttctgctcacgacaagaggtactcaggactgtcgaatggtggtgacaaagaacaattgccatctcaaggtatttcagttccccttatggatctaactagtgttttgtttgttcaggtgtttgtgtcactctttcatgtttaacggttggaagtgagttattatacttgttttccaatgtacttcctttgtttgacttgtatagaatcagaagttcctttgactactagatttgatgggaatgcaatgcaagtagatggactcctaaaaaatgtttctcccacaactaagattgtggtgaaaccaaatgaggagttgaagtcaccgttcttggtaaagcgccacctatttcttaagaggcctgatcctattatactagacgaattgtacagcttgactacaaaagtaaccgatgaagagtccagacagtaagtgtaatttgcgtcctttaaacatctactacatctgtttcaaattacttgtcgttttagctttgtcataagtcaatcagttttgttactgcagtcatgaccagccttattattgattgaattgcaggtctgtttgggtatcaggcaacctgccgatcaatttaaagcttgtagatatccaggaaacaataaaacctgaaggagtcatgggtataaattgcatggacttggctgttagaattatgtcaagacaggatgctgaaatttttaaaaacacaaaatgtctaggttggaggcattatgttgattcaaattggaaggtaagtttgcgtgagtgcgccttgggatgttgttggcggcatataattcctagttctactcttctcctagtgtcataataacaactatttttgttccttgttccacagcaatatatcaatgatcccaacaatctgaagaaccaagtattcccgtttgtctactatgtatgatccttcaagttcacatctgggatgaacccttttctatttctatccaaattgggtataactgaaaaactctcgctaatcttttggcatccaattggtcctgccaataaaattaaattaacaaaatgcacccagaaaataaccaaattgaatctgaacattgttttttttggtgaaaatgggggatatatatataggtataaatccttgtttaatctgatggccattgaactctatatgctttcaacatgcatgataagaagctctgcattctggattctcgacgagataccagtgaaggcggtgatcaggatccagtgaagcgtcatgagaaaatccgaaaagaagtctgccatgctcttaacgaaaccatggatgttgatttcaattttctctcttggaagcatgagtttcccaaagtgcctaggcaacagaacaggtgtgactcttaacacccagctttgcttaatcttcttcccgtctttattatgggtatatgttttactgcatgataagtgatcaactcatttttccctatgatttatttctagttgtgactgtggattctttgtattcaattttatgcgattatgggatggtcatcgactgattcggtggttttcaactgtaagaaataattcctggagagttaattttgattggaatacatattcaatatattatcgtcattaattttgtatatgcatcatcttgttaggaaacaaaggagttgcggaagaactttctagcatacatactctccagtttggatgatcattcagtcctgcctactaatgtctctgagttgatcaaaaagctccctggttagacacatcagagtttgcattttcttttgtgttttgttataggacacatgaacttttaaatacatagttttccgactatatatgccaataagaccttgtttgggatatgattggcccagctctaatgatatagttttcgtcttgcctaaacagaaacttaattatctgattgatcttgttggtgtttctttgtttaggggaaacaatgatgaatgttgagctattagaagctgcacgggcaggcaacgcaaatgcattttgtgaacttgttatagatcctgcaagaagtattaatcatgagcccttcagatctgcctcctgttcttgtcttctttttcggagcacatcatctggcagctattgtctctgttttgagtgcacatcctcacgcaattccgatcaagaaaagagtccaaacaagcataatgcattaacacgatcagatgcaccatcaacatttacgagagatacaagggacatgctacatgctattcagggtgtaacggttgaaggtgacggggtgctccacatcgctgcaagctttggtgttttggaacctgtgaaaaccgtcttggaagcgcagaatggagctttcgcaacggcgcttctgcaagcagagaacaacaaaggagacaggcccctgcactgcgcagccaccacaggtagactgtaactatattgtttccgcaaactaa

SEQ ID NO: 19847 - DNA, 2531 bp, Oryza sativa
  unsure (1)..(2531): unsure at all n locations
acagtgttcacaatatatattggggcccatatatcactgtgctagtaataacttgtacagtaatatggctgggcatgcatgcatgggccaagatgaagctgggtgtatatattactatgtcaatgtgggctccatttatgcatgtaacttgatcactgtttaattcatatcttttaataatttctcttatctttttttccctagcatggcaattggccaaaccataggcagtagtactccagctagtgcatgcaaagatgaaagaccgatcttgtctacagttcctagtgttattgctgctgtccttttcctttttgttaattaattactgttattccccgcaaaaaaaattaattactgttatttaattctgttgtcagattaatttcaacatgtgacttttatcctttggatggcaatgcctttcagtttcaggtatactacgtgctcttggaccaactctctagctatttcctcttgtttcccaaaagaaattaattgaaaggtaagctaggatacatgtcctgcctgtgtttctgcatactaagtacaaatactataataataatctatcttggtctcatgttaattgggagtaaaataattcaggtatgggtgtctatgctgctttagatcgactcatttaagttttttttatcaccatttgaatgggaagttgaccaggagcaaagctaatagattagattcctgcctggtcgacaggaaaaacaaaagaaaaaacagtatgctccacagaatctatactgcgtacgtgcatgtgccatattaaaagcttacacctgagcatctgcatgcatgccaaccaaaggagcccacaagaaacaaaaatgaaaaataaaaagaatctgggcttggcccatgtgatgatttgaagcaacaactctcaactcatccatcagcacagacatccgaggaaaaataacttcgtttttatctctgttcaaattcgtagtagttttgaggtagtatgttggaagcagagtctgcaatctcgattggctagtttaatttccagccccaccaagacgttaattttttttttggataattttgaatgaaattagccaaatttcgaacaaaaccatttgaaatgcacatttcacgccggctcgagatgttttaaaatcgttgagactctaaacccttggttcgagttaaaaagtttaaactttcgaaatcaggcagcaaaacgtaagccacattcatctatatgtaagttttcttccattttcaatgtataggggtgagcgtgaaccaaccaatgaaaacaaaatcagaagctgatatgcaaggtaatgactacaatcaagcatagttgacaagtcaacgtcgatatcacacggattattaaactggcattattaaattaccccctgtaacaanatgttgtaatacagttctataccatatccaacccgagaagaattatcaattggaacaaatgaacatgggttttacaagttacaacacaggttttatcttgtacagtcatttgtattcttggaagttgacatgtccagtggcctgagcatgttcaacggcttcctgtattgtgcaccaagagagaaggctttgatcagttctggtcatcacggattggtataaacaaaaacattttgtgtttttaagagcatcacttaccttttgaccaatcacaccaatttggcagacgccacagcgcaaggtgaagtttgcagtgtctgtgtagctcctcttcctgcatatggcatgtccaaccaatggtgaataagacatatgaatgaacaccattcacatgatgcacttgcgattacatatgatcatgttcgatgatgcaatttactaggagctaaagcttcttcttcctcttcttttcatttttggtttctgggatgcatattttgaatcacttctgaacagtggttacatgctaaactaaatgttctgttcaaggcatcactgatttcagcaaattatgtagatactttataggaaaaaaagaactaagcttgaaatgatagatacctcttttcatccttcacgaagttaagagcaaggccctctactgggccaatcgaccatttgtggtcgacagggaagatagtctgatcaaattcttccggtgcaccttcaaatggtgacatctgaattttgttgataaaaaacagccaaaattagttggcatctcattgtgttttgtttatcgtcaaaaatttatcatgaatacttacagctaaagcatcataatgcagcccatcatagatgagcatagttcgctcagtgtagttcttctcctgtatcaagggatgcaaagctaagacaccgccttaacactttaggataaacaaaagtaaaggaatataagatccaccaacctgaccatacagatcacagcgggttgtctggatgtcatatgcagcaatttcacgcccataatattccgataggatagaaagttcaatggcacctgtacagttgaagaaacagaggtgaaaaaaagtcaaatatcagcaggtaaactagtaaatcat

SEQ ID NO: 19848 - DNA, 20391 bp, Oryza sativa
agagggagaaaaacgcaatgtcaaccatactgaattttgcagcagtaaggcaataattgtaagcctagcttaaatcgacatcatcacatgcgtattggtgcctttatcatacctgagctatacactatctattaaatttattcttttcttctaccaaaagatggtattaaacaaagtatagtaacatagctacttattgaggaaggggtaagaattcaacacagcagctgaacatcaatactcccgcatacagttttttaaaataaattacaaacattactagtacagttgacaaaataacgcttgagtaacagatatgccaatggatctaactgaattccatagttatcagtgcatgccatgtaagagttcctcaaagaagtttatcacacgaattgaattaaggccagtagctcatctatatgatagatcaatatcattgccaagctaacaatatcattccatctattccaattaatgcagccacacatgatagtacaactggttttggcagaaaatgactttggagcatatacaaacgtttgataccaaatactataaacatattatagaacacgaagtttctagcaagcatgatgatagctttggttcgagtttgcaaaaatacgagggggatgtatatcattttttacaacatcagagcctctaaaaaccttgaagagtgagagggaagacatatatgcaggtacattagtctttcaaagcagatacctgtctgagctcagaagccttgttcctgttatgctccatgacatacctgtatcaaagaaggtataatcggcaaccgctccatttgcaaaaccatcaataatatatagatagcaccatgattgagaaatcatacccaacagcattgaagaggcaactgttgtccgaagggatcaccctcctcacaacaacaccttccattccagctcagctagaaaccatttaaaaaaaaaaatcactcgtcagaagaaatgaattgcaaaagtagcgcttgtaataatcactgccatcacattaaattgacagtatgaaggacagcaaatgcaaattactagaggcagaatccattccaatcaatgaagaagatgctgtggttaaagcatcaggaaagtaaaaacattatttttagataagcatcaagtagtaaacatgatgaacaaaaaaaaataattatattacatgggtagatagatacatgatccgctaatcaattgaaatcaaatccccataaagaagacactttaggaactagtacaggtttctaatctttatctaaacggtgcttatcaccatttctcctcctcaatcaggaagagagaagaagctagagaaccaaacacaaggaaaaggaaccccgcaatatatctatcagaaatggcgaaacgaagagcgttcacaggtgaccgaccgaccatctcctgccgcatctgatgccaaagcgcaggaaggcaggcaagaaccggacgctgcacgcggcgtaaaccttcgcacccacctatgacctaccagagaatccctcccgacgaaccccccggctacgagcgaagctacgacgaacagcagagcaaagaagaagaagaagaagccgacacgaaggaaggttcttgtcctctgtcgagaatcaatggaaggaggaggcgttccgcgaacatccgaaagggagaaaggagagggggggaatggaagagcgagacttacgaggaggaggcggcgcggggcgagggatccggggtgctgtccgggcagacgaacgaaatcgtgggggagaagaagaggaggagacgcgcgaggagagatacgaacgagagcggcgaggcgatccgagacggatctgaaggccaaaaagagggcaggttggtcgcggcgagacacgaggaggccgcgtccgtgcgccgcgagggaggctgtggcactccacgataaacatgtgtttggatcaataggttaacatatgtgtgtccaggttcatagctcaaatttgtttttttctgggatggaatagaaggtcacatcaaacatactcccttccgtccgtcctgacaaaaaaaaaatctaacaacgaaatatgaatctctcttaggttgagtttatttctagaacgaagagagtactttttcagatttgtttggtttcgagatcggtaaaaattggttgatccccacggagaaatatttcttcaagattcaagtcagattcacaatttaaaaattgacagaccaattcaacacacttcatctctgtcactgacatgtgaaccacactctcttatccctaaaaatgcatgaccacttcatatctctctctgtgttttatgttttatgtcatgccatgcaaattgtgcattatttgattgagcatgtgtacattgcaacaaagactacccatttgccctcttaaataaacgattcgagatttaaaagttgaaaaaacaaacatagaaacactcattcagacctcacaaaacatgccctactatatatatgtcactcgagtaatgtttcactaataaatttacatgtgtgtagcaaacaatagcagatctaatatgagtgcaaggagagagaggaagaattttgtttggggggaagggggttagatcatcactatttagagcagggtcaataataaagtagtcagttggctccaattatatttataccagttcatctataactcactttgtagctcgtacatacattgtattgttgggccctacacacttcacatcattattaaaaaaaaatgcagcattgaccccatgctgcagcatctctctcatgcccgacgcttttgtcttgagacgtgtgctgcaacctggtgataaaatcgtcgcccgcccgcgcctgcttaggttctctttagctctttcctccagatcagtattgcaatctacacttagtgtcgcaaactatttctcgtggatttccccctgagtagcaaagatcgaatgataattcattattttcttttaaaaaatctagatacgtgtctgtcactaaataaggcaaaacttttttttagaagatctcctgcgcttttctttttcaagaggaaaggttgcggggaaaagaataaaggctctatgtcaacgcgaagagccgcaccaccacacgcacacgggagggaacccagccaacctgtacacacacacctcggtggggtgccggccggtcaagtggcaggcgaatccgagcctcccacgcgaggaagcaaagccgagcagagaggccttgcgttgcgtgcgcctttgctagcttttccacgggcttgtttagtggtaaaaaaaaaaatttacccctacatatcacatcagacatacggacacatttaaagtattaaacgtaatctaataacaaaacaaattacagattccgccagaaaactgcgagatgaatttattaagcctaattaatttgtcattagcaaatgtttactgtaacaccacattgtcaaatcatgacgcaattagacttaaaagattcgtctcgcaatttccttatgaactgtgtaattggtttttcttttctgcatttaatacttcatgcatatgtacaaacattcaatgtgacaacgtaaaaaatccaaacattcgatgtgacgacgtgaaaaattttgtttgggaactaaacaggccccaacttgctcccttcttttccttgccccagattcctttgccacaacatggagaaagagatatatgcccagtgttgtgatatccaggttagataagattctggaaagttacaggagaataatatataagccgatatgatatgcttgttggttcagtgcatgcacaagagaagcttctcccaagaacccatggaagctctgcctctactcatgtttgttatggtggaagttgcagggccagggtagctgctcctttaccccaatcaccatccatccggcatcaaccaacaagagtccaaatcatatactagtaagcaaaaaccagccattagtgttgacgaccaaaataaccaacaaaactacttgccggtgaaaagtaagattctgcgcctctctgccgctgacattcctcccttgatttctttcgtgagtggcatgtgggtgggtcttgcaggagcaaataagctttcactgacatcatccggcccccacacgctttgctgaatgcataaacaccagcattgcaatttgtcaacaatttatgcatggtagtatttctgcaagaaagcattatcacctgggagtagaggcgctctagtatgcactagcttttggacggagactgaataagctggcatatttcttgttcttccaacacagaaggggaagttgatgtgcttccatgctgcttcagaaatgtgtcgtttgccaatcaagagcgacggcaatggcggatcagtgaggtaggttttgttatcggatctgcatttgaagcaaaatagactgggaattgataagcgattggagatactaggtaaccaaatgcgttttcaaaccaataccaaaaatattgaagtacttgggagactagctaagtaaaagctcaggagcataatacaatactaaacacatgaaataatcgaacatgtaaaacggtgcagctacgatcttagggttcaccaagtaccaccagagcttgttgatgatgatcaaggaaggtaggtacacctatatcaagcttgacaactcctccctaagttgttagaagaattttgtcttgttatctctatcgaagtacagaagattatggcaattaaacctgtccgttccaaagttaacattaattacttatcaatacaagggtgccttacatggatcaaggtactaattaaccaatcactacactcaaattcaagtttgtagaacagggctagtatttaattaagcaacttaacattcatttctctcttaacagtcaaaccataagaatcttgaaacaaatcgaagatgacaaattatccaatatgctccaggttatatatacttttagaaaaatcactagttaccttacctgcccaataatgagagaagctacattgagagtggatgtgttgaaaccctgctcaagaagccatgaaagaaacatctgatgtaatcacactctggccaggtggctttctgcaaatagtgtcatctcttatcttccttctaagagaatcaacttcatgccacaggttttggttagcataaatgttggacagaagcacaccagcacctcctttatctgagcgaacagactcaatcctcttgatcactagttccccaatatccaattcattgttgatactgcaagcactcaataatgccccgagaattgccaagtttggctcaaaaggcatgctttcaataaactgataaccacgtgcaataagccctgccctgctgaaaagatctaccatgcaaccgtaatgcttgatatcaggggtgaccttgtactcattctccatggaattgaagatagatattccctcatccaccaatccagcatggctacaggcagaaagaaccacaacaaaggtagtcgaatctggcaatactcccgcctctttcatgctaaagaataaagcaactgcctctttgccatggccatgagaagccaaccctgaaatcatggccgtccatgaatgcaggtccttctgaggcatcaaaccaaacaagccacgagctaactcaatgctgccacactttccatacatatcgatcaacgaattcttcacaatcaactctccttccaaccccaccttctccacatatgcatgcaaccctttggcatactccagggagcccagtccagcacacgcagaagcaaccgacacaaccgttgccacattaggcctaacagcctcctcgcagcttctcatctcctgaaatacctcgacacctcgaaggaacatcccagagtccacgtatcccgacaccatgcccgtccatgcaaccacatccttcgcctgcatttcatcaaacaccctgcgagcggcaacctcaaaccggcaagcaaagtaggcgttcatcagcgccgtctgcgtgaagagcacggaactgtaaccaaggcggaggctttgcccgtgcagggattcgcagagaggacgatcaccggaagaacaggcatggatcaagaacgggagcgtgtaacgatccgtggtaacgcctcggtggcgcatttggtcgaacagctggagggcgagacggggaggcgaggcgcggatgagggagttgaaggagaagggcgagagggaggaggcggggaggtgggagaggagcaggagggagaaccggagggagaggcgcgaggaggcgacgaggaggcgcgaggcgacgaaggggttgcgcgcgaggccggagacgatgcagtgggagagaagaggagcgaaggcgcggagggaagcggcggggaggaggagcgggcggaggcggcggtggcggcggaagagcgcgttctccgccgcccacgccggaagcgccgcggcgtgcggcggcgacggcggcggcgccatggaaattgcaaacgctcatctcgtccgcaaatacgtatttcaaaagcgaaggcgtaatctggtagaccgcttttgaaagcgagattagctcaacgcgatgatttcattaatcacggaacatgtatacatatagacctcatccataccttaaccactcaaccgacttatagcaatagaatcgggaggattaggacgagagatcggatgaaacagaaagacataaacaccgcaagcgataatatcgctaacacctccccgcagccggaacgttgttagagcgaacgttcaggctggaccggaactccgtgaacacaggagttggcaaccccttggtgaagatgtcggcgtattgggatgtggttggcacatgtagaactcgcacagatccaatggcgaccttctcgcgcacaaaatgtaaatcaatctcaacatgtttcgtgcgttgatgctgcactggattagttgagagatacactgcactgacattgtcgcaatacacaagagtatctcggactggcggggcatgcagctcggtcaagagttggcgcagccaacaggtctcagcgacggcatttgcaacagctcggtactcagcctcagcactggaacgagagacagtgttctgacgcttggaggactaggagactaggttgtctcccaagaacacagcgtagcccgaggtggacttgcgtgtgtctggacagccagcccagtccacatcagaataggccaccaagtcatgagaagaagactggcggatgtgtagtccaagatctgtagtgtcgcgaacatagcgtaagatcctcttgagagcggtgagatgagtctcgcgagggtcatgcatgtgtagacagatctactgaacaacatactgtatgttagggcgagtgaaggtcagatactgcaatgcacccgcaaggctgcggtagtctttgggatctgcaactggggaaccatctgtggaggatagcttggaggtagtatcaacaggggtgttgcagggcttgcaatctgtcatgccagcgcgctccaagatctccaagcaatactgccgctgtgagagaaacaaccctgaggactgacgagagactgaaacaccgagaaagtgatgaagctcgccaagatccttcatggagaactctgtctgcatagatgagatggtctagcgccggagcgaggtggacgaggcagtaagaacaatgtcgtcgacataaagcagaagatatatcacatcgctgtcacgtctatagatgaagagagacgtggccgacttggcctcaatgaaaccaatggattgcaagaaggtagcaaagcgattgtaccaagcccgtggcgcttgcttgagaccatagagggacttgttgaggcggcagacggagttggggtgggcagtgttgacgaaaccagatggctggatgcagtaaactgcctcggccagggtaccatgcaagaaggcattcttcacatcaagctgatgaatgggccagccgcgggagacggcgagattgaggacggtgcgaactgtggccggcttgacgacggggctgaaggtctcgtcgaagtcaatgccggggcgttgcgagaaaccgcgaagtacccagcgagccttgtagcggtccagactgccatcggcgtggaacttatgtcgaaaaatccacttgccggtgacaatgttggcgcctggtggaggagggacaagatcccaagtgcggttggccatcaacgccgagtactcctcttgcatggcgtctcgccagttggtgtcagcgagcgcggcacggtaggtgcgcgggatcggagacagggtagcggcttgaaggttcatacgtgtagtgggtaccggtacaccagccttgcctctggtggtcatgccgtggtcgttgtcaaccggagacttgccgaagccggtgatgagcgggcgtggaagaggaacgcgcgcactccttgcgcgggtcggaatcatgagcggcggtagaaacggtgatgaagcgctagaagatccgtcatggggcgacgtggccgtgcttgggggagcgcgcggcccagcatcgatgaggtcgaccgaggtggccgaggtgctggggaagtcctggagcgccgtgtgctaggccaaccttgtcggtgttggagtagagggtggcccagagacagccggagagttcgcaggccgtgggctagtgggcagagcaggcggtggtccaggcggtgtagtggagggcccaccaagcagccgagtggagggagagggcccaggccgcgcgccactgggcctgccggagccgatcggcgcctgtactggagcagtaaaatcatccaagaagaagagatcagtagtacatgtgtcaacagtagagttctcagcaaaggggaacgtgttctcatcaaacacgacataccgagaaataataaccctgttagtaatgggatcaaaacaccggtatcccttgtgatcgctggggtatccaagaaagatacacatggtggagcgggggggggggtagtttgttgggtgtggtggcggataggttaggataacaacggcaaccgaaaacccgaagatgtgtgtaagacgggtggacaccatggagggcaaagtagggagtgtggcgttggagagttttagtggggtggcggttcatgagataggtagcggtgtagagggcctcgacccaaaaggagccagggaggttggcttgaaagagaagcgagcgtacaatgttgttgagggaacggagagtgcgctcggctttaccattttggggagaggtgtgggggcaggacatgcgcatggtgacgccgttagtgaggaagaaggtacgggcggcggagttgtcgaactcacggccattgtcacattgaatgctgcgaatcggtgtggaaaactgagtcctgacataggcaaaaaaatgagaaagtgtggtaaaagtgtcggatttcaaacgtagaggaaacgtccaaacatagtgagagcaatcatcaagaatgactaggtaatatttaaaacccgacacactgggaacaggagaggtccacagatcacaatggattaactcaaagtttcccttagccctagaaaacaatgtagtaaagggtaaacgaatgtgacgaccaagctgacaagcatgacatatggtggaggagccgcctttgggtgaaggaatgaccgaggagtgggccaagcgagcaagagcctcgtgaccgaggtgtccaagccgacgatgccaaagtgtggtggtgctggcggcaaaggagctggccatggtgttgaagaagttcgccggaaaggagtaaaggtcaccgaaactattgcacctggcgaccacggtcctggtagaaagatccttcacagtgaaaccaaacttgtcaaactcgatggaaagattgttgtcagtgacaaaccgatgaacagaaatgagattctttataatgccaggagaaacaagatcattattaagaagaaatattcggttggcataaaaaaaagaggcatcgccggttgcagtgatgggcaggagggaaccgtttccaacaataatgtgtgagggggtagagtgagttgggtaggtgggagaggataggatatcggtgtccgaagtcatatgtgaagtagcaccggtgtccatgtaccggtcagtggaggcgggcgtcgtgagggttcctgtttggaacaaaccagcaagggtttgctggtcccaagcaggcgtcgggccggtagcgccgtaccaggccgaaggctgggccgactgctgtggcgaaggcgtcggaagaaggccggcctggttgtagaagctggctggctgggcgctggaggcctgttgcgggaggccggcagaaggcccagcgagtgccgctcctgcgaactgaggtcgtgggccgaggatgccaggggagcgcagaagtgggccaccgggccacatctggatggtgccggcccatgggtgctgaggtgtgggccagccttgaggagcatgtggctggcttggtccctgggcttgcacgatctggaggccgccttgagacgcttgtgaaccaccgccgccgccgctagagttgttggagttgccgccggagttgttgcgagggcgtcggtttcgattgttgccgccgccgccgcctttatttccgccgccgccttggctggtctggtttgggttgtcgaaacccgtggcatgcgccgggttcatgccgccggtgccgcggttgccgccggtggcggcgatcagggcggtagatggagcagaggatcccttgttacctttgttgatctcggcgaggatgagctggctgcgggcctcgacgaacgacggaaacggtcgctacaagggaataattgtttgcaagtgttcatacttagggttgagaccttgaagcatggcgaggacgagttgccggtcggtgacggggtcgccgagctcgccgcgggtgtcagccatggccttgaggcgacgacagtagtcgttggcgctgaggtcaccttgcacgaagttgtggaattccgtcgagacgtgcatggcgcgttgttctcggtgaccgaggaacatctgctcaaggcagagccacacatggcgtgcagtggcgacgggctgcagcacggtctccaggagatcggcagctatggtgccataaatccatgccagcaccacgcagtccatccgtgcccgtgtcgcttggtcggggaaggcgacgtcggagagaacgtgatcggagagggcatattggccgagcgtgacgaggaagaggccgcgccacttagagtagttcgccgcgccgaggtcgaggacgactggaacaagagccttaacgttgaggaccgacacagcttgagcgtggagtgcatcaacggtgtcgtcgacgagcggcgcgccaccggacgcggcgccggcgggttgctcgtcatgctggtgaggaggcggaacaccgagcgctgcgaagagacttgacaggtcgggttcggggcggtcgacgggcgcgccagcggaagagggcgcgtcgggttgaggaacaccgagggcggcgcgaagcgccgatgcgtcgacagtcaccgtggtcggggaagacgggctcgacgctgtgtttgccgtggcagacgacgagacgacgagggcagagatggcgtcctggacggccttgacagcagcagcagaagtggcgtcagcaagggcctcggcggcggcacgatcatccgcagagactgtgtcatcggcaggacggagcgtctttcggatggcagacgtagcggcgttggttacggaggtaatcgccgcggagagagcggcgttgtcgtgagacgacatagggccggcgtaagggtgagccggcggcggcaggagaaaggtttagggtggagcggaagcgattagatcggaggtatctgataccatgaaagcgagattagctcaacgcgatgatttcattaatcacggaacatgtatacatatagacctcatccataccttaaccactcaaccgacttataacaacagaatcgggaggattaggaggagagatcggataaaacagaaagagataaacaccgcaagcgataatatcgctaacagctttgtttccacccccacataattacacacactggccgctttaattgtaatttaaacagcttactaattaacattagatagattaattatcaatcaaaacctaatgaaatttcactggttaaaagaagtcgcatgctgccgcgttgtgaaattcttccgtttcataggcggcgccatggccgtggtcaaggttgtagccgtagccggcggcgaggtcagtgtacccaaatccatggctgaactgcggggggagaggcggcggcattatcatcggcgggaaggacaacggcggcgcatggacagcgttgccgccgatcaacttcgtcgtggtgtcgtggctcccggggctgtgagagactaacgggccggcgtcgaggtagtcgatgaggttggcggcggcggcggcggcgcccgtgtagtgtgtcatcgcctcctcgacgatgatgtcgtggacgcgctccgacgcctcggcctggaccctctggagcgcggcgagcatggacacgaggtcggcgagccccgcgcggcgcacgtcggcgtcgttccagacgcccgccacgcgcgccgcctcgtcgagcgcgtcccgcctgcgcgccgccgcgccgagcgcgtccttcaggcgctcctccacgcggttgaactcgcgcacgaccgcctcctcctcctccgccgccgccgccgcggcgtcggcgggggagcggccgaggaggaagcggtcggcgacggcggagacggaggggtggccgaagcagtgcggcctcccggcgggggagaagaagacgacggcgacgcgcgcgccgcagagcacggacagctcgctggccttcttgaagactccctcgcggcgcttggagaagcacacctgccgcgcctccttgttctcgatcagcttcatctcgatcctctgccgcccccgcgtccgcttccacctcctcccctcgccgccgccgacgtccatctccgccgccgccttcgccatcgccgccgacgagcccgtacgtgtcatgtgcaacgtgtaggatttatatagacgagaacgcatacatacaaggaaagaggagggaacagtatcagaaaaagggatattaacgttgtgaattttgtactgattgattgatgatgcatgagtacgatttgtgagttttgtgatctgtcaatcagaggagcaaggatgatgatgatcagtcaaagtaggtcagattgtcacggccggtttccatgtaaaagggcacaagaaatcaaacttctgttccaacggtatcttgcctactagttcccaggattagcatcggatgtaacaaaatgaaatgtgaatgtgatgctacattgtccaaaagttcagagataacatttcgtcgtgatggtcgatatggaggatttgtgagctctttgtacatttcaaatgcgcacctggttgatctcaattataccatctgcatgaccacttgattacttatcttattatggtggaggaaggcatgcacaaatttatttattttttatgaaccttcccgacaaaaatgccgaattggagggagatggaagatgaactggtcagcactcagcactatgaatacccaagcaattcacagatctaatcgcgccaggtgtaatcattatgagaattgtcatttggattgggataattcacaatctgcaattcagccgagaacacaataaagatcgaaatcttgttatttttcctactcgaaatcctgattactagtatcaaccaaaaccaagaacacgcgaaccatctacacaaatcgcagtacacgcccaaatccttattagctgacaagatccgccggcggcggcggcgccgccgcgaacgcggcgaagaacgcatccgcggccggcggcggcaggaacacgacgctcctggccgcgcacatcctcctcctgagcgggtacctccccgcgccgccgagccccctcgccggcacgacgaagtgcggcgcgccgccctgctgctgctcggccaccacctgcggcggcgtcggcgccggagggagggacgtcggcaggaggcgcgtcgccgccgcggccgaccggagccagcgggcgacgatcctcgagtccctgagccgcgcgagcgcccccgggcggaggaaccggtgcatccgctcctcctctcgcggcgcggcgcggtggaggcggcgtcgctccatcgccggagatagctgggagggagcgaggaagggatccggcggcggcggcggcggagataattataggggaaggaggcggggggaagcgagtagtggagggaaaactatggcgggaacgaaatgggagggaaactggaaaaagagggagatgaaaccacgacgcgcgcacagcaaattggtacacgaatgataacactatgtcactgacaagtgggcccactcacgtgtctatcggtttatcgtcgagagaattttaaagtcacaagagtgtatggaaatggaatgccagtgtttgatggtttgcagtttggtaaaaattcagcgcgaattcataatgttttaacccatgtttgaattccgatgatggcagagagactgagggcttgtttactttgttgctcaaatcaaccataccaaattttgacacattgtggcattatcaaaatttgatagcgttgtctttgttttatttgttgcgtttgtcaatatttggtagagttttaagagatagttcgtagaactgccaaattttggaatttggtaagatagtaatggttaaagtgtgtttaatttggtctaaccaaaatttaataatgtcaaaattttgtgaggttgaaaatggcaccaaaccaaacatgccctgaattgttactctcagcagtatgacaagaaaaaaagagtgatcttagtatactactatactagtcatcgaaatgaagcatcatcaggtaagttttattttggtcatacatcatggcagccatatacagtatacagtacaggagatcgatacaaaatgaccacctcaaaaaactcaaaaacattttacctcttctccaaagaatgcaatatcagctggtatacccacctccttcaccgccaccggcagacagacgctacgtaaaattgtggtccgcttcgtcggtgttcatccagacccagttacagaaacgaatcatcacagctaaaaactacacaagaattacatacaaacagaccgtggccaatgtacagcacacctactataagcaggaggaagttcctgcttgtgcttccggttttttccttttttttgtttgaccggttgtttcggtcacgctagaaggttgcgttccaaagcgccttctccccttcggcgcacttattgtgcacctcccagatcctcccctccgagttgcatatgccgctgcatctccagtcgaatgacgcggcgcaggtgttccccgcctgagctttccactcgcaatctgtgatcgacgacacgaaaatgtgactcggttcaaatgtttacgttgttcgtccggttggtattgctaggtatgaagagaagcttcagataataaatgcaagataggaggtagggagcttaccaggcggagtaccacaacaaagtctccggtcgtcgatatgctcgacatctaatccaataaaccaacttcctaatgaaacatcctcatttatatacttgtggaggacatgtctagcaattggattagaggaatcagcattagtttgtgcaacaatgagaacaaggcgtgcatgtgcacacaggtaaatatgaaaacaggtgttatctcacctgtttatagatatgtaggttgctagatcttttgaaatagcatacaattgaccagtagcatgccgaaaatatttgtttcctggttcgccaaatttccaatgctcaggttcatagtatctcacacccctggagacaagggttaacaaaacttagcaaattttgagggcatgagaaaaggaaaggagacattgtcagaaagaacagttaaaaccatgtgatgcacttacttctcagttaggacaggtccagatttcatgcatccaatatatactctgggcttcaatgcatgattagataaaatctgtccaagtgttgctgcaaaagcaaaacaccaatgtcataaagaatcaattgtctatagcagtgatgccctttctacatgcaatgaatcaaatatgcattgatgagactagctgcgtgttatcttgcgaaatatttgaaaccctggttaatgtttctacacatacaaaatggacacttaagatgaccatcaatgagtcaaagagaagcttcaaatacagacatgatggcggcacacagatatgatcactttcctctcatcttaagatcgataaaatgttcaaaaaagaacaatagaagggcataaaagatatggagatttacctatgtttacatgcacgtcatcatcaaccttcacataaaagtctgcatcccacaatgaaacagccgtagcaaagtatgtcttggttttgccagatagtgcaaggtatccttcaacatgatcctgaataaagttagaccacaataaataagggggcgaaatagcattcccagtgattctaggagaaacagtcacttgataaatacgatccatgaaaaaccaataagcaattaagcaagtgcttgtcttacaattctcatgaagtcaccatgttttctgtcctctgcttcaattgctctatcaacaattccacctgatatagcactggaagacatggaatgagtgagttgttttgtcaataacagaaaccaaaatcaaaataaggaaccatgactactgagtactgaaaaatgcaacacgttctttgtacctgtggccaatgacgaaacgaatgatgatccccttctcttcttcaagcttcttccttttttcacctgttttttgtctgttagtttatcgagtcatgccaataaaactatagaagtactgttccttttcttttcagcaggggaacaaaagtactgtccttcacttttttgcgatggaataaacagatttttcttaatgaaacacatattccagattttaatgtcaacaaccttgaggcatccaggtgtaacgtatggaatctcttctcttccgactgctaaatgcagtattgatgccgatcaccataaggtacttccgcctcccgattgactcggaaagtttgaactcttctgcaactggggaaccattgagcaaggactcttgtagagatcttgcagctgagagttctgtctctaagcttgctattgtcttatctagtgttctacattcaaagcatccaaaaataccgatcagaactaaaaaaaaaaaatcaacaagcaaacaaaaatattctcaagaaagacaaggcctgtacgtactgtacaccatgatgagtatcttgaacccgcaatatatctttgtaatcgggatgttggacctgctaacaaacacatgataatcagctaaagatattgacaattactctatacactgcattacaatagaaagaaagtatcatcttctataaaactaacttcatgtaatgaactggactaataaagtgttgaataaaattagagaaattaaaatgggaagaaaagcattacctttttaggaccacactccgcggcaactagcgtgttgccttcgtctccatttccgtttggtcgagcaatctcgtttgcctcaggcagtgtccacattctgaaacaattgatggggaataggtaagaaacatttggtaaacgaaatacctcgggggaggtctttcggcccagctttttaacctaccatcattgtaataataacatcataatgggcgaaaagactagctgaatttgcgaaaatggaactagacatccacaaaatgtggtcatgcttctgcagaaggaagtgactgaagagtggagtgctaaagctaaaatgttgggtgaggatacaccagttagcagaaactcgtctaggaagcaaattatgtgcatatttcaaatgggatcatttgcacagcttgtgaagccaataatctaatgcggtaagtaataaattcgaggttcagagagcgttgacactccaattcgatgtaatcgaggtaaaccaaatcaccaaacaacccccgtgaaagcaagaacacgaacactcctaccaatttacagtattccgctgcaaaaatcaagaacacgaattcatggccacacagtaatccagaccccccaatcaccccagatgcagaggcgcgtcaaatggcacagatctttgagctcggcgcagctcaaatcaacgacccagcactagcgaagctgagctcaaatcctcgaaaattgaagagagcaagaatcggagagcaggggggattctcttgattgattacctgttggtgaagagcaggccgaggcagaagctcccgaggcagagcagcacggcccatctcctcgacacccctccatcccctcctcctcctttcctccagctcatcgccgccgccgctatcttgctcttcttcctcctttctctcctcttcctccgcctcagaatctcatgcgcctgacaggagagcaacccatggacggatcacgagtcgttcgttcttgacttgttttggtgtcctcgatgggtgagcctttcttgcagctcagctctctctctctctctctctctctaccttctcaccacttgagcagcaagcagctcagctcacaccaccatgagacccatgtgggggcgtcggtcgtggtctcgtggaggagacgcagaagcagcgaggagcagcaactagtatactatgatagattaatatgatggagaaggactgaagttttagatccaaactttggatatactcctcccaccaaaacacgccatttctcctgcacagccgcagtaattaactcaactgcaagtctgcaagaagcaagaagcgggcagtgataataactggccgaccgtcaagatcttcggaggaggaggagaagaagacgaggcaggtgaagcgaacgcatcggcttcggcttctccgtcgcttacctagatggatgtatctgaagttctcaaccgtgtttggtttttgagtgtattcttgttttttaatttgtctgtttttgtattcttgtttttaatttgtctggctcggcttcacagttgcgcgcgcgaaacgaacgaacgcacatgggggtcggaggctgcggctgcgtgagaagaaggtggagtgaggtgatgggtaaaaagggaaggggcaaccgactgacgtggtggtgtgtgtgtgtgctggtgagacgtcgctttcggtgggtggtccacgaccacgaactcacgttgctgctgctgtccgcgccgtgcacccgtcggtcggtagcagtgcggtgcgccgtggcagggagggcgccggggggttttcttgtcctagatcgtccgtaataaaataccgttgtctctatttttgttcagtactactccgtaagcgaaattgatgagcatgaacaccggacgtctcaaaagatcgtagaggaatactccctccgataaaaacaatatatttatcctttaagatttcggccatcgatgatttctcgaatgcttagtttacagccaaatcaaatgatataaatagatttgtctcgaaaagtattatcacattggctaaatatatttttgaggggagtaatatgaaagataaaattactcgtttgccactagttgattggtgtttattcatttgctacttattactcaatatgctgtaaggaaatgtaaggatatggacacttgcgtaccgttagtgtctaaggagaagatgtcacctatgattttttatgacatggaggaaaaagaaagagggaaaaaatattagtaagttgttgattaccaatttagcttttagcatacagtttaggaaaaagtacacgcaaggtccctcaacttgttagccagatacaaaatcgtccctcaaccgcaaaaccggacatccggcgtcccccaacttacaaaaccggtcacaataggtccctcgacggttttgaccccggttttatcccacgtggcggctgactcagcgtgggacccacgtgggccccacatgtcaggctgccacatcagcctcctcctcctctctctctctctctcttcccatcttctctcccttcctcatctctctctctctctcccttctctgactcaaccggcgggaggaggagggcgtcggcagccggcgacgggtgacgcgacggcggtgatggcggcgacgggcgacgcggcagtggtggggggaggagctacgggtgggcgggcggcagggagaggcggcgcgcaggcggcggggaggggcatcgcgcggacgggcgacgaggaggggcggcgcgcaggcggcaaggaacaccccccggatggcggggggaggagcggc

SEQ ID NO: 19849 - DNA, 5485 bp, Oryza sativa
cgaagtcgggcgtggagacggtgaggtgggcggcggcggcggcggcggcgggggtgtgaatgggaacggcagtcagcgggggaaggggaggggagcgaatcgagggcggcgagggagaccgggacaggaaggggagcgccgccgttggagaaggccggcgaggcagtggcgcgcgaagccggcggcacggagcgggacggggcggtggcgaacgacgacgacgacgatggcgacatgttcgaggaggaggaggacgcgcgcaactcctccctcgccgcggccgcacgcgcgatcgaggagggtggggccgccgcgctcgcctccgacgaggccgatgccgtgtcgcccgccgccgtatcgtcgccgtcgttcctctgcctcgtgggccttgtggccggcagccggcgggggaacccgcgcgccgctcctccccccgccgtctgcgcgctactcctcgccgcctgcgcgctgcccctccctgccgcccatccgcgcgctgcccctccccgccgcctgcgcgtcgcctctccccgccgcccacccgcccgtagctcctcccccaccattgccgcatcacccgtcgccaccatcaccgccgtcgcgtcacccgtcgccggccgccgacgccctcctcttcccgccggttgagtcagagaagggagagagagagatgaggaagggagagaagaggggaagagagagagagaggaggaggaggctgatgtggcagcctgacatgtggggcccacgtgggtcccacgctgagccagctgccacgtgggacaaaatcggggtcaaaaccaccgagggacctattgtgactggttttgtaagttgggggacgccggatgtccggttttgcggttgagggacgattctgtatctagctaacaagttgagggaccttgcgtgtactctttcctacagtttaataggcatgagatggatggaagtactaggtgggctggaagtgagaaccgcttgggacgacccatcagcctgtggtccatgagtcaatggaccttgtgtaagcgggctaaggagcgggtcccacatattgccagggacacatgttagaaaaggaaattgattgaatgggcatattgggggtatttggatgaatatctgagctttgaatttgatgttccaatccatagaaactccaagaatccgagtgataagcttttgactgagattgataataattttttgagcaattttgcaatccctgtgaaggtaccatgaggtacaaaattttagtgtaaaatttggtacctcgtagtacttaagtaccaggagatatcaaatttacaatataaaaagtggtacctcatggtacctcctaaatgatcgtaaaattgctttaattttttacatagttcgaattctgataggttttaggatacggtgggatgagagggaaaacacagtatttccaatgaagttttggattcgcttttgttttcttttgtataatttggatttggaataaatctcaaggtccctaaaaaccagactagtattggatatgatgttttctagtataacaaatccgaatagaagtatgatcaaattcgttgtaataggaaatatgccatccaatactacattagtttacgtgggacgggcccacaagttccattctcaactcggagtttctgattctcacagaaattgccaactcaaggatgaaccaagaatgtcataagcacacatccctaaatctctcagacccaaacccatcaattttcacgagatccgagaaggtaaagtgggagagctcgaggatgctatatggtgaagtgcttcaacttaagggaagcataagcagaagctcgagggagagatgggtcgccgcggcctccattccctccaaggtccggctcatttgagcctcttagcgagcttgagtttggtgacgtcgtggtcgagctgctacagcaataactgtgtgcgacaaccaggcagactcgatgctgtataccggttctaaatttcattccaatcaaatgatccatagcggacaatacatctcgttaacaacaaggtgttaacctgagcgatactcgacaggattctttctagttgacggattccgtagctttttagatggcttgatccagtataaaccgttgtctcctattttcatgacgcaatctcgtgtatacactagtttcaacgtcccctgtacccttcaaatacaatctgcgagtacaacccattggcagttatatagctacttcttatccaattttacagttgagatttgagaatgcaataaaaactctatactagctatatgcagatttattgtattaggatacggttttgctacttatctgtcgacagttttcagcgctaaaaactgttgatttgttggctgttcgatccggctccaagattcgtgctgggatatttcgttattggatccaaatccactttgtctgcccgtttggcgctgttcctaattttcaaacagtataatgccgcgttagttctgttcttttccagaaatttcccgttggggaggagacccaagcggaggctgaggcggagaccccgctctcgacgattttctcgccgccggcggagaacctgctctcggcgccggtggtttttcttgcttgtgtgcttctcttcatccactcgtgtccatcgtgcccgtagctgatctgcttttaccttgctctcttctaaaatttccaggtgattttttcgctctcgatttggtttcatttttggggcattttagatgttgtgtttagatcccgcatggtgtttgccatataaattgttttaggtttggttgttgttcttctcctagatttatagggggtttgattcgttgatttcatcccgcatgtatagtcgtggatctggggatggaggcgctaatgctttctcttcatggcgaaccgtgatatatgtgtgctctttcttagttatgttcactagatctgatggtctattgtatcgtgctaatttgatttattgcagatctgcacagtacatatttgcatagtttgcagacatcccatttggattgatccctagtatgtatgttctgcgttgcatctgaagcatttgttcagaaaagtttcagatatgcatttgggttgatcccccctagtatgttatgtgacttatgtgtttcaagcatttttcgtttgagtgatgcatggacagatctagcagtatgttcttgatcgtttggttaattggaatggtgggattctagtccaagagatctggttgcaggttttgcaacatttcagtgctcgatgttttcctgttcatgaatttgtatcgggtgcaaccgtgcaagtttggggttgcaatttgcttggattatggtgtgatttgaatagagaagggaaaacattagtgcaactttatctgaatgctgcattcgttgcaactttttctagtatactgcctgttgtttggttgattaattgcccaactccctgtttgtgtctgaattcttctacatttgaagcatttcatttcagagatgtatgtcccagtatgttctaagttgtttagttaaattaaacccaattccctgcatgtgttctgcacttctgctcatgctttcttccgaattattcagatggtatcctgctgtgttgtttgctttacaaaatttctatacatgttctggattcttctgtttctatacatgttctgaattcttctgtgctgattcaaatgagttagcagcaagccaatacttggctcctgttgctttgagaaattatggctgttgattcacctactgcttttcttctgttttgtgtttctgttccctgttaattgctgcacaatcgtaaatccttttgagttggcgttgtttcttaacttgggaacaggggattgcacagctacacaattgttaacctgtttgaattggcctatttttgaatttggggacaggggatcacacgactgcacaatcgtaaatctatttgaatttttgaattttgggaacagggtactgcacagtttcagtcgacatgtacatttaaaatctcagactatggcaaacttaagataattaggcatgaactcagtctaatgcgtgtcagcagtagcaaaaccaaggtcacttcggtgcagaatacatgtttatatttcagaaatgtagatatagtttcaggttgtcaaaatattttgtagatatgcacagttgcttatatttctgatatgtttgttcagatttgtttggtggcatgcagttccattttttttacttttgcttttttaggtttcggtttgttttgaatcataggtgcagtatttttaagtgcagcggtgtatttgggagatttagcttaaatggggttttttgatggatttgaaaaaaaatgctttgcacaatgtgctgtgttttctgtttttgatatatacttagataaatgcctctattcggtggatctgaaatgtgtgggacttaaggttaaggtttttgatggtcagttctaaattatgagaagcatattattttgttttcaacatacgagatattaatctactgcatgtgtgttcttaatccccttcataggtaggccaacagtcactattaattatcatctacacagagcgttatttttttggttgcactatgcaaaataagttcaattatattccagttacatataacttacaacctagttacaaactaattacagtccagttacaacctagttacagtgtgccaatttacagttttgtgctttagaatcatgtattttttctattgttagatttgaattgaattttttattttcccttatgcacatgtacatgtatacaggtaggacacaaagaattattatattttgtaatagtgcttgacgatttatttttacttctgtacatactttgtactctgtactttttaatgttagcagatagcatgatgcatttttagtattttttttgtatgccttatctgctgctaagttatttttccccttacatactttttgcatgtcatattttttttagatgccacttatttgcaaacgaaagatgccacgtagaacaattgacatctcatctgaggaatctgagggtaactctataaattctgaaagtgacacatgcacagggtcagatgaagattatcacattgatgaggtcagtaatgttagtgcactgttttttttgaaactatggtaaatgcattatattatgtttgtatttttgtttgcaggttttggaagcactcaatatatctggatttgacaatatgcttcatgagctttacagtaagaaggtatatggtactgttattcctttatttgttctttttcaatctcctagggaatatattattataaaaaataaatgattctattttcttttataacatgttgtataatacatgtatgtatgtctttcttccagggtataaaaaagaagggagcgcacaatgaaactaaattggataaaatgttgtatgcacttttcaagaaggatg

SEQ ID NO: 19850 - DNA, 34398 bp, Oryza sativa
atacctcttctgatcatggatttgataacagagacgtcttgacgaattcttgagatgtttgatgccatcttattctccacatggcgaggacttgccatggtgcccctggtaagaaaaaccttatatgaagcaattaattaatattatatgtttaaacggtagttaaatggtgcccctaactatatgtttaaaaagaccttatatgttacataaagccatgaagtattcaagacaaaggagaatatgagactaaaaactttcacaggcaaagcttgaatcagaacacacaagtcatgaagactacaggaggaacaaaagtttattgtatagattgcaaaaaacaatggaatccttaagtttaaatagctgcatttgtattgacatttatgtaatgatttcaagctgactacacggtactttgtagctagcctaacaggtaatacaccctgtagataatacgattgcaaaacatcttttatttatacgatgtgcaattatattctctagcaaggaccctacagatcgagctgttccaaccagaaatgatttgttattctaatagagaagacgagaattagtctactgctacctctttaaaaaaagatcaatcacgtaaaattaatgttactatcattaaacaaactatcataatatgtatttctttttatttaaaatatattatttttatagatattgttggttaaaatagtatttcgaagattatatcgaagatcaaaaaatacttatattttgtaaggggagtattgcattacagatctactccctttgtcttaaaaaaactatttctatatttgaatctggatatgttcagatttaaatgtagaaatgttttttttcttttttttaacggtgggagtacttagcataggagaggtaaacaaacaaaactactgtagtacagtaatacacagagggcggcatcagtgttatttctggattaggcgattagcaccagctttgaagcaaaaaggcaaaaattttaccgcatcaaattaaagcacggtcacacagacctcaccatcagacctccacgacgaagccaaactgattgatatatagaagcttccataaagaaaagaggaaaaaaagcgaaccttctagaatccactagaaggcgatcgaattactacccagcacacaaattggcagtctccgcacgaatccccgcgcgcgcgcacgaaacacaacatgtatatgtaatgagaataaacaggagaaataaccagctaattaaggagaaacatatataaggttgcagcacatcgaatcgtaacgagatcacaccgcttggaacatgatcagaggctcacgaaagtcccaaccttttgaagcgactcccctccaggaaaagcatcccgatcacattccagaaccttctacccgctagctttcacgccatgcgctggtgtcgcaaaatcacagcttaagcccccccaaaaccccaagaacactcccccctacccccaccccaccccaccccaccccacccaaagaaagaaagaaagaaagaaagaaaaacagcaagcacgacatgcaagaagccgaactctggtgtggatccgagctgcggatgagtattttggggcaggtgagggagatcggaggacggaaaccctaacctttgcttcgaactcgaacaaaccaatacggggaagagacgcggcgccgaggcggagtggttggggagggaaggggagaaaacgaaagaaaggtgatgctgaggtgcgcttgctactgcgctgcggtgctcatatgcgagatgcctctgccacttatcgggttaacgggtcgtatatggtaatatccatcaccctcagagtatctgcttgatccccttaaaaagaattctcagttcatatcaatattacatcctttccccgttttaagtgaagttgtgtatttccgtctctaacatttgatcgtttgtcttatttaaaaaaattaaaaaagttagccgcacataaagtatttattattcatattttatcatgtgcaggctcatcctgctaacttggtgtgccgctggcaggacagcagatccacaacacttataattactagaaaataagcacgctcgttggcacgttattttcatagcccgtgtgtagtcttaatgttgaaattttaccgaaccatatcagagtcgatgtgactctaatgttataaaatttgattattaaaggtatagttggtcaaaattagcaccttaaagtaaaaaatgtttttttatcaagataaggagtattattaatggtatattatatttacatgtgttttatgatagtttaaaatatacatttctcaatacctattttttagaaaaaataattttagttcatttgtttgtgttctcaaataattatcacgaactcagtttcatttatcatccattagctatatatgtgttcatagttttctttttttcttcgcaacataaataaatctggtctcttctttgggatataatgcgtgcactaaattattacaatcgcaacatacagttattttcatgccctttctaaaaaaatattacccccatcctaaaataagtgcagccatggatatccgtacctaatgtttgaccatccgtcttatttgaaaattttaaaaatatttagtcatacataaagtactattcatgttttatcatctaatagcaatgaaaatactaataaaaaaattttcaaataagacgaacggtgaaacattgaccgtgaatagtgcaaaactgtacttattttgggacggagggagtatattttcatgcctccccccaacattgaaaaaaaactattatcgtatatataaattttattcgatgttcttcaacaattgtacatatataagttaaattttcaatgagcagctcacataagctagcttaatagctacgatacgttgtactcccttcgtttaaatatttggcgccgttgactttttaaaatatgtttaaccgttcatcttattaaaaacttttgtgaaatatataaaactatatgtatacataaaagtatatttaacaatgaatcaaatgataggaaaacaaattaataattacttaaatttttttaataatacgaacggtactctgttaatggacggtactcagttctgtccatcagaattaatcttttgagtaactctgtttcaaaaagatgacgcacaccgtgagcaaccacaaccaggcacttatccatcattaggactgtttttttcgaacgattctccccagaaacaacgcaaagtatagagcatgaaaaaaaattacaactctgggagatcgtaaacaggaaaagaagaaaaaatagcaccgcccacacaccgatagctctagcttacaaacccgggagaaggctagcatcgtaccgaccgctgctaagccaacaaaggaattcaagtgagatcgtctaaaatccaatcctaacaactgacaccaaactctactctagccacatcttcgagattgagggagagagtgagagagaagaatggaatggctctccacccaggccctctgacgtggccatcttgcataagctacggcgccgacacaagaggacataagtctaaagtgagcttgcaccggttgtttgtgaggttttgataaagggcctaccaagatgacgtctctagggagaggagcgaaagaagcaccgccgccgccgttcgtcaaggtctcaaagagaaacgagactgggttttcaccctacacccgctagaagagatgggacgacacgacaacaccctaaagaggagaagtgacacccgaaaagccgtcgttgccggcctaaccaaaacggtgctaggttttcacccgtcgcccaccgcctgcctatccatagcagatacacctttgctccatcatcgtctaaacctctgtcggcgtccctcgcatgccaccacatgggcaccctcatcgtgcgctccacgccgactgctccacgccggcctccagcatgtcgcgttgcgccagcttaccgccaccgccagctatgtgttctcatgttgtgtcggcctcacgccacctccacgcagcactcgccggccacgagcctccaccaagcgctgatggcgccatcactgccagccgccggcaccgcccttccactgacgtcggtgtcgtccatgcacagtagcctgctccaccacacccccattgccggccgccagcgtcaccgcgctggcctcccgccgtgtcgctccgctccgtccactagctcttgccgcaccacacgtcgtcgccgcccacgccggctgctccccgcccagatccgtagggtgttgggtctggctacgctgcctaggaggggggatccggtcggggcagtgccggatccactgccccataccggagaagccgccacctcccacccgacgcgctctgctccgcctcccacatcaaggaggagcttcgccggctcggtttcccttgccaccaccttctcagtcgggctcgcggtttctagcggcagcaaggcgtcgagataggtggagagggtggcggcgcgagcagctaggatttcatccccaagctacccgcatgagagtgacgaggggtttgttagattgatatttttaggacactgcgaaccttgaacaggcaccacatggcaattcttttacccactccctgagaacgcaaaaagctcacctagaaaacacagatacagtacagatgttcgctattaccaaagatcgttactaattttgacacgaggaatcttgggggataaaatctatataccctaactctcttctcaagcatataaacgatttcaagtatatcggctttgattcaccaataaattctcgctgctttatatataaaatgtatttggtacatcataagtttgacgtagatagataaaagagttgaggtaattggttcaaagtaacacaaagataaaattattggattcaaaatgagtccaaagcgaaacaccgataataaaagatagccaaaagtaaaactttataaattttaaattctgtaaaatacttattcatatcatggttgcgtattttcactcttgctgcaacgatctttgcttgcaagggaaaagagacagcaaatgcgcctctgcctcgattcgatcgtatgcctgtttgccaagaggacgtcaaggcggggtgttgacgggatggaacaacgaactagcattgccaacgtacgaagaaacaagtccagctgtcatttcaatggctgaaccaggtgctcgtaataaccaaatgctgataagctgatgtcctgatgggttagtaacaattagtctttttttttttgctcggtgttctaaaaaaacaatcattcacgattaggacaaattattaaaaaaatcgcacgagttatactacctatgtggccctgttaagaaatataaggcgcagtttgactatttagttttaagctttgatcaataatttgtataacaatatttaggttttgttggattattcatgttcgaaagtactttctactccctccgtttcacgatgtaagtcattctagtatatctagattcattaatatcaatataaatgtgaaaaatagatgtgaaaaatagagaatgacttacattgtgaaacggagaaattatataactaagaattcgtaactgtaagagaaatttgtttttggcagtcaaatacgccttatatttctgggcggaggtaaggagatcagtacttatttacgtgcacgcctaattaagcaaactgcttagcggttaagttggggcaatatgtgcccgttaggggagtgaacccgttggtgcaacacgtacgtgcattgccgttttggctgcatgcgttaggtcgtgggccctacgaccatgcatgcatggctagctctgtgcttcaaatttaaaaatgctctcgatgcatatatggctgtgtttaggtagcttcgaacttccaacttttccatcacattaaatatttaaacacatacataaaacattaaatgtggataaaaaaacaattatacagtttgtatgtaaattacgagacaaattttttgagcctaattataccatgatttgacaatgtagtgctacaataaacatttactaatgatgtattaattagacttaatagattcgtctcgcagtttaacagacggaatctgtaatttgttttattattagtctacatttaatactttaaatatgtgtccgtatatatgaaaaaagttttaccaaaacaactaaacacggtctatatatacgttttctatcggatgaacaatatatttttgttcatttgggtgtggatgcgtggccgggtacactggactaaatgataaatgctgggtatacccttaagggatgagaatgaatcgaaactttttgtaataatatataatcatattcagttccatagttcgtctttacattttcgacaaggttgatattaattaaacaatttaaactttaacaataccaataacttttaaagcatttagtttgaaaacattagaacaaacataatgtgtatagattattcttaaacatattttaataaaattaaatgttcaattatatattaatatgaaccatagccaaaaataagtttcgaagaccgtgttgttatccaaaacgttaattaagaaatggaaccatagagtatcatagagtatactgaagaatattgttttatgtagattttgttggaattaatgaatgggccttagcccactcgaagattaattctttggaaaatcacaaaagcccacctcatgggatggcatgcatgtggagtttagtaccaccttgcttatttaggagagggggacctccttaaaaggggttgatagcgtctcttgatgttgaggagaaagctcgggaaaaagatgccgcgtctaagggcgatggtgggcagtccagtgccaatgttgtgcacaagacccagaacaagagcaaggggaaatacaaagctcagcagaccaccaacttcaagaagaagaagaagaacaacaacaatcctaatcaggatgagaggacttgctttgtgtgtggccaagttggtcatctggctaggaagtgtccacaacgcaaggggatgaaggcacctgcagggcagacttctaagtctgctaatgtgaccattggcaacactggagatggaagcgggtatggaatttacctactgttttttcagttaatcaatctactaattggtgggttgatactgggaccaatgtacatgtttgtgctgacatctcattgttttcttcttatcaggtcgcacggggttccaccgtcctaatggggaatgggtcacatgcttctgttcatggtgttggcatggtagatctgaagtttacttcgggaaagatcgtgcagctgaagaacgtgcagcatgtcccttctatcgacaggaatcttgttagtggctcccgtctgactagagacggatttaagttggtttttgagtctaataaagtagtcgtgtctaaacatggatattttattggtaaaggttatgagtgcggaggcctgttccgcttttccctttctgatttctgcaataagtctgtgaaccatatttgtggcagtgtggatgatgaggctaatgtttggcattcacgtttatgtcatattaattttggcttgatgtctcggctttccagcatgtgtttaattcctaagctttccattgtcaaaggttctaagtgccatagttgtgtgcaatcgaagcaacctcgcaagcctcacaaggctgccgaggagagaaacttggcaccactagaactcctacattcagatctttgtgaaatgaatggggtgttgacgaagggtggaaaacgatatttcatgacattgattgatgatgctactagattttgctatgtgtacttgttgaaaacgaaagacgaggctctagactattttaaaatttataaggcagaagttgaaaatcaacttgacagaaagataaaaaggcttaggtctgatcgtggtggagagtttttctcgaacgagtttgacttattctgtgaggaacatggcatcatacatgagaggacgcctccctattctctcgagtctaatgggattgctgaaaggaagaaccgcacactgactgacttggtgaatgccatgttggacaccgcgggactgcctaaggcatggtggggggaggcattgttgacctcaaatcatgtgttaaacagagttcctaacagaaataaggacaaaacaccatatgagatatggattggtagaaaactatcactttcttatttgcgcacatgggggtgcttggcgaaagtcaatgtaccaataacgaagaagcgtaaacttggacctaagactgtggactgtgtttttctgggatatgctcatcatagcattgcctatagatttttaatagttaaatctgaggtaccggacatgcatgttggtacaattatggagtctcgtgatgctaccttctttgagagctttttcccaatgaaggatacacatagtggttcgaaccaaccctctgaaataattctcagttcaatcacaccaccagaacaaactgaacatacacatgaacttgtctctgaggaggatgtcagtgaagctcctcgaaggagtaagagacaaaggatggctaagtcttttggtgatgatttcactgtgtacctcgtggatgacactcctaagtcaatttcagaagcatatgcatctcctgatgcagactactggaaggaggctgtccgtagtgaaatggattccattatcgctaacgggacttgggaggtgacagagcgaccctatgggtgtaaacctgtggggtgcaagtgggtgttcaagaagaagcttaggcctgacggtactattgaaaagtacaaggctcggcttgttgctaagggctatactcagaaagaaggcgaagatttctttgatacttactcacctgttgctagattgaccacaattcgtgtgctactttccctagcagcctcacatggtcttctcgttcatcaaatggacgttaagacagcttttcttaatggagagctggatgaggagatctatatgtatcaacctgatgggtttgtagttgaaggtcaagaaggcaaagtgtgcaaattgttgaagtctttgtatggtctgaaacaagctcctaagcaatggcatgagaaatttgacaaaacattgacatctgcaggctttgcagtcaatgaggcagataaatgtgtgtactatcgccatggtgggggtgagggagttattttgtgcttgtatgttgacgacatactgatatttgggacaaaccttgaggtgataaatgaggttaaatcattcttgtctcaaaattttgatatgaaggatttgggagtagctgatgttatcttaaacattaagctaattagaggtgagaatgggattacactcttgcagtcccattatgtggagaagatcttgaatcgttttggctacattgatagtaagccttttccaacaccttatgatcctagcttgttgcttcgcaagaacaagagaattgctaggaatcaactggaatactcccaaatcattggctcgttgatgtacctggctagtgcaactaggcctgatatctcctttgctgtgagcaagttgagccgatttacctctaatccgggagatgatcactggcgtgcgcttgagcgagtaatgcgctatctgaaaggtactgtggaattggggcttcactatactgggtatcctacggtactggagggttatagtgattctaactggatctctgatgtggatgagatcaaagccactagtggatatgttttcacactgggtggtggtgctgtttcatggaggtcttgcaaacagaccattttgacgaggtcaaccatggaagcagagctaacggcactggatactgctactgttgaggcagaatggctgcgtgatctattaatggatctgcctgttgttgaaaaaccggtgccggctatccttatgaactgtgacaatcaaacggtaattgtcaaagtgaatagttctaaggataatatgaaatcgtctagacatgtgaaaagacgattgaagtctgtcaggaaattaagaaactccggagttataacgttggattacatccaaacagcgagaaacctggcagatcccttcacgaagggactatcacgaaatgtgatagacaatgcatcgaaggagatgggtttgagacccatgtgagttatactatggtggtaacccagtctatgtgatcggagatcccgtgaattagatcctgggaagaacaaactattaataaactagaggagagtaccaatatatataccctctccaagtgaagatgcatatactctcgtgagctgcaaggcaggttggctatgccttaatgagttctgttggctttaattagcgaagatgttgtcctgcagagcattcttgaaagaactcacctttgtgagcttgactgttggtcgcagtctatgaagattttgggtgaatcttctaggaagcttactaaagacctaggagtatgacttatacgctccacccgaggggtagtctacagacggtctagtaccagataagactttgagtgaaacttgcttgcacaagacttgcaattcaaggcgtagtccattgttcaagttgtgagtaagtgtaacttggagtcctaggtggatgttcaaccttaattggtctccatcgaaccgctggtatataaacagtatattggaaaaggcaaatctcagtgggattttgagatttggtgggggattgttggaattaatgaatgggccttagcccactcgaagattaattctttggaaaatcacaaaagcccacctcatgggatggcatgcatatggagtttagtaccaccttgcttattctaggagagggggacctccttaaaagggaggatgccctcctagccacttgaagcatgtgtggtggagagaagaggggaaacacacgcgcgcgctcgctcgcctcgcctcgccgggcggcccggcccggcagggcagggcagggcaggcagcgcgcgtgcacgacgtacgcgtcgaatggtccgaaaaattggctcctcacccttgcgcagatgcagcctccttttgcagttttgttttgctgcaaattcggattcgtttttgttttggaaacgttccgaaaaaaccggtgcgtgcaaacggcgtggagtccggataagttacgcgcgacttatccggttcggttacgcgcagtagagatcgtgcgggcgccctgatcaagcgacccttctctatataaaccgacctgccgtcttcacgcaacatacgcgaaatcaatctagggtttgcctcctactctgtactgcgccgtcgctcgtagactactccatcccgctcgccggcgtgcaccggcgatcgggagagcaggtctccggaacctctgccttcgacgtcctgcaccgggagaaggcggcaataaggtttttgggaagcgcttcgcgcgactgctccctgtttgttcgcgacagctcgccttcctcttcgctcgcgtgtttcgtgccttcgtagacacctgcgaaaagtttcgaccaagcagccggtctttccgtcacctcggtacgtgttcaatatgttgcgcatatttgatctgttcatgttatactgtgtagtttacatgtatagatctaatgatgcgttcatgctagttttcatctgtaatgtcatgatttatttatggaatagattaaatcattatatgtctataatctcaacagattttgggttggttgaacgaataattagtcgataggtgtggcgcgtgtggagagaagctagggggtagggccacaccctaatctcccttttaaatcctattaaaatgcaatgaaattggaaacataaagcaaaatccattagttgaaatgtagagttggggaaattcatggtctggttactcttcagattcaccgtatatataattaccccctccatttctaaataaattgttttgacattcttattttttaaaaagagataatccaaaaaaatgccattgacaagcgtccaaatcccagaaatgacatcgacaagcgtgagtttcaagaaatgccatcgtacaaacgactttgtcccaaaaataccattgccgttagggttcatccattccgcgccgttaagttctataggatgaacagtgtatttaacggcgcaaaatggacggaaccctaacagtgatggcatttttgggacaaaatcgtttgtacgatggcatttcttagaactcatacttgtcgatggcatttctgggatttggacgcttgtcaatggtatttcttggattatctcttttaaaaaactagcttaaatgactgtgctttgctacatataaaaaggaaaaatatcctaatattttctaaattaaataaaccgtattttccacgaaatatgtcattgtccaaattaatttatatgtggctatccatttagatataattgttacgtaatattaggaagtttaaaaggtaacatggaaaaattaagagagaatcccttatataccactccaaattaaccggttcccttatatgccacttcaaattggcttctcccttctatgccaccggttcaagtttgttatcccttttatgacattgccgtcactccaccgctagttgacatttaacttcatagtaaaaagacgcatttgcccttaagagttggtatacaaccaataataaatatactaatgtagctactggatacaacatatgaaaaatgattttttttcatcgcatgcaattttagccatcaccatcacaaataaattttcaataaaagcatgaaacatgcagttttccaacaatatttttaatacaaagagcattttccactagttctgacaaaattttgttcactcaaaaaggattaaaaataaattagttatgatgttttgaagtttacacattttttacttgagagggtatattggtcatttacgaaaaagtaacgtttaactaacagtcaactaacactatagtgctgggagtagcataaaatggtggaaaaacttaaaccagtggcatacaagggagaagccaattttaagtggcatataagagaactggccaatttctagtggcatataagggattctcccaaaaattaaaacaggagtaaatatcttaatttcctggaagcgcacaacatccatcctgccgagaggcacacagccgagcacgggcgctccagcaacaagctggtggtctcttgcgggcaggaacccggcctccatcttcgtgtagcctcatcgacgtgcgtagccacacatcatatagtgttccacacatgccgagctgatcgctcgagtcggagccacgataaactagcgccgacctccggccacactatagccgccgggccaggtgcccaagttggctcgatgaccacgtgtgcgggccgggacttggcgccacggactccggtaccgtggtgttggacgtcggtgccaaacaactctagtgccgcgatagagtctaaatctaaaacatgtgttttagaggatttatttataaaaaatgtttctgaaaggacttaatgtgaaaaattaaggcctaaaaacctggctatatgaaaaaaacaacaaagtacggggctctcgcgtcgtcctcatgagggtggcttgggggcaacccttagcggcccacgccaccacttcctcaccccatctaaccgcctcgccgtcgctggaaaccgcacgggcggccagagtgttcggtgggacggatccggtcacgccggaggcagatcccctcaccccccctccccacgtggccatatcgggagtaggtgactccgacaagtggaggagcccatggctgcgcaacccggtagaggcgtggggcagtgcggtctggtggatgcacggggtggcgtgacggctgtactggctgatggtggaggaggccaaacgtcgttgccgggagaaggcagtggtaggcccgcgccgtgaggaggcgcggccggtggcagcgaaggccggcacagaaggggggcaaagccagcggaggcgaaggtagacgaggtgtggcggccggtagcggaggccggcactgcgcgatgagggtggtggcacgtggagactggccggcgaggggcgccggtgtagctgtgcccgcgagccgatggaggttagacggcggtggagcgatggtgcatcagctgtggataggcaggcggctggtgaaaacctagcccgaccaatggtggcgttgtcgtgccgtctcatcccctctagtggggttgccgggtaaaaacttagtctcgattctctttgagacctcgacggacagcggcgacggtgctttcgtcacttctctccttggagacatcatctaggcaaccccttgttaaatcgtcccaagcaactggtgtaggctcgctctagattctgatcctcttgtgttggcgtactagattagggaagttggccacatcggaaggcctagggggtgagcggttccattcttctctttcatcctctctctcttattcccaaagatgtggatagagtggggttttgtgtcggttgtaaaggttgggttttgggagatctcgattgtagttctgttaacaaccaaatttgataatctaagtatcggagataaagactagatcgaagcggaatccaagttcgatatcgtatcggaaacagagcaagaatcggctggactccaaatcggctacgaccagatcggctgagtccgagtcagaaagggaaagccgatacagccgattccgacaatatgattcggtttacgtcatcaagctgagttaatatacttcacgtggattgccacacacggatagagtcctaagaagggaattgtatctattaattaggatattttatgtaatttccttagagataagtacgggcaaaaatctgctgcaaagacttatggtatcttagagtttgttagagataagagtcgtgtctgacaaggacatattttgtaatctcgggtataaatagaccccgagccccatgtaatcaattaacacacgttaaaatacaatttcggcgcatcgccacccttttgttttcattttgtttcgacgagttcttgctttcgggttgagctgcatcggtttcgatcttcaactagaggtatgacttgttatggcggcttgtgttctcgggattagtgcttccatcattatgatactctaatcctgtccatgtaagttgtcgagttatcatatatcttatataatctctgacaatatcgctatctaacctctaatcggctaatatctatcactagggagcagccgattaggttaaatatcgacgttggcttagattatataagatatctaccactctatgaagcttccaatagcttgattgtctagatattgtcttttttttcatacttatggttgcatcagttgagtttgacctcataagtcgtgcttagaattataatctctagcctgcttcttggttgttgattagggtagtgtcggggtttcagctgatcttacctgatttagccttatgtttcatgtgcttaattgatatgcttgattcgccctttatattgagatcttattgcttttagatatgttaagcttcttgtttaatatattttactcgttttaatatcttaatatagagtagtatcggagtattagctgatacatgctagatctatcttatcggctatgctatgaacatatataatctcgttgttaatacatattgcgatctaagtgatttatactgtctcggcatggcgaccgatctatcccaatcacttgatttaagtatatatcgacataaagattatatactgttaataactacagccgatcgaatagatttagttcctttattattgcctcgcacagccgatcgatgcaaagatgacatcggctcgagtataaatgatacgtcatcggcgtccggccgatcggctatcatttatggattaactgttattcctgtttcttgttgattgtaggatcaaatcaactgtcacgccctcaaacctaaaggcaagatattttggacctgcactggagttaagcagatctcccaagcctcgtgtttttacatcaacaagttcctttatcatgaaacaaacgatacccacactttaatgtggaacatattgataagtactcatatatgttcaatattataaaaacgatggatagatttgttaaaaatattattttttttacttcaaagagggaattttattgatttcggaagagaggattacattcttggtctatcaagtctaagattcctgcgggagcacacaacttccactcctcacacgatctagacctcatagccatttgagctaaagcatgagcaatcctatttgcttccctcttgatcttgcaaacctgcacactttggagacactacatcatccctttcgcttccttgattgtcgctgcccagggtgatctcgacagctcctgttgtgacagagccttgaacgttgtcagtttccaagattattggcatatgaatccattccatggctacccttaatccttctagacatgccaatgcctcagcttggacagcagtagcacaggatttcagagttttttgcgcagcaagcagcactaaacccctgcagtctctaatgatgattccagcagttgaaactcctgtgtcttctataaaaccagcatccacatttacctttgctgaaccttcgggaggggcgcgccatttatcaacctgattggttgtccgaacctgcactaatttctcctttggttcatcatacattaatccttttcctttgatgtcatcgctttgttgtcggatcagcaacaataccttctcatagttgatgaggaaattaacagactctgcaattgtggccgtcccctttccatggatcatatcattcctgaggaaccatgctctccacagcaagtataaaacacgcgccttgtcagaactactcaagctatccaacaggacaaggagccagtcaggcccagtcatagcaaacttccttttcggcggtagcgcccagaactctctgatgacttctcgcagcgatcacgccatcgtacattcaacagtcgcatggaaaccatgttccccctttacaccacagatagggcagatacctacaggttgtatccttctttttcatttattctcccaagtgggcagcctgctgtgagcaagtttccatgcaaaaatcttaacttttggttgaacgtctgccttccacacattctcccagagcttcctttcaccattggtagcagtgcttgaagaggtctgaacttgagcactctcagttaaattccatgctagcttataggcgcttcttactgaaaaaaggcatgttttctcgtagtgccaagcaggaaagtcagatgtctcctggttcggcacatggatctttagaatagcatttgcatcttcctccgtcgcaacatgtctgattaaagcctcattccaggcgtttgttccagggatcaggagctcatgtacatacgtgagcctattccaattcttcttctgtataacctcaactttctcaccatgcgccacccatctattcctccaaatcttggtagtccgcccatctcttaccctccaaatcagtcctctctttagcaattccagcccatgttcgattcctttccaagttggtgaagtattggacgggaaagctgtatcaataagggagccattggggtagtactttgcttttagcaacctagcgcacaagctatttggctccgcgatcaacctccatgcttgacgtgctaataaagcctgattgaaacaccgaatatcccgaaagcccaggccaccatgaagcttagggctcgtgagcttctcctaggacagcagtataacgtcccgccttcccccaggccaggcccgagctttcataggtcatagactgccctcacagaccaacacatgtcttttctgcacactttgtcctcactcgtgcgcacccgggccaagcattcctgcacacaatttgccttcccccaggccgggcccgagctttcataggtcatagactgccctcacagaccaacacatgtcttttctacacactttgtcctcactcgtgcgcacccgggccaagcattcctgcacacaatttctcggtcggtcatccatcccaaattgctccatgccaagtacgcttaaccctggagttctttggagatcggtttccggaaaagaagttgcaacttgttgatatgagtattctattaatcctattaagccctgggatgtcacatcctcacccccttaagagagatcgacgcccctgtcgatcaaccccaggccaggaacgtctgtccagtgccagcgcatgtgccatgctttcataggtcatagactgccctcacagaccaacacatgtcttttctgcacactttgtcctcactcgtgcgcacccgggaagaatttctcggtcggtcacccatcccaaattgctccaggccaaacacgcttaaccctggagttctttggagatcggtttccagaaaagaagttgcaacttgttgatatgagtattctattaatcctattaagtcctgggatgtcacaagcagatagaaacctctcacaccaatctgttaatctcttagaaaatctttctttgattggttggaattgttctgatttcatcctaccttcgggagttggaaggcccaggtatttatcttcaaaacctgttctttgaatctgcagaacagctttgatctcctcctgcctctcctgtgagcaaaattcactaaacaacagagaacactttgctgggttaataagctgccctgtgcttttctcgtatagactgagcgcctccttcacacttctcgcttgatcaacctcggctttaaagaacaataagctatcgtcagcgaaaagtaagtgggagatccctggggctccccgacacaccttaattggttggattgaaccttccaagctcttcttctccagaatatgtgacaacccgtcagcaataaacagaaacaagtatggactaagaggatcaccttgccgtagacctcttattggacagatgtcaacacaggacattgtccacttcctccatgtatctccaaaacccattctttgcaacacaccatccagaaacgcccaatcaactctatcataggcctttgaaaggtctaatttcagcgcacaaaaattctggttctcccttttgcatttttgatggcatggaagcattcgaaagcgatgagcgcgttgtccgtgatcatgcgacctggtacaaaagcactctgtgcatatgatattacatcatgaaggagcggtctgagccgattaacaaggcatttagctatcaacttgtatatcacattacatagactgatgggccagaaatccttcatctcctccggcgacttagtttttggaatcataactatgacagtgtcatttgctccctcctgcatttcgccgttttcaaaaaacgcttgtaccactctaataacatcactctaataatatttgttaaaatattatgaaaatgatgtagggatgattattggatatgcttgtatgttgatctgtagaatttgatagattgtagaagatgttgtatgcttgcatgagattgaatatgtaattattgtttgatgatgtggcgtggttgcatgtttaactttagagctagtgagttataactttatagaaaatatagattagtatcaattcatcgtcttactttactcgtaaataactttcatataattagactatgggtgtttggttaccgagctatggctgcaccgtgaccagccgaaactgtccagcaagctccaagatagcaggctgcaggcttgtagtcccagcttaccaacatgtccatgataaataaattgtactgtaatttttatgtagtggtgcaccacatttcgataatttgacacaatatttttagtatttgcatttttttctaaagaaaatagtaaatgtgtaccatgtcaattattatgactatgagaaaggtaaaacaattgaaagaaaggaactagaagctcctttaaacagttcattttacagagttttttataactacaatcttaaatcagaagctcatccaaacaatttagttttttttccatattttaagaagatatatttgtagaattaaaaaaaaactagaagccaaaaactatgtttatctagatttctatatttttagaagctaatcagccgcttgtcataatactcccttcgtctttaaatataagtattttggttggatatgaaatatcctgtccacggacggagggagtaaatcttaagggcccatttgaattggaggaaaaacatatgaattttggaggatttcaatcctatggaaaatttttctatgaagccctttgaaacaaggattggatcctatccaatcctttgaaattccagtggaatgaacaatcctatagagattttggaggaaatttagcaagagcttcaacctcttggtaactttcctttgagtatatctctctcatctaattcctgcgtttttcctgtggttcaatcaaacagtcattcctgtgtttttcctgtgttttgtaatcttttattttacacttacattcctactaaaattctacgttttctcagtcctacgattcaatggggcctaagctcagctagagaggccgtttagtcttgtgcacgggtgaggaagtgagtggcgtgtggtgagtggtcgggtgcgaccgttgcgacgggtggtggttcggttcggtgttgtggacgagaagtctcgaatcggcttggctcaacctaaccccataccacccggcggatcaagctccaaaaccctagaactcaacggagcgagcgcgtgggtcgggatgtcggcggcggtgagtgccctccgccgcgccctgtcgtcgtcgtcgtccgcggccaagaccagcagcagcctgcgccgcctcctccccgccgcgccacttcgccgcggggtcctctcgtcgcagccccggccgtcgcgccgcaaggacagcatcgaggtgcattctcccctccctctcttcccttcccttcccatctctagtccgattcccctttccagcgagcgagggacggacgatcgatcgattgattgctgctttttgtgtaaaattgtgtgcgtccagctctctcggagtgaggaggggaggaggctcgccggccgtttcgacgagattgaggatgccgtgcacgccattcttatcagggacatcgaatcctaccgggccagcaccatggccgaccaaggcttcgtcgagagaaggctcacctctctggggttcaccaagggatataccagggaccaagctctttggctttccaagctcgtgcttgcattcttttcttcgtgggtcgtagggactggattcgccaaaatcgacgacagcctccatcaggtcacccatccttgtttgctcatttgcaatttcgcataagctcaactttttgttgtttgcactgcaatttgccaattagtcatttaccatccaccctgctgcagaatctgtgattatcactggagtggagcgttacacatgcatgaattttgtcacccaacctcacagcgatcatactgaagattgtgccgcgaaaaataaatgtgaacgttttatgattctcttctctcaagaacattgggtcgtatcatctgataatttcctcacacagtatgctatcagagtgaaacaaatacatgagaattgtgcatctgtatggttttgagcttaaactttattagaaaggctgtaaacccatgagatgatctatgatcattccttgattttgtggttcatctcttgttttggttgcgcagataatcaattgagctgtttcggttttctctacgtctaaattcactatatctaggaaatctatggatgcttatctagtttagcacttgtctctcttttgatggtgacagtaacattctcttaacttgcttagtagaagtattatgaattaaagggatttaaactacttggctcgggtaacccaagtatatacattcaattattcatgagaaccttttccatgctatacatgaacaagtatatgttgtatgccaacaatttgaaaatggttgatgattgaactctgaaacctgctactttgtgatcaggactgtggtaacacattcccaaataatgtttctccagagtcatgctagattactatcagtcctcaattatactagcatgcagcccacaaattattaatcttgtgtaccgagtcatgcttggttgttaggtaatgattgatgcattcttcatctatatatctatccttccgccatgatttcgtagtaaagctttacttcttttttcgtttcgttttgttttcttttttgaaaaaaaaggcaaaattattgccttatatattgataaaggggtaagaaaacagcatttacaaggggggtgggagtttcggtcatccctgaccagaaacgaggcctactctcccaacggaaggaactcagctaaggactttgctcctaccattatccagagccgtgcttcatccttagttttagccaggatgtccgtttagtgcttgcaagttgcctgaaaactctcgagtttctttctttccacaacttccaagagactaggatgattagtgattttaagtaaagctttactttcaaatgcatagcacaaacaatataatgttgattttgttagtacttacactgtgaaatgttcgattgagctgatattgtgggctttataagttatagcttctagctctgcatctatgctttgcagttgtggaaattaatgaaatttgtgttcttcgaatcaaagtcttacttctatagatcattcgattacccagagctgttttagtctgtaatgcttgtgctcctgccaattttttttttcatgagcaaatttgtgtctattattggcaggtcaattcatgaactgcgccttcctgttggttgacggatggataaataatcaaggatttttttttgtagtgtgtttacgttttaatgtatggtgtgactttaccgtgcggcctactttgtgaagggattatgatttcgagcttgtttttatctcagctgttgttgtggaagagcacatttcgcaaccaatggttcgtatctgtaaaaatttttaaaaaatctttttagaataaagtagcacgtcttcggcagcaagaagaacctctgctgtttcttacgaacctcctcacaccaagttgaactccaaatcagttgctgcatcagcatgaatgaacaacaagtgtttgatgatacaaaccggaagaaatggaatcacagaatgagaaacaatactctgcaggatgagaagaaacaacactctgatgggttcaagttgtggttgataacacgtagaaaaatgaatgaacagaatagtaaaaatatttttatgcgtgaaacttttctatgtctgtattattagtggtttaataaaaaaaaggcaaggctagaaaacaacatatactaggatgaaaacccctaaaatcaattcaattctaaatttacaaaattttaaatttgatttacggttgacaataataataaggggttgttcagttccccaaaaactttttctaaaaacatcacatcgaatctttagacacatgtatagagtattaaatatagataaaaaaaaactaattgtacagtttgcatgtaaatcgcgagacgaatcttttgagcctaactaatccatgattagccataaatgctacagtaacccacatgtgctaatgatggattaattaggctcaaaagattcgtctcgctgtttagttatgaaattagttttttcattcgtgtccgaaaaccccttcgacatctggtcaagcatccattaaaaaattttcattttacaagctaaacaggccctaagtaaagccaataaacagacgagagagagagacgacgaaaggcccacactgtagcaaactgtaagcatgacaagtgggcccggccgagacggaatgagaaaatcctagggttcgttccctcttcccaatccggcggcagccagcgagcgagaggagaggggggaaaccatgcccgcgttctccagggctcgaggcgccgtcctccgcgtcctcgatggcttgaagcgccgtcctccggcgagcggggcggcggatactatggtcccgtctagctacatttccctccggttcctctttttattttcttcttcttcttgtcttttctttgaaccttttcgtgttgccgattcctgtttcccaatgcagagcccagtcaggaagatccagatgcttgaagaggagcttcgtccgtccgggggagaaatctcacgaattctccaacgcgcgcgcgcccacttggaaagacaagaggagaaatttgatcctagctcacagtgagtactgtactattctatctagttccgtagtatatgaagtctcgttgctcattttatttacctttgattcttcatttatatgccgctatgtcatgcggttaagaaacttgctggttaattttgctcaaacaatttcactaaacacacactgcttgttagtcgcttggggatctcaccatctttccatgtgtgtatatatgcagcacataagttcatactcatcgcatcatccatatcttatagccatgagttatcttacgcaacgatcgcagttggtggccaacagccattattattattttttcttgtggtttctgtacaccaccagcttctgctataatatcgacacggattctcattaaaaacagcgttaaagcagtcactttatgattattgtgcttttaggttgcttcatcgctcggttagttcaactggttgatgctttgcaaataccgtgtctcgtctgtttttacaaaacatataattgctaataatccgcatatagacttgggtaatgcattttgtactaagtataaaagttagagctctcttgataaatgccttctttttccttcacgtggaatagcttgggagaatgaatgcttatatagttatattgaattgtctcttttcacatagtgaattgtccagcactctgattggttacaagttgagagatgaataaagcatgcgtcatattcaaaaccagctgtctgtggtgatagttctgaaggcatgtagctatgtggttgttgcatagaatatttaatttaaacgagtcaagcatagtatggttatttcacaaaaatgtatgaagctgttgatatttgtattcactgaatgtatgagatattttatgttgccataacataagaaagaagacgatgtcagaatatcagtgatccattagaatctctacatattcatagtggtataatttccaatcaaccaacagttaaaacaataagaaatgcctatgaagctgacatactgatgctattgtagatagactagtaggacaagatttctaatgttataattcccatattctaacatgtgtaagtgtaagaaatgccaatgaaggtggtaggctgatgctactataggttttggggctgtacaaacaaataattatcacttttgaacaattgaaaacctcaaacaacttgacacatcaactattacacataattttagtcttcttgtgcgcgggaattgtgggatgctaatatgctatgatccatcaccatgtccgtcttgggcaccactctgacccgaaggcccaaatgaaggttgtgttattttgccccttcatctggagattaactcctataacaacaaatatttgtgcacacaagttttaaccttttgttagaaggatcatactaagtttctatcagtaagtttgtcatgtttgacatggcttccataatgctgtttgacattgactttaattaaatttcacctttcattcccacattcgatgaacatcgtggtctcagttatttcagcccatggcgtcactaagtttctgatatagtacttctctaggagcatttgtttgctgaggactgacacattccactagtgatgtgtcatcattataactgttttactattctctacatgcatatatatttctgtacaaagagtccgagacaatgatatatatattttgcaggacgccggagttgttccgtaatggtgcaggttggcaattaaacaccttctttctatgccttttctcatcaatcattgccaactacaagtacaataaggtatgcagtgagatcattacattattctgaatacatgcattatgcataagcacatttaggattctatgaagctagcatgttatttatacaaaccaaccagagtaacaaacttgagaatttggaagaaaacaagcctcaatattgctctgaacgtaggcgcaggcacacagctgttctggcatccctcgtcatatgcaaatacaagctgcaagatatgctttgtcatttggaatagactgaacactaacaaaactactttaactaacagcagaagaagatgtagagctgctttttattgcctctaaatgtctaagttgcgacaaactactccatgaatactggaatttatatatgatctattctgaaatctgaacacaattgaaatgtacaatttttctgaacctaggttcaatactgtttgcattagcatcaagtagtggaattagaagagttttttaatttggaaattaaatgcgtgaacaataaccaatactatatttcctgcaataaggcgttgtcctgtaccttgtgaaagaaatattcatcgatgctcgctgcctcgagtaaagcatttagtgttcaaatgggtggtactcatatgatgaactcgttcaattgacagtgcacaaaacttgagacaccacaatcaatcctatggtaaagaaaaggggtatagatgaatctgcatccagaaaagttgtatctgttcagaaatgctttttcataaaattgtcactgaaaaatggcaaatgaagattatgatattcgttcatcagcttcctttttaaatgtaaaaatggcccactaaaacaaaattcatggtttgttgatcttgagttaaaagtatcttttgaatttgcagttgaataccggtccattattttcactccagacatttcattaagtaatttataggagggaggggcattttggaagctggataacgatggccctagtactttttgaatttgaaacatgttgacttgattaattttatgaaactagaatctttaggagtaaagtcagaatgatggcataacctcttagcctccaaacaagagttgtgaatctcaaaggactggaaggggagggcctttcgattttgcggtagatgaagaagagtgggtgcaaaaaactagaaagctattagcacatgattaattaagtattaattattacaaatttgaaaaatagatttatttcatattttaaagcacattctatatagaaagttttcacacgagacaaaccgtttagttgtttgaaaaacgtgttaacggaaatcatggtaaaatctatatcttaatcaaaaaagaacaggacctaagtagtgatcatacatcacagatggatgctttggaattagtgcaaatatgtgtggtagaagcataaagcaccaccaatacaaaatttgtaaatggtattttgaggtccaagtttggtcaaaacaatccaaatctactaacaattggtagtgcataaacgctagtctattaactccacttgcaggcttcctagcataagtaatttttttgttgtcttcatttcctttacattgtacactaaattgttttggtgcccgcaccgcaaccagttttcagaagtttcttatgatgctctgacacgaattgttgatcaatcttggcaggttgattgagctgtccttgcgttgtggaggatgtagccgagacggaccactggtatttgcccctcagtaaaatttgcctcagtaaatgactagtgtatggttgttttcatgatttgggattgaaattactcctggccggttgtttaaattgcaccatgacgtgtgctctgtgacttaagtagctgagtaccaatggaattgtctagttaccatgttgtggaattgtctcgttataaattgttatgcaactggcgattcacaaaccccacgacgagtctccagtagcgatctgttgctgaaccaaacatgaattcatgcgtctaggaaagagacggaacaacgcgagacgatagttatgaaacatgttacacgctgaacttacacaggaaatcatcactacaagaattttaaaaggcatcagatggttatgaacataatcatatataccacacgaaagtagccgcatgttcaacacgcatcttaattagaactcagaagtgccaactcaaaacaaacaatcagcatcatcatgttttgcttgtcaaaatgtcgcccttcccaagaaagataaagagcataaattgcttgtcagcataacaccacagtccacagtcacatgcttttaacttagttataagcctcttagaattaattattaactactagcatttggttcatgcttctcggttctcccgacctaaacagcaccccaaaaatcaccacggctgcaatctgcttgcaccacagcttagcccaactctgctgttcaccctcccggcgcagactgtacttacatgagaaataagtttagatttagtacacactgctcaaggacaaattatgtgtgtaataaaaagaaacagcgtacttacatctttacgcattcagacagcacgagcccttgctcaacattggcatgcgtgatcttacctatcgctgaaaatatgcctgcctgccctattcagataccaaagttaaaataaccagtcgagttggagaaactatttgccggactcaactcaaatggattattatggtgcgcatgtaatgagggcagtacttgtcagcaggcatgcagcagcattctgatagtcaaacaatgagaagttagatgcaagaagtttctgataacaaaagaaacattatgtggatcaacggaatgcctagatgacgacaaaaaccatataaatctcagcatattaggaactccctggctgtagtcagcattataagctaaaaaacgcaaagtcttgaatctgcagactatgattgtaataatgtagtgcacccagtaaagagatgaacatgcatggtgtgacatcgtaagatcataatattgtaaattgaatttccagatcaattcagaccaagtccgctcaaagtaaggtacgcttggattggatcacacggtaagtacatctccaaaagcaattcaacaaattcaaaatatacacaaccattaaatgatgaagaatgtgcatcctttttcttcattaacctacatccactctaccaaagattggtccaagcttgcaagagtaccatccatttgaacagcataacaaaaatcaattttatataagaacctaatatcacttgtaatgagaaaaattagccagctatcacttgaagtcttggagatgctgttttttagagagaaaaaaacatgctcaacacgctacaatccgtaaaacgccagtgcatgtttcctatgttactaacttctcctatcttcatcaaattaaaggtgaaggcttccaaatgacacaagttttgtatctctcaccacttctcaaagatgggctaagttatttggtgagaggaaggtgtagtattctttcaatttcaaattcttgttagggggaaggtagtactgcactactgcatcatctaatcgaacaatttcttggagtaccaaactaaaataagtaatggagcaaacccaccgtagtattgtactaagtttagcagtagcaacttcaaatcagcactcagcacatttgagtttaagaccttatcacaatgtggatttagtgcgctacttctatcttctcctctacgcaagaaatgtattaaaactttagttgaaatttcaattagttggtatcattacctacgtactggtgaaacatctccaaattagagctcgcgttattgcagatgagttggaatggaggctagtcctctcaaaaaagaaaaaaaaaatgttaccagttcgccaaaaccaaatactatatcaggtcataaaacccttacagaagttccacccagaattaatccctctagaaagcacttttcgagattcgaaaacagacatgttctggcattgaaaaagatctggagaacaacagagtaaaaactggccatggagtgtgagaatggtggaaagtaatacttctactttcgactaatgttcccctcccgtcaccttccccaaaatgtttaatggaaatggacaagagagctggtgcacagtataggtaaatttggaaccatcttgggctttccctcggaagaagaaaacagtttggggatttgggggtactaaccttgttgaatgcagatttctggagcagaagcttgtcaatctcagtgtttgtaagatcaggtcgaatgccacctcccattgctggagagaaggcacggtgagcacctgctgcagatgccacagctgaggtggcgtggtgggtgatcgaagatcgtcgaaataaggaagccatatgcccccctctttcagagctagcagttcaattaattcagttaaaacagttgagtatttttgtttccttaaaaatcagtaccgaattaactagaatgaattctcaatacagaacctaataaacccagctacatcagcagatcagcttgctctttttttttttttggtatctaagtgtatcattactacatgcaagtgtcatgtgaccgttgtgacgtgagttataccacaagtaaagaagagaaaaacctggaatttcaccaagcaaaccagagctaaaaattttaaaaaaaacagaacgtacacaaattcagaagtaaatctatctatccatttattcccaacaacaagaagaaggaattaatcttctggacatgataagaatggttgccgtgccacaatcacaagcgatcacacaaacacgaagagtttttagtcccaaatcagaaactactccagttcttttagccgcggacggggagaagatcagagagaaaaaaaaaatccaaattacttccaactcgaaggctcttgatccgccagcaaagctggtgggcgaaaggaaattaagagacaggtggatgctggtacctggggcagaggcggcggaggcggcggcgatgggcgagagaacagtcggatcgccgggacagaaaaccctagaatatataggaggaaggaggtcggccggaatggatcccctcaagttggggtagaactctaccggtggagttgtccaaatctatgtcatctgttacttgtttccaacggctgagataatgcctcatcagtttcatctgataaattaactccttaaattaatatgatttttaaatcaatttttttatagattttttttaaaaaaagacgtactgtttagcgcaattcggaaaacttgcgcgaggaaaataagagagtatgagttgggaaagacaacttccgaacgcactataagagcgactacaataaaattatgtaagcagattgtacaagttgccatatcatatttgtatttatgtggaggggagaggagaagaaagagaaaaaaacgggctatagatttgtaaccaactattattaaacttgctcaaagattatgttctttcatcccttccaaacttcaactccctcgttcacacgttttccaaattactagaagatttatttgttttaaaaaaaaaaatcatagatgaaagctattttaaaaagttctattaaatccgcggcttcatttcaccaactacactagcaaacacaccctaaaaatgtccaaaatggagtctaatccctaaattgtgttttggaaagaaaaaaaaaaggtactccatttagttctcctaactggcgttccgcaaattggaattccctttcacgttctttactccttttagttctccactaatctcccaattacacgcgtgagatgcagagaatataggaaaggtgtgggaagggatcgtgccatggaggaggagacggactgacggagaacgatttctttttggggcacaaacaaacccttcgatgctcacagatgctcacatcgtccgactgtttgcatattaattagacgcaaccaagcaaactacatacttcgttttaaagtataacaacgcctttaaattttattcctacttaaaacaaaaattgccctaaaatatactatataacaacatttttcacctatattttttctcaactaaatacaagtatacaacattttaccattcaaattccttacccttctcaaccaatcacgatattattctatttaattctactatttttttaattccaatgtctaacctaaaactctttatattttggaattagtatatttggttgggggttgtttttcttcatttcttgggtggccacggttcacgatttcgtttcacggtcccaatgagacgagtaattttgcttccaacaaaatttaacaagaaaaggagcgatttgaagaagctccaaattgacattttgggtgacgaaattcaaagaaattgtgaaccctggggtagccaggattcggagcggctaaaccagtgtttcttcccaattcaaaagacaaagagaagactcagcgttcctttttccttctaccagcaaagctgctgtgtactctctccgtactcgtaaaggaagtcgttttggacagcgacacggtctccaaaacacaactttgacttattatttgtacaaaaatatttattgaaaagtcatatgtatacttttatgaaagtatttttcaagacaaatctattcatatatttttttacattttcaaactcaacaacttaagagttattcatgatttatattcccaaggtttgacttaaacattatcctaaacgactttctttataagtacggagggagtatgaaactaaatgtctccactgcgacatgttgaaatgcgtaggccaaaagtataacaagtagttaataaaaatgtacaactctaatgctgcctccagatcacaatgtaacagatatcagcatagttgaatggaaacaaacagtgcagttaacatatccaaagggagatctagattagatagagacttccacatttgcacacatgggacaccttacatatgtcctctacaggcgggcttcttaattcactaaagattgcctttttttcctggttttctcctcttccatacaatagccagtgaagtagccaccaagaagaacggcggtaatggcccatgatcgaccgatgtttttgaagtgaacctctctccgaacaatttcaaagctacaaacaaacatggaaatcgtttgagctgtgattcaaacaggtatgaaatggaaacaggggaatatgcacgcactttgaaatggttttgcccaccattaccaatggcacggaattgagcttcttccccttaatttcatccagcagtgcatttagctgaaaaaaaaaagaatagcatccatcaaataaagcatgttccatctggtttatcgtactagatatggaactaaaacgcagtatgaaacatgtaccatccaacaaacacctataaccacctagttgcatgcgcaggccgaaaaaatgaccacagatcttgacacggaaatgtccactcaagaactattttcatattttcataagcgccaataaacagaatgaatatgtgtttaccatgaactttccaatggaggcatgagcaaatgaataagttaatatcaacaatttaatcataccaaatcagaccacacttgactataacaaaagatatatattttttgacggttcaccgaggggcgaaatggccacctgaatatattaagtcaaatggtcttacacagggcaaggctttcgctgtgcaaaatatcccgtgatttttttcaggtgctaaagaagacctaacaacaaactagtataagagagcatacagctacacctaatgcgcgtagagaatactaacaaatacaatcaaggatcttattcagtcatggttgtttgatcaagtctgatataacagaataatgaaggatatgaagatggaaaaggtctggtcattgatatgctcaaatgcacaatctgtgcaactgagaagaaatattgttcacatgctctttattaatgctgaaacgtgagaggcttgggatcttcttacacgagtttataaatgcctatcagacttaagtagttgcatcaaacaaagagaatgaagtgatcacaccaccgagggcaacagccagatgcaatacaatcatcaaaggaactacaaagccaaacataatatgtactccccccggacacaaaaacatgtcgcaattgcatgtgtacacgcaaaccatattaatt

SEQ ID NO: 19851 - DNA, 12255 bp, Oryza sativa
  unsure (1)..(12255): unsure at all n locations
tcagtactccatgtagatgtacatagtgctccatgtagatgtagctagtgctgaaggagtataaactaacaaattggcatggaaacactagtattttctaaagtgggtttgtatcctccaaactttataatatattgtggcgcagaactttcatctatggataaattgactctgaatgtgtcttatcaaaagaaaacgaaaaaagaaaatattttaaagaacacatgctagttccaaatggaatgcatatgatagcaactgcaatgtaacgaaacataggcaaatgatgtttgttcggaataaaaagcaccagaaggtttagccgtttagctaattcaaaccataaggaattgtttcctttggttttgataacattaaggtgtttgtgatgtatcataccatgcatttcaaatatcagttcaaaaaatacgcagtggaagttaagcatactacagtatcatgaatagcactgttcaaacaagaggccctaagaacgggttaagaaaatgatgaattctggaagaaaggtactttcacagcataagcgattcaatcataaacaatgaacttgatgtctgaaatcggaaaaataatcaagcaaccacacctctttacatatcaaggaacagaatagcacaaaaataatgacaggaaaggaactagggctagggaagacacaaacttgcaactttacagggcctactcaagcctgccaaaaacaacaattccagcaccatgactaattcttactggaccaagaatgctgatgaggacaagacaaggccttgagctgaacaaaagacttggcacagatttggatgcttatggtgagagggaacgcatgtagaggaatgaagcagtaacggataattcaagattgactagattacgtgggtcgaaccagagcattgcgggatctaaagcgaacaatggatgatgcctcccatcaagtaaaaagacattatctaaaaatcaagtaacaagtagaacccccacccccttccacaaaaaagaaaagaaaagaaacatttgcccccaaaatttgcagtatcaagaacattcaaggcaacaccttttatctatctattcagggttcagggtgcaggtcgttctgcaactcgcgtatacaatatttggtttcgaagagggaaagaagaagaagaagaagaagaagaagaagaagaagaagaagaagaagaagaagaagaagaagaagaagaagaagaagaagaagaagaacaagctttcctctgctgtaacgaacttgggggccgggattaccttggtggccgcctcagataggggaggatacggatccttgtggacgcatccgctccctgcctcgtgaacgccaggagctggcttgcgctggctgagatcgccgccgcggacctcggaagaaagggcgcggggacggcgagcgcccgcgcgtcctgccttgccgccgcagcccaagaaagatcgcgcaaacgaagccatgcccactcctctctttcgctgccagcgatcgcggctgcagggttaggttgggggttctggagtggagtgcgagaggtatggggaattttggacttacgccgttttagttggtggcaaaatcaatattaaagattaaagttgggtaagaccgaaattgactctttccttttcgggggaattggtttcacagtccattccctcagttattaaaaaactcaacctaactaaaaatataacttatcctaataaaataaatttaggcagagatactactttagagctattactaaaaccatattttattattaaatattcacttcaaatcactcttagcttatgataacaatccgacccaggtggggttgcccgaggcccgataacttaaggttgtccggaccccaacagtttcttggcacacccactaggggaaaggcccaatctccctaaaagactagtccaatagaggaaggttggctctcccttttaagatggcttcctcccaagctaagcaatagcttatgataacaatccggcccaggtggggttggccgaggcccaataacttaaggttgtctggaccccaacagttctttggcatacccactcggggaaaggcccaatctccctaaaagactaatccaatagggaaagggtggcttccttccaagctaagtgaggtgggattattcataggctcacacgttggccgaggcccaataacttaaagttgcccgggattattcagaggctcacacgttggccgaggcccaataacttaaagttgcccggaccccaacagttctttggcacacccactcggggaaaggcccgccgtctttgccagcaggtaatagtggaggagatgtcctcatcattcccacccccttaaacaagggcctagctctgataccaaatgataacaatccggcccaggtggggttggccaaggcccaagaacttaaggttgcccggaccccaacagttctttggcacacccactcgggaaaaggcccaatctccctaaaagactagtccaataggggaagtgtggctctcctttttaaggtggcttcctactcccaagctaagcaaggtgggattattcagaggctcacacggtcgtcgcccgactttgacgtctttaccagcgggtaatagtggaggatgtcctcatcagcttatctttgattttaaactagtttattttatctttgtttcaactttgaaccaccaaaaacttttttttatcgcatcaatgactacatgttgggcaaccagccataggtcataccccactagatgatggggcgcgcctttgcgcaccgcctagaggtatgcnnnnnnnnnnnnnnnnnnnnnnnnnngggtgaatgaaaatcattgcgttgcgctggatttaatccatatgcaatgtgtcgacgtttgatgtcgcgattctggtatttgcatagtatggggatcgttggtaccagggtatatgcgagattatagtaaagaagatggggacgaggatttttatacaggttcgggcccctgaattgttaggtaataaccctactcctgttggccgagccggtcgttgctcttattcaccataatcacactaatacaatatatggggtagcctatctaattgttgtcgatttggcggtctgaagtgctgactcggagtcgacaacagggtagcctccctcctcaaatccgttctcggtgagatcagagatagcgctagacccctcccgacggcatccataggtaccgatgaggatcaactaggcttctctccgaagtcgatatccggcagcttgtcttggcgtatgttggcttgtatgttgatcttgtgtcttgatctattgttccgtttctcccctctcctcctagggggtcttgtatttatacccataggtgtccccttgtccaaatagaactaggaaaaccaatatggatataatccgagtagtccttgtcgtttccatgtagaactctattcatccttccttatgcggaactcgctccatatccgaggtcagtttccgtataagacatggtatgtggtgggtcctgccgagatttagtcaactactattaggtatgtggtatccataaccttaacacaatgcccagtgtattttaatccatatgcattgctggatttaatccatggatttgcatagttagaaatatctagctccataaaaaattgaattcggagttgtgccaaacagacatgggtctttttatacatttatattcaagcttaattagttctaaaattgctagatgttcttatattttaggggggaaaaagtagcatataacaaaaaatggttctttgggatgcaaagttggatcaatcttttaaatggtttttcattcattttcctatttattgtttctcctaaaaatataggatattaatgttatcacataattatctcaagtttcgaatttatatttagacttaacgtgtagtatatctgttgatgcgaaaaacacgaggcctgggagatctgcttaactccagtgcaggtccaaaatcttgccttttaggttcgtgagcgtgccagttgatttgatcctgcaatcaacaagaaataaagataaagaaaccgcagttaaatccataaatgatagccgatcggccagccgccgatgacatatcatttatcttcgagccgatgtcatatatgaatcgatcggcagttgtgaataagcaaatcataactaaatctactcgatcggctgtagatgttagcaatatataatctttatgtcgatatatacttaaaccaagtgattgggatagatcggtcgtcatgccgagacagtataaatcacttagatcgaaatatatattaacaatgagattatagatgttcacaacatagccgatcagatagatctagcgtgtatcggctaatactccgataccactctatattaagatattaaagcaagtaaaatatatcaaacatagagcttaatacacctaaatgcaataggatcttaacacaaagagcagatttagcataacaattgagcacataagacataaagctaaatcaggtaagatcggctgaaaccccgatgctactctactcaacaaccaagaagcaagctagagattataattctaggcacgacttatgagatcaaactcaactgatgcagccataagtatgaaaagaaagacaatatctatacaatcaagctattgaaagttttatagagtggtggatatcctatataatctaagccaacatcgatatttaacctaatcagctgctccctagcgatagatattagccgatcagagattaaatagcgatattgtcagagattatataagatatatgataattcgacaacttacatgaacaagattagagtatcataaagatagaagcactaatcccgagaacacaagccgccataacaagctttacctctagttgaagatcaaaactgatgcagctcaacccaaaagtaagaactcatcgaaacaaaacgaaagtaaaagagtggcgatgcgccgaaattgttgttgaacgtgtgttgtcgtattacatggggctcggggtctatttatacccgagattacaaaatatgtccttgtcggacacgactcttatctctaacaaactctaagatatcataagtttttgcggcagacttttacccaaacttatctctaaggaatttacataaaatatcctaattaatatatacaattgcctttttaggactcaatccgtgtatggcaatccatatgaagcactttaactcaacccgatgacgtacaccgagtcgtattgccggaatcggctcaatcggctaaccctgtccgactcgaactctgccgatcctgatcgtagccgatttggactccagccgattcttgctttgtttctgaaacgatcttgatcttggattccgcttcgatctaatcttcatctccgatactcagattaccaaattttgttgttaacaatatcttatttatccaatttaaaaatgcttcatttataatttttttaatggatgacgttgttgacttttgcatatgatatttggacattgtcttattaagaaaactatccaagtatcatatatatatatattacttgtatttttcatatttttattatgacgatgataaaatattaaataacgccatctattaaaaatgtggaaggagtagtaatttttacttctttctttatttctttattattttctttattttttccactttcattctatttatgatcattctatttaaacattctatttaacgtcatcttctttttttggccggcggggttttcactccgatggtcataaccgcagtgaacaagaaaggtcaacgtcggcgaaaatgctttttaaaggcgatcgaacacgtgatgactatgtgaggttgtgacttgtgacgtggttttgtgccgttgtgtgcatcaggcgtagcggtcgagatcgacgaagcgaaggagtcgtcgttgctgcgctgttgtggttgttcgtttctggtaccagtagcgaagaatgaaggaagaagcagcagcaaccgttggatgacgatggatagataggattcgagctaatgccaccctctgcattagcttctccaatgcagaggatctggatccaatgagtaccctgctgaagcttcttcagtttcttattgttttgagggtgaatacaatgtttccatgtactccataagtaagataaagaccatctagctgaaactgattgcagcaaaaacaatacaacgagaaatttaggaacctgcatgcactttatgaaactgcttcatccatttgtccagttggaactccagtgcagctttttcactggccatgcccatgcatggattgtagttgtgtttgctgggagaatatggacccatacagatatcacttaggctgtgttcaaccctaacttccaactttccatcacatcacatcacatccaaaactttcctacacacataaacttccaattttttttccaaacttccaactttccccaaacttccaacttttttcaggaactaaacacagccttagtcttattaatctaaatatcaaggccgacaaaaaggaaaagaattatttgattccaagcataccagaaagtcagtagtaataactaataagctgcattagtacggaggttatgtcagtcaagacgtttggataaagaaatttaacccgtgagcatgatctggtaataagctgcaatactgcagtagtaatgtcggtcaaagtagatgttcaattatctaaacacaaacataaaaaagcccgacttgactgccctaaacaaaaacaaaagatttactatgagtaaaagaaatagttcctgatggagctctgaagcacaacggtgcaaggctgcccaggttgtcgctggtgcctcttgttacccaccatggatccagcgccgctgtctcacctcatcctctccggcctacatgctccaatgccctcaccgccctcgccaagctctgaacggccaccatcggtttccacatcgagcagacgcccgtgcacacgtacaccatcccagcagacaatctacagcactgataaatcgagttcaacctcgtcgagggcaggccgataaatgcagaataggttgcgaggtgatcaacagcttaattttaagcaggccaaacaacagacatgtttgttgctcagttataaagcatttgatggagcctgcaaagataatcacaagttatttgcaaaaaaaactttactatggactcgtgaaagcagaagaaagaacatgtagagaataaacaactgtggcatataaagtctgcaaataatagtttcttttatcgccctactgtgtgcagagcagcaaggattgttgaggagctgttcttatagatgtacaaggtgatttctttgtagttttgagctcacaaagttatgaaatcgtaaaatgcttttacgaatgaggcttgcatgcacagtggattccagttaatactccctctgggtaaggactaaggattcaggatctactagtacaactggcaagaaatatgatactaaatgacttatcagttgggatgtgctatcaataacaaagctgagtccagagtcccctttatatgtgtaactaccatacagtagcattaaacaagggcgtactagtcattctatagaatctaacagttccttaacttcaaatgagaaaagcgtactacattattcatattcttttctcaaatttcaacaaacttaaatgaagagacagaattaattaacttaaatgtaggcaagtagaatgatgaactgattatgtactaagaaaatcaagagtgctctcctgtgcaaactaaaagtaaagccgaaatactaaacgagaacacaagggtacatgcagggtgtccaaatcatcaatttggaacttatttaacaaagagcaaactgatcagcatctacatagtgcttctactgaaactgtgcatcctatattcctaatttacaccgagacatcaagggtacaacctatgtgcttaatgtcttgcttccatatatagatcctttagtgtaatcgatagttgtatggtaaaaacttttgcatggctactgttgtgtcaacagtagattttgctgcagaacagggtgaccagataattgcagtataactatgtgtagagtatataagcacatgtttttcactattcttggacctacctacaattcagaaaatgcgtctctgcttatgcaagttagcaggagggcaggaagatcaataacctgtttcagacggtcatcgatcttggcaaatccaatcccaacagaccctgaggcaaagaagatgagaatcagcttgcacaaccatagagtttggtcacgagtgtaactcttttttatccccatagaggtaagcattctttcaaagaaaccatggtctgccataaggcttgatttgtaggcctcaatgtcgttgacgagattggcatgaatggcagcttcgatctcgtcgaaacggtcagagggcgtcttttccagtttagagagctacaaagacacaggtgccaacatgaataccgacggggtatgccatataacaaccgattcaagaaagcttaacattcaactgaattatattgcacgatcaatcagaatgtttcgattcagagttagaattaggctgtttcaaatcacaaccactataaactaaattttcaagcattttttttgtttataatgacataagaattaattcttaatatggtagaaaaacgcatacaactctaatattaaaaaggccgaatttatcggaaaaggagtatccacaattgattgattatttaggagtggaccataaaccctaatgctaaaaattagggcagaggccctcaaaattccagaggtccgtcacttgaggagctcgattaggtcgatgagaagatggagacggggcgcacctcaacttcgccgctgggacgacgggcctgcggaggcgaacggggatcgccgtacctgctcggcggcagcgacgagtggacggcgcgggcaaggggtagaaggcggtggagggtgttggttgtcctggccgctgccattgacgccgccgacgtagaacacggcgaggtggcgccgcgagaaacccgccatgatcgcagtcgtcgcaagggggaagccatcctttcctcaccctcttcggctcttccccgacagggggaagtgatgactcaaaaaaaaaaaagttgagatatcctaacgggactagctattgggctgtccacagtttttgaggtccagagcagtcaaatttttgcacctcacgatctgcaatcaatgggttacaggaaacgggtctggaccagctgaaagcatagaaccaacctgtttaaagtgcgcgggcccgttaagaaacactaaacatgccaatcttttaaataaaaaacaaaacatacctacaaaacaaaagacccatcccaaaaactagactactcagaatttaattactaagcccatgaagagaacaaaacacaggcccagatagagatcaacttgcatatcaagaaagaaaaagctcgggcatcacacagccaaaaaaaaggattcgaaacaagaagcagatctaaaagaactcaagaacacagccgaaaggagaagaaaaaaagagatggaggaaaatccaagaaatgaaccaacatctgctcctccaggttgaatttctcacatacttttaagattacgttgcaatttcagtttttttcccaagaactcttcacccccatctcattttcttctgttcagcatttagatctgagcatcacaggcaaaaaaatcagtcacatttagatagatagaaaaatgctaattcaggtttcatctaccatgtacacttagaaaacagtccaacaattaatcttgcaaatgataaaatatgaacgacataaactcccaaaaaaagcagttacaaagctacctgggtaacaaaactaaccctagctagcaactagccgatgtccagtagttttaatgctcttgcatcatacaaaacactcttgtaactgcttcatgtaactggataactggattatcacactctgatgcttttgcttcttttttacacaatgatacatgcaccactaaaaaatcatctttcaacacaatgcctaaaagctgcatacaacttaagcaaacaagatgaaaaaagactagtgacataggagctcatgctcaattccaatgcatgccctgtaacttccatgtaactaccatgtaactgctatgtaactaccctgtaactggcatgtaactacgctgtaactgccatgtaactaccttgtaactgccttgtaactagggtgtaaatattatataactagattataaactgagctaattttgcaggggcaggaaatatgacactctatgggcacaccatgttgtatgatgagcaccaaatgatgtcagattctacgaggattgtgagtcacatggcatatttttggaaaaatatctacagaaattactcagcatgcaaaaaaaaaacaggtttagattgtaatgcacaaattcttgcaggggcaacaatgtaccttcacagggttgatgcacgaaataatgcaaactccaaaaagtgctataaatgctgatcaagattatttgggcatgtccagagatatcttacatactccagctggatttgaggtgaaaaatgaaataatctttttggttaaaaaactttacataaggtaacatggtatttagatttgttataattccttgatattttatcattgtagaactcaatgataatgacgagcaataggtttcctgagaactatgagcaaatgggaggtgaaatagaacaaggaacacaggtgaccaattcgcaacagtacatgtcaaacaaaaaaaatatttatgtaaaattatgaattttaatctgttttgttatcaaggcaatttgtgatcaatgggcaagcaagaatatagaagaactatacaacatcaacatgaacaatcagcagggattatcttctattatcaagacacttgccagtcgatggagcaaaaaagatatagatgaactatacaacatcaacaacacgcatcaggtaataagaaaatcatacagattataccatatgatcgaaataagtatataggtgtggaaaacattaagtatttgttacttacataatgcaggttgtaaatggcagcacaccggaagttgaaaacaatgtcagcgcatcggaattggaaaacaatggcaccacatcgaacaaccaggatgatgaagacagtgagaaccaaaacacctgggcatttgaatcaaacaatgaaacctctgaggtaagaaatttcttaatttaattaacttaaaatataaaaaagtacatcacacaatttagtgatataaaaaaagaatacttaaaagcacatggcaaaatgcagggacaataagctcacactgagaactcgacaattgatctggtggacaaaattagagctgatgaagaagaacacagagatcaggttgtggccacagaaccccagatgcaggaaaatagcaatccagagactgaaagtaatcagttgataactgagcaagatatagacaattttttggaagaagatgaagagagcaccccaacaatagatagcaaacacatgccacatattggaatgcagttcaaggattacaatgaggctcatgggtttttttaacttttatgcttatctggttgggttctcagttgctattacacacacgtatagaactataagcaagaagagaaacaacgagattaccagatacacatacaaatgcaatttacatggcaagaatgaggataacaacaaagacttagaggagcagtttcagactgagaggcaaactaatgttctgataaggtctgactacaagcgtgtaatggttgttaaagagacagtagaaaatggaccgtggaagatttcgaggttagacctgactcacaatcaccctctacgcccgaatgaacaaaaaaaaagttcctccgttcacacaagaatatgacagaggaagagaagaggctgattagtgttagaatttcaatggttactctcattgagaagaggatggcactagagatggggcaattttctggttttctttattcacaaaacacaaagccataccttcccgagggaggttggatacatatatatatatagccatagctggctggatggctgctagctaattgctgcccacactagtctaaaatttgaacgcgatgctgtccta

SEQ ID NO: 19852 - DNA, 10008 bp, Oryza sativa
tgtcctaaaaggggaaaaataacctaaaagcaagagaaggaccacaaggaccaaagaccacaaggcttattccatcattctccccctaagtcttgtgtgtcgtcttgtgggaaagttgggccatcccgatcctggagcagagctcgaggaacttgatcctcccaagaggcttggtgagcaagtccgcaagctggtccttggtgttgatgtagctcgccttgatgctcccttcctccaagtagcttcggatgaagtggtacctcacccggatgtgcttgctccgttcgtggaaaacgggggtctttgccagggccagagcggacttgctgtccaccctgagctctaccgctccagtgtctctgccgaggagatcaccaagcagtcgagcaagccagagcgcctggtactcagcctcgcagctggacagggccaccacctgctgcttgaccgactgccagctaacgaggcactcgccgaggaagaagagaatcccgctcgtgctcttgctggtgtcgatgtcgccggcgtggtcgctgtcgctgtacctgaggaagtgtgctttgccaggacacctcgagtagtagagaccgtggtcgagagtccccgcaatgtagcggatgatcctcttcacagcctgctggtgctccgtcgtcggtcactgcacgaaccgactgacgtagccgacggagaaggccaagtccggccgtgtgtgggtgaggtagcgaaggctccccacaaggcgccggtactgtgtagcatccacctcctccgccgtgctgtcgtggctcagcttcagtctctcctccatcggagtgagagctgggttgcaatcggtgagcccagccagctcaacgacgcgcttggcgtaggcggtctgtcgaagcgtgatcccgaagttgtcctggtgcacttcgatccccaggtagaagaagagaggccccagatcactcatctggaaggtggccttcatctcctccttgaatgccgccacctccgcatccttggtgccagtgatcaccaagtcgtcgacgtagacacccaccagcaaggcatttcctccattgccccgccggtagatggccgcctcgtgcgggctttgctcgaagcccatccccttgagcgtggaatccaacttggcattccacgccctcggtgcctgccgcaagccgtagagggccttgtgcaggcgtagcaccttgccctccttgctggggagcacgaatcccggcggctggtgcacgtagacctcctccttcaagtcgccgttcagaaatgccgacttgacgtccatgtgatggacaccccagaattactgagtagccagcgcaaggaggagtcgcacggactccatccgtgccacgggagcgaaggcatcgtcgtagtcgatcccctcctgctgcacgaagccgcgtgccaccaagcgagccttgtgcttgacgatggctccggcttcatccctcttcagcttgaacacccacttaagggtgatcgcgcggtgaccacgagggaggtcagcaaactcccaggtgcggttctcctgaaccgcgtccatctccgactgcatcgtggcacgccatgccgcatgtttctcggcctctgcaaaagacccaggctcaccgtcatcacacgcaaggtgcaactgcgcctctaggtcgcgaggcaccagtcccggcaccggctggtcgctgagaagatcttccatcgtacggtaccgtagctgctcgccgtcgtggtacgcgtcgatgcgctccccgtcgtgggagagtggagtagcgaactccaccgggctgcgctcaacacgagctggcgtcggagtagacgtgcccggaggagtggctgttggtgctggagcacgtggggacaccgactggggtggtgtcgacgaagagctcgtcgtagtcgaagtcgttgcccgaggttgtgttggtgttggagtcggtggaggctcggggactgggtagacacgctcggtgaagaagagctgcctactcccccagctccctcgaagtggacgtactcgatggtgaagtcgtcgtacgtcggagtcaaaccatcatccaccgccttgtcccatacccaccctcgcccttcgtcgaacactacgtcgcgcgctgtgcgcacacgctgtgtctccgggtcgaggatgtggtaggccttcgagccctccgcgtagctgatgagcacccctggggtgctcttgtcgtcaagcttgccgatgtggccaagctccttggcgaacgcgaggcagccaaagacccgtaggtgggagaccgccggcttgcgtccatgccaagcctcgtacggtgtcctgccatcgagggccttggtaggcgagcggttgaggatgtagacggctgtcaccaccgcctccccccagaagatggccggcatccccctctgcttgaggagagcccgagccatccccacaaccgtctggttgtgccgctcaacgacgccgttctgctgcgggctgtacggcgcggtgtagtggcgctgaatgccctcatcaacgcagtacaacgcgaattcagccgccgtgaattcgctgccgttgtcggtgcgcagcacgcgcagcttgcggccgcactccacctctgcagcggcctgcgcgcgcctgatggcatccgcagcctctcccttgctgccgaggaccatcacccacatgtagcgggagaggtcgtcgacgagcagcaggaagtaacatcgtcctcctggtgtggccggtgtcactgggccacacaagtccccgtgcacgagctcgagccgctccttggctcggaagctcgtctgctggggaaaggagagccgccgctacttcgttaccatgaagacgtcgcagagctgctccacatggtcaaggcacggcatgcctcgcaccatctccttggcactgaggtgcttcagggcctcgaagtggaggtgcccgaagcgctcgtgccactgccatgcctcgtcgtcccgacgagcggtgaggcaaactggttgtgcgacctgcgcgccgaggatgtagagtcgattagtgcctctggttaccttggcaagaaggcgacgacggcgatcccaaatcctcatgagtctgtcctcgaccaacacgcgtgagccgttctcatccagctgtcccacgctgatgatagaattcctcaacgcggggatgtagtaaactccggtgagcagcctgtgctcaccggacttggcggtgaaggtgacggagccaacgcccttgatctccacgccggaggcgtccccaaacttgatggagcctcggacgccggggtcgaactcggtgaagaactcccgtcggccggtcatgtgatgggtggcgccggtgtcgaggtaccacccatcagccttgttgttgctggagctgttgcagagagagacgagtaccttcggctcatcaaggtggaggaaagccgctgcggccggtgccgctggaggaagctcgatgcttgcgtgtgccaggagcagagccggctcttcctcctccacctgtgcgacgtgggcctggccacgtcgtggctgtcgacagtctttggcccaatggccaagcttgccacagttgcggcaggtgtcgtctcgtgccggcttgtggttgctggcggcgccgccctgggcacctctgcgagcgccaccctcggcgcgtcttcgcgcccaccgcagctggacacctccgcatgccttgcgcggcttgcggccgcctatcgagggagaagactccccctttcttccgtcactctgagaggcctcccactgctcccgagtgagatggagcttcccgccaatggtgataggccccgagagaggctgtggctcatcatcgtcgacgaccttgaggcgacccaacgcctcctcaatcgacatcgtggagaggtccagcagagactcgatcgagcgagcgatctgcctgtacttctctgggacgcagtggaagagcttctcgacagctctctcctcgtcgtaggtgtcgtcgtcgcactgcaccatcttctgcaaaagattgttgagacggagggcaaagtcatcaacatccttacctggcttgaaggccaggttctcccactccttgcggagtgcctgcagcgtggacttgcgggcgcggtcgctgccgatgcgtgccgcagcgatagcgtcccaggcctccttggcagtccgcttctgggaaagcgagaactgcatctcgggcgggactgcagtgatgagggcatccagcgcccgtcgatctttgtcgtagtcgacgtcgccgtaccagactgcctcccacatgtgtcacacctggagcctcaccctcatcaccgcggcccactcgatgtagttggttttggtgagggtaggccaccctccgccgggaccaaagtccctgaccaccgtctgaacgccgtggtggccatggcgccggtcaggggagggagagccgcgctgcctgcgagggccgcgctctccgtcgaaccagccacctccaccgggagcgccacggccgcgcgcgcgctcagggctggcgctggcacgcctgcgcccgtctgggttcccgtcagcggccgtgcggtcccttgggtcaccgccgccgccgtgggggtgggctgctgcccaccgctcagccccgctcccgcgcccttcctcttgccagctcctcaaactccctgtcggcggtgatgtcaccggcgatggagccgttgatgctgctgcgcaaggactcaacctctgcctccgccgcacgtgccgcatcctccgccgcctctgcttccacctccgcgctggcagctgccaactccgctgctgccagtctggccaccctcgctgctgctgcagcggtctgagccgttgctcacctgcgctcttctgctgcggtgagctcgacgtcctactgacgccgagtgctcaaggcgaccgaacgccgagaccgaacgtcggacatggcgtgcctccggggggctgctgcgtggagaaggggaagggaaaggggaaggaggagcagcgggtgctgctgctgctgctggctgagagctcaaccgagcttggtaaggggtggaacacgagatgttttgcctacaggaaagtgtggctctgatactagatgttagaatttcaatggttactctcattgagaagaggatggcactagagatggggcaattttctggttttcttcattcacaaaacacaaagccataccttcccgagggaggttggatacatatatatatatagccatagctggctggatggctgctagctaattgctgcccacactagtctaaaatttgaacgtgatgctgtcctagagagcatccaaactaaataaagcataaaggagatgctagatactgtcctagggaagctaaaagcaaaaccgaaagatgctaaaagcaaaactgaaaggatgctgtcctaaaaggggaaaaacaacctaaaagcaagagaaggaccacaaggaccaaagaccacaaggcttattccatcaattaggacgctaaaggaatgcaacataccaacgaggagtatgattgtgatcctgtcatttctccgtggagggttgccatcattgccctacacgaaggaggatgttagcaatgttggtgcatcgattaactttgaaacaagaagcaaggatatgagtcaagtgttgtagtatctgaagaaaaaagaagcacaagacccaggtttctattacaagctcatgctagatgagaacaacaaagtcagaaatatgttctggacagatggcagatcgacagtgttgtatggtcaatatggtgattgtgtcagctttgatacaacttataagacaaacaaatatgacttgccgtttgctccatttgttgggatgacagaccatggaaacacatgtctttttgggtgtgcattcctaggagatgagacaactgagacatttaagtgggtttttgagacattcaggacagctatgagaggcaaagatcctattagcataataacagaccaagacagtgcaatgagatctgcaatagggcaagtgttcaagaaaaccaagcataggaactgcctatttcatatcaagaaaattgcagagagagaacaggtaacacattcactgacagtacaaagaaagatctatacaatgaatttgaagacattgttaacaattgtttgacagagcatgagtttgaaaccttgtgacacaaatgattgataaatatgagctgcacaatgtgaaatacttgcaatcaatttgggatacaagacaaagctgcatccctgtctattgcaagaatgactttttcccatttattcaaagcacaacgctaagtgaagggactaatgcaaggtttaaaagaggagttgggccaaggcatagtgttacaagcttcctaaaggaatatgacagaataaatgacactatatttgatacactgtattggaatgcctataactcaaacacaaaacaacccaaaaatctatggtcaggatactacatagaagagcaagcttcggagatgtacaatttaagcattttcaaaaagttccagcttgaattaaagaaatcaacaaggcttcaggtgacagtgcttgaacatggcaaagcatacttggtattcttggctctaaatcaaaaaagaaggaatggagagcaaggaattatgtagttctcacagacttacaaaatgatgagtactcctgtgtgtgtgcaaagttctcgaaggatggaatcctttgctcccatatcctgaaagtaatgttggacctaaatgttagcaaaattccgaacaaatacatcatagaaaggtggaggaagaaagacaacaacataacaggtctattcagaggagaatcaagtaatggacctaatgctatgctaatgtacaacgtgctctcgcaaaaaatgtcagaattagcatcaaagggttgtaagagaccagagatatatagttacctggttggagaagtggagaagttggatagcatagtggacagcatgattctagaagcccatggaaatcacacatgccaggtccaaagtaatgcaacaaacaacgctgttgttgaggggcaacaacatgggaatctgaatgatgaagaggaaattgaagacccagagcaagctaatacaaaaggcaggaaatcaataaggcagaaaagattggtggaaaagattatggataaagaatgcaaaaaatacaaaggcaagagtaaggggaagaataaaacattgatcttaacttttccacaaaattgtcgatttccagcaatacagctgataaaataaatataaatctgttgcaggtggccaaagtaatgagaatcagttgaagacaaagagaacaagtaatgttgcgcaaggtgggactgcttgtgagatgcaaccaaaaccaaagaggcggaagaaaggacaggaaaacaacaccaaagaaataataggtaaaaacagggcaagaaaaatatgtaactagaatgttctcatgtaatagttagggcaaaaaaagcatatatcttgttgagagagaagaacaagacatcatgtaacagtggatgttctatatatttagtactgagtttgacatcattgtacttggcatgaaccatttcaatatggttgctattttctaaacatggaaaatattatgtggcaatactggaagcctcctaagaacattgtaacctatacatttcaattctacagagcaaaaatccagaatcttcaaacttgatcacgtttgccagcacatgacaaatttccctacaataaatttataaacggtagaaaattagtacaaaaataactctacgatgcacaaagaatacttaggaaaagaaaaaaaaagcaataagagcttactttactggcccaactctgaaccaaatgttcagtctcagtttgtagcattttgtttttttcgttgaagaaaatcttattagcaagctgaatgcggattatgtcgatgtcacttttgtcaaactcattacacaatagagatcttggagaccagagttcgatggatttcatcacaaatataccagaatcagcactacagagaaaacaacattttaaaaaaagttcagatagataactaaaagaataatgttctcaatagaaaaaaaataacagtgcaaatgaactaacttgttttcttcgcgaggaacaggtgggaaaaatatctcaaaactgttgaaatccatagcactttcttcagcttcatctcaagcattttgagattgcttatctgaaagaaacaatatttagagaacaatatatagctacacataaaagaaacaaaaatatattctaaaatctttgaaactacttgattgatataacaataaatgtatgacaccataccatcaaatccatgattggatcaaaatatggatcatccttttcatgcaaagaatcaagaaatacaagcatcctgtcttttatatccaccacaaaaaggaaccaatgctccaggtaacaaatgggaaagaaaagctgtaagccaaaatagtgtttagcatgtgtttgtacataaggggcatacaaagaaaaaaaatcaaactagataattaccaaatcgcatttgtgcaatattcttaccattgctgctccttggaaggatttctcaatttttgctagctctttagagttaagatgtgatattagcatgtcctagaaatatatagaaggcacaataaaaataaaaaagaattcaatttcaatatatatagggaaacatacagggggatatagaaaaaaatgaggtggaaaaaggaaaggataacttacaccaatggaaggaaaaaagtagttcttcttggatttggatggatggtttttgtgaaacaaggactggcaaaatgcagagatcacaaatccattaacatctcctccctttttcaaagaattgccgaagttgcaaaatgagatgcgaacattatcaatgttaacagcatcctcgctgcagaaaaagatataaaaagcttcattgagagaaagtaatacaacaaaaaaatataataaaaaagaacacacgaattgagaaaaacaaaaaaaaagaattaaattactcttgatattcactatctgacaagctacaaatagcattgtaatatctgtgtgcattgtctgatacaacaaaacgacgccttggacaaacaaatgggtcacttctgtgcttggcaggatgtataatcctccttggcccatacagaggcactttaccaccagaagagctaagtccagaattgttaatacaaggaatcgacgcatgagatgagtttgtcagctgcttagttgtattgcaaatgtcatttggtgagttctgggaaaaaaataacgcaaacaagttaagtgactatgaaagcagctaaaatactagagcaaaaagagaaagataatgttgtgaaagtttagtaaataactaaacattgataggtactatttaatggcgctgataagaatacagtggtggtgaagcaactatggaacttattgaaaatatatgaaaacacaccatcttttaaaaaagagatgctctaaaaaatataaaaacaaagcagaatgtatatctaatggatatagttcactcacagttaaatcttggaatgttctcttcatgccaatttgagaggggttcagattagcatgtcttctataagtgttattgttcaatctggttcttgtaccaagtggtggagtcatataatcaggaccagcaaaagtggcaggcttcaataataaataacacgaattataatacaaaatatgaaatcacaaatataaatcaaaacaaaaaaaatatcaggaaacaaattggaaaaagaaaaaagactcacatttgcaggtgcttcattttctttgccatgtgtatgtgatttcaaagtatctggtgtgcaaacattctcgccaatattgtattcatggaaaatgtcaaatgcaagtttatcctcatcataaatgtgacctctgttgtcacggttgttaaattcagctaacctggacttaaactccatcgcaatttttgtaagaagagcaggtggttctgcacatgtagaaaa

SEQ ID NO: 19853 - DNA, 16855 bp, Oryza sativa
accccttttattaatcaaagtttcatattgattattgaaccccatctagaccattttgtctgctgaagggcaatatatattttattttctatataactcttttcctgaaaataatattgtgcttcacattgaacaaccaatctacactgttgtacaattagttggtgatgacctccagctcactcatgtgttggtctctgatggaccagccattgttgcatgcttgcatttgcatgcattcatggaccacttcactagctgtagttagtacaaacatacaagaatgcattcaggagctgtgtcactgtgcctatgtggccacaaagcaggaaaggttaagctacagtgatgctgatggtgagtgctgagagtaagtaggacactgccattatatgctgatctgcagccaaagtcaagaatgtccccagtgattgggagaaacacctgggtcccctcttgcacaacagagctttgcattatgactttttttttcctgcagacagcatggcagtggctgcacttgcatattggtgatgaacagtatctgaactatccagatcccagtgaatctgaaatcagtttacagttttcagtgtgcaggaagcagagcaagagattcttcacaacatcacgcgttacagggatagatgatcatcatggaagacaataatatgatctgtcattttacaagttgaaagtggaaaaaacattgttcgtgtagacaggtttctttttggcaatttatctcagaacacaagcagcagacaaggtgtcgtgtacaattaagaactgaagaagtgtccattgcacattcaaaaacaggagacattccatgaacaaacaagatatactatcatgtactttcttcactctagactgcttttcaggctataaatgaagtaaatctatacatcgaaaaaaaaatcaaaccagcaaaaagatttctggaaaacatttctcctacactaccttttgtcgatgcaatcttcgtatctgcattcaacctcgggtcactcacgatctgatatcgcggtgaatgtcatggaggcttctgttgtctcttgcgacaacaaaggagaagagtgtgccatgatggaagatagcaatgtggatgttgaggatgaaactatgtccacttctttcctcatgctcctgaccttaagatccataaagtcactgattattgcgggcttgctgatcttcgccagctcaacatccatttcacctgttagcatgcggacaaccatcgacattgtgggtcgatgtttcgtgacatcttgtgtacacaaaagcccaattttcaggaacatacaggcttgtgcaacatccaagtcatcacccaaagaagcgtctatgattttctccaaatcaccctcttcatagtgcacccatgtctgcaagaggagaaccccatttgtgatctctgggaactgtagcagtaaaagaacaaaagccccaattcagaacatttgctccctagctgagacacgaataacttttacatcatgatgatgatgctttcatgtagaagaaaaagttggcaactgatgtgtttggcagcatgcaactcgcatttcattatgacaattttactccctctattttttaatgatttgacttttaccaaacttttgttcacgaatgctttcatgtttgcgactcccaatatgtaatttccattgtgcccatgtaaataattatcttaaccagcacattcagcagtacccataaaactaaggcattgctaatgtgccctgcacagctactgagaggactaggctgtcaagtgaaatttgatcacattctataaaaagcacaaataatcacctagtaaattatgcggtgatcaagagtgttaactattaaaaccagaatatgattttacaaatataatagctgaaaacttgaaatgtcatggctaagattctaaaagcaataactgcatgtatctccattagtcctcttatgggaaaccaagacttccacttgaaggcaccaacattagttcatggaacaaatacaacactcatattagatataacttcagcctaaataaataatttagtgatgatggtaaaaaaagatagtaacttctgatatacaaggaacaacaaaaaaaagtattgtattttatcttaccctttcaagaagtatctgatcttcatagggtaatcttgtattggtgttggatctcccactaactatttctagtaacagaacaccaaaactataaacatctgacttccgtgtcacttgtcctcgaatggcatactctggagccaagtaacctctgtcatgtaaaactgagtaagtaaagctgcaggtgtattgatatttgatgggtcataaatataatccataaattactaaataatcatttgatatttgcaattttaattgccttagcttttccactgacaatcatttcataaaatgtaaaagaaattgtcggggtgtactgtcatatgggtcaaccatttaaactgaaaggaatgctataggcactaccatagatacccaagaaaaagataaggtacttgaaaaatgcatcgtacttgttaactcattataaaaagaacttatgacaaagtttacttacaatgttccagcaacccttgtgctaacatgtgatgcatctggaggcaaaagctttgctaaaccaaaatcagatattttcggcgtaagatctttatctagaagtatattgcttgctttgatatcccggtgaacaatgtggggatttacaacttcatggaggtatgttagtccacgggcgatgccaacacaaatatttactcgagttgcccagttgaactggatgttgctgtggccataacctgaaaaaacaaaagaggaaaaacaaaggaaactgtttgaatatctaggccttttcttagcactgtatgtaaaaatttgagaggataaagcaatagaaacgattcaagtaaccatacccaaaagtgtttgtgcaaggctattattttcaagataattgtagacaaggattctttggtttccttccacacaatagccataaagcttgacaagattttcatgagatacgtttgaaattgccatgagttcgttcagaaattccttcgctccctgtcttgactctaaagatagcaccttgacggcaacaagctttccattccttagctttccctgcaccattaatccatcatgatgaacacgtgagaattcatttttttttggaatttttcttcacttatttgtttgaactttgaaggctacttatattaccttatacacagatccaaaacctccctcaccaatcttattagacgggctaaaattttcagtaacccttgaaagctccttgtaagtgaattttgttatattcatatcaccagaggggtctgtacaaatcatgttaaatatttcagcaagaaacatatcaaggatgaatatggacaaatcatgttcaacaaatagggtataatgcagtctgttttagagatctctaccatcattatgctgagaactttgctgtcgggttgcccttctcttgccaaatatacaaaaacaacccattaccgaaatctaaaactactatgatggccttaattctgcagttcaacaaatacagtttcacttgtgaatatccacataagcatgtcatcaattttcaacagctgccatcatgtcctgaaaagaaagaatgcaggtaatggttagctaagaagaaaggtatattgagcacttagccacttaccatttcaaacattaagttcatgattaacattatacagaaatgttacattccaggagtgctgcaaattgtcatggtggcacagaatgaatgcagccttttcatttgtccataaggtccagaattacagctaaaccacaagaatcttaggcctaccacgacggctcgatgtcagactgaccttgcttcaactgttttactagatgcagcagttatgtgggtttcgtgataaaaaaattacaataagcagccaaaataggccattgattggttacagctcaaccaacatcagtaaagatgatctagttatacaacttaaagtgggagtaacatgtttaaagctcggggaatgcaagcaggaagcaggtgagatgaactaacatagtattagactattagagccagccagcagcagtacggattgctctatatttctagaatttatctacatttcataatttctacccacagaaacgctatcattgggcaggcaccatccgatcaattgctcgtcaacaggaccaactaatttcaagaaaatggaaaaaaaaaagattttctagtctaactaactctgctagtgatagaaacaatctatgattagacctactgcatcccacacgcaacatacaataaagtaatgcatgattaggcctggtctccaaagcgaaaacgaaagttccatcccaccattgttgttgacatcctaatcctagcacattctccactcacccaaaaaaaaaaatcagaatatgtaaactgatttccatacagattggcgatcacacacgacaaggtacaaaatcgaagatccattcatgagcatgtaaaattgaaagacaacctaagaaaagaactcaatttagccccccatcgaattcggggctctcatctatctcacgaatcattcccaaatctttaaccaatcaacaccgggaagcagtctactactactactatcaacgaacaagcaatccctaattccatactcaacgaaaagacaatccccaacctttgtatccgcagaatccagagaaatcaaccaagaagacgactcacctgataatcccaaccaagcaagaatccgagcagagctagtccaagaagctcaaagctccgggaaagcagcctctccggcgagctgttcgtcggcgaatggcagcttcgcagcggcggtgggcttgggttgtagcgaaccaggtggccgtatttgacttctccgcagtgggaatcgggaaacgggagcaagaagaagaagaagaacaagaagaagaggagcaggaggataggctggccggtcaaaccgttgaccacgtggtggccgcgttggccgcgtggggcccacctgtcagagagacggacgcgtggcgcggctcgggctcgacgcggcggcggcggctcggcgggtcggactcgggacgcgatcgcgcattgtggcatgtggtggtggttgtgggtcgggtccaagttgaaaacgagtcgattgactcgatcgctcgccaggtcagtgttacgatggctttggctttggtggcttggttggtccatttgcaggatcgtcgagctcgattagcacttgcgtgaaactgctggcactcgtgttgattgatttgtgattggtaccgtgacatgtttgttttttatcttcctgaataattacacggtagacgtgcacgtatatactcccttcgataaaacttatcgttttggacaatggtatgatctaaaaaaacaaccaccattatttttcattataagtactttttaagactaatttatatatgtagtaatcacaatgtataaacaacaaatattttaaaaataatttataatcaaagattctaaagtttaacctcgtcctaatctaaaacaatattataaaacaatattatcagttcggagggagtacatgtagttgattgtagtgtcgatataatgttggtttgtcatgctaaccgcaaaacagttaaaaaaatattcttttctttttcacatagttgaaaagtgagaattgcaattcagctagtatatttaagtatatgctatcgtgatttatttggttaaaattttaaagctactagctcttcaactatttttacagcttataattttgttagatattttttttctaaaagaaaaatgacggtcatagttgcacactgaataaagtttgtagtgttaagtatttaaatgcgaaggtagtaggccggtcgtcttggaaaagaagtgcgatttaaaacgtgttcttttgagttaggataacataataaagactactagcaatcaaactgcaataggttatgatggatactatatttcatatagggcaatttgcaatactcaattactcatggactggacttttggttggaggaggcacctaaattactctctatagtatgaacaaatcagaaaagctctaatttcaaatttaaaatgaaagtatgaacagaacaaaaggtactctattcgttctaaaatatagcaattttttaatagatgaaaacaaagatccgttcagatttatagtattaaaattaatgtcatatccgtttaaaatttgttatattttagaacggacgtggtatggtagcgtacttgtaaaaagcatgcgatctcacctgtcccaactatcgccttgttgctgtccagccatttggacacggtctacggtgagccagcactgtgcagtcaccgacgggtggggcccgcgggaacgaacggctaatgatttggccaactaaaaatgctaatctcagagtgctcggggactaatcctccactcatgagacagcttttggttactgcacaataagcctgcacttccagttcagtgtgctcgctctgcagctggtggacatttggattttggaacaagctgcaattttcagtaaacaccttgtgataatcttcaattgattatttctgattttcattagccgatcagccagcttgcaaatgatccaatattgaatattccaatgggacaaatttatatttaagttcctcgtaccattcaaacaagtgaccgttatgtttataccctagctttgagtcgtaattataatcttacctcttctttttagtgtgtgtgattttgtttttttttcttttttcaaaggaagctatgcccctattccattaagtttgcttgcatatttgctcatgtttctgttacaccaattatgtttttctctgttttgataacaagcattttagacaaataccagatgttccgatgcatctgtctgttaaattggtcagaaaaatgaaaaagattcaaagctcgtcggggcagcttgctgcttactctctccgtccaaaaaaaaaatttaatataggactggatgtgacacattctaatacgatgaatctggatagatatatgttcggattcatagtattaggatgtgtcacatctagtactgagttagtttttttatgagacggagggagtaggagtgtacactagtactccatccgtattaggtcataagacattttgattttagtcaaagttaaactactttaagtttgactaagtttgaagaaaaaaataaaaacatttttaacccaagacaaatttattatgaaaatatattcaattattgatttaatgaaactaatttgatattataaatattactatatttgtctataggcttagtcaaacttgaagtagtttgactttgaccaaagtcataatgtcttataactttaaaatggagagagtagtaacaaattttcagcgatcatagccttgtttcgatctaaagaaaggactaaatgatacgaacggaatttttttatgtaaaagttactctaaaatatcaaataagtctatttttggaatttatagttattaacttaattaaatcatacattagttactttctcgttttacatgccattatttaatcctcacttcatcacgtttaaatatgatattttgcttactccctccatccaaaatatagcagcctattatcagatgagactcaatctattctactatctccgtttcaggttataagactttccagcattgcctacatttatatagatgttaatgaatctagacacacatatatgtctagattcattaacatatatatgaactagcatggtggcccgcgcaaattgcgcggctagcatcattatattttctctcatataatagcatatatgttttctcattatattattcaaatatattaaaatgacaacataattttaaatttcgcaataactttacaaaactactaatgtgtaatattcatattgtattttatatacgtgttagttattaattatttttaatatcaatttttagttatttgtaaattatatatatttctatatggactctagactcatcttttaatatttctttttttctaattctaaattttttgtaaattgtatttttatatagactatatgctcttctattatttatttttatttctgaatttttattatttctaattgtatttatatgtggactctaaactcatcttttaatattttttaatttttaatttcgaatttcagttacttctaaattgtattcctatattgactttaataaatttattatgtttattctaaattttagttagttataaattcctatatggactctatactctacttctaatattccttatttttttaattccgaatttcttttttttcttaattgtatttctatatatactctatactctacctctaatattccttattttaaatttcaaatttctattatttcctaattgtatttttatatggactccatactctacttctaatattccttatttttaattccgaatttcagttatttgctaattgtatttctatatggactctatactctacttctaatattccttatttttaattccggatttcagttatttcctaattgcatttctatatggactctagtctcctattctaatatttcttatttttaattccgaatttcaactatttctaaattgtatttctatatggactctgtcttttcttttctccgattaatgtgagaatttctagaccatgagagcgaacatggaggcttctttttctattcctttaataatacaatagatatgagcaatgctaaaaagtcttataatatgaaacggaggaagtacggatttagacatgaagcttgctcagattcataatactaggttgagtcacatactcaagagtcatgtataacccaagattgctactccttccatccagatatgtagcaacccatgatgaaattagaccctatgttcagattcgtagtcgatccatcttaggttgttacatattgtgagggagtatagtatgagacggaggcaggcagtaaaaattagcaaggacaaagtgttgagagtacgaggtcaagaaaaaaataccagaaaagtggtggagcaaactgcaaaagcggacgtcatcattcatcctcgagcccctcaactgggcaccgccccccgtcgcgagtccacctcccttgacttcgactccacacagcagcgacgccacctactctctctctctgtctctcgctctcgccgtcgccgagctagttgagccgcggatggatagccccggtggtgcggcggcggcggcggcggcggcggagtccagcaatcgcgcggtgagattctgcaccccggggatccaattcttgatatttttttgttcttctttagcttgctgtgtgggattctttgtcagcttcaggcttggatgtttccaataggtcatgggagctagtatagtgtctgtatttcgttagaaagatttggatctctgggggtgttctgttttggaattgggttgtcgtttttggctgttttggtggggaatcttgtggattcttcgccatctgttgtttgttgttgccatacacatgcgagctagacatacatagtttatttactcttttagtgttttactctttcgattttgctttgctttagcggtttgagcaggcgttgttaacatgatactgctgtttaattccagttgcttgactgaataactgtcactgatattctgatcaaactgtttcactgaaaccttcataacaaagcgtattgtaatttgtaaagacgtttgcatggccatattagctactgaattcaatattagtttttttctgtcctcaaagattaacccagaaaggctcaaattaggacctagtgctgaatgctgtgactgtcagtcacacagaataaaccaaactactcctatttgagaattaagaaaggcagtatacgcactcactattagtcttggagagtgcactcgtctctgttcatacttgaagatttctgataaactatccagacaggcgtttgtcctactcttacttgcacctatctcgaaataaaagcttccattatctaaaaagatctcttctttgcaccatggtaggagcaccactgcagttcatgcagaaatttagtaaaggccctcttagtttcttgttccatgtctgaatgtgaacacatgcttgataatccctccgtctcataatataagggattttggagggatgtgacacttcctaggactacgaatctggacaggacaagagggagtagaagagtgaagaaacaaacagcagtgatgtggtgatgccaaatgagtatctattcctcgtgttagtatttagtactatgaatatatgatgcaataggcaatggctagtagcctagtacatggttgattcttggcgtttccttgtcttttgttacattgccactctttctttttaatttgcttcaaaccaatcatataattatttaatgtaagtgattgacattgttgttcgattgaattgttactagggagaagatgctaaaagtgatggtgtatcttgtcagaattcgcgacggccaaacctttcattacaaataccaaacagggcatttgatgacactctgccaacgtcaactagaatcaaaatatcacccagcccaaattctgcaagaagtggtttaccaccaaggccgaattcaactagaacaaaatcatccatcaggggcatcattccacaaaggagcttcaaagcaaagagttcattacaggatggtgaccagacaattcttctaattcctgacacaccatcatcatcaggacagcaggtgaaggcaactacatcaagatcattttctttcacaaaggtcatcaactccttatcagcgaagcgaacccactctcttccagttactcctgttgcagcttcaggaccttcttctcatgaaggtcatgcagacaacctgccaagtacagttgtaagtatttaactaggactgcattgtttgcatgctggtctattttggtataacacaattccatggcaagggttgtgggatttaataatacttgacgtaatatgacataatctctactaaaaattgaagatgtttttgccggtattttggtatgtcatccgtatttgagtcggttttatgttcgctcgcttttggtaatacagatccgtttatgaatcggattttaagttcgtttgcttttagaaaaacaaaatgagtcgtataagaaatctctttgagaaaactcgcatactaacttgagataaaaatcagactcctaattgcagctcatgattttctaaaaaaatatatatatccaagcgaatttccacagtgaattttatcctagctaaaccatataacaataataagattataataatcttcacccgttgcagcgtacgggcatttttttctagtacatgtatacagtggaaattaaatggactattatcaaacaaccaaactggtgcatttacaccttaaagtatgagatgcgcccagttcaccgaggatcatctcgtattaatgtggttcacaatggttgcagaagaatgaggttgaaacacaaattaggcgctcactctcagcaccaggaaatcatgatagtaaggatctgaggaggacggcttcatcaggccttatacgtgtgattcccacaaccccacgacctgttcctgttgaaactgttgcatcaaatgatggcattgaagaagcagtagatggtactaaccttggatttttactcttttgcatgtcagtgtacagtacattaggcacaaaacgttttgtagcgcaatcaaagttcgcgtgaaccaaaatgttctcttcaaatagcaaagctgcaggaaagaaacactgaattttgtgtcgttcatccttggtagctcctgaagatggaggtgaagacattcctgaagaagatgctgtctgcagaatttgcctagttgaactcaatgaaggaggtgaaacacttaaattggagtgcagctgcaagggagaacttgctcttgcacaccaggagtgtgcaataaaatggtttagcatcaagggaaacaagacatgcgatgtttgcaggcaggaagttcagaatctacctgtgactttattgagaatacagattcgaactgttaacagacaaccgcggaatggtgttcagcaaagagcagcacatccacacaggtatttcaaaacacacttttttagtgtgaagatattttgacccttataaaatgtgcacactggatgagtgttgttttcttcacgttttatgaatgacaattgttttgttcttttttctgtctatactatgagaaatatcattaatacattaatgtatttgtcttcttgttactaaattctccttttctgacagattttggaaggagactccagttctagtcatggtcagcacgcttgcgtacttctgtttcttggagcaactcttggtttgtgactttgtgctacacttcttttagctttccattatgtgaattttgtgtgtatatgtcaaattaacccaaccactgtcccacttgttggaacttttaacaggttgctgatatgaagtcacgtgcactagctatttctttgcctttctcctgtctcctgggcatattttcttccatcctcgcatccacaatgggtaatgaaatactacttgcttttctctggctctacgcaattgcaaaatcatgagttcagtacattgtgtagggaaccaaaaagccttttggtacctaagctcactgttttccaaattcagatttatttattgaccaccctaccctcatagttagatatatatatatatatcttgattgtgtaacaactttaccagggaaaacaattattatataatatgatttcagcttttcaacagaatgtaaaacataactccttaccgctctttccatgatctcattttaaaaccaaatattagatgttatgtagttacttgatcatttggtgtaaataaactcagattatcatgttccagcatttctgctgaacagctaccgcaattccacatttaaccttttttttttatctctgtgaaacagcaaccgataattacctatgggctttcgctacgttccagtttgctttcctaatcctatttgctcatattttctacaacttggtatggagcttttgccctcaataagtttttttttttttgccctcaataagttttttttttttgacgtaagctcaataagttttctagataatatcttcagcacattgcttattacaattactaaacatgcagttaaaaatgggggcagtccttgcaatcctacttgcatcgttcactggtttcggcatcgctattagtctaaatgcaatgctaatagaatacctgaggtggagactcctgcggaatcaacggttaactcaacgtagaaatcacagacatggtcaatctggaaacaatgcttcaaacgagaacactgcaagtaatgctaggcagcaaggcagcggaagcgatcaacagtctgcagaacatggctgaagatgatccatctgtggttttgcaggtatcatggtgatgataaagtaagtcttgtttgaactttcaagtagagtgaaagatagcagctcatattttttcatcatgaatactcaccttcgtgtagttgctgaattctgcagattcaaaatcaaaagtgttaatgaatgaatggaataaaggcgccactggtaaaaccgcaaatctgcaattccaagaatgccatggccggttgccacctaagttgatcgtgaaacaaagttattattcagaaaaagggggctctcaagtctctcaactctgaaccaaaaaggtccagcagtctccatttactcccggttatagtttagtagtccagtgtgatatgtgtgtttatgaaatgtataaattgcgaaagcaaatactacacaccgacctttgtatcacaaccatgaacaaactgtatatagctcatcgttgtcgattttactttgctgcaaactgtgagatggagatgctacaattctctgaattttctttctgcagtcaggttccctgaactgtatatccaacttcgacgaaatccgagacatggtgaagatgtttgtgaatttacagtcacatcatgatcattttcattacaacttcgtaagtttgtaacatatactacatcctgatacccaatgccataacaggcatgtaaaggttcattcaactggtcaaaaccagttggaaacctgacgaggcgtggctggctcccagggtcatgtcgtcgtggtagtcaccggcggcagccgtcttgctgtggcgtcgcctccgtggaacggcgaactccggtgatccttccttcctccgctcaggtgaagtaactcatccaagatctctcaacccctaaccgccttccgagctggacatcgaggatccagagtggtattttatcgaaatttatcaaatagagcagtatattcttaattttctccttgtccaagcagatcgacggggagggaagaagagcaatactaggctatgaaatcgatgttgcaatgtagaattcaggtttgcagttagtccaagtttgtgcaaaatagaagaaaaaaaatgttcttttcaccggtttgacatgatcattgggcaaaaaaatgttttttttttcaattagataactggattatgaatcaaattcaccagaagttttcaactcctaaaaatatatttttttaatatatattattaaatttcaattgttccggttcatgccctcacaatctcacatgatacatgccaggaagttgtacaaagcaatagttttttttttggtatttttggtgttgctacaaattttctcaacctaaggctccacaagattgaaaaaaaattggattgtaaaacatagaaaaaatacataaataatcttttgaatagaccataagaaaacacagaaagcggataagagaggaactcaaaagtaaatcttccaagggtttggagcacttctaactttcctccaaaatatctataggattattcattcagtagaaatttcaaagaaaaggatatgattcaatcatttgtttcaaaagtccttgaagaatttgtttccgatgttttttttttctataaatcaaaggggggcataaattaactgattttgttttagatttactacttaaaaatatggctacatactttctttctaaaattgaggtctgaagcaaggccctacttcaaaagcttaaaattgacagtaaaaggcaacatcaatatggtaccaccagtgcttcaaacattcttgctgacagagtcagcagcaagcttatgcatctcaagcagacagaaccattacaagcagacaagcttatccaacttacacactaccacatgcttctgaagcagacaacactattcaaccacacaatatccacagccagaaagcaggtaagagaatctgcctccttaaaccaatgcaacagcaggagataattctcttgcacatgatgatgctacctacatactattagcctagtgggctagggagaaagttcagaagttgacagttttggcacattgctaattgttcatagacatcaggggtgaagaaaaaaacaagcatgaaaaatgtgtggcaattctccacctccttccattttcattgccaggtttcctcttcttttttttttccgttgtgaaaagtcagtcaagattaggaaatgatatgatctgggatccaaattagggtcccagccaaagatctgaaagagatggaggaatcagaaaagaaattgattgggttcagaaaagatgccccatatctttgaaaagagtggatggtggtggtgtatgtcattgcactccacattccccccctccactttaaatttgtcacaatccacaaccaccaaaaaccaaaccaaaaccaaaaccaaatcaaaccaaattctaacacgttggcgcgaccggaaggtcgacgaagggggatcagaacagggataggcattaccagtaggcattaggaccctgaagaaatggatatgtgatggggagagaaggcatcacattcacctcatcatccaccgctgaccttcaagaaagggaggctatcttttttccaaccattggttcaattgggtgtgcacttgtcaagggttcttcagtcagatggggaccttgaagaagaggcacatggatggctggtccatttctttgcctgtcattgtccccaagaactggtgccaaattatgtaagcataaaggttcaggtgaattccctcatggatctatctatgagctttccaggatcacataaaaactacttttttttactgaaaacagcaatgctaatcaacatgtcagtaattttggaacacttctagaacaaagctgcttactactgatttggtagtagtacatatataagctcaatagttcttgaactgaattttcacagttgcatggaaaaccttacttgctgtcattaacagtacattgcaggaggaaaacatcatcaatatacagaatatggccaaagctagcgcctgcggcactacagcactactcaacatgaacctaataattagatgccctaagttaacatgatcagtattccaggaaacaaagtgtcggcatgtataccaaaatgtaataggtaccactaaaagtcaatgtaatatgacataattaccagacagcgcataacttagagctacacttgacctatgtgcttgggttccaggtcacagaactaagagctacagagacgtacagaactggacgcctaacgcc

SEQ ID NO: 19854 - DNA, 8683 bp, Oryza sativa
aaacatgcaactttgcaactgatggtgcatcaagcatgcaagccattcactcaccttcacaaaggttgcatgcggtcgcttcacttgatcagcattatctgaacatggaacatatcctgattcatctaagcagcccggagtagttagtgtttgactcaatggataatcatcttgagaagggctaaggaagttggatgtggaatatggaattgtgcttgaactgttttcattgtgaaggcttggaatgccatcttgcatcaaaagtgactgtgagtctatatttacaccaaacaagaagtgattttgaggatcagagctcccatcttgatccaccaggcattcccttccaggcagtggtgctaacgtggagttttgaggaatactagaaggtgtcaagtcgaagttctctatctgtgatgaaatgtcatgtgggcgagaagtgatcgtagattccactgcaactcgcttagatgaccatgggtcagagacaggtacaggggtgattcttggcacacctgggaggtctgaagcagcttctgaagggaatgatctcagtgtatcgtgcatggatgagacattggatggagagagacaactgatatttgtgtcagggaaattatgttgctgtgagaatggtgaaactgtctgcaatgtggagggtgtagactgaggggtggaggaaagctgtgaaaaaaccgacaatgcatttggtacagtctgaaagttggacaagtgtttctgttgttgcatttgttgatgctgaggttgctgctggtgtgattcttgctgctgttgctgcggctgcaactgaggcttctgttcgttaaatgattggcaatgttgaagcggttgctggaggtactcaggctgactatggccttggattgagttgccattgatgttttggtggtacatctgctgaaattgaggctgtgcttgctgcagaatctgactggatagaagagaagatctaccgacaatgttttgcggctgctggaactgcagcatggcaggtgatactagcttagtggtgttctgtaaagccgccgccaacgctatcgtttggtacatgtcaggttgcagaccaagtagggaactatccagccttggctgcatccacggactcataccaagtcctccaaaattcagagattggaaacctgtgttttgactatctcgaagccacataagagaagaagccaagtcatcctcctttccgcctgccaaaaccatcagaggtgaatatgattatcataacatcagagcaatgcactaataatacatacgagacatcattgatcattgtgcactgctatagtttaaagggctgactaagatgctaatgtcactcgtaccatataaagaaggtaagcctgttggccatggacgctttagtctgagaggaaaaggagatggatacatcgggaaagttgtcagaggctcgatctcccaaagagacacccttggctgtctctctccagcagtcgactcatcccatccaacctgcatgattcaaagaaaaccttgttcacatgcttaattttgaagcaagctcatagtgaaggtagaaaatgactaaagcacactatctgaaaatatgataagactaaaaatgaggtaataaaagcatatgagtggtctataaacaaacagatgtttcaagatctaccttgacagagcgccagtgtgagttcatccaacgaacaggatcaagatcacttattcctgttattgtccccatgtatctgcaaataagagcaattgtgcaatttaggccacttaatattaggtagagactgcaaaagctctacacatcacaacagaagataaaaccataaaggtataaacagacaatgcataaacacgtagagaaaaggaaatagcattacgtgatgctcacagaatgaattaaatgatatataacaaacaaatatttggcatacctcctaacactggattcttctgtttcaaaaagcatccggaaacgcatgcccaccgatatgcgggtatggtagacagcctttacatatttagccagtggtataacaaactccgaagggcttgctctgcaaaatgaatgcgaattgagtacttgtacgaaatgatcagatatgtgcaaaatatggtttaccttggattatagaaaatagtaaaccggctatttgttgatgcggcgtgagcagctgcagcaagcagaccaatatgcatgctgtcactagacaatactgatgatggcatgaccgtttgtggcctatttgcccgacgaattcccagaagcagctgattactgtcattcctgatcaaccagagacatacatcatacgacaggataaaaaatctctgctgggaatgacaaggttaaggtggagaaatttagtgacttttgagaatttcaaagaatgaacataccagataaaaaggacagagtctccagcaaccagtctctttgcacttacaaagacgctccaacccgtagtcagaagatgccgcttcggttggcctgcacaagtttaattttacatgtttatcatacttgttcaagattcttatttgaaaatagaatgtcactgatagatatttgactctcacataagttgtacgtgaaaacaaggcagcaagcattatgaggaaaataacaatattaagaaggaatggatgtaaacggaaaatagctaaccacgaaagatatgacggaatttccattcatttccatggaggtctttcgccatcaactcttgagctggaggctgctgagtgaaatcctacagaatcatcaaaggaacccttaagaaacactaataacttggtgtcttctctgaataagtacagataatctgttcaaaggatgccacatacaatagccaaccaagaacacataccagcggaggaaatactttctctgctgctcgacggggaacagagaatccaccatgtgtacttgtgtcactagcagttaacgttttgcagaaataatttgttggctgcttgctggcagtgcctagctcggcgggtaggaatggatccttgagctcttgctgcaaacaaaacaaaacaaaaaataaggagaaagtgtaagcttcttagatacaaacaagagtacacaaatatagggtagaaggtagaaaattctgttttaccgggctgagtggctgcagcgtcatttgcgcatagacttcatccgtctctgcatcggcctaaaggaagaaacacagaaaaagttgatgagacacaaaagtaacaacagtattacatagttttcaataagatgtcttgtgttgctccagacttacgtgcatggtcacattatgtagctggcatataagctgcggcggcaggttaggatagttggggatctgagactccatttccttatttgttgatgcagctacctacgtacgaaatgtacataagctcattaacatctcaaacaaatctttggcctttgcaatttaagatctgacaatgagatgttgcaatataagaaaaaacgtaaaatttacggtactaattttgctgatacttcaagtactgcagcaggttaatctagtacttatgaggataaaatctgtactaagatgaagaagactacctgctcactgtggccttgaggaaaataaaccacccgactaccgaccgcaggcagcgaaacgagagggccggcgcatgcatgccacaactcagaatttaggcacttctgctcctctgcaactgaaagaggggaaaatcatttcagaagaacacacagcaacataaattttagttgtcagcagtaattcttgaaccatcccataatcaaatcctagttcaaaacgtatttcaagaagataattttaaggctaacaaagatgtttaaaatcaaagatttttcaaaaaaaaatgaaggggaaggggatagagttctcaagaattaagaatacgaattgtttgcatgtttccagaagcagatgacttttacagggaaaaaagttactgcataaataaaaatcacactaatttgcttgtagacaagtataactaagcagtctaatgaaaaaaaaatgcatcatgtgtatgtatcattactgtaacaggagtaactcggttattcaaagcacaaatcacccaaaagatgaagaaatcgacaggctgcatcattgaattgatttggagcacataattaccaaacgaaatttaaagacttccaagccaacaacctaactaacttgtcctaagaacataaactacccaatggatgagaagagcattaatgagcaaaaagaaaagaaaaaataataataacaaaagagatgcaactggtcaactcaatgcccaatagaaagaagatgctagagtagctagtactattctctataccttccggcggcgacggcggctggtcggagacgccgccggccgacggcgagagcttcattcttcttcttctcttcttcttcttcccccaaccgatctagaatgcaaagtggagagtgcaagaaatggagcagagaaggaatcctttctgcaccgagatcacgaggcgttcccaaacgcgctgtcgtgtcatggagcaagcaacccagccaccaccaccaccaccaccaccatcgctttctctccttccccaaaccggccaaaccttcttgcctctccaacccgcaaccttttcgatcccaagggagcgagctcgaattccttcacatcacgggcgccgctacaccggcgcgaaggtcgtcgtcgtcgtcgactcgccggatagaatgcgcgcgccaagacgccgccgccgccgcacgccgccgcctttgcagctagctcaaagagaaggcaaattaagaaacgcgcctcagatccctcccgcctgcggcgagctccggagatgcgtgtcaccctcaccgctcgacaatccagccgccgctccaccgcagatccgccgccggagttgacgacgaactaggataggactaggagcatcagcatcctccccctatctccaccacctccaccaccacctcctcctcctctacaactccaagaacaacagtagctagagagggagagagagagaggagtgtgtgtgctcgcttcttgcgactttgctcggttcttgctgctgctgctgctgccgcctttgccgctgctgcgccgtgtgctgctgctgctgtgcagttctcggggttttaaccccacgagtggaggtgagctgagctgagctcctctctctctctcgctttctctctcttctcctcggttcaccctttctctatgcactttaaaaacacaaccttttctcctccctgcaccatgcttctacttccagttctaaccccgcagtaaaaaaaaaactctttttacagaattttttactgcaagtgcatctagtactagtttactgcaaaagtacttgatccatctcccaaaatataaacgatctttaagtgaatggtatggagtatatccatgcactcaaaaaattgttaatccgtcctaaaatataagcattttaacgtaatgttaaatcaaatatttttaactttaactattaatagaaaaaaaacaagatctatcgtgtaaattgatgttactagtagatttattagtattaaacaaactattataatatgaaactctttttatttaaaacatcttgcttttatatttttggataaaatagtatcttgaagactatatcaaaatctaaaaatgcttatattttagaatgaaggaagtatattttaggacagaaatagtataatataaactacaacaaatctggatagaagatatgtccagatttattgtaccatatacaagtatctcatatattatgatatggagatagtttgttcaactctcgttgttcaaaaataaatttatcttttctaacacataatttatatttagatttataggagtatttcgtactgaatgatttatcttaagacaatgagtactctactactagtacttgggtatactccttaagtagtacatcataattacggccaagaataagatactgaaaatgaggaaaagatgcaaggagagaaggtgtgatcactttgcagcgcacacacacaccgccttttctttccttgggccactgctcggtttgacatcgttttgctgctgctgttcatggatggataaaccaagcaaagacagagagagcggtgtcatgggtatggaccattgaatccaaacgtgttgcgatgaaaagggatcgcttctgttctcggtgagagatcccaccccctccatgatcctgcctttttgacttatgttttattcatcctcaactatatttaataatttggttgtttccttcttattacaccttgtttaattaattgaattaattggttggtttgcggagtaaattgtgtggtcaaaccaacatgtgcatcatatgtggtggtgctatacaaactggatttgtatgtttatactctgtatgtattgtttggttttgttttgaacagcttaagtatactgtctattgattttaacctaatgacgtccaaatcgcgtggaaaatttttcgcgaaaaatgggtggaatttaagaaaacgtagctgtcaaaaactagtccagaattttcagccgtagctgtcaaaagccacccccatcctctcaccaaaaataaaataaaaaaaataaagaaaataaaaaaatccctatccctatcacaaatacgtacgatacgtgtagctagatactgaaaataccgtacagttgggcaagagtacgtatagtacgtacatgtcggattctctctctcatgtgaagaaacagccatgaattaatggaattgaatcgatggaattccagcaatgaaattcaaaaggtggattagatcgatcacatccttttttcaggaaaatacagatgatttgtactgaaagatgcgaatctgaaaactgttcatcatcagcagctggaccacgaaagttttagtacttcgtagtaggctctgcgtcaaacacatatctgaatttttttctgcagcagctattgctgctaatgcatgcatgttcacacagaaaaaaagcaagtactggtcatcccatgatacaaggacgacgcatatgctcgtaattaattggccgcttaattgtatatatcctccatgccgacacctttctaagttctaaccctggattttgagccgattaagaaaagattaatggtaatagtacacacaagtttatattgtctctgcgatttgttcccggttaatgaagtcgccggcttacataaaaaaggttgatgttgtctcttcgactctaaacatttgttaagctagttggtgaatagtacaactcaattacacaagccaaggaaaaagaagagggaaaatgaacttgaactcttcatagttggggagataaatagtctgatatcaatagtttaaacgtaaaaaatttaagttaaatgaatatattaaaattataccgatgaaatgcatgagaaatataatagaataaatgcctttaactcttcagtttcatatcggttaggattctcgccctccaacggatgatccaacgattaggatttctagggcgatgtgactcagtgcatgtcgagacttttggttccaactatataagatatatagattgtgcacgcgacatatactcgtataaaataatcatgtgaattattagactcctcctaaaaatcaaaatagttgataacccacaacatctacagatgaattgatcagatccaattcctttctttccggggaataaacttaatcctcttttatcgtcggaaagggtgcagaatggaacaaacaaagcgcagagacaccgaacgtcagaaagccgataacagcgtttgccctttgggcacagtctccagccattttcgatcgacgcatcacatggcgatcgatcgcatcgatcgatcgatgcatatgaatggcaacatcaagaagcatctttggcaacgtgtgaagaacatccatgatctatatggctagagaaagaggaggagatggagaaggagaaggagctttgggtttggataagggtgtgtttagttcatgccaaaattaaaagtttggttgaaattggaacgaggtgacggaaaagttaaaagtttatgtgtgtaagcaagttttgatgtgatggaaaagttggaagtttgaagaaaaaaattgaaactaaactcggccaaatgggattctggtttggacagtgactcgaccgacacgcctagtcccccacactgtgccctatccttgcagcacaaaacatctccatttgccctcaaaagccatcttgggtccataccctaaaatacatgagtatatatatgcacgcatactctctcttggatggataagatagactttgctgaatttcataaacttttttatctcaaaagaaaattttgaactttgagaacacaagtgtagaaaaagtaccgagttcattactccctccagtcaaatttatttaacatcgatgtcaaatattgtttttactagagggagtatatcgaagtataacatttttataaattctaatttatatactctctgttttaaaatacttgtttggttgtctttctatatttattctaagccaaactttttttttatctttgataatcaatatattttaactcgtatggtttaacaacatgccaattatgtcttataagtatttctcaagataaatctacaaatataaatcta

SEQ ID NO: 19855 - DNA, 1606 bp, Oryza sativa
aattcctgcagcccgtgtcgacacatttattcccacttacacatttaaccagatctttgtcatttcccgaaatgatcgatccatggttgttccgtattcctaacaccataatatgcacgcattgctaggaatgtcgtctccacgacgaacatcattatgaggtatatcaccttccaaagatgaattctccacaaggagaatcagaggagtatcctcacatccagtgagaactcttatgctctgactaaggcccacggatcgtgttagcaggcatccccgcagaatatgatcaaatgccataagtcttatgtggatacgatattattcccgggtctatccacatttaccacaattgggagcattactctttttaacaactatccagttgttcctcatatgattttgttggcaaaaattccatgcaccaagcaatcaggagtatgaactaaacatacaagttcaactcatttaatgcgttcactgaaagaaatctccaagcatttcaaaatgtgcatttctcccccccccctaatgcgagatgtcttgcaatagcatacttacaatccccatgtcatggcacaatattaaggcatttcacctcaaacacatgtgttctcccacgaatgtatgctacgttggtgatatatttgggaaatattacggactttaataggagagatttttccattatatgcagtgagcctggacatataccaatatagtggcatgaataccgtattcttcctttctcagaagggttatcctcaacctcctagttaggatatacaagtctgcaaaaaccaccattgctaccaaatgtatatgcaaccaacatgaaaatattttagccatatgcaatctccatggattaatgctcaccgagtgccattcaaacttacaatcgattccggatcgatgtggattagacatcccatgccttatgctttagaaggcatcctatggtggcaaaacacattcctatgcgctcaacaaggagtatgatagcaaagtgcgtggccactagcctgtgttgccaagcagatttttgtggtgcagagttgtattaaagtccaacttgtctaatgcccaagtttgaccccaattactcataccaaattctagaattgggtcactcaggttaagcagcaagttttaggtacgatccacgagcgagttgtcaaaccacattagcttatatcccctagacatagccattgagagataatcaacacctccaacaatggtaatattcactatgaaaccattatgttaagacatatccacaaaaatagtgggatgtgtcggagcaactgtcgttgtcacagcgagctcaacgcatgcaacacgatgaacttttacatggcttacagacgtccattgcgccagtatgcgacaggcatggtcatcaacccatgggcgatcaaccagcacaacctaggagtagtcaccgactacgagtgtgcgataaaacgcaatagtgcatagccaacatttgtctgaaatacaattcggacacagttcagcgtaactgtaacatttgtctgaaatacagtttcactaatagttcttctaaactaaagcattttattaatttcagcatgaagat

SEQ ID NO: 19856 - DNA, 1177 bp, Oryza sativa
tcaagaaacttgatctccaataactaatggatgtttagtactgtgtacgccatgcatcctatctcttgattaatcttattgaagaaaataatttgctattttgctacctaactagggaatcctatgatttgcaactccaagtctccaatcagagtattttaggattttacaacttgatgtttcactgacatgccaacaccgcaagtcattgaaacattgaatggtaaatcctagagataatatttttggagtagcaaatcctagattccccctttttgctagattaactaaataataactaatcagcaatctctcccgtggaggttctctataactaattcgactccaacgagcacaacaatgcacaatgcagtgcatagtccagttaacagtgactgcttcaaaccattattactgccaaaacatggtacataaaaacttcatgcacaactgaaccatgtctactactaccatagtacatccaaatttcatgcgcatcaactaaaacatggctgctagtttaagtcataagtcccagagcatctaaagttactatcctcttttttaaagaatatcaaggttaacatcttctgtccagaaccattgaaccattcagattatggcaaacgaatagattgatggtggagatgttttaatttaattgcaaaatttaaagcctggtaccctggtccatgcaaagtcaaataagatttaatgaataaatgtggtgtgcctttttacagaaaaaaataaggatgaatagtccttgaattaagttgaatgttaacattgcaactcacttcctccacagacatctttaaaaaaaaatgacagttgactatgttgcatagtccagtcaacaaaacgcaccgtgaatgcaagatgtgagaagggcgttaggtctctgtatttggcacttaatgttacaagctcattccagcagtatggtgatcccaaagatttcaacctgaaggagaacacaaattaactccagtaaatataactgatcatgatcatggtaacaaaataaattatcattcaagattaaatttattacttttttctcttataatcatattaggtttaccttgtatttgtggacaatccaaactgtactccatcaatgtatagtgtacactcaacaaagagcactggagcacttctttcaatcaacagg

SEQ ID NO: 19857 - DNA, 2291 bp, Oryza sativa
cgggctgaggtcgatgttggttccggcggcggagaaggggccaaagtcggctccggcggcggctgatccgagtgggagaagcacgatctgggaagaaggaggtggggaagagcggggcgcggcggtggggaagaaggaggacggccgcggcggctccggctagggcgcggcgtagcggcagcagcggggagaaggaggagcgagcgaggaggatggctgcggcggcagtggggagtcgctcctgcgaggacgctgggaggagtgagcgaggaagagaagcgcgcggtctccgcggctgcgggtggaggagcgatgtcttcgcgcgtggaatcctcggctgtgaaatagtgcggtggaggaagagaagcgcgcggatggacgcgtttagtccggatgacttggcatgtagcattggagggggcaactcctctttttatattagtatagatatatatatagatatatttctctttaagaagttgggtattctcgaggatcaagacaaatgttatatatttctcaataactactaaccagaacagtaggatggcttcacagtgattagtgataatcatccgtattacaagcaaatttagagcctatctcaaaacatcacattacctccaaacaaataaaaaaatatagaaccagacaaaattttccttcgtaaagttcagaagaaagaattgatgcaaatccattgataggggctgtgcaggatcaacggagaatagggacagacgccttccgaagccgccatccttaaggctagcctattaatcgactttggttacctaattcatggaagagcttctcctgatccaagacatatatgatcaggcaaggaggaaacaaaacgttaagatcttcaaactccatggccaatttctgattggcaaatagtgaatgatcaagaaaacaaatggtgatccacaaattgacacaacacaaaaaaatgtaaaataggataaattggtattaccttagggtttagggggaacaggagcagagtacggggagggggcagcaggtggagcagatgccggatcagcttggcctccctggaggcggcaacctcgatgacggaaccaaccggatcgggtcggacttagcaacatgcgtgaggaaccggcgacgcgatggaggtggctataggagcagtggatggcaggcgaaacagtgatgagggcgcgatcggcggggcgaggtcgcgacgacggagaaatcgcgatggagcaaggaatgggtggagaaatcggcggcggtggcggaaggggacgacctcggggatgctgcgacggcggcggcagatggggacgacgtcaactccgatagtgcggcgtcgctggcctgtcgcgaggaggacggaggatgcacacggattgaggaggagcgaggaagcggctgggattcgtgggcagaagtcatcatggcaggcgaggaggcagcgggattcgtggggaggagtcattgcagcggggatttgtgtggcactgcggctgagtcatcgcgtgggagcggaattggtagaatcgctcatcactgatgaatggatggataagatcagatgagatggtggatggacggatgagatgagaggggatgattgttggtatttcttaacgacattaaaagaaatatatgtcccagcaatgacgcagaaatacttctagtatattatggttacagagttcatccgcaagcgcacggatataccattgtagcatttcacccgagagtattccaagtgtatcgtatttattttattccgtaagaagatcatgtagagagaacttgactaataatttatatattacttgtgataatcatattctaagcaggggtcaaaaataatccaagggtagagtgatacacaagcattaactactcattctcgtaatatattatctaagctaagtgggaagaaaagagaaagataatctattcctatacttctaacatacatagtatccatacattctagttaactgatatactagctaataccctctatccgatgccctactgatacttcgagaagccacccctgactaccgagttccttacaacagcctgtcatgaccatacaaccggggctaaatacggagaaataccctccccagggaattacttaggattatataccggcgcggaggaatacccgtactgagctgtcaccatcagcggcccacctctcatccgcaatatataaccccaaataatgatatcccgtaatctagacaccacatctaaactaccagatactactctaatatgggctgcaggaattc

SEQ ID NO: 19858 - DNA, 16540 bp, Oryza sativa
actcctgatttctactctattcctattccaccatctagatattactaaactaagggcccctttgaatcaaaggatttatgtaggaatttcataggattcaaatcctatagaaaattttcctatttggccctttgattcaaatgattgaagctttccaaatcctataaaattcctatagaatggcacattgcatgtggattttggaggaaatttttagcaagagcttcaacctcttggaaaatttcctttgagtctatctctctcatccgattcttgtgttttttctgcgctccaattaaacgaccattcttgtgtttttcctgtgttttgcaattcctggttatttccggtcgtgacatttagcgatgtctgccctgctaaaccaaaggaaggggcttctttggcatatacccatggacaattcagggcatagtgtccttgttctctacaatcatgagaaaaggggacatgctcttctggcattggaagctcattgacctgggtggcaaatgctcgatcaaacacatactgattttggtcttgacttccaaccaatggtagctgtgaactaagcagcatgcttggaatggaccaagggtgtgccctttttaactctcttgaggctagtggtgctagtggtggattgagttgaaaacttgagttactggaggcatacccgctgacattctttcctttttctctgttaaacatctgtgacagggattgaggtgagagaggaaacaagccaggaaagaatagaccagaactagagacaggaccttaaaggaactaactcttcttgttgatgtgttgtttgttttacttattctgcaagtagattaagcaaacaacctagcatggttacatcacaacccaccgatgcaaaccacgcgctacacacacaagcaaaggaaacacacgacaaacgaaacaatagagggtggcttaggttctgcgacgggttctccaagatcttcactgcttcttcacagctggcttcactgcttccttcgcttcgctagcggaccctgtggtcttccggagcttcggcaaacaattggcgacatcttcttcttcgcaaagctgaccatctagtactagtcaaaaatccgaaggaggaagaagagaataaacattttgcaaatagcattacggaaaggaggaaaaaggaactttcacaaatagtttcatttataaaatatgtccttaggttttatccacttggcttatcctacagttgagatggctctgataccagcttgtcgcgactgaaaattttgcatttcccgaacgctagtgtattaatccccgtcccaggaaaagccggggtacaccacacaaacatgatacaaaaggcacatctttattatatcgataatatttacattattacaaaggcacttaaggcctgacaatcaaaattaaacagcagcggactagcgggcctacggctccatcttcacaggcgctcaactggggtataagccaggactccacctaagacttcttctccaaagcttctcttactgaaggggggaaagattgagcaagaatgagtacaaccacagtactcagcaagccacaccggcagatgcatgattaatgcaaggggtacaaggggtaataatataggggttaagttttgcagtaaacagcatttaaaagtcacttagttgcccaaagctattttgtaaacacgatcctagagctatacaatattattaatcaaggccgtagacccacacgaacctgccttaacccaaggcctacgatgattcagaccgaactggcaacccgaccctgagtcccagctcgtcccaagccaacccaggccaaccatttcacattttagttgttaagcaggttttaagaattaaaacactaacttgggtacattgctaggcttgcccataaccgagggcgcggctatttgaatagattatactctgatcagaggtgtacatctttacccacaagacacatcttcctcacgtgtaaccacgtgccacataccaccacggcatacggccaaaagacgtgacatagttctcaacccatcctagccataaacaagagtaccgacccaaccccacctatggccggaacctccgggacaggcaggtaggattgagcccctagcagcaggacaccagccctgtgccatgacatctcgactaccgggccgcagctcgtgtagccttcatttgtcctagagatgtccatcgacccccgacttcgtccatctccatccgtgtacttttgtttataaccagactgagccacaaactaagccttacccactagacatgtggaagtacggtagtgctttgcaacagaggcccgagcttaatccttatagtacccgaggtacgactaacaaaacccaaccacgcacctcgagcccagcctaaaactattttgggggttttgaatagagggggaggtgtgtgtccaattccaacataagccaaccattccatagtgtccaaatgatatgagaattcccaaagtctaaagttataaaaccatctaatgttgcctaattaatcagcgaagcatctacctaaattcatactagtggaaccatgaatagagtacccactagttggggttttgtttatcctagggtgaacaaggtaataataacaataacaacaatgataaggtcataacaaagataaataggcatggctaaataaaacagtgataacgcgggaattttaaataaagcgataatgcattaatttaaatcaaaataattttataaactgggattcaatatgctcaaggatgatgtgacttgccttgctcagagataacggccttccgaaccttcggcgacgaccgcaaaccacgcttcgggaacctccggaacgacgaagactacgcgaagcacacaagcaaagctacaagcctataaagaagcaataacaatacataaaaagaaagcacatggttctttaggttataacaaacattaggagacttgaacggttcgattcggagctcgtatgaccaagacatggtcatccgaagtttaatgctgttatatggagatttgcggattattgtaattaggttttacaactataaaacatgtgtaagcgctagcctggaaaagacaggaagactgcgctgttgacatgcggaccccacatgtcaacctaagggaccatggtagaccgagtacacagagacagtccacgggtcgacggaagcggaccccgtgtgtcaaccgaggcaagtggccgacaaacggactccactagacaccacgagggctgcacacttggaaaccacgcggctaccgagcgcgcacacaaacacggccaccacacgcacacacaaacgactaccgacaccggtacatgggtaccggggtcgacaaccgcacaacaggcacaggcgacaccgaaaggacgaggacggagcagcgagggagagggatacttaccaccacgcgacgaggcgtgggaacgacaacgacgaacgggcgcggcggagacggacggtgagggaacgactttggcggcgatccttggacgaaggtgagacgcggccggcgcgaggcttgatgatgcggagacgaggacaaagacgatgacggggctgtagcggctcacttgacggaacgcggacgacgaacgcgaatggcttgacggagggacgaacgccacgacgaccgggaacgacgagaggacgacgatgacgacgaccggggccggcgaggaggcgacgagggcagccagcagtagctgcacagagatgaggacggcgtggaacacgccgctgcgaatccgacgacggaggcggcgccgcgagacgacgagccggcgaggacgaacgaccgaccggaggagtcgtcgatgaggatgaacggagacgatgataacgaacaccggcggggttcggatggaggggaggcgaggccgagggcgaccttgccgctgcgatgccggaggaggagatggcgacgtcggccgatgcacgggcacggcggaaggggttgccgaaggaactccggcgaggtggagggcgagaccggcgtgggcgacggcgttccggcgaaaccgagggcaggccggggtggaggtcgacgcggcgacgccgagggaggagacggcgcggccggcccgcacctgagcggcgcggcaggggcggctggagggtgggtagcggcaatgccaccggttgccggcggggatgcgcctccggtggtttccccgcgaaacggagggctgaccgggggagagaaggtggctgcgaggccgctggtggcgacggcgcgaccggacggcgctcgggcgaggagggagaggcggctggaggccggccggcgccggagagagagaaggagaaggcggggagaggtggtgcggccacggtgatgaaccctgagttccactcgagacactaaaggctattgttggcccgatctttcggtgagttgagataactacgatttgtggaaaagacgttgacgatccgactacaaccgtacaagacgttgtgttgcgccttagcgatcgatacacctctccatgggttgttgatcttgccggtgcagatcaaccttattcctgcaagcaaatcgaagaaacaagcaagaacaagataaaagcaatctgaattgcaaataggagttaaatacgaatgataagttgtggttccgaagaacaagcagacggacggtctagccgacacgcgcgctgcaagcaagtagcaatggctaaacttcaatctatcaaaacccaagaaaccttgaaggggtacctagctatataaataggggtgggaggacgacctaggggtgcctagggtcgtgctccacctggctggggtgcaccccacatgggccccacctgggccgggatcccaaatgaagttacaagcccataggcccattataggtgatgcagcaacttgtgcgtgtgattccggccacacgagatggaattcggagatgaggctggatccgttggaaagagcgctccgagagctgtccatcaagtattcacgggccaaaaacggaggtcgtatgcagattcggcggccatttgaagtcagcagtgtagcaggtggccgaatcggattccggcacttggaggacttgaacttgatatcttgttgttcatccatgatgtgagcaacggatgtatccgtagtagccatggtcacatcatcctccccttcttcacggaaaaccgtcctcggtttttccatatggtgttcttcacatagtccattcaaaataacctgtttcattcaatcaaaacaagagaaactcgaagtagtgtgattagcaataacatgtttctctacatccgaacaaatgaaaactctatgcaccaaatatattcctctatcattatatttgccaatgatatgaaaaatagcattagttggacatggcaaatcagacttagcaaataatttctccttcaaattatcgagctcacaaaaatcatcaaactgaacatagcccaaagtatttaaagaagatagcaatttacgttcctcaacttcattagcaatgtgaacagcatgcttaaaatcagcacacaaagaaactctagaaatatcatgttcattcactagttgtggcatggatataagtgaagcattatcacacaactcttctttatcacaaggaacagcgagtaaatcaacttgtgacaaaggaattccagcatttgattccactaacggttgctctactttagtatgaaaggtggacaaatttacttcgttaacaatgcactcaccatgattaatttcaataccatttactttacctttgatgtcctcttcagatgatggaggtgccttgactttgagtgtgaacaatgggattggcggctctttcatgtctctctcctctattttactttcagcattgcaagcaagttgtaacaaatgagaaagagatgtatatctttgacaatcaagcatgtcctgaatttctttgtttagcccacataaaaacctcaattctttagcttcttcgcattcatctaaaccacaacgtaataaacaagcttgcatatcatgatagtatgaagtaacagttctggtatcttgttttaaacattgcagtttgttgaacaaaatgtcagcataatacatgggaacataaacatctctgaaatatcgtttcaggtatttccaagattgtggtattttgttatgcctacaaagatgtttccaatcattagaagcatgtttaattaaaacactagaggcacacataaccttttgtttctcagacaagacatgcttttgaaattcactatcaaccgctagctcccaattaatgtaagcacgaggatcatagtttccctcgaaataaggcaatgcagatttgatcttacctagaacatcatcacttacctcataatggtcatgttgatccctcctcatgtctcgacgaagatgtcgatgttgagcacagctatccccaattatcttgcgtatccctgccattgttagtagaaaacaagaaacatacacaaaaatatgcgcgttcctattaactactaggtagtggcagctcaaaaatcacacacactcaagcttttaaccaagctcttacaagatcttaccaatgcaagcggaatggtgacatacaccgactcaaccaagcaccccaatggaggttggatgtatcgatgccttggtgaatacttgctgtacggctgcaatcaaatctgtggagctctgggtaggcttaaatatgtagcaaaggaatagcaaatgctcaaatcagagaatgcaaagttgaataattgttcaaagtcaagcaccgtgctggtcctaggctagaacgtactagagacgcgagcctagacacaaacgatgccacaagatagcactaggaataactcatgcacaactctgatatatgaagttcagctcaaacataacagtattttctcttttctttctttcttctttcttcttttctttcctttccttttcttttctttttttttgggtgcggcttttcttttcttttttttatgcacctttctgcctttttttttctttctttttttttgattttattttacaaaaacagattcaaggacctcaatgtaaggttacagggactcaaacgtaaatataaaaattacagggactcaactgtaaaagtccaaaccaaaattaaaaattatacaacaatggaatgctaaagttatgtcggttccgtttttgcaaacggatcttgaatccgacaccaaaaataaaatttcaccgaagtgtttaaccaatccggacagaaacaaacgtgagggagtgtgagtcgactcacaagtctcggccacaagatgacgcaagggaaggaatcctactcggcttcggtttggaaaggtaccaggtgataaatagaaacagactcggcactaaatagaaaccaaaccagtcaatctaatctaatcttctccttccatctttctcacacgcgcatgcacaggtgcaccatcacggcatgcaccatcacggcacagccaccaaacagaagctatgcaactcaagaactcaaaaactaaccgacataaacttctgaaaactacgaaaatagaaccgtggcagcgagccaattccgttttcgtaggtcccgacgacaacagagacacgggggcggtgacgactgtggtacaaaatgtgaccagaactcgaaactctaaacgaactagacgctaagaccagcaacacgacatgacgatgcaacacaaaattcaacaaagcaaaaactgaaaagaacaatgcaatggcacaatatggctaggtaaaagatacaattttttttttggttggctattttctggttataggtagataaaaaaaaactcaccgagcaacgaaagctctgatatcacctgatgaaccctgagttccactcgagacactcaaggctattgttggcccgatctttcggtgagctgagataactacgatttgtggaaaagacgttgacgatccgactacaaccgtacaagacgttgtgttgcgccttagcgatcgatacacctctccatgggttgttgatcttgccggtgcagatcaaccttattcctacaagcaaatcgaagatacaagcaagaacaagataaaagcaatctgaattgcaaataggagttaaatacgaatgataagttggggttccgaagaacaagcagacagatgtcacgtgccaaaacgactctaaaatatatcctttaaattatgcctataataattaaaatccatgtgaaagcctccaacaattaaaatgtgcaaagttaaaagtcaaataaggcttagaggatttttgtatatttcctaaaagcctaaaatgtgtaaataaattttagtggaattttcagagcacaaataataattattaagaaataaacaaagttgaaaaagttttataaaaagaaaaaccctaaaagtcccccttccttcccttgggccggcccggcgcatctctcctccccccactctctctctcctctccccgcggcccactcggcctctccccgcgcgcgcgccgcttacgggcgggcctgcccgccaccctcgctgacgggtggggcccacccgtcatccccgacctcccgccgctcccgccgcctcgcccgcgccctagcgccgccgccgccgcggatcccgccgcctccagccgtccccgcgtgcaataaagtggggcgaaatacttcccgtgattccctctccctttccccccatttttccctctctctctcgcgttcaaacgggcggatttgcccccgcaaatctcgccggcgccattgatggcggccgacctcccgcgccggtttccttcccctccggccgctctctcccccttccaaccctatttaaaccctccccgcacttccttcgcccgtttccaccctttgccgtgccttctcctcgccggaatcgagctcgcgccatcgcctctctctccgccgtcgccgccgagctccggttcaccgccgtcgtcgccccggaccgcctcccacctcggcgccgcctccttcggcttcaccgcatcctcgccgacctcgtccacctctctgtttcggttgccgaccgccggagcgccgctgtccccgtcgacctgagccgcgccaccgcctccctccgctccggccgcctcctccgtcgccgccgtcgccccggggtgagccgtggaccgtcgcctcctttcccccttccctcccctctctcggccgccgctccgccgcgccggtggtcgccggcggcgatcatcggggcacaggcgcgccgtctcccgccgaccgcgccggcgtggccgccctcgggtgcggctgacgtgtggggcccacggcgccggccggtgtgagcccgggtgcacctggtccaccgtggactgtgaggctgccgcgtgggccccactcccgtggacccggtccgcgcgcccctccccctcggctgacgcaataaaccctttttaaattaaaatttaaatgaagaaattcgcaaatattcatttaaagagcatataaacttcaaatggccataacttggccatttgaactcggaattggaccgttcaagtctctaatttttccttaagaagtcaagaacccatttttgtgctttgttcctgcttgttatatggagtttattagagtaaaagccttttcttttccgttggtcgtgtagacgctgcagcttcagaagatctgctcttcgtggaggttgaagccgacgtttgggaaagcgagcaaggcaagtcacatcatccttgaacatattggttcccattttataacattattttgatttaaattattgcattatcgctttatttaaattcccgcgttatcactgttttatttagccatgcctatttacctttgttatgaccttattattattgttattgatattattaccttgttcaccctagattaaacaaaaccccaactagtggacactctactcatggaaccactagtatgaatttaggtagaagcttcgctggttaattaggcaaaattaggtggttttacaactctagactttgggaatattctcatcacctggacactatggaatggatggattattgtggaattggattcacacctccccctctattcaaaatcctcaaaatggttttaggctgggctcggggtgcatggttttgatagtagcacctcggccatataaggaccggtcttcgggcctctgttgcaaagcactaccgtacttccacatgtctagtgggtaaggcttagtttgtggctcagtctggttataaacaaaagtacacggatggagatggacgaagtcgggggtcgatggacatctctagggcaaatgaaggctacacgagctacggcccggtagtcgagatgtcatggcacagggccggtgtcctactgctaggggctcagtcctgcctacctatcccggaggttccggccgtagttggggttgggtcggtactcttgtctatggctaggatgggttggaaactatgtcacgtcttccgtccgtataccgtggtggtatgtggcacgtggttacacgtgagaaagatgtgtcttgtgggtaaagatgtacacctctgatcagagtataacctattcgaatagccgcgccctcggttatgggcaagccgagcaatgtacccaagttagtgttttaattcttaaaacctgcttaacaactaaaatgtggaatggttggcctgggttggcttgggacgagctgggacccagggtcgggttgccagttcggtctgaatcatcgtaggccttgggttaaggcaggttcgtgtgggttcacggccttaattaataatattgtatatctctaggaccgtgtttacaaagtagctttgagcaactaagtgacttttaatgctgtttactgcaaaccctaaccccctatattatggctcccttgtactcccttgcatttattctgcacttgtgggtgtgtcttgttgagtgcggtggttgtactcagtcttgctcaatttttcccaaacccagaagaggagttcctggaagatgaaggctttggtgtctagctcgtgcctgccgtcaagcgcctgtggtcgtcgccctagtcttccgctgtttcccgtttgtctttgtgtgtgctgggccttcgccgcccatgtaataaattaattatttacgcttccgcttgataaactctgaaatgtatcaacttttggtgtaccttgcctcctgggacaaggaataatacatgcacgtaaggaacgcccgttgggttatttccggtcgtgacaacggacggtctagccgacacgcgcgctgcaagcaagtagcaatggctaaacttcaatctatcaaaacccaagaaaccctgaatgggtacctagctatataaataggggtgggaggatgacctaggggtgcctaaggtcgtgctccacctagctggggcgcaccccacatgggccccacttgggccgggatcccaaatgaagttacaagcccataggcccattataggtgatgcagcaacttgtgtgtgtgattccggccacacgagatggaattcggagatgaggctggatccgttggaaagagcgctccgagagctttccatcaagtattcacgggccaaaaacggaggtcgtatgcagattcggcggccgtttgaagtcagcagtgtagcaggtggccgaatcggattccggcacttggaggactcgaacttgatatcttgttgttcatccatgatgtgagcaacggatgtatccgtagtagccatggtcatatcacacggggaggtgcgggagaaggctaaaacgagagaacggagcgagggggttccagtttataggtgaggggagggagccggccacgggagaggcggggaacggcggcggaattcgtggccggtggccatggaaggcggccgggaatggcgcggctgttccgggcgttagagggcacgaatcaagggggaaattggggggaattgaataggaaggaaaggggattaattccccctaatcaattttggaattcccggtttgaatcgcgtggattttggggaggaatggcgctaggtttccgggagagaaagaggaggtcgggcgggaggaggacaacgacccggcgcgtgggacccatgcgggcgcgccgtcagcgcacgcacgtgcgtggcacgggcaggagggcgccgcttggcttgggcccggaggcggcccaggaggagaggagggagaggcagcccgggagggagagggaggaggagggagctgggctgaggggaaggagggaggggagggtcggcccagaaggaggaggagagtatggagtgggccggaaggggaaggggaggcccaagagagagagagggatggaaaaagagagggaggagggaaggactttgggctgggctcagcccaaaggaggaaggagggtttatttttagctttttctttttagtaaactttgataaatgttgttgttgcttaataattatttccggtgctctgaaaattcaagtaaaatttgagggctccttttagaccaaggagaatttaacaaaaattctccgggccatattcgaatttttcttgtacgtattttagtgtttgccaatttctttttgaattttaattaattctattattccttttagggaatgatttttatttcgggatgaatttatcaggacgtgacaattctcctccactttattgtcattctctgcaaaaggttagtatacctaatactagtggaatattattattctaacagatatatgcattgcaagtatcactagttcttctctattttagtaatattgacggtcgaaactgatcgataacgaccgtcaacaaaacccccaaagcttgaacctttgctcgttccaagtgaaggacagaaggaaacaaagacttggttgttgatcaggagttgctactatgctgcatatctcaaagatacaggtgcagggtatatgtaatctctctcagattaaataatctttgacacggtgacttacccttactcctgattaccacgagacactgcttctccttgccttgggcagttgaaagacagaacaacaattagagcaccaatcatccaatcttcattcaactcttattccagaagttttcaaatgattttgaaaaagaaaaccaagttcctcaaatgattcactcggtctctccaagtgtatcaatttgaattcctcaccagtttttccttttttattcctactctaaggtttgatatgtggagcttggtagggatcaaacatggcatacttgcattcacatttattactaaagcaaaaacttagactaaagcagataactaaacatactcaagatcaagatcgtgcaaaatgtgtgtgtggtgtatgatgaaagtggtacatgaggaaaaataaagaaaaatgcttctcctttgtgcttactttcttctcccaaaaatccttcttttattgattaggagagggcatggctacagttttttttcaacatcatgctcatgcttgatggagcataactttattattattattttttcacaaccatgcctttccctccttctctttttttttcaaaaggattttcatttttaggagaagaaagcacatgaaagtatggagaatttatttttggtggtaatatggaatattgcttagctcccagtgtaggagtttagcatgtgcatatatgtgggtgtatgatcttgatcatagagcatgagaagtatctacacaagttacaagagtttgacaaagttcaatggaatgacaagcaaccaaaatttatatggtttaatcatgatagcacatttttggctttggtaggaatttatatcaaatgaggaactctcaatttatcattttgaaaaacaaacatccggaattcaagtcaaactagtatcaggatcatagcaattcttatttactatctcatatctcgcaataacttagacttagatcagcaagtgcagcccatttaccttaggttcccggataattgttggctactcatatttaacctttgatagaatacttacctatgaacccatatataagagatataaaacagagcaactattcatcatttcaacaaagagaactagcttgtcttacctagcatgactcaaacctatcctttttttttgatattttctattttgcaaatttttatgttgttttcaagttttataagatgcaattggaaagcaaatatgcaattggaaagggaaatatgcaatgtgatacaagttacctcagtggggggggggggagggagggggagaggtgtctccccccaagcttgctttcgctcaggatccttgataaggattgaacccctgaaaacggaagtacgcttgaaggtcatcgtgctgttgcagcatcatgttgttgaagttggcgaactgagcatcagcagattgttgccattcttgcgtttgagctatgtgttccatgaggttgtactggatctcccccatctgcatatcaaggaatggaggcacaccacttgatctggaaggttggttgtccccccattggatgtcatgaggcgcacgccaccggtcctcactggcactcgcccaggttaagactccgatgctgtggcgtagagcttgggtccatccgggtgcatccccagctggtgcccaacctgcttcatacatctgtacgggtgttgaggatgatgaactctctcgttcattccttgtcatgttgcgcgtctccctgtatgctccacctacacgaaattcttctatggtttgcagggaaatggttagttcatggcagttgtacaaatgataccccgcatttggcaacgggatttcatttgtacaaccggggaaaaagtaaatcaaagatccatctactccatgcttcagaatatgcccttgcactagataggtctcatcaatacacggacgagcggctgagataaaagccatttagtcgctaacgacccttagcccttttgctattcgagtaataagagaagtgaactcaacaggagcagagaactttatactttctaaccattgccttatcatacatttcacaggagcaattttgatctttctaaccatggcaaacatgataatcaattcatccctcctaatgggtctaagatcacctctaggaaacaaagtcatagcaatccatttatgcatgagcctaagtgtaggattatggatatcattcgtcataggtttcttgcaaattggagcaccagaaatatcttcccaaaacctatttttctcgaacccagaaattcctttctgaagatatattttacaggaatcgtgaaaaccaagaagtgtacttaagcctttctatgtaagtgtgtactccttatggaaaaagcgaaaggaaattccatcttctatttctttcaaagtgcacagaaattgcaaagtaagcaaacgagaaccaggctcatctaccacagcaaatctttgccaaccaaccactttccaaatagaacgaaattcaacatccatacctatcttttttagcagctccggagagtattctcgtgtgtgagcatactcccggtcgctcaacatgtagtaggcttgtctttcccgatcactgacaaggtcaaggtcggtgtcgtttaggagtcatcgcggagcttcggcgtcttccatcgagacattagctaatgaacgagtactagactcatcatgatgacttgatgaagagctggaccccttgaacagacgagacaatcgcctcctcattctgcacaatggagcaagaacggactaactcggcgggggttaggaataaaaaaaatttcacccgccgattagtttcaccaaagcagcttgtatatatgcaactaagtatttgaatttgagggaaactatcaaagcttgaatgaacttgagagcaaactttggagagggaatgaaaatttgttgaaatggggtggagttccctctcccggccggttggcttaagtagtgcacccacaacggtcaaaaccgacctgtggggcccactagccattgcctcaaagagggaggcagccgaccgttgcctggccggttcggccgaaccaggtgttcggccgaacccctggtgggcccaatcggccccactttcgaccgttggattccaacggtcagtgtagtcgtggcactgcgaatttttgttggaagttttattttggtttgctctgaaaaattcattggaagaatttcctcaaaattcaaaaatcctaaatgcaactttgaaattcaaccatgtgctgatgcaaaaatccaaattgttgaaagcaaaaatgtagatacataccaatttacctgttggcgaaggtcgcgtcatttaaagtccgacgtgcaagaccgtacctccttctgattcagttcgtagattttccacccgtctctggaggtgatggagcgggcgtctttggcttttccctccacaccttccttggctttggtgcggacggcggcttcttctgagccggctgctctaacttcttggcgatatgggtggttttaccggcgtcttccaataacggttcctg

SEQ ID NO: 19859 - DNA, 2347 bp, Oryza sativa
agagggatgagaaagaaagaggatgtgcgtcggcaggggatgctcaccataggcggaagcagcaggacgacaacaccgttgctcgactcacgtggtggatggatataggcgcaggcggcgggcgactctcgcgaggagattgagaccgacgctacgggagattgacttgggtgcaaggaatcaggcgagagtatgcggcggaagcggcaaaacgcccgcaccgctgctttacttgcgatgatggagatcggcgcgacggcagtggcaggcgacggacgaagggggtctggtgcccgaccgaccgacggatgtggtgagtcgagggaggccaaggccgtaagcggtatgcacgtgtttggtgcggccaatattaattcctcgggtaagtaggccgaccgcgaggcagattatgggcccagctggagagcagctccgattaggactgtaaaaaaaaaaaaagctcggctcacaaactgctcaagctcggcttcaagtttggactcgaattgtaagagcaagtttaatactccctccgttcctttttgagatgtcacacgcacacataataaggttatactcttaatctaagaaaatgacaaaaatacccctggctagattattccggaatggaggaaacgcactggcttcagagagttctctgggttttgtagtacatgagaaaaccctctggttaggcccacaaggggtaagtgcacaaggataccaaaggatagcataatataggctcatttgcaaaagcagcatttagcaaacatttaggagtagtaaaacagtagagtaattaatcatcaattttaatcaacactgaacagcacacccatactgctcaggcccaaccatcctgaacaaccatacacggctgtacagatctactccaaaccaggagctaagcaaattattaccagttatagcatcaataattattgtgagaggtatgagactaatcacgaaaaacattgctcaacctgcccatgaccgcgggcacggctattcgaatagttttactctggccagatgtgtaccactgtacccacaagacacagcctcaacatcatgtctaccatgcgtcgcgatactggaaagtacccgaatagaggctgtgacaataccctctgcacaacacaaatcaccacagtgcaccgttcctggatcataatcaccccctcaatatctagaggcatggactccccaacgacccccacggacttctcgccacttcacagtttggcgccccgcaataaaccatgctatacagaagataaagccgttgcccacgctggcttgtggttggcacgattaatgtctcacaacagtagctcgcgaaccggtccttaattgtcatgagcacgaccttcaaaaccatatgctcacaacccaccattgtcaagttttagttggcaagtaattaattaaccaatcacgattgaccagcgtgagctattattaaatataatcagaagtgatagtgtaacattagttatcccaatcatgtgctaatgtttgtaagcaaagctaagcaattatactaatatatatctagttgaaccaatatataaagtccaactagtcaaattataacctaaggtatcaaagaatagggtaatcaatgcaaattggccataacaaagaaaggttcacaccacccagtgatattcgaaaataaatgcacagttgaaataaatagagaatttaaatataggatcaacatgctcaaaggattgtgtttagggtctgtgtgacttgccttgcaataatcggtcttcaattagtcttcttgaacacttccgacgcactcacgaaccttcgaaacaatggaaacgacaagctaacacgcacaacggagaaaaagactaataaaaaccaaataaacagtacataaaaagtaaacaaatatttagatcttgattttagatgaatttagagacttgaacagcctcattctgacatcatatgaattagttatgaattttaaaagatttaattcaattaaacctattcaaataaattaaataaatttataacacaatttatatataattttaatatataggtctttattttatacaatttttataacttgaatcacattaatccgacttaccatgaattagatatgaattttctaagattaatctgattttagccttaaaccttaaaggatttgcgatttattttagaaaagaaaaaaaaaggctttatgacatcatcgatgacgtcatcaccggcggctcaggctcctttggtcgccggcgaactagggcacggcggcgcgaacagagggcaccaacgcgacgagcacgacgcggggaactcacaaggggcggcg

SEQ ID NO: 19860 - DNA, 7807 bp, Oryza sativa
taggtttgcgcgtcgacggcgctataggaggcggctgcggctaaaactcgggccaaacggaaaagcacgactaggggatgctatttataggcttggattaaggagatcgaactcggaacgagaggaatcgaagcggaaaatcctatgttttagttggagagataaactctaaacgagtttgattcttataaaatacaaggaattggtttccgattctcgggggaaacgaaagagggagataagggaaatatttcccctcaactaattttaagaatacactagagagaaggccggatttggaggagaaaaaccgagccaactcggtctcggttcggctgtcctgaggttgaagacgaacagtaacgagggagaaaagtagactttcagtctgggccggctgagaacaaagaaagaaaagacaaggggatgtagggaggaggggcggctcggcctgggccaacttgggccgagcgcacgcggccggagaagagagagggaaggctgggccgacttttggcccaaagccgaaaaggagatttaaaaaccttttctatttaaatttattcatgaaatgcaattccatttattaaaaatacttccttggctcaaatatatcccataaaaatctaggaactatagaaacaagataagtatttaccaaaattttatctagcccatttttattgatatttattaaactaaacttagatcttttcttttaggcctttaagatcatttataaaaattcaatttataatttaaggatttttaaacaagcaaagcacttatcaaaattacaaatagatcatttcatgattatcttattgattaactaattaatgaaatgttttttgtattactaaaattaataattgagctctgaaaaatctgagaaaattccagagagtataattaatcatggagaatttaataaaaattaaattcatccatgctttatatttaggaaattttatttcccacatttaacttaactcataaattaataaacatttaatataaattcatacaacaatttattaaataatttataaatcgtaagacgaaaatcacacctcgctcccgcgccggcaggtaggcccgtcatgttcgccggcgaggaaggcagggcttccagatccggcaacggcggcctcctcgctggtggattgtcggttgcccggacgagaggggtgcaatgacgagagtggtgcaagccactgcaccctctcctcctctttcatctcatctccacgttagcctctctctcaccctatcctctatgcctgatgcggtcccaggtccgattccctcgattttccaatggcggattcggtcgtggccctcttcggcaatacaacgctgctctccaccctcttcctcccgttctctacgccgctcacctcccctcggtgccagatccagctcaggggctgctggatttggtacgaggaggacacgtgccgaccggtttcaaggaggatggggagagcaagagcagcagcttgggcaccaaagccatgacggcggcaaggcatgggctatggcaaagtatggcgacgacggcagaaaggcacagactatggcaaggtatggtgacgacggctgcaagtaaattgggacattgtgcttcggtttttctcctagatgttcttcattctttccacatgactactgctaaaacattgattctccctattatatgcatatatacatatatgttctagcccctgctctctattcttgatttgctgctcattgtgagtttcacatgattggtaggaaggaaagaaaaaagggagtgcaggctagaatgctagattattcagtactaatgtttaaacatcaccacccagctacagatcaaatcatctccttctgtcatgcatatattgtatatgaatcgagtgtattgatattatgatttggtttgtctcctagatgctcttcttcattctttgagcatgagttttaatagatcatttgtctatacaattagttttacctgtttgcacattagtgttgcagtattaatacgaactgttgccatagtctctctatgtacttttggttgggaacacaagagtgacatatatgcctatcattaatctataataataactgcaatgttgtattttatctttagaattacccattgtctaagcatacaaaatatccatctgtaatttgaattggttagttcttacattttgcatatcaggtttattagtaccatgacttccgtttccataggctttctcaatatttgatacaaccaaaatttgccatattgactacaatgtgctttgaaccaaagaaatatgttgtaggtctgttatgtactgttctatttggttattggaagtaatttatattaccaacttctacgccttttacatttcaccgttttagtttgttggcacctactgaacaatatttttcccatccaaagtattcatgaggttattttctgtttggaggtctggacagtcttctctcgggtgtacatgtggtcgtcagattgctcatcacattattatagttccatgatacatgccggttatttttgttgttatagtgagtgtaaaggtgaagccaattttattttccaaatggaacatgcaagctatgttaaactaagttcttcagctttcttccttggtaataagttcccttctgtgcttcttatcaggtgtgcaaacgggaaatgagtagcgctgtcagcaagaaatagaacacactaaacatggacttgaatctggaagtattacatatgacccggcaaagcttaaattttctgatgacatcaaagattctcggtgaacctgacaatcctgacatattattgcatccagcgttccaatttggccagtccaaaggtaccatttgtttatatctccatttttactagctcactttcctgatatatgtatgatagatcattaggttggcagttcttcctgccttctttgcattttagttctcagtgtattttctctatattcttgatctatacatggactcggaataaggtgttcaccctaaataaggagggaggtcagtacatttttcctaccttaaaaatctgaagtatggttgaacattgtattagatgatattcagataatattgttagtttataacaagccagttggtttatacttaagccacttggttaatgcaaagctatatattctataattcctttatttcttaccaaggaatgcgaatgtgccagtatgttccttccagtgcatttgcctctgtttgattttttattgatttgttgctcccctatttttgcccctatatttatttggatactggagttcattttcaaagagatgaacctcatggtcttcaggcttcagtttagacagataattgtggcgtctttaaagtaacgatgttatattgaggtacaagtcttttagccatcatatctggagtaggctccattatcccgggaattatattgaaacaactacaatggttaaaaatatatatatttcagttcgagattttgatattggccagaatttaatagaccacaaatacacatttttacgatctcttcattatctcagttcaagctctttgtataacaagataattggcagcatgttgagacatgccctaaatatagatggtagtatcaataccagatataaatggctaaaattgttgatatgaatagtccaatgttttcttttttttatctacattttgggcatttagatagtatttactattttagaatgcaatatatatatatgtagcactgtgagcagagacagatcaagagatgcaatgtctgtagtagattcatactcttctcaattgttatcaccaggttgagaaatcaccaactttagtatgtgcttatgggttatgtgttcttgatattaaccatcttatttatgatctccttttattctctgatggtaccaatcaatattattaatggtttgtcttttctgaaagtcctttgtttgtagttaactagataaccaaaaagattggagctgatggcatatgggattccaaaaaatgcccatgctatatatgtggagtctggagatatgttttttttacaggaatctggagatgagtatatattttgttcaccagatgaatgtgtcatgtgccagccgtgtgcaatcattattgaaacggactcaaaatttcagggaaaaatttttgcgaattatttttaagtcatgctcttctcgattcttgcgttggagtgatattgcttttaatcttttcttttattttggacataaactttaattgcaaagttaatcgctcttttaaattttataaaacctttccatttattttctgtaatctctaactttggctctaaattatatttcctttgaatccattcccgaacacctccaacaaataccctttcaattcccgttcaaccatctctagagcacatgaaatatcaatttctctagagttaatacctttttatttagagtttaccacactaccaccaattttagttttatcttccacaaatatttcccctttgaaatatcgtttatctaaattatccattcaagatttcaaagtctattatttagcttgggccaatatttccccgattgacccgactctctgttatatcccattaaccatttttatctttgggactaaaccggtataactccctttttgttggaatttattttggatcacacctctatctaaacctatcccgaaaaacctttaattcctctacatcgatccaaaatattctagggtcaagttcctattttgatcgagccacctgtttgattcctatggcttgatttcctcctcggcacaagaactatactatcacaaataattgagtgattgctcttgtgctaagaaacttatttccaatcccttctattcaaagtccaacttcctttagccacaaatatttcatcaagaatccataccacatattttggaggctaaaatcctaattatttacccccatctatttttgacgtcatcccaaaatttatctaaagttagaagatcaattatttgtgttccttttcctcccatttgattatttcaatcttacattttaaatattaaagaaaatcttttgtgacaatttttatatttggttcttattgaattctataaaattggagcattttgatccttattgaattcttttaaagattggagcatctttatttttattttaaaataaatatctttgattttattttaaaaaatatttcaaactccttttgctttaaaacccttattcaaaagacccccaaatatttctcttttaaatctattaaaaccctccattcaaattttcccttagttttcatctcctttgaaattccatttcaaatccctccacacaaaattcataaaacccctattcattttgggccaaattcccttcaattaacccaatcagcacaagtctacatgtctccttcctccctcttgggctgtcagcccagccgagccgagccaagccggcccatggccgagccgctccctcctcctgtgggcgcacttggcgcacgcacagggcgccgccgtcgccgccgtctcgccacttcccgatgccgcccgccgttttgcgccgccgccgtcgtcttgccttcgaggcgaaggatccgtcaccaacgtcagctgcgacgtcacgccgccgacgtcagccgccgaatcgaaccgccatcaccaaccaatcaacgaacagagctggcgccgtgctccacttctccacgccgccgtcgctgagttctccttatcttcctcctccgcaaccgccttacgccaccgcctctcgccgcctataaaaggacgacgaggtcccctcttcctccacacacaaaccgacttcctcaagctctctttctctctttctctcccatgtccggccattagtaccactggccgatctccctcaccggagcttcgcaagacaaaccctcgcgccaccaactccgcctcgtcgaggtgattccatttttttcctttcccctctccctccaccttaagataaaccgccaccaccaccttctcttatcggccggtctgagcttttgctaccgccgttccggccatctccctctctccctccgccttccaccactttccccgggtgcgcgttgctcgggaacaccatctcccaccggcgttcctacctcccggccaccggagagctggcacctcgctcgccctcccctctgtttcctctcgactgccagacagaagaaaagaagaagaggtagaagaaacatatgacaagcgggccccaccttttataaagtaattccattttcttttatccaattccaatctttgagcatccatatctctccaaccattgatccaattccaaaaattctttgacctaaattcatctaatttcaaaccctctcttttgataccaaattttctatttttaaaattttatttaaatacctttttcttatttatttatttactttctaatgttaaattattttaattaacctttaaaaattattttaaatttatttgatttactttatatccctttaatttttaaatttatcgtttaaaaacctttttaaaaattaaattatcctttaatttctttagatgcccttttctttattttaaaataccattttaaattttatttctttaatctattttaaaacccccttttgaattcaaatttatttgatactttttttttaaaaaaaaccatcccttagccaccaaataactgccttggaactttactccttccatggagacgttcgcgtggtcttacacctcgacgtcaaaccgttggtcgtaaaacccggtatcacctaatcctaaggttgaagtgtcgctcttcgcaccccacgcctcaagccctcaacgcttacagtggtcggagcctcactactccctcaacctccacagtacgccgcacactagtccttgagctatgtgcaaccctagccgctctgttgtcactcatgactgcagagtaacactgttcccctccacacaaatctcctaactcactagtcgttgtgctacttagctgtagcattgactagacgagccgatatttagccgttatgctgcccatctttagcatcggctaactaatccaaatatctagccgtcgtgctactctaccctagcatcgactagaaaccaatccaccaaataaaccccacctatccaaaattatcctttcttcgattttattcaatttccaacctatagaaaccatcacctctcttttcttcttcaagttaaaagtttatttttaacccatttcctttttcctctcacctcgctccaattttatttatttcttggctttatcgtttctttgtagcaatttgcttataggctttatttgctatctttttcgtattcgtacgttagaccgtacaacaagttctatcggcatccaaggagctgacgtggacccagatggctacgctgaagccgcaggaaatcttaaggcgcaaggcaagacataactaaaattttgatcatatagaaaacttgatataatcttcatatttaaatttgatgcatgatatttactgttttaacatctcatgggtagatgttatactttagaataacattgtggtggcttaaaatgatatttaatgcttttaagcattgttatatgagattatggaaagatacactaaacatcattttatgtgatttattattcaaacatctttacaaacttaggaatccggttaaaatgggtatttttgaatgttatatataatgaagtttgttggtgcagggagtttggaaa

SEQ ID NO: 19861 - DNA, 5028 bp, Oryza sativa
cacatgtttgattattcgtcttatttaaaaaatttacgtaattataatttattttgttatgagttgttttatcactcttagtactttttaagtgtgatttatatcttatacatttgcataaaatttttgatgaataagacgaatggtcaaacatgtgagaaaaagtcaacggcgttatctattaaaaaacggagggagaatactctaagagcacgcataaggcaaaaatattcctttccatttctcctaggatcaatcttcatagtcaacacccctttgattatcatcaatcaacagagtccgtttaaaagtaagaatttacataaattacaaaacatttagctaaaagagttgctggtctctatggaagttagcactaacaatagcttttgtttcagataatgtaatgaaacatccctgcttttgctaaaaagttatagccaattattacaaagttcacacaaaagcaaactcacaaagtgagtatgtagcaaaagtaacgaaaccaaaagtagaaacaaactaattaaaaccaaacaaggtaaagactccacaactactgaattctattggtgaatcttcacgcgaaactggcaaagagctgtatgatcgtcgacttaagtttacgacacacatcttttattagcttgataagatcatcatgcctttgtagttgggccaatatattaccctgaaaaaatcctgcaaataagattttgaaggtgatctatcaaaaaaaccatttcgttttactaagctagagagcccaataaataacggaagctccatcaagtataagttccttgattttttttattaacacccacaagccaattcccaaacatatgagatatactatgtggagggtataatataaacgagaactatatagatctccaaagaaatctagcgaaatggcaatccaggaaaagatgataaatcgattcatttttcataaacatctcaaactactatccaattcctcctagccaataactaattccacggaaatgagtccatggagattaaacgaattcttactttgaattagatttttcagcatgtgcttgagtagagggacaatctgcaataacaacacataaatcggtaagaagaaattctattagcacataaacacctcgctatgtcaactgttttggtgtttcaattcatggcctgtaaaggttcttgtagacatgcttgttagacatgtacttcatatcaataagtcggatggagaaattaaagactgagtttctctcaaccatcacacataaaacataaacacattttatgctgattcaattggataggcacacttcaccgttatctaggtcacaaagattggaatatgggaaacatacacttatttatatatactgcatttctaccctgatttattttgcaggaggtgcatgcctgcatggcaacatcattttttcactaaataagatcattttttcaccagcaaatagaagaaaatggaactttgccaaacctagatcgattattgcgactgaaacaatagagaatcagaatactaccatttgtgtcggtgatatgggtccggggctatcagcaccatagggaggaggctgcccctggttgccacgtggccttccccccgaggggggtcaggcctgaggtagggtgacggcgccccctacatgcccgggggtcgggcttccccgtccccctccacgcggtgccgcgtgtgccgcattagataggcgctcccagcgccacctaaccgcatttaaggtggtctgagcgagcgcaccacgctgcattaaatgtggtgcgcgtctgactggtctatgaccggtctgtgaccggtcgaatgattgatgtggcagggttagtgcgtctgctcactggctctatgtcagatggcgtgccgcctaacgcccccgtcacgtcgtgatgatgaaaggctgcttagcctctcatcacagccggagacggtttgcctaacccagtcagggcggggtttccgtttcccggcgcaagtgagggcccaaaaatcctcactcattaaatgtcaaatgacgggtgtgtcccccgtgtcagccggatagattaggcggaccccacgccgcagcagggcgtacaagagacttccaaggcaagcaacgagacatgcatttaatgtgattatcctccctgaataggctcgatgggcccatgttgtaaccccttgagatataaaaggaggtccatgcctacttagggagaagatgagcccttttcattagagcagtctcctgcccctcatcatcaacaccttctactccaacaaggagatcttgtaatctctctctcaatcagcatagcacaggagtagggtattacgcttctcagcggcccgaacctgtataaaccctttttgtctcatcgtcctcgaggagcctgacctcctctacgtcacatagcttcgctcaccaagcccacgaatctcaccctcttcccctggccgaactaaaaggggggcttcactgtcccccgcgtgaggagttcaccttccgacaatttgagaaaattataaaaggccacaaattttcactgctagataacctaacaaaatacgaaggaataaatggtagaataattgaggagagaacagtgtggcctgggcaacgaagtgatatcgtcagcccaaaatccaatatctcctgttctctgcacaaacagagatgtaaaattttccatatgcagagcttagcacgccataaccagtgtccaattctgaggtgggttttgaagcacgacccggtatatcgatgcaaccatttattcatgagacaggatgaaatgattagcataattccaaaacatttagcaagatagtagtccagtagtgtctaaaaatcagggatggaatgatccactaaatgaagtggcgattaatccaaagcaccttagagtccagtaaggtcgaagaagtcctaataccagttctgaaacatagctgatcgctttataatgcagatactgcaaattcaaatgttgtctattagaaaccaaaaaataaattcagttgtgcacctatgcacagccgtggtgcagtctttggtcaaattaaaacggattatcaggttactcaaatcaattcaagaaattttattctagaaaggttcattcagaaaatttatcctaaaaaaggtgaaatgggcttagataagcggtaaaattttccattccaaattgcatcagaaaagtttggagattaacatacagagatatgagtagtgaaaaccaaatcgaagagaagagtaaatacctgcacaactgcacagtgcacaccatatgctcgcatccatcgaatcacggatttttttagagtatcctccaatgaatacgagccattcatctagtttgatccaatggatcatattcatttctattacacccaataattttgacagtagaaattgtaaaggggcaaatttggaaaatatgtatttttaaaattcataatctcctattttttctgtcgtttcatggccttctcaggctgtagatgggccaagtcctaattaattgatccgtaatccatgcgcacgtacagatccaaatttcttggctaatcgttggattatgtgtggcttagttgaagagaataccatgttccaattattccatggactcacgtttgcatacatggtcaggatggaaattagcggcggcgaggagatcaacgcaacggcgagctggccagcggtgccaacgagatgggtcatgggtatcgagcgatgattcatagcctagagagacgagtgatatgttctgcacgaattaaccagatctaataataaaaatgcattacattaaattctaaaatacctatcgtaatcaacggttagatgaaacttctatagttctactacactattaccactagcagtgggaggtacagtaaaagcgcccttaggttgaaagtgtccagtactattgtataggcagagtgaatagaaaaaggcaatagttaagtaaatttgaaattttcctttggacagtagttatacacaagacaatatgctatcggtttagtaagtaacttcatataactatagacattctagtatagatggtactgtacaaaactgactgctaatcagaagctagttataagaatcgtctactaatgaacatatagcagcatccttctctttttactctgttctccagggcactccaaatccaacattgcggatgagtgacattataccctaaatattgatcccacgggttgaagttctcttccaactacatggcaacatgtgtagtgcttttggtagatatatgaataagaccagcatccagagatggcagtttcctttgtaactgatgataacagaagatctgttgcatcaccataaaatacacattatgttgtagaatgcagttaagagccttgtagttatcgaagaaaatatgatgtcaccgtaacagaaaagaacttcaaaactgacatgtacagaccaaatattataaatgtcttgaccaaatattataaatgtttttaacgcctagactgtgcccattgatggatggtctcaaccacttgagggaagaaagcactgatactttcgttgataagaccctggagaaaatgtatagcatcctcgtcgtctagatccaaccggaaattttgctgtagctgattaatgtccacagaaaaaatggaaagacgatgtcacttattctgtaggtgtttaactttagggtaagtccattttacaccccttaactcttcctgtcgtctaaaattcacaccttaacttaaacaccgggcatccaacaaccccaactatcaaaaccattcaatttacacccctagacaaaaccagggtgattttcctgcttatgtggtatcaacataccaatctgggttagcaaaattattaaaaagaataatggccccacatgtcattaaaagtttgagaccctcttcctctactctcaccttcattctccatcttcttgagatttcctcaatccgcctctgtcaatggggctgcaggaatt

SEQ ID NO: 19862 - DNA, 1418 bp, Oryza sativa
ttccacttcccctgtcaccccccgagcttgagcttgcagatcccactcaggaggcttcgatgccattgattgtcttgggtgcgtcgacatagggaactaggggagaggagagatcagagagagaggagaagaatgcctcctaactgacagttgggccctgtattttctttttatacttttcctgactaaattgccatgtcgattgacacgtaggagaaaaccgcttgattttgactcgggtgtaagttgaacagttttgatagttgagggtgttgagtgtctggtttaagagtcaaggggtggattctagacaaaaaaaaaagagctaggggatgtaaaatggacttatcccttaaacactttaacagctacttaccttagaagtccctttgtctgtgatactctcaatatttgatccagtcatcagataaaaaagattcagtatgaggttgctggactttcgtaatatgttgtatgcctcgcaacagtaggacttgaatcttgcatagtattcactaaaatggaagtcacatgcaaagaataaatatctgtgaaatgagcaaaggtgcaaaactatatatacataactaaataaagcatttacctttcagtaccacccatggcctcaaccatttctttgcataatttcatcggtggtgatggtggtgcaaatcgatgtggttgttccccaagcatatacgagaagtcaacatggaaaagtcttccatcgtcttgtaggagaaggttgtcaagatgcctagattagaaaagcagttgttatttattgcttacaaactgcataatgcttgacctccaaaaaaatggaaaaactgcatgttgctttgatgttttgttgtttgtatactccagttgccatataagaccagacaggactgaactacaagatgtgaagtgaaggtgatttattttttttagatataatggatagaaatctagccttttatatctacgagtggatatacagaaccaaaggttataggaatttagattctaagtctcataactgaaaaacaaaaacacaaaatgaaaacattgttatgactagcttccatcttttgctgcctaacgaaccctgccacaccaaaaactgcactgagacgatctagatatgcagttcgaacttgtgcagcccacatccacgttccatccacctttcaccgggtcctatgccaccctgccccaacctcagctggatccaatcgatccagattcatcaatagtgcatttgctcgccgacggcatccagaggaggcagagaagagacccctgcaagtgagattcgggcacggccacctcagatccagcagcatttaggccccagattgagcgccgcgccccatctgtaccagcattgccaaccagcttgtcgttgtcctgtccatggcactcatagcttt

SEQ ID NO: 19863 - DNA, 2463 bp, Oryza sativa
tcccccccaagcttgcttcttgctatggctcatggcggggatcaaatccctggtagcggtgaaacgcttgccagtcagcttgctattgttgcatcatagtgttgaaatttgcgagctgtgcaccaacagactgctgccattcccatgactgtaccacatcatcctccaaggtatgttgcatgttccttgcctgcagttcaagtgtatccgtcccccggatgagttctcccaaatcccttcgagaggagactgagcaatgcatccaagaggatggaggtagaccacttgaactgaaggagcgcgagtatccccagtgcagctcctacggctcatgccaccggctgtcgctggcactctgccaggacgaacctccgccgtcatgttgccggaattgggtccaaccaagggcatgcgcggtcgggtcccaactgtctccatacatctgcactggtggtgaagaggaagacgcctcttggggtgcttttctccccatacgccgtgttatcctgcgtgggacatcacgaggcaactccgcttggagagaaatggttagttctcggcagttatacaaatgaaactccgggttaggtaacggaatttcatttgtatagccgggaaacaaaatcatttggaccatgtttgagtgcgtggccttgaaccagataggcctcatcaacataagagccggtaacaagaatactagatacttgcatattaagcatagtcccaactcttcatgctaaacgagtcaccaaagaaatacactcaacaggaccagacaacttcacattttctaaccattgcttgatcatgggttgaatgggtgaaacgttgattttttttctaaccatggcatacaagaggactagttcgcgctatctggatatcagctctaagaaacgatgtgaaaccaagcaacttatgcaacagcctcaaggtaggattatggatgtcattagttctaggctttctataggatgagagacccgaaatactttgccaaaacatacgcttgttaaaatcaggaaatgcgttcctgaaattaattttgcatgttttgtcaaagcctagatgcaagctaaggtccttccaaaaaaggtgatattccttgcggaataaccggaaagtaacaccatcgcctacctctagcatggcacataaaaactgcacggttcgaaacccgtgcttaaatcctactcaaggcccactacgggtagcgagcaattaacaaatagagacaatgatgaagagaaatgacgcatatacggccggcctgggtcactcatgatgttggtagttcaagtgaattgtcgtagtgtaaggaagattgattggttttctgattactacttggctggcataagaaagaaggcgccccggcaggaattctgtaagcttgacttgcacgcagcgtttgggaatcaaagataaaaaataactctatgggacttgaactattaaggatcgcatcccgtgcatattccacattatagccagcaactgattcagcttccgcttctgggagatcagacggagctcgattagtttctgctagacaaggaataaagaacataaccaatacggggaacaagggaataccggaccatatctgcttttgcgccatgacaatctcactcgaattacagggacctacacatattagtacagtataccggggtccccggccagaaccacacgtgcaagtttccctgcatgtggctcgtccatgcttttatccgaggcgctgcctgcgactctgcatgggagaagagggctgaactgcaaactttcgtgttcacagcattgcattgtctaagggaatagggtgagtaagcagcgcctaccaagctaagctttcgtcgaaaaggcgtcactgcttccttttcggcgcccgccaggaacccggctcgtctacacatgaaatttatcccaacctatagcacgccaaaaagtaatgaagctcagcatctatacctatccttttcagaaggtcgagtcgtatgctcaggtccgagcacaggttcggtctttcagcatatgataggcttgcatttcccggtcgcccacgaggtcgtgaaaggagttgttgtacagcctcggtggaatgtacgcctccttcatggatgcatccgcggaagaaggtgtactcggcttatcgtgtcggcttgtccgtgagcttgatcgtctcttgaatatgcccaaaagtcgtttctttatggctacagcaaagagcaagaatacaagactactcggacgggggttaagcaaatacccgccgataaccttgcaccaaactaaagcaaacttgtatatgcaagtgtctaaactaaatgcagcaaattgtgtgaatttgaggcgagcttgcaaaactttgaataaatttttagagcaaggttttgagagggagtgaaaatgagttaaggtggtgtgacttccttctcccagccgaggggctgcaggaat

SEQ ID NO: 19864 - DNA, 1904 bp, Oryza sativa
tgttgtacagcctcggtggaatgtacgcctccttcatggatgcatccgcggaagaaggtgtactcggcttatcgttccccgggttttggggtttccccgggggggcccttttttgggtttcccccgggttgaaaggcccttattttggaattcgttcctctttgaaaatatgcccaaaagtcgtttctttatggctacagcaaagagcaagaatacaagactactcggacgggggttaagcaaatacccgccgataaccttgcaccaaactaaagcaaacttgtatatgcaagtgtctaaactaaatgcagcaaattgtgtgaatttgaggcgagcttgcaaaactttgaataaatttttagagcaaggttttgagagggagtgaaaatgagttaaggtggtgtgacttccttctcccagccgagctacatatatagtgcatggataacggctaggaatggcatgtgggccccactagccgctaccctgcaaaaatttccagccagccggtgccagccggttcggccgaaccagggattcggccgaacccttggtggacccaaccagccccacctttagctattggattcgaaaaacccggaaatcccccaacaatgtggggtggtgtgctgtgcaaaagttttctaaaaactttattttattttgctcacaaaaatttatttgaagaatttgcctcaaattcagatctcaatgtgtgtttgaaaatccaaacatgctttgatgcaatggaaaataaatatgagataactaccaatttacctgttggcaagggggatgtcgttttaggtccgacgagcacgaccatacctccgacgtatttagctcaatgaggcacccagttccggaggtacaggaacgagtgtcttctccttaacccgccacaccttctttgccttaggtgcgggcagcggcctcttcgtaactgggaacacaggttgaccggcctgtattcccggcttcttggatgccggcttaaggtattgacggttactcgtttcttcctgctccaggaagttcatcatgaaagtattgaggctatccgtccttcggggttttactttgacctccttgtgtttggtccattcttgatctaccccatggagaaatgctccatccttggtctcctcgtggacgatacccattgttattgttcatgagcataacgttctcatgggttttcgggcaatccatcccagagtgaccggtgttgccatagacctcacatgtcgtgtggaagtccagggctttaacggtaccctgcttgttatccttctcattgttgtctagtctcttcataaggagatccaactgggcggcgagcatctccgtcctcttgacggtgtacatgccgcattgacgggtttggagtcgttcctcgctccaacccatatttgagaccatcttctcaattggttggcatctgactattcttgagaagaatgtccctccagcagcagcatccaggtgatcctaggacgagggggttaatcatttgaagaaattctgcaggatgagccactcggccatcccatgatgaggacgggtggtgacgtattcctgcagcctttcccaatcttcaagaatggtttcatccctcgtctgctgaaagctagatattcttccgcgaagagcgttggtcttgcccatcaggaagaatcttgagaggaatgctgttgagcaattgtttcggtattcaccgttgcacggttgatgtagaaccactgttctgctctctcgaggagggagaacggcaacagttggagtctgattcttctgacggtatacgtgctatggctttccacaaattgctgcaaatgagcacttgcatcctccttaggcttgccacagaacgggcaagcctgcgccatcgttaatttagctgg

SEQ ID NO: 19865 - DNA, 1202 bp, Oryza sativa
ttactggatcgagtttgaaattcaattaaccatgcaacggtgattaacactcaattttttgctatgtccaatgtacactgatgtatttaaatagagtattatatcatcggattttctttatttttgaacagttcaaccattttgcctcggcctcatacattatagtgttttgtttttgggtaatataggtgtgggatatgtcatctggtgaagacaacatctatattgttggtggaaccactatatctcttttcaatagcaaaaaccaacttaaaactgggaggctgaggctgagagtatggcccaataaaatggcagatggaagtctctccacctctacccctggcaaggtatataacaagctttattgtctctatatatagatttcagaatgacaaatgtttaactctgtttactaatgttggcatcaggttattttatttatcatgcacttaacacttttttatcaacttaaaggttcccaagaccaagagggaagaaatagagaggttggaaagggttgctaacaagtacatcagagggcagataccacatataggttggctagacaatctcattgcaaatgctgctgataaacttgagaaagagagtgagagaactgaaaatttgcattctagccttattgttgaactatgcagctttgaacacagagttgtctttcaggttgcactatttgactattcagttcttttttgttccaaatttcatggaggtttgctttaataaataatattcttgtctgttatattttaacattatagttaaatatgcatagcgcattggatagcacacatattttgacggaataaattttcattggtattatttgggctgaagaatgctgtattacaaggttttttttttttttttttttttttgcactcaaggatgcattatgtttggtttacttttcaaccttgctctattgctcgtcctggattttgttattgagctagtgcctttattgttcaaaactattgtcactatattaataattctcttgctattctcgattcttgtgtagagccaggatgtttttctttatcttgcatgtcatcatgtcataaaattttctagagtattttactgtcttactattattctttcatgcaggaatatggagcaaagttgcatacatcagtcccttcatccttagtggatatatctaagaataaacttgt

SEQ ID NO: 19866 - DNA, 1353 bp, Oryza sativa
  unsure (1)..(1353): unsure at all n locations
tgtagatatatggatttgatgtggataaactggatatcagatagtccttcagtaaaaggaacaaaaactcaagattgatgagcccacttaagtcttccagccagtataggtcggcagcttgcttatcacaacatccaccatgcagtgcctaaagttcagcataatccaacaggtgctacctcttttttgatgcctccctagccaaaatggtgtatatatggaagctaggcatgtaacgtctggtttccattatgtgcagaaattccatgcacaagtctttgtatccatccctgagcaatccatcgatgagcactgcctgtacaacgtcatcaggattccaggtcctcatgagcatgttttcaaaagtaatccgggcttcctttcttctgtgtaattggcataaagcacatattaattctttataaccattaaggtggacctcacaaccttgagtagacatatgcttaaatacgcccatagcaaggtcaacgttccggactctcaagagtgagcataataaggaattatatgcctcctgatctgggcataaaccctgactaatcatgcttcctaacaactcatttgcctcaaaccatctcccagctgtacttaagtttgaaactagtgcattctgcacctgaacagataggccaggatccagttctgctaacttagcagacataactgacacagcatcttgatcagtggtttgataaccaaaactgcagtttggaactacatctggcaaggcagcaagtctctggtcagctaataggtactcatttttcaagcctttaatcaaaacaccatatgtccacaatgttggttggcacccagctttatcattcttccaagaaaattaaacgcatgctcaactttccctgacatgatatatgcttcaatcatcttaacataggtaatttcatctggaatgagcccgtgccgctccaattctgcaaacaaattctcagcttcctctaccttgccttcttgacctagagcgcggataagagaactgtaggtaagaagattaggcaaacaaccctgctcaatcatcttgttgaacatttcaagagccaaagatgtggaaccatttttgcacagcccatcaatcattgcagtgtaagtgactacatttggaaatatcccttcttcaatcatcactttacatagttcctctgcaccagaaaaatataattncctgccttttttaaaggtttcaaaggaaacccccaattggggaaaaattttaaaaaggggnaaaaaaacccccgggtttttgctgtatgtctgaacatttggtctgcaaccacttctcttcatatgttccaacaatgatgttgcagtgtccag

SEQ ID NO: 19867 - DNA, 7897 bp, Oryza sativa
tgttgaacatttcaagagccaaagatgtggaaccatttttgcacagcccatcaatcattgcagtgtaagtgactacatttggaaatatcccttcttcaatcatcactttacatagttcctctgcaccagaaaaattattctgcttagtcagaccatgaataagaacgttgtatgtctgaacatttggtctgcaaccacttctcttcatatgttccaacaatgatgttgcagtgtccagtttctcatccttgcagtacccatctatcagtgcagtataggtaacttcattggggcataagccatcatccaccatttcattgaacaatccaaaagccgactccattttgcttatcttgcaaaaaccacatatcagttcggtgtaagaccactcgtcaggtttacatccaccatccctcataaggtctagaatcctaagagcgcttgtagtatttcctgagtcacaatatcctttgatgatggtgttgtatgttacaagattagctgaatgtcctctctgcaacatattgttcatcactaacattgccttcttaggatcaccaagaatgcaatagcccttaatcatttcattgtatgtcacgatgtttggtgaacaaccatttctgcccatcaaatttaaaacaacaaacgcatatttgattctcctgttctcaaccagaatattaatcaaagcattatatgtcactgtattagggaacacaccatctctagacatcctatgaaacagtccaatggccactttcaataaacctgacacacaaagaccactgataagtgccgtgtatgtatacacatttggttcacaccccttatttttcatatcaacgaacaacctccaggcatcttcatagcaccccatgtcacataatgcaataatagggccagtacaagtgtgcgctgtcggcagaataccatgcaatatcatctccctaatcaaatcaaatgcctcgttaaccctcccactatcacataacccattgattaatgtcgagtatgttactgtgtttggctcacagccctccttagccatctggttgaaaacctgcaatgctgaatccaagtcatgtttcctacagtgaccaagaatcatggacgtgtaggtgaacgtgtcagggctcatctcggattcgaacaccttcttcatgattgtctctgcatccgctacattgccatccttgcacaatgcattgattacagcattgtagataagtaaatttggctgtacaccctcgctcagcatgcggtggtacctgtccatgacggcagcagtcattccaagcctgctcagatggatcaacagggcgctatatgcgaagagacccatcctgaggccgctttggctgagcatatccaggaaactcatcgtcctcgccatcgcctccttgctgtggcaggacttgatcaggtggatgcgcgcgcgccccgcggcagcataccggcgcgcgtccacaaggcgcctggcgagcgcggcgaacgtgcccggccggtacgagtgcgagcgctcccgcgacaagaaaagcaggaggtcgaggcctcgcgcggcgatcgggtgcgactccgccacggaagcggcctgcgcgggcgtgagggaggcgagcgcggcgctccggtgccagtccggccgcgccagcgcccgatgggccctcctgatcagggcgtcgtcgcccggatcctgattcctccgcccgctaacgccccccgggtccacgggaagtggccgctcagatcctaggccccgagacgaggaggagaaggcggagacgaggaggacgagcgacctcaggcgggcggcgcgcgggggaggccagagggggcggagacgagagggaggcagcgactggaggggcgctgccatggggaggatgaggaggtggcaggtggcggcgacgaatggcggaggtagaggccgcgcgcgccgtttcgccgccgctccgctcggcgccccgccgccgccgctcccctccgccgcgccgccgtcgtccacggcttccgccccgacgaggagaggtggaagctggggcggcgtcgactgaagacctcgccggcctcgcccgttccccgctcccgctccgctgagagccccgccgccgtcgccgccccgtcgccgtcctcgatccgccgccgccgccctcaatccgccctcgatccgccgccgccgccgtcgccgctcgggccgtcccggcgctcgcgcctcgcgccgcccgaccgctccgtcgccgctcggaccgccggccgccgcccctcacccctggcccgagtggggaaagagagagagagagagcggagaggaagatgagaaaggaaagagagagagagaggagagaggggaggatgaaaaggtaaaagggttaatttgatgagtaaatttgattggtggcacagaaattgtcctagtaccaaaaaaaaatggcacagaaaatttatgctttcatttgaaagcacagctccgttaaaatcttctggtttatagcactcccgtctcctttagatataatggtggaactagggatgaaattgccctcactgtcccacaccagaatacaccgatttcctttccctcgttcccttctctctgtgtgctctctacggcagcggtggcgcctgctcgtgcggcatgaccacttcgtcggctacccgaatatcggccatccacgaataactgcggcggcacgggtgcggcgtccaagcccagcagcgcggagctcgtcccagcgggcactgtctcccatggagtcctcgctgacgccgatgtcgctgtgacgcccaaaatagcaagaacaaaagaaatgcgaaaacaacagtatcgttggttggctttgagcaagcaacagcagtagcagccagccaagccgtgcagtccccatccaacaacaaagtcgtcatcgtcgtggtgcttggcctcctcgagcacccaggcgtaggtgtcaacagctagtactacagaaggcagtgaggaggttcggatccaaaagcatggcgaacgggctccgacgatagcggcgcggtcaaacgagctcgcgaccgtagagacatggttgcgcgggctagatggcagccatggcaacgtggccacacgggatagacggtgccgtggcgtacgggctcgccgccatgccgtcgcgcttggagagaagcgaacaaggcagcagaaggaagatggtgaaacaaaggtccttttagtctttctgcattccgattcctttgactaatggctaaactgacagaagtgctgtaaaatcaaaaaaaattgacggagctgtgctttcaaacggaggcataaattttttgtgttattttctggcactgggtgaatagctgggctatcaatcgaatttcctctattttgattcatgccattgcaaatgtggctattcagaaaaatgtcattataattcgactattcgtaaccgtgccacttcaattttacaaaattaaagccatgccactgtcatcaccttttccatccatcctcttcctttccgtcttcttcctcacgccgctcgggttcgctggcactagtgctagccattactacagatgggcacggagctgatccacgcgcgcgacgccggcagtgcggttaccgttgcgcacgacgtcgatggatgggttcacgccgccgccgcagctacctccatgtcctcgtcatctgcgctcaccttcgacggccacggcgaggagcacaacgcaattcgtggatggacatggacatggacgcccacgccaccgagctgcaactaatcggccatggcctgacggcgacgacctcctcctcctcctgcttcagctccggcggttccggcgacaacggcatggtgattgtgacaaccaccccgaagagcgctgccgcctctggttcgcagaagcgggcacgcacgccgtcgtcgccgtcgcagggagcagagctgctcgagtactccaagaagcagcgcgccaacaacatggagacacagagctcaactgccaaggtactacattacattgcatccatgtcgacgatctatgaacaaaatgttgcagtgttcatcagttggagatgcaagttctccgacgaattgaattgaactgaacgcataattgtgtttgttttggcatatgcagagccagcacgagaggaaggagatgcgtgagaggattagcgagaggaaggagacacgtgtgcccattctactcgacctctagctctgcgccgccaccgccgccgaccgcgccgactccgacgaggcctacgtgtttgaggccaagacggtgcgccacatggagctgctcgtgtagattggaggtggcctcgccaccggccttcggcgtgggccgccgcggcgttgctcgtgacggccagatggtgcggcggtggcgacgacgaccacgagctcctagccctcatcgatgcctccaaggtcagtagtaatggctagcactagcgccggcgagcccgagcgacgtgaggaagaagacagaaaggaagaggatggatggaaaaaggggacggcagtggcatagttataatttcgtaaaattggagtgacactgttacgaatagacgaattgtaatggcatttttctgaatagtcacatttgcaatggcatagatcaaattaacccaaagtaaaaaaggtggtacgggtgggtccaaccacaagcaacttgctacacttgcaatgtgggtgtagtgtcttttggagttcccaagcctacatggcagctgtggcattgcaatttgctaggacgcattgctaccgcccttagggtcggagagacggtggcacccaggtgcgcccggctgatgcttgccacttgccatttgcaagaggtgtaggtcggtcaagtgcagtatctatgatccgttaccatcggacggtcattttttccatctttctcctcccttttgtttttcccccaacttctcttctccattgaccaccaagcgtttgttactagggtttgtaaatttgtcgaaaatcactcaaactttgaacctatatccaactcaaatataaattttgataggattcaatataattctgaacgaaactcataaattcatgtagttcaatggggtcgtattctaaactgttcaaacttgtaaacccaacgtgagccgccaagagttgtgacaccatctcccttgtacactgatgtcatgaggcgataaggtccaaaatggagagaggtggggtagcaaaccatggtgtattgagaggtgagggacaaggtgattttgtggtcagcaaggggtagttgtcgtccaagctacggcgatgtatggtcgtacgttggtggtggtggaacattgtatcgccgcaagggatacaattgaggtcgagggtaccgtggtgcagtgagaggtggtggacatggtgattttgtggtcaacaaggggtggttgtcgcccaatctacagcgatgtatggtcgtacgatggcggtgatggaacgttgcatcaccgtagggaatacgatggaggccgatggtaccgtggttgccatgctgaatgaagaataggtggtggctttagagcgaactggcatggagaaaatactagccaacacttcccggcgacgggcggagtgtcgtccgcgatcggtgtggcagggacaaaatgagcggcgaaggttgtcgtgcctgtggcactgacaagtgccatgaacgacgttattcccatgacttctactacgacatggctttcggcaggggttgatagtgctactactttgcttgccttcgttggtgggaggacatgtaaatgtctatgttgtaactggttttatagtactgattgttgccggcttcacgctttgtggtatgttgagtgttgttggcttctctagcgtgctaggaccgacggtagtgggcagcgtgggagtcgacatggcgggtttgaaaaacgggatggtagacaggagtagcatggttgttagcttccagggtgtggatggtggcatggcaggcaaggaggcattggtaagtaggaaatttgctgtaggggctactgcctgcagtgagagtgctgttgtggcccaaccgtggcctttggtgatggcacatgatggttcccccagtgtgtcaacaggaaggattaaagtccttgcaagcagggcaacgtccacaagatatccgggagtattgcaaggaagtgttgtgttccaaggtggtggagtgatggctcaagaacaaatggcaggtatgggtcgagagattggcattggtagcggcggacgacgagaaaaaaaataaggtgtggcagaaaaacaacataacactaggcaaaatggtctagatttgcaatgtgttcccaaacactgctaaaagttttcacaaaaattgttttgatgtaaaaaatcatattgatctgtgtcgtggttcaaaaattcctgaacaaaaattccaaatttttggagatttttaagaaggatgccaatttagcaaaatctatccatatttgtccaaattatgtccacatttcaaattatttcagaaagatagaaattgccaaatcgatatattgaaccttaatccaggttgtgtcatgtaacaagctaacaaccggttcttatatatagtcagctaattatgagtgaaaaataaacgatatatgtggttgcttatgtaactaagtacgaacaaccaacgcttatatagtcagctaattacaaggagagtgaaaacaagataattggtgaagaagttaatcatgtactccgccactagctaacaaaatcaatgtatggcgagcgccatatctcgccgtaccagaagctccgccactagacactagagatatgggtggtaaggctaaatgttggtattgttatcattgcactacacaaagggccatacccttagcgagtactagttatcgtgcacgtgcaaggcacgttttgtttatatatagagagagagataacaataatgacctaaaaaatagtgcactacaaaaaaatcttgacttctcaaggtaaaaatagaatttcatacaccatagtaaaatgataatttggattattcctataaaatcttttctggtgaatcacactaccttctagccaacaaaggtacatatatattcacaatgtaaaaagtagccattcccatattccacatcaaattatagtatagaaatgaaatccatggggaaaaaaaggcattagcattcttgtcaagattgactgcaaaaaacatcaagatttgaatacaaaagacatgctaaaaactctcttggtaaaaaaagagatgaaatccttacatgatataatctaatttttcgaacattgctcgcaaatcagttgatatattcattgtttaacaaagttgcaaatgcatggcattactttctagtaagtaaaaggaattgcaatttcatgtactacaagatattaagaaattagaggaagctaaagaatgtaaagatgaatggtctctcacaaccagctattttttgttcaagtaaacaggtttggtctatcttcagcaaacaatgaaggtcttccaaatctgtataaagaaggccaaaaaacatgaagaaaataataccctgcgatggcaggaaaaaaatttaatttggttgtcatagttctaatttcctaagaaatctatacatttcagttaaccctattctgatagcagatgagtggctggggtgacatattgatataagtttcctggacaatgatggcaacttggcagggtcatgtatacaaatactcacaactccaataggagttgcacttagggcactctttaattatttgataaaaaggggtaatttagagtccaaatttcttttaacttcatattggtattgcattcaactaagcacaccttccctccttatcaaagtagaaataaaaaattctggaactggataaatatttctagaaca

SEQ ID NO: 19868 - DNA, 2215 bp, Oryza sativa
  unsure (1)..(2215): unsure at all n locations
gctaacgtgctcataggtcgaaacactatcttgccctgagaattttgtgaaatctggaactttgaaccggttaggcaatggaaccctctcgaaccactcagggtttggatgccgatacaagtttctagcgtcctttggcttgagcccaaattgctctctcatcacatctgcaatcatattggcccacggtctctgttgaggcaccccctgcacttgctgtggcacaggctcgaactggttgtactgaggagcgaaccgaggctgagccgaccctccttgctgatactgaacttgcggcgatggaggctgatactgataattcaaattgcccccttgataattctgaaagtttggctgtatattgtgcaccaaatgtttgggaataacttgtggtatcaccgatcgatctggttgcacattatgaaccaaatgctctggaacaacttgatttgcaatgtgctgccttggctgattatcgggcgtcctaaacccaaccgatgcatttagcaaaccttgctgttgaatcggctgagcaacttgctgcctcggtggtgtctgctgaatcgactgctgttgaactgggtcagcagtaggccgagttggtaagaacatagctgcaacttgctcttgagttagccgattcacattttgtccactatgctgtggctgctctctcaccaacaaccgaggattaattaattgccctggtgctgatcatggtgcagcaggtgcaggagccgacactggtgctgtcggttgaactgatggcgcattgggagcaattggctgagcagtcggctgattatttgtgatcaagggccgataatttgggaaaacacctcctggtaaataaactggtcctgtagcctgatactcagctattgagccatcaaccatcgacttcacgatgtttgacaaagtattgactaacactccagattgattaatcaaagcatgtcgcacagtatagtcaatccgatcttggaagttgttaaactgtagctgcgccaggttgccatctgggctaagatcctcaccttgcactccctgagaaccatcacccttatcacctgagccatctgcagcacttttatcacctgattgagccgtaccatctgagacctgttgtacctccccatccttggaagaacttgtcgcagcaacatcagcatctaatttcatcttgtacctctgaacaattgttccttggcgagtctccatgaatgagttcaagaattggttctgtgtttgctacatcatcgcctcaagatccttcttttgttcaggtgtcaatttgtccaaaatgatgagcatgatgttgctctcatgaacttcagacccaccaaacttcgggatcctagttttggaagaaacttctttgccggccaaagacggcgatgctggtggtttctcagccatgagagaatactgttgcggttctgacttctaatggtcccaccaggcgtgccaaaagcgtgttgatgtaaaaacacgaggtctgggagatctgcttaactccagtgcaggtccaaaacttgcctttgggtgtgtgagcgtgccagttgatttgatcctgcgatcaannagngnccnagacaaagaaaccgcggttaaatctataaacgatagccgatcggctagatgccgatgacatatcattgatctttgagccgatgtcatatatgcatcgatcggcagacattaataagtaagaaagaactaaatctacttgatcagctgttgatattaacaatatataatccttatgtcgatatatacttaaatcaagtgattgggataaattggtcgccatgccgagacagtataaatcacttagaccgaaatatatattaacaacaagattatatatgttcataacatagccgatcagatagatctagcatgtatcggctaatactccgataccgttctatattgagatattaaagcaagtagaatataccaaacagaaagcttaatatacttaaatacgacgagatcttaacataaagggtggatttaacatgtcaatcaagcacataagataaatatagtcaaatcagataagatcggctgaaaccccgatgctaccctaattggcaaccaaaggcaggctagagattgagattctaatcacgactcatacgatcaaactcaacagatgcatctataagtatgaaaaaaaagacaatatctagacaatcaagccgttgga

SEQ ID NO: 19869 - DNA, 7012 bp, Oryza sativa
gggtggctatgcaccgagattgatttgaacgtgtgttagttttattacatggggctcggggtctatttatacccgagattacaaaatatgtccatatcgggcatgactcttatctctaacaaactctaagatactataagtctttgcggcagacatttgcccaaacatatctctaaagaaattacataaaatatcctaattaataaatacaattgccttctcaggactccatccatgcgtggcaatcatcatgaagcactatacaattgccttctcaggactccatccatgcgtggaaatcatcatgaagcacgtcaacctaacccgacaacgtatgccgtgtcatattatcggattcggctcaatcggctaaccctgtccaactcgaactctgccgatcctagtcgcagccgattcggacatcagccgattctgctctattcctcgagcgattccatcttaatttccacctcggtctcaactccatctccaatacttagattaccaaatttggtcgttaacaacaatatagtacaatagagcctcttataatttagctcaagcttggaagtgtgtgttgaagtgagtgagatgatgtctttatataggggtaggtatgacggttggcgaaggggaaatgtccgaagtgccccgcaaccgccatcagggcgtgatctgggacgtccatgccaaaacctgggatcaacggcgatcaccagcaggggcggagccagagcaaaatcaaggggggttcctacagctttcttttgtatatagccgcatatctagttggaacactattatggagtactaaatactcgtgtgtctaataactgtaaacatcattatctaattgatagcaatatacaacaagaaaatacataaatatttagaaattgtgtaccttaacaaagaaaccaactaataaatatacacgaagttactaaagtgtcaagcacagacacaaagtcactattcacaaaacatatcagtagatcgtataaaacctattcaagacaagatgaaaattttcaagattgaagaaataaggttgagaagtgaggggaaatctcacttgctctcaattggaggttgtcggtggattgggagagaccagaggcccagagccaaggagagctaatcttggatgaaacgtcggcaccaagttgccgtccaacagctcagaggctccaactcaagcaacaatgtatcatccctgttagacaactagacaagatcacacaatgcaacgattaaacttcaaagggcagaagctcgggctgctcggctcgccctagctaaaaccagtcatcacgggcagagcggcaaaatcaggagtgccgagcagcaggagcacggtgaccttggggcttggggcacagtgtcaattggcgtcggcgatttgaatcaggctgccgccggaacggaggcagccggcgagattgcgagagcgaggaggcgcgtacagcgaacttgattatcctgaagacgaaacgatgtgttgtgctaatgcccgcttgaccgcgtcgtgactcccatgattgtgaggcttccagggcaagcctcgagcagcgcaaaggactccatcgaatgggcctgcctgtgtttgtgtctgctgcttgcctacttgggccttttccattctgggctggacaagaagggggttccttggtttgggctgagggggttcctacatggtgaaactataggggtaacaagtgatttccaagtttgggccgggttcctgggaatccccctcagcttattgggctccgcccctgatcactagggttcggccgaacctgggttgggccctcctggtctggccttcggttggtggacttcctgggccttcctgtttccatttctcggagttttgggttcatttactgatgtttcaatgaagttcacaacccctccttgtatggatacataattctcctcactttagtctgattttcctcccaacttcaaggtttatcatctgcatacaaatatacaccaacacttgtggaatatgtgagattaagcacctattactatgttggatgttttattgtctcgactttatgcagatgttggaggtatgagaatggcatttaacaaccgccaacaaaacccctgtcacgtcccaaaacgactctaaaatatatcccttaaatgatgcctagaataattaaaatccatgtgaaagcctccaacaattaaaatgtgcaaagttaaaagtcaaataaggcttagaggatttttgtaaatttcctaaaagcctaaaatgcgtaaataaattttagtggaattttcagagcacaaataataattattaagaaataaacaaagttaaaatgattttataaaaagaaaaaccctaaaagtcccccttccctcccttgggccggcccggcccatctccctcctcctctctctcctctccccgctgcccactcggcctctccccgcgcgcgcgccgctgacgggcgggcccgcccgccaccctcgctgacgggtggggcccacccgtcatccccttcctcccgccgctcccgccgcctcccccgcgccctagcgccgccgccgctgcaaatcctgccgcctcctgccgtccccgcgtgcaataaagtggggggaataactccccgtgatcccctctccctttccccccatttttccctctctctctctcgcgttcaaacgggcggatttgcccacgcaaatctcgccggcgccattgatggcggccggacctcccgcgccggtttccttccactccggccgctctctcccccttccaaccctatttaaaccctccccgcacctcctccgtccgtttccgcctctcgccgcccttcctcctcgccggattcgagctcgcgacgttgctctctctctccgccgtcgccgccgagctccggtccgccgtcatcgtcgccccggaccgcctcccacctcggcgccgcctccttcgggttcgccgcatcctcgccaaccttgtccacctctctgtttcggtcgccgaccgccggaacgccgtcgaccccgtcgacccgagccgcgccgccgcctccctccgctccggccgcctcctccgtcgccgccatcgccccggggtgagccgtggaccatcgcctcctttcccccttcccacccctctctcggccgccgctccgccgcgccggtggtcgccggcggcgaccatcgggtcgcgagcacgccgtctcccgccgaccgtgccggcatggccgccctcgggcgcgccgagtggctaccgcgtggggcccggccgtcagccgcccgcgccctcgggtgcggctgacgcgtgggacccacggcgccggccggtgtgagcccgggtgcgcccggtccaccgtggaccgtgaggctgccgcgtgggccccactctcgtggaccccgtccgcgcgccccctcccctcggctgacgcaataaaccctttttaaattaaaatttaaatgaagaaattcgcaaatattcatttaaagagcatataaacttcaaatggccataacttggccatttgaactcggaattggaccgttcaagtctctaatttttccttaagaagtcaagaacccatttttgtgctttgttcctgcttgttatatggagtttattagagtaaacgcccttttattttccattggtcgtgtagacgttgcagcttcggaagatccgctcttcgtggaggttgaagccgacgtttgggaaagtgagcaaggcaagtcacatcatccttgaacatattgaatcccagtttataaaattattttgatttaaattattgcattatcgctttatttaaattcccgcgttatcactgttttatctagccatgcctatttacctttgttatgaccttattattgttattgttaatatttccttgttcaccctagaataaacaaaaccccaactagtagacactctactcatggtaccactagtatgattttaggtagatgcttcgctggttaattaggcaacattaggtggttttacaactctagactttgggaatattctcatcacctggacaatatggaatggttggattattgtggaattggattcacacctccccctctattcaaaaccctcaaaatggttttaggctgggcttggggtgcatggttttgatagtagcacctcggccatataaggaccggtcttcgggcctctgttgcaaagcactaccgtacttccacatgtctagtgggtaaggcttagtttgtggctcagtctggttataaacaaaagtacacggatggagatggatgaagtcgggggtcgatggacatctctagggcaaatgaaggctacatgagctgcggcccggtagtcgagatgtcatggcacagggccggtgtcctgctactaggggctcagtcctgcctacctgtcccagaggttccggccgtaggtggggttgggtcggtactcttgtctatggctaggatgggttggaaactatgtcacgtcttccgtccgtataccgtggtggtatgtggcacgtggttacacgtgaggaagatgtgtcttgtgggtaaagatgtacacctctgatcagagtataatctattcgaatagccgcgccctcggttatgggcatgcctagcaatgtacccaagttagtgttttaattcttaaaacctgcttaacaactaaaatgtggaatagttggcctgggttggcttgggacgagctgggacccagggtcgggttgccagttcggtctgaatcatcgtaggccttgggttaaggcaggttcgtgtgggttcacggccttgtttaataatattgtatagctctagaatcgtgtttacaaaatagcgttgagcaactaagtgtcttttaatgctgtttactgcaaaccctaaccctttatattataacccccttgtactcccttgcatttattctgcacttgtgggtgtgtcttgttgagtacggtggttgtactcagtcttgctcaatttttcccaaacccagaagaggagcccctggaagatgaaggctttggtgtctagctcgtgcctgccgtcaaacgcctatggtcgtcgccctagtcttccgctgtttttcgtttgtcttcttgtgtgctgggtcttcgccgcccatgtaataaattaattaattacgcttccgcttgttaaactctgaattgtatcaacttttggtgtaccttgcctcctgggacaaggaataatgcacgcacgtaaggaacgcccgttgggttatttccggtcgtgacaaccccccacacttagccctttgctcgtccctgagtaaaggttagtgtagaataaatttcttcaagatatgaatcaagcatataaatcattcacaaccatacctgcacctgtgaactttatcagtggctatcttaccatcttgagtaattgataaatggaacgatcttgattctagtccttcttgcttctctgttacactcatgggatttttttataaattttcgcaaataagctcttctcctattgacttcctctcttgtctctcaagaatgtatattttctttttggatccttaccaaagcaaaatgtgccataattcattcctattctaaggttaatatgtggagcttggtagggataaactgtgacatacctgcatcatatatattgcaaagccaaaaatatggactcaagaagatcatcatactcctagatcaagggtctttatttatggtggaaaatgaaaaagtaaaatatgttgtggaatggtggaataaagaaatgattatccctttttcctatactttctctccaaattggttctcttggcatgattgtggaaggggcatggctacatttttctttccaactttgctcaatgttttgagagcaagctttatttccttctcttttttttagccatgcctttccctccttttatcattttctttttgccaagaacttttcaaggagaagaaagtataattcaatgtaggagtttatttgaatggatatttttgtggaaagccaactttcagtgtagaagcttggcttaattttatatgtggaaatgaaagtggaattgaccacttgatcatgagagtatgaaggatatctaacatgagtcacacgaatttgacaaagctcaatataatgtcaagcagtcatatgcatgataaggttcatcaatgatatacttgcatatggtcttggtaggcataagatgaagtcaattagaggattgagcttttaaaacaattttattttgaaaacaaattcccaagagtcataacaagagttgcaagaattcctttcatctcgaatcatctctcatatagcaattacttagatgcataaggttccctaaacatggatggttgttcacaaacacaagttcagctgggaataatgaatatacaagatcaatcacatgaagaatttcatgagttggaagttttatctttcatttatgcttgaaccaattgttttctgaattttcagctctagtactataccatggtggagatatacagataaaagacgtgctcacctgcttacctgtaaaaattgggagaggttggggccagtcttggttcggccgaaccactctggtgcccaatccctttgcaattttctgcagagttgagtgctttcaggtgttcagagatttcatcaattttcagagcatatgcacgtcagaagctgggatatctccccacacttattcaaaacctgaatctttattaaacataaaacaaaaacaaaccttggcaaacattggggttaacaccaatgtgccacattattcatagcaagtgcttacatgattggaaaataaaaaccaagcacctactaccattttattcatgggaaaggactaattagcataatacttattttcctttcccagctctacgaatgcacgcttgatttaagcgcacaaaccgagactaagggtgtcgaaattgtttctaatttcagcaagctctacccctagctccgcgttgcaatccctaagctctatgtt

SEQ ID NO: 19870 - DNA, 1585 bp, Oryza sativa
gaatgtactcgcagttgcgagacttagggaaaggtcccatgaagtctatacctcacacatcaaatatctcgatttgcaaattgtatgtgaggggcattgcatcgcgagcagtgattcctccttgcctctggtagcttgtgcatcttctgacgaattcttttgagtcttcgtacattgttggtcagaagaaaccactttgccaaatcttggcctgggtgcggaatgcaccgtattggccaccgtagggtgaggcgtggcatcgttctatgatcttaagtccttcatcagttggcacacatcttcgtagtaagccatcagagcagacccgatataggtatggctcatctcatatatgacggcgactttcatatttcagttttcgtttattttcccctggtggtatgtacttggataccatgtagtttactatgttagcataccacgggttagagtcacgaaccgtcatcagcatgtcgtctctcatgaaatcatttatcggttgttcctgcatgttagtgatctgcagtctagacaaatgatctgctacagaattttctactccctttttatctttagtttctaagtcaaattcttggagcagcaaaatccatcttaagaggcgtggtttagcatctttcttagtgagcaggtatttcaaagcggcatgatcagtataaattatcaccttggctcccactaagtaagatctaaacttaccgatagcaaaaacaaccgcgagcagctctttttcagtagttgcataattcaactgagctccggttagagttttgctagcctaacagattgcatgatgctttttatccttggtttggcccaagactgcaccaacggcgaaatcacttgcatcacacataatctcgaagggcagagtccaatcaggaggttgaatgattggagcaaaaacgagtacctttttgagaatttcgaaagattttaggcacgcatcatcgaactcaaagggcgcatccttggctagtaaattgctcagcagcctagcgattgtagagaagtctttgatgaaccttctataaaagccggcatgtcccaagaagctgcagattcctttgatgttcacaggaggaggaaactgatctataacatctattttagcacgatcaacttcaattcctcgttcggacactcgatgcccaagaactatcccttcacggactatgaagtggcacttttcccaattaagcaccaggtccttttcttggcatcgttgtaagactttgtctaaattttgcagacaatgaccgaaagtctttccatagaccgagaagtcatccatgaagacttccatgatgtcttcgatcatgtccaagaaaatatacatcatacatctttggaaagatgcaggagcgttacatagtccgaaggacatcctacggtatgcataggtgccatacgaacatgtgaacatagtcttgctttggtcctccggatggataggaatttgatgatacccggaatacccatcaatgaaatagaagaaggaatgatttgccagccgttccaacatttcatcaatgaagggtagcgggaaatgatccttttttgtagc

SEQ ID NO: 19871 - DNA, 15032 bp, Oryza sativa
agtaccacggagtaacatataatatagtaggggtttaagtgctgttctatctaattattgccactctgttcagaccgctttgtccctccgcgggtgctgcttggtacaggcgtacagcgctcatgacaagtagtacactactacttacttcctccgtttcacaatataagtcattctaacattttccattttatgataatgttaatgaatctaaactagctgggtggcccgcgcaattacgcggctagcacccatataaaattatatatttttaatatgattttacttcaaatttattaaatagttatctcattgtcttaagatttttaaagactacaccttattatcctcgtgtttctaatttttttagtttttaaaagtcacaacagttgctaccccttacttctttcatattattctttatttgcttacccgatctaccactattttctattcattctccttagaatctttaaaaaatggatctaaaaacttataggttttagagtctattgtcctgtttggcatctttttttataatttctagaagtcccatcaaacacttccattatacttatctatgaccgtccaccgcatcgtctctttattgtcattgctattttaaaaatcgaacataattatcgtttaggtttatattttttactttctataagttccgccaaaacgtcagcgactttatcactgtactcctctacggctcacccgctgccgcccttctttattgtcattgagattttaaaatcaaacaggattatcgttggggtttatttttttactttttagaaacccgaacctttaaaaattggagtttattgtcttgttgggtttcatttttttaataatttttagaaatcccgtcaaacgctgccactatactcctctacgacccgtctgctgcatactctttattgtcattaggattgtaaaagtcgaacataactatcgttggaattcatttttttttactttctagaaggcccaccaatcattggcaacttggccattgtactcctatacgacctgctcgctgcctctcatttttattataatcgagattttaaaaatcaaatatgattatcatttggtttatttttttactttctagaagtcccgccaaccgccttgaccgattgcttcacgacctgcctgttgtatttctttttagtcgtcattaggattctatttgcggtagtttttagatgttctatcaaccgccaccactatgctcctctataggcatgttacttaattaatctcgtcatgtgtttcaaatggtcttttcttttagtaatctttatttttttatcaccaattttagttatttataaattgtattcctagctaatatcttatttttctttttctaatttcagaatttattttatttttcgtattgtgtgcttttgatatttttatttttattttcaatttcagttgttttaaaattgtatttctactttaactctctttttaatttgcctaatttcagattatatattatttttattttgaattttagttaatctactattaggttcttatatgtactcttattttaatattgtttatatttaattccgaattttaattaattttaaattatattcctacttgaactcttcttttcttttcttttttctaattttgatttttatttttttattctgaattttaattaatctcgtattgggttcttgtatggactcttcttttaatattccttatttttaattctgaatttcagctatttttaaattgtattcctacttagacttttttttttttgctaattttggattttattttatttttctttcaaattttgattaatctcatattgtcttcctatatggaaacttctttcaatattacttatttttaattccgaatttcagctatttttaaattgtatttctacttagactctccttttctttttttctttttctctaattaatgtgggaatttctagcccccacagcgaacgtgatgcctcctttcaaagctgttttaataatatattagataaatatatatgtctatattcattaacatcgatatgaatatgaaaaaatattagaatgacttacattgtgaaacggagggagtagtatatagcacgggatattgcgttatcctttgatgcagcgaactcattccattgtcattcagttcagctagtgcgaatcatccatccattcatccaccctcaccgtcctggtgttaatttcagctcagtactccctccgtcccaaaataaaggcaaaccctagatttccgtgtctaactttgactgtccgtcttatataattttttttataattcatattttcattgttgttagatgataaaacatgattaatattttatgcgtgacttgtctttttagtttttttcatagtttttttaaataagacggacggtcaaacattggacacggaaactagggtttatcttttttttctatttttgggacggagtagttcactcacatttaccttccgtgccgatctgcactgctgcctctttcatcagtgatatgatactatacgaaatcgatcggacgagacgccgggacagcagcagctggggggagtatataggaaccaaaaaaacggcgctgtacattttggtcggttcgccaatcaagccgcgccgatggcacggcaagttgcagggccgccaaaaaacctcacgtacagattcctgcgtgcgattgggcccttccggaaagaagaaataacgggaaaaaaaaagcgcttgaccgatcgcgcgcgcgtgaccgcgcgggccactccgtacgtgccgacctcggtgatttgggaataaagtgcgtgtgcggtgggcactgcgtagcccaccacctctcgactctcatgccgacctcgccagggggcccggatcctctgctcgaaaccatgtggatttccctcgtccgcagatgcgatctgatcatcatcatcgatctcccgtgcgcaccgatgtgatgcgaccgtgcaacagcacccaacacatggaagtatatccggcttatccgcacatgcatgtggattttcgcttttttggatatttggatatacatacctttggttcgtcctttttttcctaagtacttgtcgatgcatagtacacttcacagcttatgcttctcaagttttgcgctttttatacaaacaaagcgatttgcaggcatggataagatatgtgtggagcatgtgcttacaaaaaggtgttaggatcagtatctcgcattcacagttcgttagttccatctcaaccagctcgatcactgttatctaacacccggggctatttagtttttctattgaaggcaaaaaaaaaaaaaagagagagagagtttgctgcagtccattacatgtgccgaggcttcatttgaaatcgagaatgactttatacccctctaaaatcttactttatactccctccgtttcgaaatgtttaacgccgttgactttttagcatacgtttgaccattcgtcttatcaaaaaatttaagtaattattaattcttttcctatcatttgattcattgttaaatatatttttatgtaggcttataattttacatatttcataaaagtttttggataagacgaacggtcaaacatgtgctaaaaaagtcaacggtgtcaaatatttcgaaacggagggagtacacaatttgacaggtatatgtgagggttcccccccccccatttttaagattatttttgtaagtcttcaagaaaacaaattaaagtttttgggacaatttcatcccaaatgaaataagatagaggcgtatatgtagagagattattttattacatagagtagttgatagaaaacatgatgaagcagttggtaaataaaaaaaaactatacttggtgctcacttttaaaaggagtatataaaaactcactgatcggtgcagtatgattttttactgcatcctgaacctgacattatatattgcaccaacggttacaaactgcgtgatacaaacacaattaactggcaagctacatatgccccgcaattaacctagaggctagagagcctgcctacttattcgaacgctacaatcggatacaaaattacatatataaaaaccataatttaattgactgcaaaagtataagaatcagtaaattcttgccgtgtagaaactggtttgagcatgactatcccgttcagtttagggcttgagcccgctataggtgccgccccgccgggacgcggagggaccccttctcccagacgctgtagtccttgccgtgcaccgtctgatggaaatccgacggcaccgcgttgcccacgtcgtacctcgtcccgatcttcaccatgaccttctcgtcgacgacggcgacgtatgcgtcggcgtcggcgacgacgatccggagcttgctcccggcgttgatgccgttcctctccctgatcgccgccagcgcggttatctcctgcttcaggttccagtcgaacatgtggtcgtagaactgccacaagaagcgttcatcaggacacgtgtacggtggaggttaatcaggacatggtatataatactataatgcatggtttgcttacgatgcaggggactccggggtgggtgaggatgtaggcgtagccctgcatgaccttgtcggaggggaacggccaaagcttctgcgtcgagccggtgtcgtggttgtcgacgaacgtgacggccttctctggcagccacccgatcatgccggcggccttgccgttgccgtcgcgcagccgccacagctcgccctggacgcccgcctgcaggaggcccttggtggtgaagtcgaacgtcatcgccggcccgccgacggcgttcacccagttcaccagctcctgccggccctggtcctggttggccgccggcttgccgtcgccgttgtagctcagcgagttccatatctcggcgacgacgaagcccggcttgcagctctcgacgtacatcttagcgatgtccgtggagtatcccttggcgaagtcgaggcgccagccgtcgaagccgacgtcggacttgagccagttgagccagtcggtgagctcccgctggacgcgcgggttgaggtggtcgatgtcgggcgccgcgccgaacccctcgccggtgtcgcggtggcccgtgccgtcggagtactgcgtgtcgtcgctgcagatcatgccggggccccagtcgaggcggtcgtcgggcgtcccgccctcgaacacgcagtacacgccgcgggcgtccttcttctcggcgcaccggtggttgatcacgacgtcggcgacgcactggacgcccttcccgtggaacgccgcgatcagcgacttgagctccgccgccgtgccgtacttggacgcgtccaggtcgtagagacgccccggcatgtacccctgcggcgccacggagtgcgacggcggcggcagccagacgtgggtgaccccggccttggcgatgtcgtcgacttggcctttcaacatgttgtaccagccaccctgctgcttccacgactcccagttgaaaccctgcatgatgcatgttataagtaggtaagtgatcaatcgatcacacataaatatctcaaaattctaatgtgtttcttcagcaaaagtcttcacagaaagtgatgggtagtagagtactacgtacctggaagaggacctgtgcttgacccgagttacaggtcaagctgcagagcaccacgaggagcagcaaacacaagctgctggtgttcttcatatctgtgtaagctgaaaccgtgttcgatagtgagttgctgctaaccactactgatcgatctcttgtagatgatggatgatcgatgtgttcgtggcgaatgacctcgacgtcggggggcatatatagaacaccgggggcacggtcaccgtggcaggggaatgagaatgatcaggagagacgaccacaataaatggcgtggatatggataaggcaataaagcatggccacgtaggcgccgcgtcggccgcgtcggggcccggtctccaaggcgacgggatgcggcggcgtgatcgcgacgactgcctgaggcgggcgccggctacctcctcctccatccatcgccggcttggataaggcgagcatttctctgaactttcatcttcagagttcagacaaaaaagacagtgctacgtgttctagcaggctgatcgtatataatagggttgcagttagcctcttgactggccgcttgatctcccgtcatgtatatgcacatatggctcgtcctccttcaattcctgacatggcaattctatccacatctcggtgagaccctaatccggacctcgaaatgcgagaatcagataatgctggaatcaatgagtccgagttgttcatcgtcatcagccaatggagcaagccggaaagagagactactgttctactaagactagccatctcatctattgtagttgatgaatttatgtcagtatctatgaatgttacgagtatcagtatgtcataagtcataaccaagttcattacaaattccatatcaaagccgccatgagcaatccaaatggataaggtagaagtaggtgtatgtttgctgatgaatactccgtacacaggcacatatatgaatgtcatgaccaagtttatcacaaacttcatctccgccggacgcccgcagcgagcatttaagtcatcgagatgctaacttaggagctgctgatttctagcacgaactagaacgttcctgattgcgcacacctatatcttcttttcagaacggattactgattgatgattgcctatggagcagtggagtagctagcacaggtggttgaagatcgacttgacgctctcagcaaaggggactcagcagaataaacttccctcctactttcccacaagagcaaacaaggcactagcataggaataagtcctcaactcatgggtctggttaaaatgcaccctcaaccgcaaaaaccgggtataaccaatcgtctaactcataaaaccgttgcaaatcaactcccccagcggttttggaggcggtttcgtcgtacgtagcacttacgtgacgggttgacttggtcttcatcccatgtggcatcgacatgacgcttacgtggcacaaaataaaaacaaacctaaataaaaaaaattgggcccacgtgtcagttactcagctcctccctcttccctctttatactcagtgtcgatcgagatggagagagcagcggggcggcgagagctcagcgggagcagcaggatggcgggagcggcgggaactcggccgagcagcgggagcagcaggacggcgggttgacggcgatgtcgacggtgttggtgtcggcagccgggagctcggtggagcagtgaagcagcgggagctcgacagagtggctcggcatgagcagtaggacggcgggagcagaggtaaggaagcctcgccaccgcctcctctcctccctccccgctgccgcctcctatcctccctccctgccgccaccctcctggtgatcctcgctagcctcgaaatccgcgtcgtcgtcgggcaggggtcgaggtggaggcgaagaacgaggtcggcattggggaaggagagtggaggagaggaggcggcggcggcgacggcgtgccgagccggcgaagaggagagggtgctgagccagtgtggggagtcgtcccctttgcctagatcgacgtcgccgcgcttgcgcgtcgcttgcagtggagcacacatccgccggcctcgctgacctagccgtcgaactcggaagcctccgccattgtcctcgccctccgttgtgctctgtctctctaccgccaccatccactgccatttgccggtcgctgccatcccccatccacctgagaaagagaaaaggtagctaacacgtgggcctgaagtttatttttattattttactcactgacatttgggtcctatttaaggtttgttttcattttagtgccacgtaagcaccacatcgatgccacatggtataaagatcaagtcaacacaccacataagtgccacgaaactgcctccgaaaccacctggggagtcaatttgctacggttttggaagttggaggatgagttatacccagttttctcccgggagagattgtccccagcgcagcaccccaggtagccatcgccgctaacgagtccagggtcgggaagtccaacagtcgcaacagtgacggcggccgcatcgcgattggccagtgcttgcgcctctcttagtggtggtcgcgacggcgacgttccggttccgtctgtgttggacttgcgacctccgcgccgcacccgtcggcctctgcgaccttacttcgccgttgcgcctgtcccctctgcggtgccaatcccctctggtctccgtggctgcctgcgaggaaggagaggagaaataaataatgtaaccgatatgtgggcctcacatgggccccacctaaattttcttattgtgagtgccatgtagatgtcacgtgggatgcagacctagtcaagatgccatgtggatgcaacataagctaaagctaggctcaatagtgccttgggagtatatttgcattggtttttatgataaggacctgattttacgattgagggatgcgattcgactaggggcaagagatcagggacataaaatatacttattcctacttcctccgtttcacaatgtaagactttctagcattgcccacattcatttagatactaatgaatctagacatatatatgtgtttagattcattaacatctatatgtatatgtgggcaatgttagaaagtcttacattgtgaaatggagggagtaattaacaatctacttacttcattcaagcacgagacaacaatctgttgctggtcaattgatcgttaggcgtccctcaaggcttatcgattcgctacgaatggagcttcccgaaacttgagtgggcgtcaagggcctgacatccgggaaacaggctacagaagcccaaaagttagcaggccgagacaatgactgtttctctatatttgacaggccgatttgtgtggacccatttactggacaattggatagtgggaaaacttggtttattcgttgggctggaagcctcgaacggtgtggtgacttgcatacggcccaagatcattatgaatggtgggttatgttgggccagaacagggtgatgactgatgacggtgcaacgtgcggactattttagtggaataagtttagttcatatccctcaatttatcgccgagtccaaattggttcctaaaccgaaatatcacccatgcgggccccacatgttaatgcctagcactttcctcttcctcctctcttctcctttctcctgtgcccgtcctcccactccactggcctccgtcacctctccacttgtggctccgctctcaccaccttgtgcgcattggtcggtcaccggtgcaaacattgtgtcattccttctccgtgcctttaccgttgagccgccccacggtgcgcccctctgaaaccagctctccatgcctatggccccgttgacgttgtccattgcttgtaggagcctggactcctcgaccgagagctgtatcaagttctagacaaatgaggaaaagagaggggagatggaagatgggagggaaagaggagaagataaggggggagggaggagaaaggaaatgataggaactgacatacgcgggctgcgtgggtcccatgctgaatcagcttgtcacgtcggttaaaaccggtcacaatactgtctaggtcctctagtgaaccgttttgaaaattgggggaccaattatatacagtatttcggtttagggataaatttcagactcgctgataaattaagggaccagtgaacttattccttgggttataaaggaaaggtgccccattatagttaggctaaatcgttgctgtgaagaacattcgtcccattatctttggaccgctaaatgagagacaacgagcgtgcgctttgggccggaatatgcagtgtcattcttttacttacggcctaatattgctgggccaaacgggatcaagttgagctttcaatccaccacggtatccacaccgctaaaagcgggagtaaaaaactgaagtcaactgacaagatcttgcaagtctttcttgaggatcgaaacgaacagtagctagttaattccattcatcctacatttctgcaggattaacagggtacattccgcttacttatttccgaagaacgctagttataacgaagcgtacatcgatcgaagctcgctcgtacacatctcgcagcaaaattgcatgattcatagctagagccacgtacgtatatatattatctagggttgcaaagcaccatgcaactcgatcgctatagctaaagctaatagtgctttctaccggcaggaaccctgaggccttccttctcccagacgcagtagtcgttgccgtgcgccacgacatggaagtcggaggggatgatcccgccggcgtcgtacctcggcccgagcttggtgatcaccttgccgtcgatcatggcgacgtagatgtccccctcggccttgaggatgtccagcgtgctctccgcatggatcccgttccttgaccggatttcagccagcgtcgcgatctcgtgctgcaggttccagtcgaacacatggtcgtagaactgcatacacacgtacacatgcaccagcaatgagctcaccaatatgaacgaatttgatgagaaagatttcggtggtgatacttacgatgcatgggatgccagggtgagtgaggatgtaggcgtagccctgcatgaccttgtcggaagggaacggccagagcgactgggtcgagccggtgtcgtggttgtcgacgaaggttacggcctgatcgggcatccaccccatgaggccgggcgccttgccgttgccgtcgtggagcctccacagctcgccctgcacggcggcctggaggatgcccttggtggtgaagtcgaacgccgtcgccggcttgccgacgccctccacccagttcaccagctcctgcctgtccgcgtcctggttggtcgacggcttgccgtcgccgttgtagatgagcgagctccagatctcgccgacgacgaacgtcgggttggtgttgtcgacgtagatcctcgccagcggcgcggagtagcccttggcgaagtcgaggcgccagccgtcgaagccgaggtcggtcctgagccagttgagccagtcggtgagctcccgctggacacgcgggttgaggtggtcgatgtcgggcgcggcgccgaacccggcgccggtgtcgcggtggccgcggccgttggagtactgcgtgtcgtcgctgcagatcatgtcggggccccagtcgaggcggccgtcgggcgtgccgccctcgaacacgcagtacacgccgcggctgtccttgtagtcggcgcagcggtggttgatgacgatgtcggcgaggcactcgacgttcttgtcgtggaatgcctcgatcagcgacttgagctccgcctccgtgccgtacttggacgcgtccaggtcgtagagccgccccggcatgtaaccctgcggcgagacagagtgcgacggcggcgggagccagacgtgggtggcgcccgtgctggcgatctcctccaccttctcgtgcagaaagttgtaccacccgccttgcttcctccacgactcccagttaaacccctgcacgtacggcaaaaacacccaaacgcaacccatggtcaaatcaagcttcctgactgcggcgcgtacattatattgccgtgcaagattattattatcaagtattaacaaactttcaccaaggcgtcagtaaattaaactacctggaagagaacttgggcttgtgctaagctggacgccaggcagagcacagcaaaaacgacacaacacagggtgacatggtgcttgcccatggctacagagcaatgcaaatgcagtctcaactctgcttcttctccaaactaacttgtttcctaatggctggccaagtagccaaccttcgcaaagagaagaagagctgcctgctgtactctgcttctctgctcttgcattgcctgaactggcctctatttatagtgtccaagaggatcaggtcggaggttacatggccgaggcgaattaaacgcgaacaatcaatgctgttgcaattcacggataagcaacatggataaaggtggttatttctccaacggaaacgagtagtctggaccccggtgtccggtgatggagtgccgccttgagccgtgcagctacttcaggccctgctcgagtcaccgccgcgccgatcgaggcgcgcgcgagctctctcgactcgtcgtccggtctctctcggtgatcgatcaccgatcacgcatgacggaaacggcgatacgttgataagaggcaagccgcaagcggaggagccgcacatcagttggttgttcgaacaggtaccgggcctctaccggcgtcgcgtcatcggtgtgacggatcaagcgccggcagggaaactttcggtttggaaaggagatcggtgcaacggacatatattttgcatttacttttttttattgaaaaaagagaggagatcctctcccatttcatcgacgaaatgccaatatacacttttacagagtttatatgacctgcagagcagacaactcccctgacagaaaacaaaggccataagcaccaactccgtcaccaatccaccataatcctgcaactgcaagcaacttagtctaggactatttgcaaagaaaacagcaaacgtcgattgacttggtacaatcacagacatgcaatggaaagctcaataactccagatttgcaccacgtcaagcgcattgcttgtgaccttcatccatatctttgaattatactaactttatgttctaatgtatgacgttgactttttgtttaacgtttgatcattcgttttattaaaaaaaatgcaattattatttcttttattgtgacttgattcatcatcaaatgttctttaagtatgacataaatattttcatatttatacaaaaaatttgaataaaacaaatgatcaaacgttggtcaaaatacggagggagtataatttaacggcaacctctcattagcagcgccaaccccagctgcagtattcttcgctagtcctccgatatctgcataatggatcaggaattgatccagtaaaaaccttcatgtattagttcagtaggatctttaattctcttgtttttgaagtaagctgtatttctggccttccacacagtccagatgactatagccccatgccaaccacagcaattttcttattttcttttactaaagctatgtaaccgtcctttgcgtttacttttgatcttgagaaggaactatactaatttgatggaacgttgttgatttacataaggtgaactatggtttgtcacattttatgccgttggattgaaaccataattagatatgcacatctgaaagctaattctagtgctaagggagtcaacattaaaagctactaacaagataatccccctccccctttctatcaacggactgtacccgactatgatatttgtaatgtattgaggatgttgataccatggcatatgcaagattgtggtaaaatagacgggagacatatttttgtataggttcaggctccctttgacgggtaatagcgctactcctgttggtcgaagcagatgccattataaaatcaatctctcacaagtacaatggggaggagtctgacagtatagcggcataaaagtcaagcatgtggttgacggctagcaatcatcagattcctcgattgagtactctgctagcaatcgtcagattcctcaatttggaactcgacgagattataggtagctatagatctctcttgacttttgtggcgcttgttggattgtgtcatggcttatgtggctctatattgtcttatcccctctccttccggatgtctcgtgtttatacccttggatatcccattgtacaagtagaagtactgtagaactagagagataagtatggatgcaatccgaatagaccttgtagagtccaagtagaatgttgtttatcttttcttatctagaacttcttcattatcttctcacgaatttggccatacttcttcattatgagactgatttcttataggacttgctatatggtaggtcccaccaagcttaatacacaagtattatatattccatatttgagacagagactgtttcatattataaggtgtttgtctttttataagatctttagtttgaccaagttcgtagaaaaaatatctacgacaccaaattagttttactaaatattacattgaatataaacatatttctactttgataaaaattttgctctattttctataaatttggtcaattttttttgaaaaataacatataaaaaagtgaaaacgtcgtgtaatacgaagatatctactacaccgatcaagtgcagtactaaggatttcaaaaaaacaaattgacagggattttcacaaattgtataagatggagaccaaatatatactactccctcaaatgtttgacgccgttgactttttcaaacatgtttgaccatccgtcttattcaaaaaattttgtgaaatatgtaaaactatatgtatatataaaagttcatttaacaatgaaccaaatgatagaaaaagaattaataattacttaaattttttgaataagacgaacggtcgaacatatttaaaaaaattaacggcgtcaaacatttagggatgtagagagtaatacagtagtgacttagaaataaaactgggccacatattagaacattctctctgggccggccgggcacagcccacatgttcttcgtgccgttcctaggctaaaggcccgtgtgaactggcacgacatgggccgcttaattagacggaccaaaaaggccgtgcgtgcctttaccaggcccgcatgtgtaccgtgctcttgcgcacaaatgcggccgtgtacaattaaggccgttccgtctttatctcgaaggcagctgaagcacaattaaagcctt

SEQ ID NO: 19872 - DNA, 10994 bp, Oryza sativa
tgtacatgcaagtatatttaacaatgaatcaaatgatatgaaaagaataaataattacttaaattttttgaataagacgaatggtcaaacacgtactaaaaaaattaacggtgtcaaatattttgaaacggagggagtacattggaatctgtagcatgggcgatggcggtctccttcttccttctccgtccaacacgtgggtaatctctctgcgcagatcagagctgtggactatggtaccatgtcagcatctacatgactgatccatcaattttatgcagagatttggagggtagatgtgtgatgtgtccccccttttagaaagagctagcttagtgtacatatataaaacatacccacgacggataaacggtcactggcccttgctagctttgcgcctccggattcttgcaatggcaaccgggcctccgaatcctaaagcctaatgagacgagatgttttacactggtcgtgcaaaccagtgctacacgttgctccatgaacagtacaaacaaaggcttttagttttggctgcatggacaagcatcatcagccacaattagtagctgtgatcatgtgcgagctgctagattgatggatgtagctagcaaaaggaagggaaaaagggagctgaaagaagaaggtagctctgaatgcaaagtctgcatcctgcaaaggcacgagagggactggattgttggaatttggaaagggagccctttccggatccttgcacgccgctttcttggattcgggattcctcggtacgtggccgtctgcagtctactcgtcttcactttcctttgcctgctcgtcgcctttcatggtgtcaactgtcagcgcagatgcgcaatggggcagcagcaagctcctgctatcctcgcaatggataggcacagcgatatgattgtcaatatatccggttggttggctattctcggttgcagcctacaggctagtagtcgtcctgtcgttttgctctcgatatcgatcgagcactcacattgtaagatcttgcagttcgtcaaacgatttttgataaaatgatccttctttaatttccggcagtgtgccacttacttggagtaaccatgagcctcactacggtactctctactcataatagaaactaatctaaattattgatcttatttgatttaagggttcagatctatttatactactatcctagttagcggtaataaaaacgtgaagagatattattataaaaatactgggtgcaaaatggtatcatcattatttaacattgattaaacccctttccttttttttttgctttttttatggatatgagttatgccagcacgatggatgaccacatatcgatctagcctggaaaaaaacataaataacaaagttaaccataatagatatattggtaaattaccgatttattcttaataacgaatggttcaaactatttctactgattaagtagagagtaccggagcattactcgagcaacaataggctacatacattactaatatccactgacatatatttattttaacttgtaaaagtctaatttaaacttacatgtttaagtgatatatattgatctatcttattaattttttcatcaattatttgaatgaaataaaaaaagagatatattctcttaagagatgaaaaaacatttccctatccactggtctatttgtttctaccactttggattagctacaacctacagaattttttttctcgaacgcgcaaaaggattgcacgtcaatatattggaagataagaatattcgttacacaaatagtcggtctggcttgctccaacctacggaagaataacattttccttttattgggtcctaggacccatcattgtacatgaaccttttctccttgctttacaaatatgttgagggtttatttctttggccttgtcaagggttttgctaaaaaattatttatcagcaaaatcattcgatcaggtttcaatgaagtcctcagtattcaccagttgagaaggtggcagtgaccggacatattgaaattcaagatttaggatcaccatcgagcttatcggtgatgccctacatttagagtggggctaaatgatgaagggaagagaaaacactaacaatgtcgtagtcgtgggagacaggtatcaggtgttgagaagaggttaggtgttacaagggatagcaaggtgaagaatataacatggtgtaacacccaacatgtaacttggcgtgggggtctagggatgaaagcccatggccttacatattttttcaccatggtatggtatatggcatttgggcattctcaccagtgattttgttgtacaccagtgagtgggggttggagaccgagggagagaaggaactggagaaagctaggattaacatcttatggattactccagcttagaaatttggatgtttttattataaaacctgtcgacacatgtgtatagatgatggattgatcccttagcagtatcctcctaccatacgctctggattaagacgtgtaattgcagggcgtgggcatggtccttcctgcctttggcagtattgcagccacagtgtgcatcgtcgcccagatttttattccctcataattgagctcgatctggttgatcttgggacctggctatatatgatgtgctttcatcggtaggctttcttcacgctcaagtagttttttttttcttttttgctcttttgaaaactgttcggcatttatcatcaatgggttgtcctcatttggatggtgaacgatgggcagctcgtgccattgggaacagtcgtgtatgaataccagccatttgagctgcaattaataaattggcctcttacatgctttttttttaataatgaaaatcatcagcctcgtgcatgaattagccacgttcctgataaattgatcgtataaaatcgtgaccttcactccacagtgctggcttaccacataccagatcatccattcccggcccaatgacatggttcaatcatcactagaggaaaataaacccgacgagagatggagttcgatcactatttaagaggaaacaaaaagcatgcttggatgagtatgctgcggttgtgcatctgctaccctcggctagctgcgacctttatttcccaaccgtaccaatgcaaggggtttacaatctcgacgaatttcaaatggagttttctagtaaatttagaaagctctattaattttgttgaaacaatcaatatactgcaactttcactaagcattttagataatacaaccacatcatttaattttatcagaaagttagaatattatctctgacaagtttgggcccaccaattataaagacataaaataattatttttttaaaaaaattgggcccatatgtcatataaatatattggataaaactacagtttatataaaacttttgctattaatttgtagtctgtaaaatatttagttaaagttatagcaaaatgtacaatagttttgacccaaataattatggttttatgaaatttcaaacatcttgaattgactcaaaatgtgtgtctcgaatagctttatttaaaatttatccaattaaaaaaattaacatctcaatgaggattaaaattcgcttagcaaattgaaattgcaaaccctggcccaactggctcaaacactgcaacccaaataaaccataactatcccatctattttgggggggggaaaattcttttaatccctcgaaggtgtctcctccttttttacatatcatctgaatatataattataaaaaaattatgaaaaaactgataatatctattaatatgtgaaacaccacgctacaaatatgtaaatttaaatatgactttaataaggtgtaaaaacatataatttaaatatacacatagtagttgagttttatcttttttttttaacaaactctaaagatcgaataggaacatgtatatttagaggatgatatatcaaatgtgtaatctatcatgtcaatgttttctaagtttttcataactatttaattgggttgtgtttagatccaaagtttggatccaaaattcagtctttttctatcacatcaacctgtcatacacacataacttttcagtcacatcatctccaattttaaccaaaatacaaactttacgctggactaaacacagccttcatgtgtaagaaactatgtacgcccaatgtaaaatccatcactcctatctagtaaactgtttgtatttagtttgctttaagcttaacgcttacccacgtgccagctagaaatctagagtagggcctttttaaggtggccctttaaccaaactaaccaaactactccctccatctacttttgatagtaatattttatcttagcataatggctaaggataagtaattctatttatcatccatttaaatatgctactagttattcctcgtaaataagcaattcatttaaataagcaattcttaatggctatgtagccaatcttgtgtggaagatgaagagtcacacattaaatccgagaaagtcattaagagtataggtggttggattgaaatatgcctatcaaaagtaatttttttatatttaaaaatatgtctatcaaaaatagatgaagatagtgtttgagattgatctggacctaaaggttaaccaaacaattttaattccattaaaaagaaaatggaagactaaagtgattaaacaaatcggatgatggctatgcatggaagcaaacctgacggtccaacatcccactaaaatcaaatgtaaaacatggcgatataattttttttagcaatgtcgtcgtttagaagttgaaaccaaaaaatgctatgtaacttatcccgttcagacggaataacgcctatgagatatcaccttatacctcgaataggatgatacctagctataagatatcgctcaacacctaataggtatcgtgataactaaatattaggtgataccttcgagttaccatcccatccgaacgggattctataaaaacagactcaactttttttttccgtgtaggaagacgggacgtgagacggccgcctttcgcgcctcgccagaattgccgaacgtgcggccaccgcacaaaacgtgaggcgagccgcgcccccgtccgtcggcgtcggccggcgttcgtacgccactacgcctccctcccttgtcatcgtgtcccgtgtctgcggttcgcagtaacccaaataaaacaaacagagatgagccggaaggcgcgcgaagtggctcatcgcgatcatcgatcgcggcaagttgcgcccgcggacgacgcgtgcggtgccggaggccggagcgtacggttccatccaccatccatcatccatcccacccccgcccttcgaccgcgtcatatgttgccgtttttttccccctcaccgtctcgatcttgtgggtatttttcgttttcagcaaacccccgatcagtacatgaaagtgaaaccgcacagtggcacgagataatactagtatgttcttacaacaatgttaccatggcaagtaccgccgaaacaacccagtacacccatcgttttaaggccacgaaggtgatatggaaaaatctgtgcgcgcgacagttccagagcagcctaaaaccgccgatcgagagcgtcgaaaacgtagtcacgcgacgccgacgtgagtacggctgcccgtcgagccattcagcaactcggctacaacttgcaaggattggattaatttgtcatgctacagcaacatccatgtcaaccaaaacggctgcactgatcgagccacgggagcttcccgaagaggagggtagctgaggacagagctaaagcccaaggcagcgacgtgtttggatcgactgaatgtcgaggcaaatcgcttgcatgtggtctgagattcctgagaatcttggtgtatctcgagccgtacacaaagccggagattaattaaccttgctgtctggttagcaagcttgatcagtctcgttgtaattggatttggcaatgaagaacaacccgtcagttcctttggtccaacagggttggtggacctgtaaaaggattcgaatctgagaacgccacttaaagttgctacagatctgaggtctcctgccattcctgattcatctgactgtgctcatagcgaaattttccaaccaaagaaatatataaaacttgaacaacgtataagtcatttacaggatgtgatttagttagataagatcttttccttttcaaaaaagaacaataattcatagcattaacaaactctaatttgagaagtaccaaatatatatgatggtgaagccgtgagtacgcgactatatatatcaatctagtgcatacaattacacaccaaggatttaccgttgatctcaatttcgtcgagcttatgcgtggtgtgcgcacgtacacgtacgttgaagaaaaaaatgcaacttgaattagcccataattttgggtttggtagctagaaccgtagaagtcatcagatactcatctgttgtgataaacccaacagcccaaatgtcattaagcgcttaattacgtaaagtgtaatgagaagatcataaagacaatgccatatcagtgcactacagtacgtatcatcaactaggattaatagcagggacagcgacatttctggagcaaaccgattccatcagcctttgctagccaggtcacgcatcatcagagacggcattcaaacaaatttctggcagttcaaggtactgtagatggatacgtgacatggccgcctcgtctggtgcgtgtgtggtggccgccgcgacacgttacgtacgcgcgcacgcgcggcggcggcgtcgtcccgttctgatcggtggtggtctcgtcactgctgtactcctccatgcctaactcaaccaacaaaccgaccacaaaatgctgccaactctctagctccccgatggcggcttggtttggtgacaaatcagacgaagcagctagtagtaaccggtgccctgtacaattgatcgatgggatactttttgtttcgatgtcaagctagcccatcaggtagccgaggccacaccgccacagcattctctcctcatgatcattgtgctgtaccatacgaaaaatgtcgatcgtacacacgcgacagcggcaacacgcaatccttgcgcgcgctcaggtgtgggcttggttggtttattactcaattcagccataccaaaacacatcagcaacgctaataaactaacaacccatcgcttggctgatgggaggaaaaagcgaaaggatatatttgcaaatgaaaaataatttgcgaataaaaattttatatacatgttcttaactatccaaaagcaaagattaaaaaataaactataattaaaaaaatcctaaaatcaactcttaactcaactttaaatttaaggttaaaaatttaaattttggctgataaacctaaatataaaagaaaagataagaccttaaatatcagtttgttgctagaaaaggcatcgccaaaattttgacaacacattaaaaaccaaagtaaagcacactccatacctagtggtggccaggaagctcgtggctcgttagctcgctcggctcgtgacaggcttggctcggctcgtttgaatttcctaatgagccgagctggcattttagctcgttagagataacgagccagctcgagctggctcgagaactttaacgagccaggacccatcagacatcctcaaagacccagcccaacaacaggaaggcccaaggcagcccaactgcccaacagcacggccgcatctctgtgagactgtgactctgtgcaaaaccctagactcctcctctcctcagtcctcagtcctcacttcctcagtcctcacgacctcacccaggcggccagccgccaccaggccaccgatctgcgccgcgatccgccggccgccgcacggctgcggtgccggcgcccggctgctgcgctcggcacgtccgcacacccagtcgccactcgcccctcgccgacgcaccgcatccgccacacttccccagccgccgcacttccccagccactagggccgcgggccgccgccaccaccgcacttccctcccacttggcgccacacggagcaaggcacaggctgcgaatacgatggaggaagaacgagaggtgcaagagcaagtgcctcaggttgcaagtgtggaatcctagaggaaacacgcgagcgcgagctgacgccggcctcgtcgaaagtagcggcgggagcaggagctgcaggaattgtgatttgtgatttgtgaaattgtgttcaatcatggactgtggttatgtacttgtgaagttgtgatttgtgaaattatgttcaatcatggacttctgttacattacttatctcatctgtgactatgaatgggaatatgtgattgtgaatttgtgatttgttgctttgatattttcatatttgcatttgatttgcgtactcaaacaacctattaacctatataataatatatactgccatcttgatgtcttgttagttaggctcgcgagcctaacgagctagctcgagctttcaaacgagccgagccgagctgggtttctagctcgttaggataacgagccgagccgagccgagctggctcgctatccagccctatccataccacatcgctctcatgcacgcaggccacacgtatacatccatgggcacattgccccataatacacgtatgttaagaaaaaatttggcaatgcctaaatttatagttttattaattgatgttgagtaaagctagatattaaatgcagagttcgttttagtatacgacttctgcttttgtttctatgcaactgcattttagtataactataccagtcaatttgcatcgctataatctgaagagataatcgtgcttttgacctattctgaaggctaactagtattaacttcacccctatttttccaactttacatatttgacactgcttttgaaaaaacaaacttgttgcctaactctcctctgtccacatcaccaggagtgttattagaaaatgcactttagagaatgaacaagatcaaaatgcctttgggaaaatgtgctaaacctaggttagttttgtcacatatttttgtcaatttccatcgtatattttatagggaaaagtgaaataactaggtcaaataaacaaaaactttgagaaatcaaagataaaatgagcaagggtattaaatggtattttctccctaagttaatgtttaccttcatgaaatatggtcaagcctgatcttcgtttttgaaaagaaagttcatataagcaaacttccaaaaaaaaaatgaccaaatcgatagttaggctttaaaacggggttaaaaacacaattacctctaacctgaaccgtctatgattaaatgttctctctcagtttttctaatttgttgcagtaaacagatttctcttattaacatagtagtttgcttattggcttatcactctctaccagaatttaaattttagaactcaattttagagctttctcattatattctattcttaatcttaacttttaaaccgctaaaacccaaatagcataaattatttttagttactttattctttttacaatttatcagttatatcttaaccaataagcatagtaaacaagatatgcttgtttcatattataagtcgtttgactttttttaagtctaacttctttaaatttgactaagtttatagaaaaatatagtaatatttttagtacaaaacaaacatattatcaatatatattcaatgttaaatttaataaaattaatttagtatggtagatgctgctaagttttttatataaacttagtcaaacataaataattttgaataaaagaaagtcaaacaatttataatatgaaatagagggagggagtacattccttataatggtgcgtttattatttttcataagatttgaatttgtattaattggcatcgatccaatcgtccaaataacattgatgtctgaatggtcacggtgagtcgggtgagacggtcgacgacatagggctggacaacgatcgatgctctgctctagctgcatgctgtgtcgggaaacaccgaaacagtatggccagcaaaactcgctacttccagctcgctccaaatatgcgaacattagccgcccgccggcccgccagcgcaaacattgctctccccgccgtccaaccgagggagcacgcgcgccggagatcgaacgattcgtcgctaatttgcgccgttgcgcctgtcgaaaggcagagtgcaaatcagagaccggttgctcctgaaagttatcaagattttcgtttgcaatctgcagcgtgaccggccgaccaggacggcagcgagattagtatgctgttaattaataatccaccggaaaataatagctgattgaacagtaaatagctcacacatgcatgggccgattttacaccaccctgaaatggccgatcagtttcgcatgggcttagttatctgctcgacgctcagagattgcacgcatgctcgtaccgtcacccttggctcgatgcgagttttgtttcatgcgagagctatgtttgaaacttggaaaccacaatccattatcgataagtactatctaaaagaaatcattatagatttgcttacgtatcctgagaccaactgaactaaaattattcctttttcagataactgagaaattaaactaaaattgttctttatattacaaagatttaaaaatatgtttagactagatacggtctttgaggtgcaaaatatactacctccgatctaaaataacttcaatttttggtttatgtactcgatgtttgaccatctaccttattgtagcgcccgttccgtcgtggcgcatagcggaaaatttatttcctaaaaaccctaattgcgaaatttgtttcttcgcttgtcgtctagtgtccgtgccatctcaagatctcaaatccccaatctatcgtcgagttcaattccgaatccaaatccttccaaatcaaattcctccgca

SEQ ID NO: 19873 - DNA, 53136 bp, Oryza sativa
caagcccccctttccctccccctttttctacctttttccctctcgccggcgtcacctcctgtcgccgttttggccgctagccggagcgccagctcgccggcttgaccgtccaatgtcggttcccctctcccaaaccgacattgccgcccatttaaacccaaggcgccctcccatcgatttccccctcccgtttcgctcgccgcctccgcgccattgccgccctctgtttcgccgtcgccgttcgtcgttgcgcatgtcggaggagccggcacgagcaaggacgcggaaggggacttcggccgcgccctctccttcctcttccccagccctaggccggagagattactcccacgccgtcagcctctcgtcacagcgcccctcctcacctcggtgatgtctccctccgttcttcctcctcgctccatctcccccccttagttttcggtagtagctcgagtagcctccccgtagctagccggcgccgccccgaccgttgccgtcgctcgtagtttactcgccgccgtcgccgcccgagctccgtagcacccgctcgtcgccagcctcgctcggcgtagctccgctcaatccgacgctagcatcggattcccgtggccgcgtagatgctctcaccgccgggaatcggcccctcgtgacctcgtcgccgtttcccttctccctccccgtcggttgccgccgccgcgattcgccaccgtcgagcttcctccggcgaatccgagccgttggctcgtctcccctcgtctcgtgcaaccacccggtgtgctcgctttcgcctgtatcgccgtggttcgctccgccgctcgccgctgtcgtccgccgtccgttccggccggcgtcgtcgtctacctcccgccagcccacgttgcagccacgtaggcgccacgtcggcgccagctcagccaagaccgggtcgagccgaccccggtcagtccctccccgtgcgcgcgttccaccgcgagccgtgaggctgcgcgtgggcccgccgtatcctttccaccgcgaaccgcgcacatgcaccgcgtccctcccccgcccgcacgcgtgcgccgtgtgctccctccgcacggtgagccgagccgctgacaagcgggtcccacccgggaccgcgcgcggtgaacccggtccaccggccctctctctcctcccctcccgcgcgcgcgcacttgggccgtcatgggccggccggcccatttagctcggccggtccgctccttttcccttgggccgcgccctagctgcccaaggaaaagtctataatccctccctctttccttttcttttctttttcttttccaaaaaggatttaattaaatccttttcctttagaccaaaaatccaataatcttagaaattcaatatcttcccaaccgtaaatccgtttgactccgttcaacttccaaaattcctcaaatctcgagatctatctaatggcacgcttagaggtcattaatagggctttatttttgccgtttgttgagttgtcccgtttcgcgtgtagtttcggagcccgaagacctgcagtgcgaggattgcgaggatcaagctccagatctcgagcaaggcaagccacctttgaatatcttgagcctatatttgaaatttaattatgttgcttgaaaaatattatgcacttataggatcgcacttaatctgttgtcccgtctgcaaggcagattggcggacctacctaatttgttgcattgatcctcccttgttaattgttatatcatgttcccttgtaaccatctagttgcgtctcgatattcatgcaccctgtacgagtatcgacggacgccttcaaacttaaaatctgaaaaacaatttgggtaaaacttgggttttacaaaagacttggaaaacccgacacctgggtcggtgcttgcgaactaaatgaatttccaaaaccgcggaccggggaacgtaccgggtgtacggtttcccgctcttgcacttaaggaccgtttccttggaatttcatccgaacataagacaagtacgaccacatgggtggaatgggacacccttggctgagtaactagcttatcaggggagccttgatgccgagagacatgtggattcgccggggtggtgtcggggaggacccctgggcttcctggcacagtatggtctgggacctaacctgttgttggtctgggacccctctcgtcggcatatggtaaacatgtgtgggctttcgaaatgccttgtcatgaaagcttggaggtctcccgtcgtggctgatccccacgggctgggtgatccgggttagtaatgtcgtgtgggtaaagtgtaccccctctgcagaggttaacaaactgttcgaacagccgtgcccacggtcatgggcgaatgtgaggtgattcctagcgtagttttgattgactactgcttgtgaaattactgttgtggaaaggggttcgatgtttgaaaaatctgcagctgaagggatcagctaggcccgggtggccgtttgaaagttgttggcccgggtggccgtttgaaaagctgttggccgggtgccaatcttgtttcaattttaaagactgatacattgcacatactccgaccggacgagacgcactgtctcatccgtgtcgtttgagaagcactcacttagtgttttcaaaaaaaaaaaaagagttcaaataaaatccattgcaaaaacaacagcctttccttgaagcctgcattaaacacttaatttcccatggcttgctgagtactcccgtactcacgcttgctctatataaataatcccccccagttgctgaagaagatgaagcagatcctgctgatgaggagttcttccaggagcaagccggctacgatgggttttagggtttcggcctagttcccaagtcgcgcctgtgttgtttggtccaagtcctggcttccgtttcccttttataatgcagttgtgagctcgggatctgtccgcagcccaacatgactgtacctctactctataataaagagacctctgatgctgtgatattctgtctccctgtgataccagcactgtttcctgggactggtattgattaacaggttaatttggagcgtcacgggctagttccggtcgggactagttcggggcgtgacacttatttaaagaaattatgaaaaaaataaaaaaatagtcatacataaaatactattcaggttttatcatataataagtaataacaataaaaaaattaatcataacaattttttaataagaagaagagtcaaacgttgtattcaacaactgaaaaatgatttattttttgagacggaggtagtataattttccaacatagccagcattgatgtctggacttccacgggattattgggttgcaatatatatacacttctgtagcgtcactagatagaaatgtgaattttcttaatagacttacagatatcttttttttttacttctagaaagtcaatactaatttagagtccagccttccaggtatattcttacccatatacaaatagaatggatgagctagggatatcagatatctcactaacactcacaagacaaatgacacgtgcttattgaaaaaccagcaagcagctcgcagtgtactatgtcaaaaatgtatggagtacaaactttgtgtgtcccgtttcgtcaagctacagaaggccacgtagccacccctgccttgactgaccttaacactctccacacgcagatatcgagcagagcaagcgaatctggaccgtgtttgaaatgtcaaggtccgaccgcgatatgcatcgccccccaatgtaattttagtcaaatgcgttgggacctgcactgcacgtacgtacgcgtgcaggcacggccatcatcagtcgacgcatggacgccgtggagaagcctatctgcatccaggatttcatgctccgaaatcgcgacgcaaaaaaccgtatcttcttgaacagttgaattcctcaacggagaccaagcaaaaaattaaaccaccacacggaggcgtccgattggccggagttaatacgggccatgcagagtctacctgtcccactccagtggcctagcttgacacatggtggatcggcgagcgcgccacctgttgcccctgccggggattttcacgagttttcaacggcggcgagcggcgacgtgcgaaacctcgctgcggataccgggggaagtgacgatgtcaggccaggtatttccggcgcgatggcatcagcagttacgaattacgtacacagcgttgctggcgcatgctgctcgcatgaacatggagagagagagatcggcgattcggtgcatgaactggggtgctaacgtggcatctagtgaaggagaaaaacaaaatggtgcatgtgcataaatttggaggttcttataatctatctcgataaagaaaaatcttatcgagtggttggattgactatttcacaaaataacaaagaaaaacaagcatggaaatgtatccgctttaacaacaaaggatgctatgtcatctataaaggagaagcattgttgcatctacataaattttgaggtttttatatcttttcttgataaaaaaaattatccagaggttggatttgatcatctattaactataagttaaaatagtagaaaaagatgcctccatgttcacttttacggcctagaaattctcatattaatcagagaaaaagagaaaatcaagtccaaatagaaatacactttaaaatagctaaaattcggaattaaaaaagtattgaaagaggacgactagagtccatacatgtatagaatttagagcaaattgaaattcataattaaaaaaaagaaaaattagaagtagaggttagagtccatatagaaatataatttagaaataactaaaattaaaagttaaaaaaataaggaatattggtagaaaaacctagagtgcatataggaatacaattttaaaataactaaaattcaaaattttaaaataagaaattttgaaagatgaatttagagtccatacagaaatacaataagaaataacgaaacttcagaattaaaaaaatatatattggaagaagagtctagagttaatatagaaatttagaactaattgaaagtcagaattaaaaaaataagaaaaattaaaagtagagtttagaatccatatagaaatacaatttagaaagaactaaaattcaactttttttaaagaaaaggaagactgaaagaagtgtctagagtccatatatcgaactgaattcaaaattataaataaaaaaatattggaagaagtgtctagagtccatattggaattcaatttagaaagaactgaaatttggaatttaaaaataaagaaatattgaaagaagtgtatagagtttaagaatacaatttagaaataactgaaatgaagaatttaaaaataaggagtattggaagaagagtgtagagtccatatagaaatataatttacaataacataaatttggaaatataaacagaaatattggaagagtagtatagagtacataaaggaatacaatttagaaataactgaaattaagtattttggaataaaaaattattgaaagaagggtttagagtccatataggaataaaatttataaataatgaaaatttgaattaaaagataaagaatattggaagagaaatatagagtccatataggaaatacaatttataaataactaaaatttggaattaaaaaataattgataactatcacatgtatacaatacaatgtgaaaattatatattggttagtttagtcaagttagtacataatttaaaattatgttaccattttaatatattttaataatataatatgaaaatatatatgttatttgtgcgggagaatataatggtgctagccacacaatctgcgtgggccaccatgttagtttcacaaattcaaataaaattcaagcatggaaatatatctgctttaatgacaaagggtgctaacgtgtcatctatgaaggataaacattgaaatttaaggtttttatatcatttcttgacaaaagaaatcttatcaagaggttagattgaccatttcacaaaatcatataaaattaaatcaagcatggaagtgtatctgctttaacaacaaagcactcttctcttgctttttcacttagaagctcaatcccctctctttttttcgcttctatgcttgtgcatggtgatattaggataccagacaccggcatcaacattaaaaatctgttttatatgtacatagtctaagtagaaatatattttacatggtagcaagagcagagatactagaagcaattatgcaattaagaggtacggtggagctaagatagatgatcgactactccaatactccaataccagatcagtgttatagagtacgtgagtaagagatattaacaacaacaatataattgaaaaccgatatgccatgatttcatcaccgataggtccatgaactagccatatcttggacactaacatcgtgtttcttaaggaaacgatcggaaacgttcaggaaatttccatatttatggatttaactatttagtgtcaatttcattgcgacactgacataaattagaaaactaaattttagaaacagtagccgttagtaaagatattattgttatatcagttatgtggaaacggtatcggtatggttaggaaatttttgtaccttcactagttacattattaaatactgatataccagcatgttctcatcactagcttcttaaaataatataactatgctaatcaaaatttctacatcacttaattctatctctcagcttgtttctttttaaccatacatcattgaaaaaacaccctcaacacatgtaattgtctatggtttcctgagcattgaattagtgattagaaagctaggtaacaattgatagccttggtatgaagcatgacaggctcacaatagccaaggatcgggcatgttgcatgcctggtggtttatagtgtttccagaattggaggcaacaactgttgtgctaggaaatcatttcctcaagacaagatcatgggagacaaatgtagagtgtctttacttgagtttaatttttgtgtactactgttgcgacaacaaattggaaagttaaagtttttacctttgttgcattcgtacgtcatcgtaactaatttggttctgatatacgtagaccgttggcatgatcctatgacatcacaaccaagcaaatctttgttttgcccttttgtttttttaatttttatgtactactattgcgacagcaaaatagaaagttaaaatttgtaatatttttgcattttgtcgtacaccgtacgtgcgactctgatatacagagtagtatatcgttggttcgattgtatgatgtcatacgagcaagcaaatctttgttttgtcatcttcttgccgtttaattttgatgtattacgacaacaaatatagaaagttaaagtttatacttttttttgactgaatgttaaagtttatacgtttgttgcatttgtcgtcatacttgaaatcataccttagatttctaatatacctaggccattggtacgataatatatatgatgtcacacaagcaataaaatctttgatttggcaactcaagtgggcacggggaacaccaagaatgggggtagggtgttagagatgagacaccgccatggattaactcaagttggcctcatcgattgaacattggagaatagctacgttgcagagaattgcctaaaatggtttgttctatcttcttttctacatgacaagtgttactatatatagtttatacagaattgctaaccatttgttgacagaaaatctatctccaaatcttacagattttggtctagatgtgcttcacgattcgtactctagctgcttcttctccaactccggcgaactcctctccttctccggcgtcggcaacaacccaaactccgacggagggccgatgagttagggtcccgggttggggaggtgtgggagggggagggggaagaagggggagttcgccaggcttatagggatggtcgtgggtatagttggccataaggcccgaggcccgaaggcccggcccacggcacgcctctttggcccgtcccaagcacggcaaggcccgacttgggtcgggcccgtgccggcccggcccgactgtcgggccgtgcctgggcctccccaccagcacgctgggctggcccggcacggtcgggccggcccggcacgatgggctggcaggccaggcccggtacacaaagtatagggactaaaaatagacatataaatgtcaatgtctaaagaatagggaccttaaatagacttattttagctatttatataccacagcacaaagaagagggaggtaaaatagactttttttagctatacaatgtcacagcccaataggagggagaaaatttagacttattctgaggaaaagcacgatggcccattgtgccttcgggccggcccgccacggcccgaggcgtgttgggccgtgcctgggctgtgagtgcggcacgtgggctggcacggcacggcccggtgcgtcggtcgggccgtgccggcccgacaagcctcggcccaggcacgtccgcgtgccgtgccgggcggcccacatggccatctatagtcgtgggaggcggcggtccggcggtgggcggcagaacaggtaggcacactagtggagataggcacatctatgacaatctacttttgtcatggaagacgcgcaaatcgtcataaagtaacttctatgacgaatttatgacgaaatgggattcgtcatagaagtcgcgtcacatatgtttttctatgactaaacagtagatttcgtcatagaaatgcttatatccatgacgaaggtgctcgtcatagaactgctttccagctggctaggacagacgtcgtccatgccacgtggctatcacacgtggagtccatgttggctgtgatgtggcggatgacgtgtacgccacgctggatcatcatctcccgtacgctagagccaagtggcagtcgtatttaacgccacgtgttggcatttggtatgtccacgtggtggtgcaagctgatgccacgtggtcgaacgtggtggcgccacgtggcagccatattaacgccacgtgttggcatttcttatgtccacgtggtggtgcgcgctgatgccacgtggccaaaggtggagacaccacgtggcagtcatatttaacgccacgtgtttacattttgtatgtccacgtggtggtgtacgctaacgccacattgccgaaggtggaggcaccacgtgctctcattttgaagcgccacgtgtacatatctgatttgtgacacacgtctttacctgatgttgccacgtgttgatttgtttggatgacacgttagcacagtagggatgaaggcccgctcatttttttttcttagcccagcccatttggccacatacttcacatattgttgtggcccatcccactatgagatctaggaaatttttagcattcacccatttcaagcaacaattaatcagaacttcgcagcacataagaaaataggcccaacatcaagattgatcacatggacaaacaatcagaacttcacagcacattacaaataggcccaacatcaacatatatcacatataccaacttcacatagcaccatattacaaaaaagttcacagaacctagcacacatatgttcacattaagtccacaaaagtttgccataggatgacattaagtccaccatagcaccaaacatcatttcacataatcaagtccaccacatgacaataagttcacagaaccatcaaacaactaatataagtagatggagttcatcacagtgcagaagatcataaaggagactaggatagatttaagttaccctgggaaaggctcaagatacgtcgaaggagcaaattgttctcttcctgctgctgcttgaactctgccaactccttttgagtctttgccagtgcttcatttgcaagatttgcttgttcttttagttcgacaacttctgcatggagaatggctgaactttgcttttcagctgcaagttcttcctgaagtgctgcttctgtcggtgtcactgatttcttggagctcatctgcagaccagcatttttcaaaaacgtggtattggagttgtcccgagagagaaccttggacacaacttctgcactagttcttggtgtctcaccatcaggtacaggttcttccataatagctttcatacttgactgcagcaatgattgaacattagctatgaaattagatacatgaaaaactggctgctgcataacacattcaaaatactggcagttgcacaacacattcaaaaagtcactgaaaactgatggaaagctaccaggaagcacaaactagaggtaaggaaacttgtatagaatgcaaatttaaccaaatttgttttccataagccaaaacagaaacaaattatatgagtaagccaagcattcccatatttagaaatattgcattgccctcttaactgtgaaagagaccagaaacattttgagctctaactatggtagaatgtaattattttctatctagcctctagcaacaatgcaggccaaatgcttcttgacagaatctaggatactgttttagcatatatcagaaggctgactttagactatatttgattaactttcatggcagcttttgattgatggaacaccctggtagctataaaagaacaaggttttcccctcaactactttcataaaatttggagggggtgcaatgttacttagcgttggttattttctattcctcctatgatgcctaaatattttccctagaaaccactaatgtttagaaagaaaatactagtgtggagtacataatccctcacaattaagtttacttttgcaagttacaatgaaataagttttgaagtagtaaaggctgaaatatattcagtcttatgttcatatgattcaaaacctcaatacatgcaaacaccactacagcagcttaggtaaaaatgagttttcatgaatcacaccctcaaacccgggatattgataaaaatacaaactgcaaccaggatcaattgatgaaaaaatgtttatgtagcttatttggcattttaacccaatctcaacttatgttgtatatggtaagttgtctagcgacaagtttccagctacaaatttagtttggtatgtattctaacattgttagagtctataaattccattaagtctgtaatgatcttagctgcaaatatctctgcacactaaggacagaaattatcctatggatgtaaatataaaatgagctgaattaataatatgttggcataggtatcaaggaattgagttcaatgttgtaagaatatacaaagtgacttacaattgcatctttggcagcatcacttagacctttttccctactggtatggcagtcctcaaaggcatccacagcatcaagctctacaaccttgttcttctccttctatttcaatacagaaaatgcagatcaattattttatatatctattacattagataagtggttcttaactacaattaatgctaaaagataatgggaacttacgtaagcgtgcaagtgtgcagcatagctgcgagatcccgtagcctgatggaacctaacattaagccggttttgcttgttctgttcagagatttgctacaaaagatgtatgtgttagacatagtcgcaggtataaaatgaaacaaatatgtcattagagatgacataccatattctttggatttgaccactttgcaacaagttccagccactgttcatcagtcatgctacttatgggagaggtagttctaatctcgttagcaggtactccattgaagtaggccttcttcaaattataccgtgtttgtcgtatccctttctgccatacatcagcacaagcatcccttgttggctggtgtttttggttaatggccaacctgacctgatggtttgaattgcaatcattaaggagtaacactaggtcatataatagatgaaatataaaagaatatagataggctcttacagataacttgcccatgaagttgttaatatagccttcatcatccttgtacttcttccaatgagggaagacaggaactttagtcctaatgataacaccagcctctgatgcaaacttggcagcttgcaccggttcatctggccttttcttcccttcggcaacagcaatgggcattcttcccatagctttggtcatcttgtcaagcattattcctgcagttggtggccttgattttcttgtgcctcttcgtataggtactacagagtattcaattacaatgttagcattcatcaaatagttaaaaaataataaatttctcttcgttgaactaactggccttcaacatcagaattggtttgctgtgcaggttgctcttcatggttggcatcatgtccatatgaccagtccatcaccgggctcgggggcctgttcacatcattatcttgaagcaaatgtccactgcccacatcttcatcaccattgttttttgtttctggaggcagttcttcatggccattacctttaccttgttctgctatgagttgccttttcgctgaccttgttgagactccaggaggcatttcggttggagcacccgccctcactctctttgatatccttactcctggtggcatcttgagggtaggtttcttcttcgtcgcacacttctttcgtctagtttgtcgagggtactacaataataaacacaaaagttgtaagcatgtgaataaattagcaacaatcattaaaaaaataatcaaatgctgcacaaattaaatgcggaaaaattattgcagatatcctagctccccccccacagccaagatagaagaagcacctcaatcattatggggacgggctgctccggttctaaatatgaatcatcatcacactgaaccccttgttcatcatcttcagggagaaactctgatgtatcagaaccttctccatgacttttcttggtgcctgagttttttgtctttgaagatgcatgttgtgtttcgatatgtttaatagtggcagctatgtctttgatgccaagttcatccatccttcttatattctgcaagattttctcttgccacgttctttcatattcgttttgtgcaggttcttacatgaatacacatattttaatggtcagaatactagatggcattttgatggcatttcctaagcatataagcattttcagaaatagaaacaataaagtatctaggcatttgggatgaaaaaaaaagagaccatgctcatcaacattggggatttaatgatcaatggtgaaaaacaactttacttcaatatctagtaaaaacaacagggtgattcacttttccattttaaaagacaattttgatgagaactctggaaacacttttacagtgaacaacattggtcatataaatgatatagccattatatcattctctttcacctaataaactgtatctatttatacgactaactcaaattattggtacattcataaacacaaacaaagcagaatctaaataaaatttccattgttgatctgaaatccacactctggaagatgcttatggcaacttaaggcacaaatttatttgagaatcaacatagcatgattaatttaaaggtgcgcctgaataacacagaaacaatgccatatgcagtagcaaactagcaatagcatcaactgttattgtagatagtgacctcaatcggattgcacacagaaaattcttaatagaagttggacggcaaatcaatccacatgatgtataacatctaatagcttgagacagtacacataaacatctgagcttgagacgacaagataattttgcgtacctcgtgctactggacgtcgacgtcttcccatcggctaggtacggcgacggtgcagggaccttgtcgatggggtacccggctccggtgtggcggtaggcgtcgacggtgttgtgggagatggcttcggtgcagcagtagtcgtcgacggggtaccggctccgatgcagcggaagtcgtcgacggcgtagtgggggaaggatctggtgcagcggtcgtcgtcgacggggttgcagcggaaggcgtcgttgcagcggctgtcgacgacgaggaagtaggggacggatctggtgcagcggtcgtcgtcgatcggtttgcacgggaaggctccggcgcagcggtcgtcgtcgacggggttgcgggggaaggctccggtgcggcggtagtcggcggcggctctggtagagcggcaccccgatggtgtggcggctggatttggagattagggtttggtgggtgagaggctttgtaaatatatagtggttgcacaaatgcccctgggtgttgttttgctcttcgttagatggaggataaaagtgacatttcccattctgatttgggcaaatgggcggcaatggaatgttttggggctgtcattggcggtaggtttaggcgccgaacgaaaaatcctccatccatgagtaattaacattatccataaatcgaaaacattcaaattatactaatctatctggattaacaatttgactttaaaaatatactccctccgttcaatattatataacttgaaaatttggattaagggggtgtttagttccagggtgtaaagtttttaaagtatacggacacacatttaaagtattaaacgtaaactaataacaaaactaattatagattatgcccgtaaactacgacacaaatttattaagcctaatccatccgtcattagcaaatgtttactgcagcaccacatactcaaatcatggcgcaattaggctcaaaatattggtctcacaatttacacgcaaactgtgtaattggttattttgtctacatttagcactcaatgcatgtatctaaacattcgatgtgacatttttggaaaaaaaaatgtgggaactaaacaccccctaatattatttttttaaagcaactttcctataaaaactttttggaaaacacagacaatttagcagtttaagaagcattcaccgattaatcggaatacggttgtcagacggaatacggttttccacaacactgctttaagcatgactgaatttatttttagaaactagcacctataatatattataggcgtctttttttaattaattggcacctatgacaaattaaaggtgttggttttttttttaaaaaaagaaaaccaacacctatagtattggtgtcggctcttctatagtcaaaatctgctgtggacgtctaccacaggggcgcggtcgtcgtctcccatgtcatcgagacctccatgtcatcctcgtggttgctcacctcgccattcaccatcgacaccgtggaatgcaagaacctggttccagcctcggtggcgttgccggtggatctaaagccaagctggaggatgatcggcgacggaggatttgagccaggcaggtgataaaatcgtctcagtttaccattcatggatactccctccgtcccataaaaaaatcaacttctggctatgaacctggacacatgttgcgtccagatttatagtcagaagttggttttttatgggacggagggagtatataggtccaattgaaaattgaattttaaaaattttatgttcactttaaactgggtgaaccggtcggtgtttgtaggaaaaatgttggaccggccggttttaatagaacggactgggtggtttggaccgacttacccctcattcttatcggtagaactcacatataacgagggtacaatcgtaaatcaacacacatataacaacggattcagatccaaaccaaaccaaatcgtaacaaaaaaaaagagcttcctcctccatggcggtgagaattagcaggaagcgcaggagcccgccgacgcgtgggctggggacctccacgacggcgtgctggagcgcatcctggcacgcctcccgccggacacattcttccgcctccgcgccatctgctgccgatggagcgcggccgccgcgtcaccacacctgcggccgcatcccgtctccgactccgaccgcatcgccgcagtagcagctggtccaggtgccgcatctccaaggccgatgctcccagcgctgctggtgaagaggacctggtgctggccatgatcgagtagcaagcttctggtgcttatgctgcttgcttcctggatgtgggcgacaacagtagcttgagaagaaatgatacttctttgtacagcttggtgaattcagattgagatcgtgaatgtgaataaacttatggctgattattgtgttattttgaaaatgtgaagaccatatttgtgtcatttttttatgtcaattgaatatgacaattaagaaaaaagtgtaatgctttgaacagatgcttgaagtgtaagttgtgtttgtacagattgaaattggtttttgctgcttgaaatgtcatggtctgtacagttttagactgatatgcagtatgtcacttggaacaaatatatatgtacatcactttgcatactgtttcaccaggaaacttactggattgcccaaaaaacagaagtaaaatattttctcttctcctgaaatttttgacccaactgcttcacatattgttaggaatatgagttagcaccatgaacctgggaaagaaatcaaataaatgcaaatcattgctggtaacaactctgttcttaaaattgctagctcagaatctcgatgtgtttcagatatgcaatggcaaatgagttcacagaataaatcagttgtgacatctcagttacataacacaaaataaatgagtttatagctcatcccaattacatatgacatatcagatagatgacacaactcaagatataatttaatcatcatcggtgtcttccggcatgtcatcttcagcgttcccattgccactgtcactacagtactgcaatattgtgtcatcttcatctgcatcatccctactgtcttcagtcaagttagcttggttgttaaggtcttctaaattagcttcaataatagtaacttctccatcttcctgcaaatggtctagatcctcatcagcattaccttcatgcacttcatgttctgtatcagaacaattatcatcttggtgtacatcaaaaatgtggtcatctttttcagacacattatacatgttcctatgttcgaatttctgcacaattcgccattcgttgcccaaagaggtgtcctgcaagtaaaatatcttcttcgattgagttgctaaaatgaaagggtcatccttgtaccaaaatgattggatgttgatggatttgaaatgcccgtcatccctaactcctcttgtcttgccaacttgattgaaccaatcacaatggaaaagaaccaccgatcgatagatatctagatcagagttatactgcaactcaagaatctccctaaggacaccataaaattcaatgttatccccttcatgtgtaccatcaaccattacaccactattctgcgtttggaggtatttctcacggtctacagtgctataccggactccgttgacaatgcaagatgcacaactctttactcggagatcaggaccacatgacaatgcaaatagtgcttcactgaccacccctggattttctttcctcagcttccagatctgatatatatatatatatatatatatatatatatatatatatatatatagtaaatttgtttggtgctccatggtgcccgggcaccattgttgaaattgagtatatacccaattcaaatgagtatgaatctttttcaattacttaggtattaacattaactactttactaactagttcaaagcaagtttgaactgaatttgaacttgtttttgttagattttgattctaggtatatagcatccatacatataattagttaggtatgtaatcatggattgtgaaataaagttaaatttgagttgttttgttgataggtataggtatgaatcgaattattataactaggtatatactcacaatttgaaattttgaaaactttgagtgattttgtgcattagataccatggtgcccgggcaccatggtgccccatatgagtgtcatatatatatatatatatatatatatatatacaagaaaaatacacatgttattcccaatttgaaatttcatcaccaaaaaatgatatttttgtaagtgtgcgtcacttacatgagtcttaaaccacctagcaaatcctttttcaagtcttctgtcaacatcatgtgcatcttctttctccaactcttctctatgcatgctgtagcaaattatgactcaacaattaggaaaatattatatttaatacaatacatgtgaaataaacctacataaatggtgcttactccaaatatggttgaacctcctcacagttatttagcacataccaaactagcttatccatgatttcatcctccatgtactatatcctagtggatcctatgagtttaacaccatgcataaaaacagagctgttaccatccaatggcccatccccatgacgggcgtcccgattaaatctagtgtcaacatcctccatgtaccttgaacaaaatgtcaaggtgtcacttgctacataggcctcagcaattgatcattcaggcctagccctgttccgcatggaattcttaaaggtgccaagtcgtctttctattgggtacatccatccatattgtacaggacctctaagtagtgcctcatcaggtagatgtacggtcaagtgcaccatcacgtcaaagaaggctggaggaaaaattttctcaagtttgcataggatcagcgggatgtcttttttcagtcgtttgaggacatctatccttagatttatactacacaattccctgaagaagttaccaagctctgcaattgcttcgtatatatcattgtccccaaatcctcttatgccggcaggtatgattctttgtgagaaggacatggcagtcatgagttttgagcccctgcaccttggaaccatctgaacttatgcatcttgctaggttggctgcatatccatgtggatacttgacacctttgaggaagttacaaaactcaattctttgttccttcctcaagacatagcgagcttgtgggatgcgaactgagttgccatcctgctgtaagtgcaagttatgtcttatgttcatatcatgcaaatctatcctcgaattgactgtgtcctttgtcttgccctcgattttgagcaatgtgcccaaaatgttgtcacatatgtttttctcaatgtgcatcacatcaagattatgtggcagcaacaaatctttccaatatgggagcttccacagacttactttgcggcaataaattagtggcccttcatcctctccacgttttcttttcttacttgtatcatgcttacccggtctaacatctttcaccttctctaactgctcgaggacctcatctgtgctgaattttcctggctcaacctggttttcatggtgtccatcaaaagcatggcttcttcgccaagcgtgtgtccttggaaggaaacgacggtggccaaagtagcctatcttatttcttagtgctcgtgacaacggatttttgtcacaatgaatgcatgcataataaccttttgtagttcgccctgacaaggtgcttagagctggataatcatgtatgcaccatagcacggcggcacgaagattgaactttctagcactgaatgcatcataagcactaacacctatccataattcaagcaattcttctatcagaggctccaagaataaatcaaaatcctttcctggagatgttggacctgggatcagtaatgacataatgcagttcgatggatcgacagattcccatggtggtagattcaaaggcataacaaggacaggccacatgctatacgaattgctcaccttgccaaatggattgaatccatctgtagctatggcaagcctcatattccttgcatcttctgcgaaagttcgatactttctgtcgaagtccttccaagcctccccatctgctgcatggctcatttcattatccactggcttccgcttgattttgtgccactgtgtgtcttcagctgttcgttttgatgcaaatatcctctttaaccttgggataagtggaaaatgcctcaaaactttgcgaggaaccttcctgtcgccaaccccatcttcccatctggattcaccacatattgggcatagatccatattggcatattccttccaaaatagcacacaattattcttgcacacatggatcgacacatatccaaggcccaattcacgaagatatttctttgcctcatcataagattttggtaattgacattgagggaatgccgaggacaacaacttcaataattcagtgaaagctgtattgctgatttgataatatgacttgatatggagcagcctcacaagaaaggaaaatcttgaatggttagatcctgggcaaagtgcctgcttcgcatcttcaagaattctagcaaaccttggtggctgtccatcttcctctgccgcagtgtatagttcacctattaactctggaactccattgtcatcctcgggttcatacccgcccacatctgtcccttcattatggttagtttcatgtacctgttccaaatattcgacatcttctgtatcaactaattctccatgataaatccaccgggtgtatgttgatgacatcccaaaaatatgtatatggtcatgatttcttgctgaggcagtgaagtgtggttaagacacctacagcatgggcatggtatgtcaacgtgttcatcaaatctttgtccaacaaattccatgaactgtttcactccctccatgtatgcaggtgtgaattgtctcccatgtatccaagttctgtccatctgctttggcatgttaaaaaaagcaattaggcaaacaaagctaatccattttttaggacagaatattttctaaaacattagatggaatagctggttgctacatgacttaaaccatgttgatttgttcataatactctgacttgtttctctgttcatacaacacaaagcataatctttcatagctgaacttgcatttcatactcagagtaatgtacttatggaaaatcataccttatatctactgaacggcgttggtgatgggctgtgcgcgctgacgacaggattgagagaggaggtgctaggataagacggtgggcgaggagcagccgatccgtctcagtcgtcgaggatcccccgcgccgaccgggatccctccgcagccccaccgaccaagatcacttcaccgcgccgccacccaccacgatgctccacatcacgatgccggccagcctgtggagccgcccttccctgcaccggtgggataagaaacctcctcctctgcgccgtcccggtggctaggatccgccccactgagctccgcctgcgccgccgccaccctccctccctggctgtgaccaaaccctgcgccaccgcccccctccctccctgaccaaaccactaggtcgcccgcataaagcattcaatcattcttgtgttcgagaattgaaaggaaaactaaaagtaaaacatcatcagcatgaaagctccttgcagcgtagtggttaagctagaattatggttagtcacaagtcatgggttcgacccccaagtgctgcagcattttttttagaaaaaagagttcacatgggctgcacagattcacacatgggctgcacaaattcacggactgcacaaatttgggctgcgaaaaaaaagttcacatgggctgcacagattgacacatgggctgcacaaattcacgtggactgcacaaagcatctgctggcccgaaaacgcacctgtgctgcatatacaatgtggggtccaataacaatctggatagccacgtatacaatgtggggtccagtgacaacctagatagccacatatgcaaggtgggaccaacagcagaatagagatttacttacaactaacgaaatatatttcagcatattgtattaataaaggagcgtcataagtgtgttacatgaatggtgcgcaccattttgtgacgaaattatctattgttttatgacaccattttaaatttcgtcatggagtttcgatgtctaccctccgccatgagtgatccatgacgaaacatgaaatttcgtcatagatatgttgtattcaatgacgaaattatacaacgtcatgagcaaaacgtcatagatggacgatttcctactagtggcagcgaggcattggtggcagtgccagagccgtggggacggaggagggcggtgagccggcgttggtagcaggggcatagcgagcttgtggtggcagatcctgcggcgagtagttgctggagacgaggaatacgacgggccgagagcatctcgtcttcgatggctcgaggagggaggtgagggaggaggccggccggggggcctcgtcggcgccgttgacgccttccagccagccggcgaggtcgggcgacggcgcgctggggtggcgacgacggtggcggaggcggcgcagaatgcgcttgcgctgaggagcggcggtgtgagggggaatcgggagaggagaggttttgtagggtttggttgcctgcacgaatcttaaagcaatcgggtggtctaaaatttataagattcctaagggggttttctgtcaaatgatttatagacagtctcgttatatgcctacaaaatatttcatacatggatataagtattaggtgtaaatatgtacccacgaactattgtattcatttagagaatggaactttaaagcatatagaatattcgtggcagttacaaaaggataatatgaagcgggagatcaagataaaagcatgtattaggagcttagatatggtttagacccttttggagaaagaaaaagtacgaaatataccctgaactcaaaaaccagatattttacaccctaaagtatataaaccggacaaatacccccccccctaacataatttgaagtggtttcgatcctacgtggcagtccagtcagcaatttttttattaaaaaataggtggggccagcatgtcatactctccctctctctacctctttcccctctcacctttctctatctactctatcatcctctctctctctcactgagcagagcagggaggagcagatggatccttgccggcagcctccaacgggcggcgttggacagcgacgggcagaggagctccctatcccctctctctatctcgcggttgggggcaacgggcgaggggttgaaggtagctgggggaggcaggcacggtggcaaaggtggcagccacggcagtgaccacctcccatgcctcgcattggcggcctcgagcaacaacgaaaaccttcaattggcatcatccgcctgacaacaacgacgacgacgaccttcgattacgacggggacagggagatctggaggtgaacaggcggtgggcgggcggacggtcggcgaggacaggcagtgtgcggggacgggcgatgggcggcggcgcagggacatgcggtggcgagcggggggacgatgggcagtgggcaggtggtcggttggcgccgacgcacggcggtgttgccggaatcaaccattggagggtgggaagggagggagatctgaggtgccagagctagttcgcgcgcgcgcgccatcaacgtgctggcgcgcgcggcccctcaccacgccaagccttcctttttctatttttggcaattttttttgcttttttttccggttttttctgattacattttctaatctttagcccacatatttttttcaaaatgttttgagttgaaagtttttaaatctctagttaaaaattttcaaatctgatttgaaagttttcaaatctcgagttgaaaagttttcaaatctcgagttgaaaagttttcaaatctcgagttgaaaagttttcaaatatgagttgaaagtttttaaaagtgggttgaaagttttcaaatcttgagttgaaaagttttcaaatttgagttgaaagttttcaaatctgggttgaaagtttttcaaatttgagatgataacttgaaagttttcataatttgatttgaaaaatttaaatttcaagttgaaagttttcaaaattttgaaaatttgacttcagatatagatttctttttaatttgttagttaaaaaatttcatgaaaaaaaatcctaactactatcgttattatctcaaactataattatctaagagattaagactaatagaattagtctaactacccgaaaaacagcgccagggacgcgcacctgcctctccgccacggctgccgcctccggtcgccatccgcctctttgccgcttgccgtttgccttcttgatggtgagcatggcgagggaccatggcaccactccacctcaccggcgttcacctccgcagcgtcgacttcgctgccgctgctgtgtttttcacaaggccggggagaagagagagagaggatagggaaagaggtagagagaggtgagggggagagatctgataagtggcccccttgattttaattattttttttctgactagaccgccacgtaagatgaaaccagttctagattgcggtagggggttattcgtctggtttaaaaagttcgaggtataaaatgtctagttttgtgtttcagagaggtaattcggttgaccatgatagttcggcgcggggggggtgggagggggggtaattcgtattttttcctatatccaaaaagttttcttaaacataaaacttctatcgatcacaatttcattttaaaatatgtctagaaattgttaaacaagaacaaatactccaatatttgctagattgggtataggcccgttgatgcattcatcgaattattgggaattccatctcaaaactcacaaaatcttatataaaacattgcaaaaaaaaaacacttctattgcaaaaatcttgcagataaattttctttttccaatgatgcagcttatatttatcacttaaaaaagtcatctcctgtgccgtggctccatttgctcccttttatttatttccccccatcccggttatagatcaaatccatttgaccattaaaagaagccaaaataatcaagcagtaccagatcacacaaggcatctagaaagaaagaagaaaaaaaacgatattttttttaaaagaatcaggaaaaatatatccaggaaccatggtacaaactactgaaactgttgtgcaaacttcttgatcttttgggatatttctaatttaggtttttttttgttgaattaactgaacagtggacaccttttttttcaaaaaaaatctttgaccaaatgagaatagtttaaaagaaatgaagagagctgtgacaaaagagagtaccgtcttcatgcggaagaaatggcattagaggttatacaagtggcaagtaaaaatggtctaaactttatggcaggctagtaaaaaatagtaatataaacaacaacagtctaagcaaaatttaactaaggattacaacaatccataatgatgtagtaccaatcaagctgtcagagagatctcaggctctgatgctatgttgaatctcaatccccaaatcaatgcctgtccatgggccaaatcccagggaattcgtgcaagccccgctgagctgcacatgactaggaccctatttgaaagattagcccagaactaattttgagagctaatatttagtaatgaattggtaggctaaacattagtctaggttggtatgtttggatctatgggctaattcaaggctaaaaggtagagagagagtagaaagagaggagagagaaggagagagagagctgctttttgatggtccccacacaaaattagccccattagcacttcttagagaggctaatattttgagaggggctaattcatattagctcaaaattagacaacctgtttggattcttgagagctaatttaaggctaaaaggtaagagctaaacattagcccatggaaacaaacagggccaggaatcttctaatctccctttcatgtgtccctcctttttttctccctatccccaaagatttcacattttctaatgagcatcatgccgtccatgagctctgttttttatcctaacacccctctgcagccgtgctcaccctctataaataccccatacaggtgtcttccaatagcaccaccatttggaagaatcctccccaagattgctcgatcccctcgtgtccctctctcccaacaacactgcgccacagacacaaatcacactcagatacgaaagataagtacagagagagagagagggcacggattatacactgcacacaagcatatatatatatatatcgattagccatccgtgctgatctgaagagtatcatcggtagagagttttacagagttgtttggacaaggagacacacacatggctttcttgctcttctttgtctttgtgacagctgcagtgctgtgcttcgtcgtcccggcgttcttgctgctctgcacgagcgtgcagaggaggagagatgttggacagggtggagggcgagattggcagaagaagaagaagctcaggcttcctccgggatccatgggctggccgtacgtcggcgagacgctccagctctactcccaggaccccaacgtcttcttcgcctccaagcagaagaggtaactaggcaattcctccgtctcataatataaaaagttttagcttatatagtcagatatataatttaaaaattgatggcgaatgtgcttaatatgttgtcgtcctcgttgatggttgtgttatttttgggtgtaaggtacggcgagatattcaagacgaatctgctggggtgcccgtgcgtgatgctggcgagcccggaggcggcgaggttcgtgctggtgtcgcaggcgaggctgttcaagccgacgtacccgccgagcaaggagcggatgatcgggccgtcggcgctcttcttccaccagggcgagtaccacctccgcctccgccgcctcgtccaggccgccctcgccccggactccctccgcgccctcgtcccggacgtcgacgccgccgtcgccgccacgctcgccgcctggtccggcggccacgtcgccagcaccttccacgccatgaagaaggtgagcgcacgcacacgcacacgcagttgccgccagttgccacagaccaggggtcgatcggctcggcgtcacgcgacacgagtgaagctaagtgacgtgtggggcgcgcgcgcgtcccggacgtgtttgttgttatgcgcgcgcggcgtgtacgtaatgcgtgaccggtgttcgtgttctctctctcttttgtatccagctctcgttcgacgtcggcgtcgtgaccatcttcggcggccggctcggccgccggcacagggaggagctgaggacgaactactccgtcgtggagagaggctacaactgcttccccaaccgcttcccggggacgctctaccacaaggcgatccaggtatacgcacgcgcgcacccgcaaatctctgtcgaattcgacattgatcatcatgcaaattaaacggcatgcgttgcgcatgcaggcgaggaagcggctgcgcgcgatcctgagcgagatcgtggcggagcggcgggcgcgcggcggcggcggcggcggcggcggcgacgacctcctcggcggcctcatgcggtcgcgcgacgacggcaccgccggcgcggtggcgctgctcaccgacgaccagatcgccgacaacgtcgtcggcgtgctgttcgcggcgcaggacaccaccgccagcgtcctcacctggatcctcaagtacctccacgactcgccgaagcttctcgaagccgtcaaggtaaacgcaacgataattaaccagagtttaagtactcgatcacgatcgagcgagaacgatggtgagctaaccaccgatgctttttttttccgtcgtgtcgatcgcgcgcgcgcaggcggagcagatggcgatctacgtggccaacgagggcgggaagcggccgctgacgtggacgcagacgaggagcatgacactcacgcatcaggtacaagcatgcctctttgttgtttttactcccgttttattgttacaaggaagacgaatatgcacctattgctgcatcacacatcacggaaaagaatggctttagtttagtttggagattagctagcattttgtgtttggaagtatatgtttggctgtgtatatctactgtatatctatatgtgtggatatatatagagagacttaattattattcttatttggtttagaaatgaggtgggatgagttagacttatccttatttttttaatgggataatccaattatctgtttggcatgagagatggagtgatcttatttttcttagggaaggagggggtggcccacatatcaataacagagagaaagtgagttagattggtccaccaaattttgagatatgaaattgatccgaatcttagggaaatattccttttgggaatcaatccatcacatctatttctaaacaaacatcctgaaaaatggatttgccccaacctagcctatatcaattgaaccaaacacatgccaaaagttcagtagcactgtgctcatttgtgccactttgtttccattcgatgcaggttatactggagagcttgaggatggcgagcataatctccttcacgttcagagaggcagtcgccgacgtggagtacaaaggtaagcacgtgttcaacatggattgggagtcagtgtacactgtactggagtcactgaacaaaagctagcagtagcagcttgcattttgcagtacgttagccagttgtaccaccagctggatcatatatatggatcatgcatgtacagttcctcccattgcacctcgatgtggtcctaataatatggactccaaattaaagtcaccttgagaaaatatcgtacaagattaaacaataagaaaaaaaatggaacctcggataaggccatggaaataaataaatgggtttaaaaatggataatatcgaggtgtctacacatatatatcatggatcataagtcaaccttgcattcatgagatcaatgttaaggaacatacacatcttcaagcatatctagtggccaaaaatgatcgaaatctatcataccttttgggaataattgttgatttattgtgccagtcaatctccttttttcacatactatagataaaaatcctagcatatgcatatataggatatttttatgcgcaatattgtagaacatatttcccattaattgtttgatctatcaaagtttggaggttcctaggactagctagaaaaggtgtaaaccgttttgggagggttaatgcttagcaacctcaccaaatgctagtaattaactccaaccgttttgggagggttaatgtttatcatgggagggttaatgttttctttaaaaaaatattgtggtcttctgtaataagactgataaccaactgcatgcatgctcccccttgaagagaggtgttcagtaaatttcaatcgaaataggggcaacagacaaattcatattttgtagcaaagataaagatatactgtaaataaaaaaattaaaattaaggaacataaactacatgatgagtaacgtcatatccacctcagcataatcatgctgctccgaacaagtggcttgattatttctcatgcatataagccacatggcaataaagagggatgcattttaatttgtttaggcacagttaattgtcgtctccagtgttgtatgaacagcagagcaccctatttcagcttccttgtgtgatatgatatactgacatgagatggtgtatttttcgccataaaagggggcaaaacatccatgtcctctcgttccgattaatatctgaatcatcagcatcacaacgggcggtccagatgcatccttagctgctcctgttcccggccggcaccggtagctagcgaccgattcactccattttcgagtggcagcgtagctgcagaaatgaattgagattgggaaagcaattgaggtggttctgggaacatttattatgtcgtataatagaagcggcataataattaggaacattaattatgtagagtagcactcagtgtttaatttgcaaagtggtatctttcgacaagttaaagtcgcatatatatattttcgtcactgaattcaatttcgagtgagactgaacgacgtttgtgtcgatctgttttgtggtgttttgtcaggtttcctgattccaaaggggtggaaggtgatgcctctgttcaggaacatccatcacaacccggactacttccaggatccacaaaagtttgatccttctagattcaaggtaatgggtcctattccttactcctaagctactgctcactgacccttgaatatggattgcatcagactaaagtaaactattagcggcattaagtacacacgaagacttttaggacatcccatcagaagagtggtagtagcacagttgcaaatcctcacacacgctcaaaattcagactctggtctcgcttacgagacatgcagcaaagtcaaaggaagcaattactggctgcttaccatcttcgttcacactcattgttgactcttttgcgtagactcattaaaccagatcactaatttaacatcagtttaattccccggccaggcctgcactagcttgggcgtacttaacgacgacatctctgaattttgccggccgcttcagtaagcaggtggcagctaattaagtgttgtgcatgcacgcggccaagtccaaaccaaacactagctagagtacaaaggttaatttaggctcactaagatacaatctctcgagcattagcagccggagattaggccgcgaatcttttggactttggttggaccgagagtgactcatccttcagtgtacgtgcgtgcgtgacgcgtggctgtgcgtgcaggtggcgccgcgtccaagcacgttcctgccgttcgggagcggcgtgcacgcgtgcccgggcaacgagctggccaagctggagatgctcgtcctcgtccaccgcctcgtcaccgcctacaggtaagtgatacggcgtacgtgaaaaccaccgtgttttccacggcttttgccggtggcgatcgacagtgtgacggacggcgtacgagcggatgatgttgttgttgttgttgcaggtgggagatcgtcggggcgagcgacgaggtggagtacagcccgttcccggtgccgaggggcgggctcaacgccaagctgtggaagcaggaggcggaggaggacatgtacatggccatgggcaccatcacagcagcaggtgcttgacacgtactactgctgatggtggctgatgtgtccttggtttcttttcgtcgccgtgtgtgtggatgcaatggtcgatcgatcgatctctcctgtaatcctcggataaagcaaaggccatgggagggatgagatgatcgtgtagcaaaatctctcttcactttttcgtgtgtgtgtgttgggttggataatggtggtccatggatatcgttcgatgatcgatgatgatgatgctaaacctagtcttggtgtgcctagtgtagcactaggagtagtagtttatcaattgcttagctgttagctagcatcgctttgcattgggttaatacagctagctgtcaagcttataagtaattaagctctctaatcagggttttaaatctcctgtttgagaagtttgagaaggattctctcatgtacaatttagccgctataacttcatttagcctggctataactgtttgagaagctaaccgctaaatgtcttagcctgctacttaaaaacattgctctttattgcaactgcaaactcgagcatgtgtcatgcatgaacatggcagttgtgatgtcacttctgagttctctgactgtaacaccagtatcagcgacattgaaatgctgccacatgccagaagtctgtggctatcagggtatgcatcatcgatcgatcacaccagtgatatatctgtgtacttttctaaagctgattgttactccctggtcccattttaactgcaatcatgagtttccgcgttcaattttaatcgtccgtcttttttaaattgtttttataattagttttttttataaaatgacaaaacatgatcgaatagtactccacttgtgacttatgttttcaatttttttaaaaaaacaatttaaataaaacggacgatcaaaactgaacgcgaaaaactatagctgcacttgaaatgggaccgagggagtagtactttcaccttcaccttggataaaaaataatttggtgatcacagggctggcctcttcttttaaggagatctctttaagttttctgaaagaaatcgaagaatctgtgtaataatatcaggttgatctctagacatcatagataatcgcgcatgatcttaagtccaaaacaaaagcttgcattatccatacttgtcgccacaacggcatgccacttattacagccgatgtgaccactacaccaaccatatggatcaaccactgcaagactgatcgccagcttgtcactagtaaaaaaaacaatagtaaaattatttagataacaaaaatggattgaaaaaacaaccgtaataatttgtaccatagaatgtacatgttagcagtttttttagacagttctgtgtttgaatatgaagtgaatttgtttatcttttctcatcaattaagcttttgagttaaactgtatataaacctcaacataatatcagaacaactcaatatagtatcagacagaaatctcgagttcaaatccttgctgaagcgtaattaaataaaagttgtacaccacttctattccacgcttgagacttgacggagcctcacgtgaggagaagtgttaaaatataaagtgaatttgcttacctttctttatcagcttaaaattttaagctaaatcggtccatttgtgcaactcaatattcttcgatgcgtggtggagctgcctgtggatgtggcgtggtcttcggtgcacgaaggctagccggcgggggtattggtgcaggggccccacatgtcggcagagtttgagtggtggtgaagtatcggtgcgtcagccgtggattggcaggtggtgagcggcgggtgaaaaccaagcccggccttggccggaccgacaacgatggtcaattccccctcctaagggcgttgtcgtgctgtcttacccctcaagggtggttgccgggcgaaagcccagtcttggctcctttgagccctgacggatggcggcggtggttttccatcgcttctcttcttgaagacgtcgttttggcacccccttgttgtagggcgatctcgtctgtgttcctttgttggtctagcggcggccggtcacgcttagcggtggccggtccggtgctaaccttctcctggtcgtgtgtgttggcgttgtcggtgtgtgggtggtggtatttttttcctttttcctagttacgatcctccagggttgtaatcttgtaatttttttcctgctctattaatagaagttcgcaccatctcgtgcgagtcattaaaaaactcaatattctgagcttgacaacttttagaaaatatagtgttagttgtttgcaatagagcataaatatatgtcctccagataagcaaatgttgtccaggtttattatgttacaatgaaatactgcatcctgtcatgagggacacaataaataggtttgttaaaaaaaacataaggtgacaggacaaacttctaactttattagtgactaactttctatcatttctttcttttctagcttgttccgttcaatctcgccactagccgtgcaatacggggctgctgtcccatgacactggagtagtacttgaccgtgcaaatggttatggaaacggtatgtttaacataaaagggaaaaacaaagaaagcaaaaggtttccatggcagtacaacacctgttagcacattactgtccggatggcaagttatttttttccatgtttccaggctgcacaggatccagcatctgtactagaaaggatcaaaccgcatttccgagtggatggtctttgtcatgtctcagtacgaaaggggcactctttttatttagtttttggggaaataattgaaagctgtgcaatcatcctactcttgtcagactgtagatcactgtagcttttgcttgatctttattcgatctcccttcctttttcatgtttcttgattttttctatgaggggttgtgtggttacaggcttacagcaatgctagctaatgggtctacaaaatcaaatgccactgatgacatgctgcatcaccttcgattgatggatatctttgctgatgcatgccctggacaacacaaagcaccctccatttctgtatccacataatagctagcctcatacgtgtcaaaacttccatgtgtttcgccgtacaaccaacacatgtttatggctgccagacaagcaagaattatatatacgtctcccccacaaggaacattggaacaaacatgctgttcagctggagatgcatgatgccaacgttgacggtgtatggctcagaagaagaagaaagattctaataactcgagtggacgtctacccgtttattacatgttaactggataattaaaaaaaattcaaaaaaattgataagatcatggttcaagaaagcgctaggcgctagttggacggatagggggcgcctagcgcctaattggcgcctaggccccgcctaggcgggcgcctaggtcgggtcaaatagttaaattcaagaaattagtaggcatattgcatagaaattagactatataacactaaaatagcaataaaacactacctaagtaatttaaccgcctaatgcaccattgaatgcctaatcgcggcggctacccggcgcctagcgcctaatgggcgcctaggcggcgcctagggccgatttttagaacactggataagatagatcgatatgtaatatatcgctctataaacatgtaagttcaaattcaacttctacaagttataacaaaaataacaaatttaattgtaaatatgtatataataatttgagctttgtttgttatttttgttacagttcatatgtaacgtcccgcctctcataggacgggcccgcttacatttggcagctttactcgtgtgcaccatccgggaattcctcacttacatttggcagcttttataggtcatatactgcccttatagactaacacaagttttttctaaacactttgtcctcactcgtgtgcacccgggaagaatttcccggtcggtcacccatcccgaaattgctccagaccaagcacgcttaacctcagagttctttcgatgcaacttgttaatatgagtattctattaattctattaagctctgggccgggatgtcaaatcatagaagttaaatgttaacttgtatgtttgtggattgatatattacatattgatctatcttgttcatatttttttaattttttttataactatttagatgacataaaataaacaggtggacgtctactcaagctcttaaaacaatttcatataagaaacctgatctacagaaacaaaaacctgatctacagaaacgacgagaatcaggttgcttttattggttgcatcagctagctagcgttctgcactgaactgtagctcatcttcttctccccagcggtagagcgccgcgtgtcggatggtgctagctccggtagaggactgaactggtgtttctgatgggaaaagcatttgtcagatcataccaaccgctgttctagttcggtcactgctgtcgaaagtgagttggcatccagtgtttgtagggttcggacttcggacaaggtgtgtgttggagtccagctaacgaggggcagtacttgctctgacacggcaagcacggaagcacacgccggacaagagctcacgcgacggcatgcgcatgtcgtgcagtgtccatgaggggatcatcggcttctcttttggcccctctcttaaacaccaccagttttgtgtcatccgtgcattacaatgacggatctcaattctcaaatcaataacaaaggttccaacttaaagaatagatcactccggtatgaatttcatgcgtataattataccacaagttattttaaaatgaacaacctagatagtctatacgatgttttgtattaataatagagcaggaaaaattataaaacttctagtaaactttttttttacaaaactatattctgaaatgttgtaatccgaaaaagaaaaacaaccataccaccgtacaatgctacgttagaccagtcaccgtcagacctataacgtagccactattgaactgcccatgaaagcctctaaacagccgaaaacatcacagcctcatagacaccaccagcgagaaaggttgcataagggacaagtgagaataacatctactcatccctgaatagacctgccgtcatttaagagtgtcattccaattgtttgaaggggtaaaaaaaaacataaacatgatctcataggcaatgcttctaagaaggaagtaatgacataaacatcgccaccacctgtcctaggaatctagatgttgtttttacttagaggatcccgacatgggagaacgaaacacctcgataagaccttttggagggatcacaacacttgaaaatgttgtcgttgtcaatccagcaagccatcaggctagccttttacttgctgcttgttcggcccctacaactacagctccattgcccccaacattcaatattgctaacaacgtatagacacctctacaccaacacccctctatcggttagcctctacacaactctgcatgctactgctagtgtggctataggacaaaccgtagcaagagccaagcataatgtcatcccttagtgtagatctatccgccgtcattgacctcataaaccaatgtcacccatgccactaccttaggggccgaggacacctacccttccctacaatggatttggcctaccgccatcaacactttcgtcgccatagaggccaagaacatttgtcctaccatgtcatagatttggcccacaccaccattgtcaccagccacctacagaccacctcctctcaccagccagctcccatatgaagcgacagcaccttcactaggtccacactgttgaccagcacctccgtcatggcctcctcctccttgctttgtcgagcattggttgtgggaaacgtcgtcatgtatatccgctgaccgtgccatcgccgcacccatgcacctcatcatcactgacaagcatggatccagcctcgggagccaaatctagcctcaacagagcaagatttgtttccacggcttaggagttagggctgccatcgctaccgccgccataggcttttcctcaataatttatggctagtgagtatgggaggatgatgggagaaagccttgctaccgctttcctcgcagactttcagcgatgtgctctagtgccagtgaggtagaggagaggaggtggattacgtggtggcatgagtgttagggtttcacctatattgccgagggggatgagggggatgacacagacgatgcatgccggtcttaggcccatgaacatgattataccatcaactattggcaactatatatacgcatgcaaataatatataacatcatggtataatagaaattgagagaagacaaactatccacttatactctcacattataaaagcttaaaacaggatcataaccacttattgtttccttgttatcttatgagccacgagcaaaatttgaatttcaaaagtcaattttgggattttttttaaaaaaaaggcttttaaaacgttaatacatagtaacacaaatggttctttttttttccacagcttatcaaacatagctcacacgatcagagtaattttccacagcttatcaaacatagctcacacgatcagagtaatgatcaaattaacgccacccgctcctctataacaagtagagtttctgtttatctcatcttagatacattttatggcatctgctggaataaagatccagcgctaaaacactctgcgctacagcattgcatcaactttcttctcttttctgttgcatttgattgctgtgtgtgtgcagtgaaactggctgaagttgccgggagaggtttcttttcccctcgtgcatcatggaatcgtgatccatgaggaatcaaccaatcatgccgatcgatcgacagaggagctggctgggccatggccgactgctcgaccgggttggccgggaaatatctctttctcggccatcaatcatcatcatcattcatcatcaatctaggagatctggaagggcaacgcctgaagtcgacacgtggagaatactcctcctttcgctgtgacctgtcactgtgagtgtgagagactgagtgagagtgctgggctccagggccagctataacccatgccgctcacctgtgtaagctggcagtgtcccttggcatggcagatgccaggcgatctccatttgctttcggttcgtgtcttgcagcagcgcaccagaccgaccaaagtacagtagttaacggcacaagaactagtcagtaggtgcaatgccgatgcagggttggctggcaaagccgcaaaggcaaaagcttagttaggactgaggcatcatgtccagatcagaagggttaaggtgagagttgtttggttagttcgaatgtttaaacattggtcaaaatgtcaggcaccacaaacattagcgaggtttgatatgaacctgaacctacattaatgcaaatcccagcaaatgtcattacaaaggtggtacttcagttgttctgcaaacgttttttgatgtttctccgtgactacagttataacatagtacattacattatatcacagcaatatcgttcattgtcccaagtcaatcccttgttgactgttacccaaaaaagtgagaaaaacaaaacatctggcctgtcgatgaaaatttacaatcgatgtatctcaatgcctaacaaggctgtgcttttgattgtagatagatctgtgtgagcatgaattggttgctactccctctttttcacaatgtaagtcattctagcatttcccacattcatattgatgttgataaatctagacatatatatctatctagattcattaaatcaatatgaatgtgagaaatgcaagaatgaattacattatgaaacggaggaagtactacataagacatactagcagactagcttaccgtacagcagaaactacacattgtatattttcaactagagaaaggcgcaagaaaagaaaatgtctagagcatagttatacaaaaatcacttcaagctttgcacatggatgatctttaatgtatttgtcaagatctgcgtcatctctaaatctgaactggtataatgcctgtcgttgtgtaaggccgattggataaattttgtataccttcaactcgtccccacctctaatacttggtggtctttcatccttccacacaggaacatgattgagcgatctaaatttagcaagcacagcagactccaaagcacccatagttaattggtccgacctgcattgcataggaaaggcacaagttttaaaaagactagcaggaaaacaatcaggtaaaataagttagaaacaattgtatatttaagctattcaatttgcaagcagcattagttgcagtaaagacaccaagtttataatgtaacaaagctagaagttattttatatatgtttttaaaaagagcaaattgcacaatagggcaataggctaggtattattaccgaagtttcactttggaccaggacaatgaaactttggaccaaagttttttttttccatttgttgcacactgggctacccatcttaccggctggcctggcattgcctgcatctcaccatcacggcatccatgaaccctctgttgttgctgctgctgcaaggcatgaagagtgcatgcgcatgcagagtaagatgagttgctccaagggggcagccattggagcggtgagggcatgaggtagatggaggtcggaagcgggtgtgaggaagtcgacattaacagagcctgagcttgggacaacacaaatagagttcaagtgcagggacggcaatggtggagccagcgaagctcgagctcgagggatgccaaggcaaaggcagccattgctgaaactgaaatcaagtttgcggcagccaggcggaggtggaaagcgagcttgggcgctgtcaaggcagaactcctcctgtgccaactacgggtaagcccatttagaaggaatagctcatggaagggtggggacagtggtcatcccaactgcagctgccttgatctggagaggagttagagcaggggaaccacgggagggatgtggaaattggatacgcaatggcagtacaagcacaagctcacgattgcttcttctgtagcaccagaagccaactaaccaggcatcctctctagagttggagagatgggatggtctaacctgcaacaaaggtaatatttcctagccctatgtgaaaacattgtttatgccctggtccaaagtgaaactttgttcataatacatggcccaatgtgcaattccctctttgaaaaatgatcaggagcactgtgattcacaagacaactaaaccagtagcaccatattcatcggtgccatcgtaaaaaacagaaggttggaaaatatcattgcatgtgcaagatcattctcacatgcaattatatttctgtctttgtggtggaatttacctatttttttcaaactagcacttaagtccttataatataaaaatataacagtagtcaggtacaaatgcaccatctgactatctgagataataaggacattagagttgagattacataatataggatgagcatctgcccttgtaacattttttttaaaaaaatcccttgatattttgctctttatcatgacagctgcagataacaaatctaacacaggtaaatataacagtaattaattccatacctcagaaaaatgctctctgtcttgaaccgccctctttctctgacaaacaagtggtatacctttcctcttttgcttgaacaactacatgggcgattcataaattttggtgtcctttcctctttctcatgaatcttcgtcgcgacatgtatgcaaagacgacatgatgaatgaaccgctgccatgtcaataagggccttgaaagaatcagatgggccatcatacttccatctacaaattcaaaacatagaatgagatatgcacagcacagaaaatggtgacctaataatggctgataaaggatctttgacaaactgtacagtaattttatcagcagaatcatctacacgtgaatggaacccctgaactactcaaggataccttcaagcaaatcaaaggtaatgaggacgccaacttactctaagcctaaactgcatcagtttttttataattatgtcttgaataatggttccaacaaatagatttacaagatatgggagagtgaaacaaaaaagacaaaaagaaaatacacccagtagagtctcatggcagtactataatttggctatttcttcattctaagataaataagaataatctatctaaagcagcaatagcaagttaaaatctatgttagacagccagttatactaaagactaattccagtagcttctgatggtggtttcatgcttttccagagtgccagagtcacatgattggtaccaacaagtttacaatagagtatcgctgcaatagcattttaagattgagaaatggatttccagaaaaaatctttaattgtagagtaattttgttcctcaacaagttacatatttgataatgcttgtttgcaagatcttggtaaatgaaaaaatgagtgggtgaaagcaacatcatagcaagttaataatgtataatacagcattacatcttattccttaaaagaactatgccaaaaattgataagcatgactccatatatttccaatgctgaactggtgattgctttttaatgcaaattcagtgtacatgcagacatacaccatgattatgcttgaatttgcggagatcattagatgttccaaaaatatgattggtgtacacgtgatgctccaacaataccattagtgaatgagaaacaaatctatctcaggcatgaagtcaacagggaaagcaggagcatttacctcaaagattgattaaaggcttcctgatttgatgcaatatgtttcattgtcttggcaattgaaggaacatcatcaagctctttaatgtgtaatattgcgccttctccaggagagaactcttgaatgtttggagcaccaatcacaactggaatagctcctgtagcacagcgcagatgaaattttcaatcacttccattccagttagaaatctaaatttcacagagttcaaatttaatcaattgctggaattggaattaaataaaattcatggtgaacagaaataaaatgttaatcagtagatatgggaaatatgtacatcacaaatatgacaatttggtttatgatttggaagatcctaatcgatctgtttcacaatatttgttcacttgcttcatgaaagtactttcataatatatttcaattggtgagagtcacgataatatgattttccatgtctgtgcaatattccaccccagagagatgactaacaaatgggcataaagcttatactaactctggatccaatgttggatgagaatttaccaatgcaaattgtgtggatgggtgggtgtgggctgggggtttgggtcaggaatgcttaatagcttatccaattacctgttaccagcgattgaaaaaacttttctgtaacataatcttcctcgttggaattctcaaaggccaagctaaatttgtagcgcttcaaagtttccactttatcaactgcaccaggcaacatataaagttcgcataacatttctttcctcaaaacatatgcagtacaacaatagaaatacaaactagtccaatcataaaagcatcatttatgtaggcaaagcatttatcagattttaacaacacaatatgatataagaaaaggaaaaaatgttgccctggacagtgcatcaatgtccaaaacaaattatatttgcagccagaaggaccaaggaagaataacttaatgcagagatagataaaatcttaattaacaaagttgaacataacgatagctctttggtttttaatcttttataggttgaaacatcatttgctgctgctctaataataatactatgtgctactctatataccaacttctggcagcaacatcatttcccagcaatagttattaagatttaaaaaaaggttatgtgcaaatattgatgttgaaattattgtgatcatataaataaaatgtggaggtcatcagtgtgcttaatacaaaagtagattctaaatcatcaaacacggtatccttaaaggcttcataaaatcaaaaagaaaagaaaatttgtcatgtgattttcacatacccagttaggaattatctcagttaaacagaagggagatggacctgacaattagcatattgacatagcagcaagaattggcagttgtgatagttttatatggtattcaatatttttgattgcttggaacaattaaaaccatgccacgtggaacactttgctgtggctggccactcattacactcttggaagcataaggcaacatatctcattaactatatacgagtaaatttcacaaaagttaataaagtatgtcactcgaaatatggaagagaaagtgtacctttgccatcatgattacgatggcaactaccatatgaatcaattttgacatctaagctctcaagcatctcaagggcttgcaaacgaaaattacgtgcaccacagtttgaaataaatgctgcagctagggcttcttcagtttttggaggcacaggtgccattatatcatattcagcccatgaaaagtagccaacaggtacatctgaggaaaggcttgttgtcatcacaattttgtaacctctcctgtgagagagcatcaggattgctcagtccattagaattatgcttctaaaaataataaatcacactgaggattaaaatgaatagttccgtagctggggatacatgatggtaataggttcacaagaacaatagcatattcaatacaatactggttaattactattttactattttattttaagtgagaatgtttgagcatcagcacgaagccaatatagtagccaaatagcgctctttactttcttaatattacaaataaaagtattaacctacaaccatgtgtgactattaaccatgtgtgacttctcaacatggataacagagtagggatcttagagccagtatgaaaattgcttacattatgaaaacatctaacagttctgagtttatgtaccaaagtgaagtcacacatggttacaaactaccaaagtgtacgtggaacacaacaaataaggttaaaatatcatttaaataggcagagaaatcacccaaccagaattaacttggttcttacccaccctcgagccacagcaatgttgttctctgaataatactgagatgactccatcgatctgaggatactctctacagtaggatctggggcaattccaaaagtagcatcaggcgtcttagtagctgaaaacccaaattcacatcctacagaacatttattccaatcctgagaggggaaagaatgcataagcacgatatatggagaataagtaaagcactaaatgaatgacaagtgatggcaccaatggtacaaacaacaatcatcattatctgcaatcatcacatcacaaatggcagtatggcaccaacacaagcgtatagcaccaggtataagcttacattaaggtatgcagttgagcataaagcttgagggcaagatcttcgaattctctgttgctaaatctaattttcacaatattttatttttacaccatttagaaagtgtttgtggaatgttgagtaacacactagaactgccccctccttcctcctgacataatcaaaccaacatgatatcatgtgcattctgatctactatttgaaaaaaaaaatactggttccaaacattcactaccacatcccttcattcccatggaaatgatgcccacgtaagtttgctaaaccatggtatcctaatttccagcatttataatcccaatttaataatcattgagtggtaataatgtcaggatatcatgaccaacccaacagtccataacctccaattcgtgtcatggtttatgtttaatataagaggttacttgttctttttcactttggatgattttgtttgtaacagatacaaatatgcaatttcttttataactcgtataatggtatgaaggctagaagactgtggagtctataagcacaaagtcaagatttttcataatctactagttacagatgtatgttaaggaagccccatatgtaacctggtggagaggccagtgacgaacgtgtcaccaaattttagggggtgctaataaacaaaactgacagaaaactatctaataaaataaatgacatatatgttttcttatatcatcttactgtcattgttgtggtgcaacaaatgtgttccatattatactattgacaatagaactaatgggcttgactcatggactcagctaattcccttggttgctcaaaaaaataacaaagcagcctcgctggcccaaacagccgaagcccccaaactacagaaggatgtgcttgctaatgtgtgggactggatgtgtacgtctggtgtgcaaaggctcttgtaccagtggaaagggtgttctgtacttctgttagtgcccccaagtaggtcgaaatgttgtgtaaaatctgcaactaagcatgcaagtgagaaatttgcaattccaaaatggcaagtatggcgtagatgcataatctggacctttacatgcacgagctagagttatataagtattgctagcgacatacagataacagaacatcgactagaattaatgagctttaactcgttgatttggctacttggcttttgttgctagaacaaataacagaacatgcacatgcaaacatgaaatcccacgtaagcctcaccagcccaaagccccaaacaacccaagcccccaaactatagaaggatgcactagctaacaagtgtgtgtgtgcaagagcccccgttgagtcttccgctgagagagactcttgcaccatggaagggatgttttgttagtgctctatcttagttcaaattgagcatgcaagggaaaaaattgcaattctaaaatggcaaatacgacgtcagatgcataatccggaccttttgcacgagcaatccgtgtgctagagttatctaagtaatgttatccaactaagcagaagacctgttgagctgagcagtccaaaagtagctctcctaactcaaatgcaagagcacaaggaggcggatctccgaactgaaatggaagagcgcgaggaggggcggatcgggagaacaggtacgagaccttagcggcgcccccgacgaggacgggatccttgtcgaagtcgcggtcgtgcggcacgccgtcctccctctcaagccgctcctcgcacaaccggatgtcgccgtcgtcctcctccaccacctcacctccgcccgggggcgcgtcgtccgcgtccgcgccggggaccacgaccgctgccttcccgtcgcgggcgggggcggaggagcgggcgtagaaggaggtggtccagctctcgaccgcggcggcgttcttcgccatgtcgaggcggccgaggaacgcgatctcggcgaggaaggccgcgccgacgaggagcggcagcagccacccgcaccgccgccgccggcccgcctgggactgggcctgggcctgcgactgcgagtgggaccccttcatcgccacgcgcagctccgcctcctctcgccggtggcggaggcgatgggtggggtggtgggtgaggggcggagtcgttagacgacctggtcgtgggagttggcaaggcgacctcgtctcgatcttcttttctcatcgtgtgggcccacgatgtcagtgagagagcatggcagagatccaattttgcttgggcccatttaaccattctattttcctgggcctttttctgcaggcctcgtggtctgtccaggaaccggagtcaaacggcccatcctttagtgggctaacagcttaattatttgggaaaagtgtacttttactccctcaactatcgcccgagtatgatttatgtcctccaaccacaaaactgggtatatcgacacctccatctattaaaaccggtgcaaacaatgcctctgggtggtttttggatgacatgacgcctatatggcgattttaaccgagtctttgtcctacgtggcgtttatgtggtattagaataaaaataaaaagaataaatgggacctatatgtcattcacataaataatgtattgtagaaccactgacataccgggttttgtggttgaaggacgtgaatcatactcgagagatagttgagggagtcaaagtatactttttcctaattacttccctatatttgcatgggctgatcaatgtgtcccgtctgggccgtctaattgggctagagctggtatactccgtggtccttggcattggccgattctgaccgagttagccacgaatgaagtttatgcatgtcagcgagagtttaaattcagatcactatttttttagataatattcagatcactatttggattagggaatagttaattgaaaagttatagctaatctggtacagccagtagctcgaaagagacccctgcaaaggtaagaactaagaaagaccgaagaacactgaagagaaagggagctaggcatatgcaggaatgctaaagcactgaagaaaattcagtgtgttacagaaatggaacttggcattgctacagtgttgaagaaaattcaagagtgttacagtcgcatgaatacatgtcggtgaactcggaaacgtgagattaacttcgatactgtacagatccaaggcagtacagattattgcatgtgttcttttctctcaagatggcactgcagcaatcaatctgaaactaaagcagcgctgaattttcctcattccggagtgttctgcagctgatttccaattgggcctaggctaggtctgggctaaagcaaactaacctaggcctgggttaggtgtaataaactttgcatttagtgcttagattaggttcaaatcaggattaggctccaaccataccatatgcatgcatctagctcgttctgcaacacaaaggcaacgcccacgaggcgttagctagacaaagggaatcatcaagaacatgctgtgacggtagattagaacaagcaagaaatataaatcgtttcagtttgtcatctgtgcatcgcatgtctgggaacagcaaaagcaggacaaaatctaaagaggtggttaaaaccaaaagtacaagacggacgaacggttctatgtatagagtatttcattgtgtcaccttggccatccatcacaaatacgtgatcccaacacatgagacaagccatgcaatagagttctgcttggaaaaaaaaagactagttattgttaattaccatggattggattccattgctctgaatgatgctctgtttgtggtccatgatcatggacaggtaggaaaggagcataaacatattgtacagccagccagccagccagcccaagcaagactggcgttgcaaccatttctgcatcccccccaaagtaattaggattattcatttgaaagatagaataagaacctaactaaggcattggtttctattcccttatctgttcttttatgttgattcctctaacaaactagaaataaaagaaagtaattaaatttgtccttgtccatatacattcatactcgttggctagcttctcatgtagcgattcccaacgtcaatgaggtttagggaccagtaatatcctaataaacgaatactagcacagtctgaaagaactgaaacttctttttggtgatggcatatatacaagtccgagatgttcagagaagcaacaaatcgaccacatatagtactagaaagactgcaattttttgttgtatcatagggattccaataggttaactacctacacattccaatggaggagacatcacgaatttttatttgatgcatccctatcacaatacgtacgtagctaagtatagctcattcttttttctatctcaacctgggagagaagaaagtatctttgaataccgtttcaatcaggcgcacgggtgtcctgttcttaaatctatacgcatgctcagagcacccacaatggtaaaataagatgatatctataaaatatgtacatatcagcaatagattagattaatagtaaaccacttcaatagtatgtctacatgggtatctatagctctctaatctattgtattatttttctctatatattatctcaaggttagtagatagttttgctctctctttatttaatctcttccaagtagaaaaatatgctgacatggatatcttgtagagagcctatagataaccattacgggtcccctcatcaactacctaaaaagtgatcatggcatcttcttttctcttccaccaagtttaatttgcctatgcctacaatggctacgtctaggctagctttgtttgtttaacacaccatgaagcagaaccagaattgtgcaaatgttgttgttcactttgcctttgcatgctgcggaccagctgagaatctttatttcgggttgttcctttgatgcggtgggatagtttttgtgggtatatatatgcgactctattgctactacatgctagggtttaaattctgatatacggagtacatatgatatgtttttattaggtttgtactacagatcggtataaaacctatagcgcacatgttttttaatatttctccatcatatatataattataaaaaaatgagagtataactgcatgaaagtatttctaatgaaagaaatctaaaaatgtcacttttacttatgaaatcttaattattggcgatataagatgacttctcaaaaaatatgtactaccaccgtttttaagagatgacgtcgttgactttttgtcacacgtttgaccattcatcttattccaaaaatgtatgtaatcataatttattttgttataagtcgtttttatcactcaaagtattttaagtatgatttatataatgtataaaatttttgaataagacaaatggtcaaatatgtgttcaaaagtcaatgcattcaccaataggatttaataattgtgggttctttatcttgtgttggtgcttattagtttgtgcttatgctttgttaaatcttggtgtgtttgtgtgaaccctttggtgtgtggtcgctttagagcgaatttgtgtaaaaattggttgtagctcgttgagcaaatgccagattttatttcattataaaaaaataaaaaacacaaaggggatataagattttgaggtttgactgcttgcgcccaggagcggatccagcgtgggtgccggagggactcgagtcccccttaccccactggatcaccattgacagaaggagagatgaaagagtaagaagagggagaaaatgaagagtaggggggactgaagaaggaagaaaaagatgagtctcgagtccccctttcattctggttctagatccgcccctacttgcgcctaagacaacatctttcatgtctagtctgataagatggattttcatgacaactttacacctctcccaaacaagtttcttactttatattcctattcgagaaatgtgcaggggataaatataaaacaaagaattacttgtgcacgaacatgtcaattgccatatactaccgcggaaagaaaagggaacgtcctttgcatccacgactgattcaagcacgtagtggtgctgcgtaatgatcatgtccctagctatatatactacgctgtaatcgccttttatttccctttcgtttatccccgtcagattcagcaaatcacaacagtacattggtgatcaatttctgattagacaaagtccatatcagggtagagatgcaaggttttatctcactaatccacatgactagcattacagaaccaggttgaaagctaacgcaataatattattccaggtgcttttctttgcagaccgcggttcgccaactctatatcagatagataggcatgtagccaggcaacactgcctggctggcccacagccacacgatcaacatcccacgaatacaatttctgcattgtctagtgaaagtttggttttggtgaaaagaaaagttaaggtaggttgagtcctctaagtttaatattcaagggagcctactcctccaaggaaaaaaaatagaatttagtttgtcatttttttactgatgcaagtgattatattcactaatactcctagatagaactgttaaatgtttctctaggatcaagattgacatgaactttgtaatgttcaagctggccaaccagcagatcttttgtactgtttattttgttcatgcaaaattattgaatcactgttgatgaacaagttgttgcatgcatgcataattccatatgcaagaggtgatgcattttctgcattgttgtcttgtagaccatgaaccaaaagtgttttctgcactgttgcccggacccaaaagtaactaaagattgagaaggactacacttcagggataaacaaggagctaaccaaaatgctgaaatgagatattcataagtctggggttggtgcacagcacaaatttattcgtttaaaaaatgtttattttatttttgttcacattaccgccactgtatttacatcttactaccactcacaattcacagcactgccaaaaaagaaaaaatcacaacactgcaaataccaactgcatgcatgcaagctgcaacatcagcagacacggctttattcatgtgtctggtaagtgtacaccagcgagagttgcccaaaagagtgtcaagatcgaacagcaagaatccgatcgtccagtggaagaatcacccgttgctcattgagtcatttggcatttttcaattttatgtaggaaagacgagttccttttgtttttctaatgaatgactcgaaaggcaccagctagataggcaagttagtgacacaggtgaacactagcactgctagctagctactgctggctggctggatggatcaatttgctcctaggttagtacatataccggccggctctgaattatggtgctttcggttggcgcattaacatcactcatgggggaaaaggatggacgctgttgatcctgtttggagagacggcgctaattaaacttctcacaggatgcatgacatgagatggatcatcgttaggttattgctgcctttgggcttcctcgaaatgcaggaatttttataggacttttatgtgtaagttggttcaaatgtcacaaaagtccttcatttcaagggaatccttatgttttctgaaaatatagaggggattttatggagagctggtcatgatcggtgggtatttgaagagtcggatatagcaattttagagattctagctcttagtgatgtgctctttccgtttcaggttataagactttatagcattgcccacattcatataaatgttaatgaatttaagtacacctatatgtctaaattcattaacatatatatatatatatattaatgaatatatatatatatatatatatatatatgagtgtaggcaatgctaaaaagtctttgtaatatgaaacggagaaagtatgttcttcgatgatctgactgtgacgactcatgaacaaactaaattcctgcctagaaatccacatgattcaagccttccaggacagctacttatgggttgaacctctgaattgggggaggcagagcttctaaaatggagggccactgttgggtgagatgacgtcgtcaaagcaactgttctattgctgctgcatatatctgtccgtcgacaaaacattcgctcgcattttatgacgggtgatctgaactaatcgatcgtggagctatcgatccctttgtctcggttgattggagaatgatttcgtgtagag

SEQ ID NO: 19874 - DNA, 663 bp, Oryza sativa
cagtcgccggcgacaagctccgatatggaccgtggatggggaaggatgcggctgccagcgacgaggttcgggttcggtgtggaccgtggacgggggaggacgcggccgccgatgacgacgcctcgacgcccagctcctgatatctggtaggtatcatctgatacctcacaagtatcaccccgatacatcgtagaaatcgcacgatacctgataggtatcacatgatacctcacgagtatcgcctgatatgtgataggaatcgtctgatacctgatgcatggtagaatcgcatgatacctggtaagtatcacccgataccggctaggtatcaggacatgatacatcgcaagtatcaccatctatgtggtaaaaatcgcatgatacttaataggtatcatctgataccttgcaagtattacctgatacgtggtaggaatcgcctgatacttgatggttatacttgatacatgttaggtattaggtcctgataccttaccggtatcaggcgatacttgcgaggtatcaggtgatacctgatacctataaggtattaggcgattcctatcacgtatcatgtgatgcttgtgaagtatcaggtgatacttgtaaggtatcatatgattcttaccacgtagaaggtgatactttcaaagtatcaagtga

SEQ ID NO: 19875 - DNA, 5985 bp, Oryza sativa
caactgcgtatcagaaaccgaacacctacccggcaccaacgccgacaaccactaccgccccctccctcccctggctctaggcaccgccgccgcactgcccctccctcctctggctccggccaccgccgccgctccgtaccccaaatctggctaccgccaccgccgcccctcccttccctagctccggccaggcggccaccaccatcactctgttccctggctccggccaccgacgcccctcctctcttcgttgatgtatcccccgccggcggctcggccacgatgtgtcgctgcctcgacgcgacgcaaacgaggtcctcgatgtcgcaggagctcactgcgcggggctcgtcgccagcggccgcgtcctcccctcgccgagtgggtcttcttccccaactgcgccgaaggtcctcgtggacaggcggcagcaatctcctccacatgctcaggcgctcagctctcgcttctctttggatagcccgacggaatcccggtatgtagcattttcattcaaatttaactaggggtaaaagttttactgtgagtaaaaattttactcgagatgacgtgaatgaatcttaaacgttcatttttttttctatggtagttttcatgtttacactatatatatggttttcaggttagtaacagatctttagcctcactgaattcactttttatgtgcatccatgtgtatatatagtatttgtgagcaccaagtttcaaacactgatggatgaagttttacacccccacgattccacgaggaccacgaccacatctgtggtcttttccctatcacttaaaatctttgatccggctttaaccaaaacaaagtggctatgatttttttttgaaaagttggcatacattgataaagtattaagtatgcataagccatcctacaaattaaatctcaattacacaatgaagtttggggctgtgaatgtagtactgtatatagttatactgtcgaatttgcacccttcttttcaaagtgtgcatgtagtttgtatgaaattttacatgataggactctatagtcgatttatttttaagaatctttacaattattctgaatatgtttaaatagtaacggaacataccattaatgtttcgaaggatttttttttctctaggacttgtccttgttcggaactttagatattctttagatttgtcagtgatctggaccactatttatccaacggtggatagaagggttgcaaacttgcaacttttcaactccaggcgatctctacccatattacgtaggagtatctacgcttaccagatgtactggggccgtccaattccatctttcaccggaaatccccgccgtacgtttggtcatctcatcggaacagggttcatctgtcgttgttactactcgttgttactcggcggattaggcatggtaaaactagcagccgcgagacaaatcctgggcgaggtcacgtacgccgccttgttcgttaccagcgaggagggaaaccaccaagagacgccaactcaaagaatcgccttgtgctctcctccgcctcctccccgttgcttgccttgctccccctacccctcgatctcttcccctggccccaccacccgtaccgcgacgcaatggccgcctcctcccctatataacccgcgtctcctccatccctcacctcgcctctgctccctccagcgttcgtccagttcgtctacctcgttgccacagccattgtcatctgtcgaagctttactggtagtgcgcgttctaggggcggtcgccgtacgggaggcggtggcaatggtggacgtggaccgccggatggccggcctgtccccggcggcgcacgcggcggggctgcggcggctgtccacgcgcgccgccgcggggccctcgtcggcgtcggcctcgccgcgccacgggctccactcgttccacgcgctggcgggcgcggtgctgtcgcacctcagggcgtccggggtggccgtgctcccggggctgtccgacgcggagctggcgcgcgccgaggccgagatggggttcgcgttcccgcccgacctgcgcgcggtgctcgccatgggcctcccgtcgggtcccgggttcccggactggcggacgcgcgccgggctccggtcggcgttcgacctgcccatcgcggcggcgtcgctgcagatcgcgcgtggcgcgctgtggccgcggtgctgggggccgaggcccgccgaccccgacagggcgctccggctcgcgcgctcctccatccgccgcgcgccgctgcttgtgccgctcttcgaccgctgcttcctgccctgccgcccctgcctcgccgggaaccccatcttcttcgtcaccgacgaccgggtgctctgctgtggcctcgacatcctacacttcttcacgcgagactcctcgttccagccgctcgacctccgccccccctcgtcgtcgtcgtcggtcgccccgtcctccggcgaggcgacgccgtacatgcgccgcagcctcgacgcggcttgcggcgggaaagccccacgctggatcgagttctggagcgacgccgcgtccgaccggcgccgccgtgactcgtcctcctcggaggcctcgaccgcgtcgtcgtcatccgggtgcgcgtcgccgccggcgaggagatcgaggaccccgcactgggtcgacacctacctggacaggctcgggtcagtcctcaagagcggcgggtggagggacacggaggtgaatgagatggtcgaggtgacggcctccggtctgttcgacggcgaggaggcgccggcggtggacgccgacgcggtgctcgacgcgctcctcctgaaggccgacaggtgctcggactcgctccgccgtgccgggtggagctccgaggacgtgtccgacgcgctggggctcgacctccggcgatgcaaggagcggccgcggcccgccgttcagctaccgccggagatcgccgtcaaggtggagcggctcgcgaagtcggtagctaggcggtgacctcatcgccgccgccggagccatcggccatcactagcactagcaagcatgccgttttcctttagaaaaagttactttctttttttttccttaactttttcactatacaaggaaagaatacatgtacttttaatcaagtaaataaaaattaaccccgtgaccgtgatcatctgaatactgggatgtaatttaatgctctcatgtctcaagtggtgagagtaacttggtcaagtgagtaacggttacattgacggcgcaagcacacactttttttttcactttttttttattttgggactggtaagaatttttttcaatcttttgttagcaaacggtactttttgtcgaatctttgggggtcaaggtggatgccagtgtctgctgctaatctaccgatcatctaccgatccaccccagtctctcatttccactagcaaaacggatcctaccgtcccatgtatctaccgtactagattgaatgcaacggatcttacggaactcccagtgcaagatctagcggtgtgcttcagcaaaaggcagcgttttctctcactatagggctagtttggtttggtttcaaattgtgccctaccaattcattggcaattgtctatagtgttttttgttgtttgtattggtgccaattttaacaaaacatctcttagatggtaaaaattttggccatccaaaattgatagtgccaaaagttacccaaactttgacactaccaagattttggtatagcaccaaatcaaactggcacatagtttcttgattatttttgtcgtgcattttgcctccgtgcatgttcgaactggataatactaggagtactactactagccgacaaatcggcagtaaatggtaaatttccaccgtttttagtttttaccctcacctcacctagacggtgtgtcatgatgagtggttgggtcggatcggatagttgtgggttgggttcgtgctcatacatgcacccccgcgcttttggttgagggtgttgcagcagttgttattactgtgtgcaccgtgccgacgtgtctccgctttccgtcgacctcgcggccggccacgggtgtggcctccgaaaagaacagccttgttccgtagccagccagccgcagcggcggcagcgcacacgcgcggcttttgccctcgggagccgagcgcccgtgtcgcccgccccgcctgccatgccgcgcgctgtggcctgtggtgcccgtgcatgcagccgtacgtgcagccgcggcgcggcgcgttcccgttctcacttgctgctctcctctctcgtcgcaacaagcagctttggtgcaggcacctcgcctcgcacggttcatcaatgccgcggcgtgcgctccgtgcaggtggtggtgataaactgaacgtttcaactggtgataaactgtacagatggccaactctccgagggcccttcagtagcatagggattctttttagttccgatgggaaattaaccgttttctgtaataaaaaaaaagcgtgaaattcttgtaggaaggtgccccagcgaaatggatgtgtgcagatctcttttatctgggaggttttataaaggggagtagctatacaactgtcgacagttttttggatgaaaaactttcaaatgtaactactatataaatacattgtaactactatgtaactcgagtgtaactcaaaaaagcacgccggagcaactggttagctggacaaacctctaagttggaggtgttgggtttgatccctgctgcatgcgtctgattttttccccttttacttcactagcacaaatctcaaagcatattagacgacttaaaatttgaaagttttcacacctgttaactgtcgacagttgtatagaaaatccgtttataaagtgtacgaagggtatgtgtcatggagaccacaagcatctgtggtctcaggttgccacataggataaccccacacaaaaaccacaaatctcaaagcatattagacgacttaaaatttgaaagttttcacacctgttaactgtcgacagttgtatagaaaatccgtttataaagtgtacgaagggtatgtgtcatggagaccacaagcatctgtggtctcaggttgccacataggataaccccacacaaaaaccacgatatctataatggagatcactgctaagtgtatttttgtgtttcaatctctacctatttatgtgttagtccctatgatatttgttattaacaaattaactattttagaccttctaacatcaaaaagaaatgtacagatacccctaatctatatatagacccacactgtcagcctctcaaatcctctctctctctcatttattttctcttcctagcagcctctatcttatcctcttcctctccaaccgattcaacacctcctcctcctcctctcaacggcaccgcctcctcttccgacacagaggcgccgctccccctgctccccatctagctccggcctctcccccgcgtcttctctgcaagcggcagcggtggaagggacaacgagtggcgatggcggagccccatggcggcggcggcggatttggccgcgagctcgttggcctcttgccctcccttctctacgagcggcggcggcctcttcccacgacagtgccggatctggccgccaacttcttccctctcccccctcttctcgcagcagccgagggaccatcggcggcggcggatcctctccccctcccttcttcacgagcgtcgcatcagctggcctctcccctccatccccatgtcgcgacggtgaggggccactggcggtggtggatccggccatgagctcaccggatctggcggcggcggagagcagcggacgacgacaaccacgatgagatggggatttggggtaggtgcacggggggaccgatcagacgaggcgacgcgcggggctctgactcctccaacgcaagttctcgagccgtggcttcgcggctcccgggcccaggcgcggcgcttggagcgtttcctctg

SEQ ID NO: 19876 - DNA, 800 bp, Oryza sativa
gagggaagggtggggggtgaggaaggcggcggcgagggtgagggtggcggcggaggagaactggcggcgggcgtgggtggtggcgctgtggttcgccgccatggcgtcgctgttcgtgtggaagttcgtgcagtaccggcgcacgccggcgttccgggtgatggggtactgcctcccgacggcgaagggcgccgccgagacgctcaagctcaacatggcgctcgtcctcctccccgtctgccgcaacacgctgacgtggctccgctcctcctgggcccgcttcttcgtccccttcgacgacaacatcaccttccacaaggtaaattcaattaaatcccctcccgcctaaataacactctccgtctccttttaaatacagtcgtatgtcccattttaaatacagtcagaatttgtatatttaaattttaactatctatcttatatttaaaaaaaatattaaataggttaaaaataagatatttaaattttaatcgtctatctaatttaaaaagtttattaaatattttaaaaataggtcaaaaaaatttcaagtaagatataccgtcaatatgttcagattcgttatactccctctgttttttaatagatgacgcaattaagtttctgcttttttttttcaaaaatagatcaatatgattttttaaagcaactttcgtataaaaactttttacaaaaaaacgcaccatttaatattttgaaaagcgtgcgcccagaaaacgagtaagaggggttgggaacatgggatggccaacactccctaaagggagggggagtggggc

SEQ ID NO: 19877 - DNA, 4540 bp, Oryza sativa
  unsure (1)..(4540): unsure at all n locations
attacctcattccaaaatataacaagttttaattatatatctgaataagtgtagttgtttgatagccatctataacacggtctttacctactttttttggttttatcactaacatgtctacaaaacacttaaatggccgttgcttaaaacagagtcatcatcctgtgttcaataatcaactttataggtctaattttgaactaaaaacttgtttataatcccaagtacctgcttacaaaaactaataaatcgccgtgcaacttttttaaaaaaatatagttaaaacaaaatgaatggctcaatgcgtgcacttccattcggagacctatatataaacacacgcacacacttatcagttctcacccaagcctaccctcctcaaagaccaaatcctcctctcgaacaaccgccggagccaaccaccgccgccgcgccaccgcgcgccggagaatatggagctcctcgacatggtgcccgcggacgccatcgcgctccgcctctactccctcccggcggcggcggcggccgtccgctcgctctgggcgtggctcgtcaccgccctcgccgccgcggtcggactgtggcgcatccgcgccgccgccggtgtccgtagcgccctcgtggacgacgacgactacaagcagcgcaaggcgaagcagccgcgcggtgctctgcggcctgccggcgtcggcgaggcacggccggctcgcgccggggcggcggagtcggaggcgacgacgccgacctccccgagcgagccgagcacgccttccaaggtccggttcacggcgtactacggcggcgagggggacggcgccgacgagggagtcgtggacagcgtcaggagatgcgtggacaacgacggcgacggcgagggggagacgccgacggcgccggtgaggcggacggcgtcggggaggaggaggtggtcgacgacgacgacgacgacgacggcgccattcatggcgacgccgtgggaggagagggagatggccgtgaggaggaggggagacctggggtggtaccgccacctcgacatggcggcgctcgacggaagcgtcgtccggctgtgggacggcgaggtcacggcggcgtcgccggggcggcgcggccggagggcattatcggaattgcacctctcattgtagagacatggctcagtgtgtatattgtggtgtaggactattggatggttattaccatggttggtgtatatgacaattttgcccctgggcttgtcataccctagcagtatggctgaggggtaatggcccctcgtatgaggacataaatggaaatttggcaaatgccactggttatcctttgcttctgaattccaattccaaatttttacactctgccacttaatcctcattccttttctttctctgaatgtttatctgataactgaagctatccttcttaatgcattcatggtttagcttcttttcttaattatttatcaccaattagttattccctattgatgatcatttttaatgaagtctgctgatagagaatggttagactatgcatgtagatgaacttgccaaatgatataatctgcttatagattcagataagactgtactctactctaagaggaaaaaaattatttggatcaattaacataagcatcatggttgtttggtaaggacaccagttgacacggcatgatttgcagataatattatacaattatggtgatgtgtggaccaagccggcttattagttccgcaattaaagttgctaaacaaattggctgccttttcccaactgatcaactctgaatgaatttagtgaaccaccttggaagatggtagtggcaggcaatgctccatgcttttctctgatcatctctagaataataaaacattttaaagagcgaaataacaatgtagcaccagacagaagtacagtccaagacacgcatattattgtgttcgagagaaatgtggctatgattttttgaggttaattgtccttatttggtgttaagctatgtaagcacttcttttctacaagaaaaagacaagtagataaaaatcagtgataattgcattagtactagaaacactaactttatgcctatattccaaattagatatgaaatccgacaggtattaattccattttgctgatatcccggcacaatctatagcaggtatcaccttgattttgccataccctctcaaggctcaagcctcaattactcataattttggtggtggaggacaaaacaacaacatgggttgctttccattggatataaaagtttcgataataaagtaaatgatttagtaatagtggtctgaactattctagcatggattcataattaactgataacgacgggcttggaacctgggctataatttaaattgatgttctccgattgatagtgatatatgttacaacgagtaataccacgagaatatgcttcacatatacttggaagtttaactcaacaaaatgattgttcagactcgggtttaggtttattctagtgaagatgcaaagcatctttcagattcagtgtacattgcaggaggcaaattgaacttggattcactgaacaaatgtggcatatctaccacttctattgactgtccaagaaaactttgatcctgaaaattgttcggacttggaagttgggacccaaaacctttttaagttgcaaagctaaagttagcaacaatgatagatatacatcggtcagaatactgccaggataatccgcaaaagttagcaacattaatgataaatatactattagaatttggagcagttgaacgtcaggtgaggattatttttttctgaaagaagtcatcagacgaggataataacttttctcaagtatatgggtgcaaacaaactaaagccatatacaacatcatactgccatttcttcaggcaacaaactaaagctatgcattggcttcagaagaagaagaagatcaaaggagaggcagagttcagttgccgagttgctttcgtctctcgtatcatatcattccagtggacaaatcgatcggcaaactgccggtatggcgcccggacgacgtcggtgtctcgtagcagatgtgtggtcaccggctcaaaaaaaaaaaaaaattgtgtgtagtgcactgttcttcaaaaatctgaatagcaacaagccaaacacgcctcgtagtttttgagagacaaacttccattattcgccgcatcgttgcctactccagatagcaacttctaatgggcatgtttggtcaggggaaatttggagagaattatattccaacattttactatttactgtggatttcctatgttggaaagaaatatcggaggagatttttttcaaaaatttcccaaataggagaaatttgcattcattggtatagatggccaaaaggcccgcccggcacggcccggcccaggcacggccaagcacggcccaccagccatcgggccagcacggcccgatcgtcacttcgtgccgggccgtgccagcccatgggctgcgcctcccgcccaggcacgannancagccgtcgggccgtgccgggccggcctgaaggcgcgggtggcctattgtgtctttttctaaataagtctatttttccgtccctcctttttgggctgacatatatatatatatatatatatatatatatatatatatatatatatatagtgaaaataagtctatttttcatccctcctctttgggctgacatatatatagctaaataagtctattttacatccctattctttcgaccgtggcatacaatatatctatttttactccccaatgtttatgtctagggcctggcttgcggcccatcgtgccgtgccgacccggcccaacgtgccggtggagaggcctaggcacggcccggtggtcgggacgggcaggcacgggcccgacccctgacgggccgtgccgtgcttgggccaggccaaaacgccgtgccgtgggccgggccatcgggcctcgggccttttggccatctatattcattggcgactcgtgttgtttttattaaaacaaagatgagcttatgtccttaaaagtcttctcttttcttttactatctaaaaattgccacaagtttttgagcgaaaaactttcaaatgtaataatattgttctaccataactatactacaactaaaatatagcttgtatataagtattttttaaaaatatgcaacttcttatgcataaatcatagaagttataatgtacaattatgactactacgttgtaactcattgtaactacgtaatatagttattgtaactcacaataactaaaatgtgtctagtgtagcacaaatcttggcgcatcatcgtacggtcgaaaattcgaaaaccagggaaggaaaaaaattgtaatttttctagcaaatccgtctttttttttcttttccgtatcaggaagcccaacccagtttgggcttagacgtcatatctccggacgaggccgcgaaagcgaacaggcgtgcagcccaagagagctcggaacatgtagacccaatgaaccggaggta

SEQ ID NO: 19878 - DNA, 2973 bp, Oryza sativa
taacaaatagcttagaacatgtggtctaggcacacagtagaagaaatatttttgagaaaacatatttttagaggcatggagcaaataatctgcagaaataatcctgtgaattagttgaaaagaatggggcctagcttaaaatggataacgagttacactggtcaagcccacagagttaatacttaatacaacttacttagcttctgactcgctgctcctatcactggatgtagcatttgtgttcgaacagaagaaagtcttcccctgaaaagcatttcctttgtcattaccatttagagaatatgtaaaagtcagaaaaccgcatgtttcatgctttagttgtacaaaattccgggtttacaggcgagtggcacttaaccccatgttttaagctgcaagagatccagttaggaaagcttaaacggcataaaagacacacaaatttgcgaccagcctagtagtgactacacaacctaactagtgtttctacagtaaggtaagggcacatgtagaccaattttcagagcaccaaggaaatgaattctcaccaacacaaaccctaatagatgttatagagatcaagagctgtaacagaactaaccaaatggttcacatgagaggtaacagcttctgcttcgtgcctccttgaagcgagtgaattttgacctgataagtaacagtgcataataattcaagcagtgaaaacagagagaaggcgaccaaatcaaacttccaaaaatgcaaattctcttttcaatcaaacacctcgaagaaatctacagaataagtaactcatgcccagatcccaaactccaattaattccatggcaaacacacaaggcagcagcccagtctcttgtcttcccaaagctagcgagcaagtgagagctaggcggaaaccaccataactctttatctccaatacgtatacagccaaaccctacgccatcctttgcatcccgatgatctcgagctcaaatcgctgtagcatgcgcggcagattttccggagattcacgatgagggagggagaggagagagacggagcaagcggagcccgaaccatgccattctagaccgtgcggcgcacgaggcggcgacgccaaccacaccgacaacaacaacgacgaggacgacgacgacgacgacaagcggaaccgccgcggtggggaggaaggggggatctcacctggcgcagtggcgcggcgcagggcatggagccccaggcgggagaccctcgccagcatcccgacacccgcccggagcaaccggtgcaagcggcggcggcgacggcgacggcggcggcggcggcggatttggtggtgccgtgtgggggaatcgccgcggcgccggcgaggcgaagtcgcgaggcggaggagacgaggtgcggcttttgctcggctctcgcctcgaggagaagggaatcgtgaagctgggccggatgaatgtacttgggccggaggtacggctgcacaggacatatattgggccaggccgtgatttcagaaggctcgagggggagcaagttaaagtgtttaacgggcctaaatgggccaaattctggcccaccgacgggaaattggccgagaggttaggcctgccaaacaaggccgaggaaagggggctgctagctggcgcgggagccccactccccctccctttagggagtgtttgcaatcccatgttcccaacccctcttactcgttttctgcgcgcacgcttttcaaactactaaatggtgcgtttttttgtaaaaagtttctatacgaaagttgctttaaaaaatcatattgatctatttttgaaaaaaaaaagcaaatacttaattaatcacgcgctaatggaccgctctgttgcgaggagtttagttcccaacttcccatctccgaacacagcctgagtcttctcttaactaactaaattacttaatataattaacactaataatagtaattaagaaagattctgaagatttttttactaacagattgaaaattttttaagttagatttgaaaactttcaatttaagttttaaattttaaaaacttcaactcaaatttgaaaacttttaacttgacatttgaaaactttaaactcagatttgaaaactttcgacttgagatttggaaactttcaactcagattcgaaaactttcaactcgagaatcgagattcgaaaactttcaagtccagatttgaaaattttggaaactttcaatttgagatttgaaaactttcaactcgagattcgaaaactttcaaatcaagatttgaaaaatttgaaaattttcaaaatcgagatttgaaactttcaactcgagatttgaaaactttcaagttcagatttgaaaattttcaactcaaaaattaaaaactttcaaactcaaaacatgctaaagattaaaaaatcaaaaaaagtggaaaaaaaggaaagaaaacgaaaaaaaggaaaaaaaaagtggagagacacgcgcacgccggcgcagcggcgttgggccttctggacccgaaacgcgcgcgcgtattagtttttccgcgaggaaaggtcagcaaagattcggttactttttggagttttaacaaggattcataaccctctaaagaaagtcatatgtttacatacctcctgtgtgagtggcgacgaaaatgaaccagcgaaccaagcaacagattttttttttagataaagaagcaacagatatactgacagacaagcctgcaatcgatctgaaactgaaatgcgacatttgtgagattgattaaaacaaaaaaccaaaaattggagaatggagacgcggggaatcgaaccccgtgcctctcgcatgcgaagcgagcgctctaccatatgagctacgtccccatcgtgtcatctgttcttgtacaaattatcaaggcaacatctgtagccaccctcgaaggcacgttaacgcccagaaaaaaaaaagagctcggatgatgagcgtacaacgtgct

SEQ ID NO: 19879 - DNA, 539 bp, Oryza sativa
attttacctgtatgcatggagttagatgtgttcctgacagtataaccttctttatttgtccaccaattgactcaacccggggcttcaagacatcttcaacaatctctgtatcatcaatagcatcaatgctgaatttcacctacagtgcatgcatcaagtattaatatacactgattagagtagagagaggtttaccaaagtgaaaagctttcatcaaacctaccaatagtgtattaagtacattgtaagaattcttgcacaattcacggttttcaagtggtgttggtttgaattcagatacaccttctgtaacctgtcaataacataggaaacagatatgggcagaactaagctaaacattttatgaaatcgtcgttataaaatgaaagaacttaaatttatatagcacctgattcatcactgatggtaactggtcgacaaatttgctcacggataacataacttcttgatcatacacctgtgtcaaaccctccactcaatcaaatagggccttccatgcatctcctacaaaaccatga

SEQ ID NO: 19880 - DNA, 524 bp, Oryza sativa
atatttgttgtgctcaaaaagcatgcttttcatggtatttctgatagtctgaaatacagttcagtatgacaatattttttctgttcttcttttttcaatgaaagagcaccagggtcaatgattctggggtaaggataatttggctgtattttgttgttatcttgtttgatcaatcgtatatatctcagattagaacgggaacatgtaatgcttgtcttgaatggagtaatctccaatactgtcactattcctttaattatgctatttttgtgcttaccttagaactaactagtactttatttttcaggtgtttctgtgctttggtaattcagttgcttcaacccgcttcttgctccaagatgaattcaacatacagacaactaaatgcgataactgcatcattgtactgtcactgtcctcttgttgtttgttttactaacttttaggtataattcctatgttccctttctatgagactataacactccagaagatcactcttttcctgtagggcttcatgttct

SEQ ID NO: 19881 - DNA, 1119 bp, Oryza sativa
ttttagataaactttggaggcaaataagtacgaggtttcacctcatattttcttctgagttcttgtgttttcatacgtgccaatcaaatgattatatttaatttgtaacttttatgtgtcttaaaattgtagaacccaatgagcataatattttattactatgtatttttttcaattaatgtatttttaacaattaatgcatttcgaagctgctcttatcatgtacatggacgcagactcgaattgttcatgagccgagctaagccgttaaggcgcggatcgaggcatggaaaaaccaaaaagacaaaaaaaaaaaaaggaaagtgacaagccaaaattacacatgcctcccaaatatctcgccgaaatgctctctccacccccaagactcctctataaatccactcccctctacctccttccaacaaggaaggaaaaaagagaagcaaccagacactgcacacatcatcatcttctcccccgagaccgggtaagccatccccttctctctctagatcttctctctctcatcaagaacaacaagagtgaattaatgaacagcaagaacaacaacaaaaaaaacgcagaggagaggatgcatgcatgatcaatcaaattaagcttcaaggtagctagctagcttgctagctctaagctaaatacacatttaattaatttgctacgtataaaaaacgttgcaggtgatcttgggttagcttagctagctaaattaagctgcgtgcagcatggggctcctcgaccagctctgggacgacacggtggccgggccgcggccggactccggcctcggcaagctccgcaagtacgcctccttctccccttcctcctcctcctcgacgatggcggcgtcgccgtcgcccatctcggcggcggcggcggcggccgacgcgccggccgtgacgcgcagcatcaccatcctccgcccgccggcgctgtccgtgacgtcgccgcgcggcagcgagtcgggcccctccacgccgtcgtcgccggccagcgtcccggactcccccttcggctcaggtggtgaccaggccaccataatctcttcttgaatcttgatctttttgcacacgcatatatcgtaatctcgatcttaat

SEQ ID NO: 19882 - DNA, 1006 bp, Oryza sativa
cttgtacgtacacaacctgtagtgtacgtacacgatgcgatcgatgatgaactgatagtatatgtatatggcgcagctggtgtattatattacatgcgctagctggagggagagtgtgctaatgttgtactagtactacgactgatctgtttgcttctcctctgctttctttgtctccagaaaagagggagaggagagaagtttttcccctgtttttgtggaatatgtaaaagatggctgcagtgcatgcagcagtgtaaaagtgtgaaaagaagtgggcaataatgcatggccaaataatgttatgaacctatacttaagactgtttattagtagtaagtagatggtatctgtcaattatcatggtggttgataattgacaatacttgattgttttttcacagcagtcgtgttcctgatgtcaagacgatggggaagtttatcagaaaattgaatgttaccgtgctctttggactgttaaaggtcaagaggatgaggctgatgtatcatgaatgacagaaagtatgaaccatgctgccatgccatctcactaaattcacaattacgtgctttacacccccaaggccctaaaatatactcatatatatttttttgtcaataacttaagcgtccacttggaatttgagtcctgtgtgaaatacaaaacgaggctctaaaataagaaatccatgttgttgtaacagggggtcatcgccatccttcctattcaatcgtaatacttaagtatggaaagttcttcctgtgctagaaagttcctctcgaactggaaacatgctctcaagtcggaaattaaagttcctctcgagttgggaagttcttctcaagtaggaaagttcttctcgagctggaaaaatgttttcgagtaaagagaacgtgaccaagatggtttgtcacttgtaacttgttttgctcaggaactgaggcagattcgcttcgggagtcgacggtggagaagaataagcaagtcccaaagaacacaggaggc

SEQ ID NO: 19883 - DNA, 1374 bp, Oryza sativa
tcctccttatcctcctcctcctcctcctcctacgtccgcaacggcctccctcccccgtcctcctcgccccccgagccggactcgggctacgccgccgcgtgcggggatgccgcgggggactggatcctcttcaccagcccgacgcccttcaaccggtgcgtgctcctgcggtgcccctccgtgtcgttcgaggacgggggcgtgctgctcgacggcgtcaacgagcgcctcctcaccgaggagcggcactacgtcaacctgagccgcggaagcatccccgcggcgcgcggcggggatggcggcgccggcgacatattctaccagagggtttgcattcccgcggaggacggcggggtgatcgcgctcgattggccggacaatttggatttgggcaaggagcatgggcttgattccacggtgtttatagtgcccggcacgcctgaggggagcatggagaggggaatcaaggtgtttgtgttggacgcattgaagaatggctacttccccattgtgatgaaccccagaggctgcggcgggtcacccctcacaacacctaggtgaaatttatgccccttatttatttaccattccaaagctttggacaacatctttgctgcaaacgtgcaatagtgcttagctagtgatgactactactccctccgtccctgaatatactccctccgtcccagaatataagaagttttagggttggacacgttattaagaaagtaggtagaagtgaatagtgaagtgttgtgattggataagtagtggaggtaggtagaaaaagtgaatggtggagggttgtgattggttgggaagagaatattaatggagaagttgttatattttgggacaaattctgagacctaaaaattgtaatattttgggatggagggagtagcttttactagtattagtatttgtaagaaacagtttctgtgagcaaaattagaagcttcttgtagcctctgcataattcactttaaattttatagtgttttccatgtttgctaaacctatgtactattgctgaatttggtaaatgggaattccagtccgtctcatacacaactctgttatccatgctgaactcaggctagaagattacaggaccttggtggtagctagtactgatgtgtaacatcagtaaaaatgtttagaataactagcgttattattggataacaaaacaactttacttaagaatcgcagaagcagtgattggtaagtgtggattgtactggaaattaacataattttagttagtgtagtggacgatagttttagtgatcatttcaaggaaaaagtacatctttgcaagatcaatcataaagttgacttagaagtttgatatgggtaggattgttgtct

SEQ ID NO: 19884 - DNA, 2267 bp, Oryza sativa
  unsure (1)..(2267): unsure at all n locations
tgcatgatcaagaggtggcactcgtcgagcaggatctcccgcacgccgtcggggtgctcggcgtcggcggggtcgacgtcggcgcgcagctcgcacggcggcggacgcgtcggcggggaggaatgggggcgcagcgtcgtggcgagcggcggcggagggggaggaggaggaggagggcgcggcgggtcggtgtcgttccacggcgcggacggcgtgcccccggggctccacccggtgtacgtcggcaagtcgcgccgccgctacctcatcgccgccgacctcgtcggccacccgatgttccagaacctcgtcgaccgctccggcggcggcggcgtggggggcggcggcggcggcggcaccgtcgtcggctgcgaggtcgtgctgttcgagcacctcctctggatgctggagaacgccgacccgcagccggagtcgctcgacgagctcgtcgagtactacgcgtgctgaccgcgcctagctacctgcgatcgagaagacggcggcggcggcgatggccggcgtcgccgagctcgccggagtcgtcggaggcttctagaagggggtaatttggtaattcggtttgttctttttttttttggttctttctttgaggttaggggtagagttgtaatatacgccgagctacgagggcgagtagcgaaatgtttggagatttagttaaccttggggtgtttgtggtaagctggagattagcagtgtaattaccgtccacccaaggtaaatgctcttttggagcagttaattaattctctaatgctggatgtaataatagcttgcttcttttttgttcttcttcttcttcttttcctgcttaatcttaataagattttagggatcaatgtatccatgtactctccaccattgtataaacttcatgatcatctcttctgagattcctcttaaattcacttgaaattcttggtttggtatttggaggtgttattcacttaattgatccatgctaaaaaaaatgcatgtcacttaattatattaactagcatggaggcccgcgcagattgcgcgntagcatcattatattttctctcatataatagcatatatgttttctcattatattattaaaatatattacaatgacaacataattttaaattttgcaataactttacgaaactactaatgtgtaatattcatattgtattttatatacgtgttagttattaattatttttactatcaaattttagttatctataaattatatatattcctttatggactctagactcgtcttttatttttttttaattctaaatttttattatttctaattgtatttctatgtggactctaaactcatctttcaatattctttaatttttaatttcaaatttcagttacttctaaattgtattcctatattgactttaaactcttcttcccatgtttttcttaatttcgaattttagttatttgtaaattgtatttttatacggactctaaactctacttttaattttatcacatttattccgaattttagttagtttcaaattcatgtatggactctatactctacttctaatattccttattttttaattccaaatttcctttttttcttcattgtatttctatatggactctatactttacttctaatattccttattttttaattccgaatttcagttattttctaattgtatttctatatggactctagtcttctcttttaatattccttattttttaattccgaattacagctatttcctaattgtatttctatatggactctagtatcctcttttaatattccttattttttaattccgaatttcagctattttctaattgtatttctatatgaactctatactctacttctaatattccttatttttaattccgactttcagttatttcctaattgtatttctatatggactctagtctcctcttctaatattccttattttttaattccgaatttcaactatttctaaattgtatttctatatggactctagtctcctcttctaatgttccttaatttttaattccaaatttcagctatttctaaatgtatttctatatggactctgctttttctttttctccgattaacgtgagaatttctaggccatgagagcgaacgtggaggctcctttttctattcctttaattatataatagattccacccatttgatttgtcttacaaagacaacacacagcttgattcctaagcaatgctatatgtatatactataaagcaacttt

SEQ ID NO: 19885 - DNA, 1252 bp, Oryza sativa
aagtcgaggaggggctacactacacagtatctgtactctgggaaggtttcctttttcttttcttgaatgcacaattactattttttttctcatataaattactattccatccgtaccataatataagagattttgaccatttgcctttcaataaaaaaaaatccttaaactaaaaggtttctcatcttttctctttcttttttttttcttttacctttaaatagtgctcttattaaccagttggcatcattgtatcgtatgtgatctagtgtctctgtctattcctctctttttttttattgagacgacggccatattgctcagtgcgtacaaactatcgacaaaaccatccacttttacattagactagagcttggcgcgtcgcctgcccgtaatgatgttgaaaaaacacatgataattagggttactgaaaaaaaagaagaaagcagatggttatagataaccaaactacagtactaattacaggccaacaaatcatgcacacttcataaaagcgattattcaaccgatgctacagccaagaaaaattttcatatctgtaagatctatgtttacatattttgatcaaccatagcgattcaaatactaatcaactggtagacaatccctgttacatgaaccgcaattaccgcatacctcacggtgtttccttggatcagcatttgcaccttgagaaaagcatgtcaaaatcaaattccctggcaagcacccaatgcggaaacctaaccaggcgggggaacaaaaaccaaggtctcgatcaattacttgagcagtcatctatggtcaccatgatggaaccagtatggttatgtccatgaacaacaccggtgttctaaaaacttacagttccataccatatccatgacctaccattgaaagaatattataaagctgatctgacagatataatcacatcgatctcaaatcaacaattcccaccttagggtcagcatttccctgaacttgtacataatcacagcgtaggaaagatgaggaataaaaaacctcaaacctaatcgcatatctttcggaatacaaaaatatctattccattatactcttgcatatctttttgcagggcaagtaatggcataacaaaaaaaaaaaacacggtggtagcacgaacattgccatggctaaggaaccgcaatagccctctctgcaactgatatcttcattaatctgaaagtagtaaagcatagtagtggactattggcatcatggttcttg

SEQ ID NO: 19886 - DNA, 642 bp, Oryza sativa
gcacgtaacggatcaatcgatccatccgtcccgaatcccgatgcccattgtggtagtcacagattcttgataatgcttcttgttgcgttcttggccccaaaattcagggtggacaccaacgtggatgggaggataacgagggaggaagtacaggaggtgactttgtttaaacacgttttaaactttctttttctcttttaccttctctctcactaatcatcagaagcttcttcctgtgggcacccagttgcctaaatttctaatccgatcactaaccaattctccattttttttactgcggtaattaactgtcactcgcagctgatcgtcctgagcgcgtcggcgaacaagctggcgaagctgaaggagcaagcggaggagtacgcgtcgctcatcatggaggagctcgacccggagaacctcggctacattgaggtgcgtgcactgatgcgtatttattttttttctttttttctctatctcttggccgtatacgtatatacgtatagtgtacgtatatgtttagagctttgtctttttggtgggctccggcgtgatgacacgtgtctcgtcgtcttcctcgtttgtgtccgccagctgtggcagctggaggcgctgctgctccagcgcgacagctacatg

SEQ ID NO: 19887 - DNA, 762 bp, Oryza sativa
ttgcgaagtggacacccagtcacccacccatgtccccgtgttagaaacttctggtaactaaacacactcaaatcgaagaattacaagtttcttgaggatgacatgtagaactatgaacaaaacaatattattgttttatttgtaaatggtgaaaaatgtaaagataatagtaacaaataattttttttgttgcagatgattgcgacggcgatcgtggtggggatcacgctgcacgcggggaaccatctggcgtgcgatttcccgaggctgatcgcgtcggggccggaggagtaccggctggtggcggacgcgttcgggccggagaagccgacctacgtggggctcctctcgggcgtggagggcatcacgggggtcgccatggtggtgctcatgaccgtctccttcacgctggccacccacccgttccgcaagggcgagaagggtggcagcggcggtggcgcagccgccaccgtcctccccacggtagcgcggctcccctcgccgttcaaccgcctcgcggggttcaacgccttctggtactcccaccacctcctcggcatcgtctacgctcttcttatcgcccatgggtacttcctcttcctcgtccgtcgctggtatttgaaaacggtatgtgccatcacaaacatccttaaaaatatccaattattttatattttttccttttttttgcttgaatccgttacggattttttgggttttttttttaaaacggtgagggtgacggttttctgtttggtccgg

SEQ ID NO: 19888 - DNA, 4410 bp, Oryza sativa
  unsure (1)..(4410): unsure at all n locations
aaattcccgcagcaatgcgcggggttttacctagtataaacaaaacttataactggttaagtctctctcacggtaaaacatgtctattcgaaatcaaatcctaaacttgatagctaaacttgataggagagcgtttgtatttatggttaattaaatttccagtagagtatatgtgtgcacgtttatagaatgattgtctatgcgttatgtaagcgtcttatgcgcggttgtacggtgggttgtacatattgttttttttctaaaaaaaactaagacaggattagagaggtactaatcgtgccaccgacctccttattccttcttagttaagtaggtatctactctctccgtctcataaaaaagaatttagaaccggatatgacatattatagtataataaatatggacatatgtatgtctagattcatagtattaggatgtgtcacatccaatactagcttgtttttttatgggatggagggagtataatctatcaagatcgacatattcacatggctcgctaatttcatctcttttggcgattaattctgttggccccattgggtcactcgtagcatctatatttctatatgcctatatatatatatatatatatatatatatatatatatatatatatatatattgtgtgtgttacatgtcgagttctcaagtgtacacatttccagactccagtactgtagtagttgccatatactatctccgtcctaaaatatagctatttctagcacagtacttancctaaaatgaagctatttttctacctaccttctcctctcaaccaatcacaaccattctttttcatctaccttctcttttcaaccaatcacacacctttttcaattattctcacctattttcttaatacccatgccaacctcaaaaatacttacattttagaacggaggaagtactacgtaggagcagtagctatagctcgtcggtcatgtgcttgcacgttgcagcagccacctttccaagcgatgccaatgtccttatctgaagatctagcataacacgccggccacgtatgtgtcctccgtttctagtttatgatgaataagaaacggtttaattttgtgtgatgatgctttgttaacggctgtttggttcatcaagtaatgtaaagtttgggacatgctttagctaaatagtacttatcattctcccttttaatttacatctgggtgcatgcatgctcagctccccaggtcattagttatttgagggtggtttattaagaattgtttcagggatcagagcataactcagtggtcatcagtccatgctttgggggtttctgtccttgtcacgtcgggccaaaaataaaataaactcaagactcaaatcatacaggaattaaaatgaagaattttttaatctacgacctttagatggattcatgtacatagtacacctctagcatacgtacttcttccgttccaaaatataaaaattttgggtgaatgagagaaaattgtaaatgtcttagaaattgaacataagaccttagagataattaaaaccacacacttcttaccactgcactatcaagtgcattttagaaaatcacaagtaagtatatggcaattttacgcagatgcaccggcttaattctgacttggtgatccatcatgttctaacctggcatccgatcaaacacaatcatgcaagcatgttcctgtgcaggccatacataaattaaagtccgtacttacctgaaaaattaattaatttccagcgcacacagcctgcctcaggccctcagttagctattccactgcagaaaaggagtgtgaattaagcacaactccagagtccagacttggcgattgcgccaagctcatcactaaaatccggaattgatatgatatattcctgcttcgcttgcaaggcaacgtacgtacaaaatatatttatactttttttttctgaatcttctttaatttgaagtctagctatctaagctaagctagctaaagcttagcccggatggatcaaacacaatgcattcttgagcgacacgccgcgctagtctcgtccaatcaaaacattatcaaatcccattttaaaaaccgggagaaaattaatggaatctctccggctgatgcatatgcagctagcttgccatgttacccctccatggccgcgttgcgagtacgaactgattatataatcgcatgcccactctcgcatgccgtcctctcgatccattcatcattcgctcgctctcgctctcgctgatctctccatcttcttctccagctcagttcagtgacaagatcgatcctaaatgggcgacgatggcggcggcgtgaaggtggcggcggcggcggcgacgacggcgacggggatgaagcagatcacgcggctgagggagctgctgcagaaatggcaggcgatggcgctgggggcgaataagggtgatgttgccaccgccggagacgaggaagacgaggaggtggtggaggtggctccggcggcggcggcggcggcggcgataccgccgttcgtgatgaggcggctgcagaggacggtgacggtggactccgacgacgagagctgccagagcccggagccgccggcggacgtgccgagggggtactgcccggtgtacgtggggccggagcagcggcggttcgtgatcccgacgaggtacctcggccacccggtgttccggctgctgctggagaaggcggaggaggagttcggcttctgccaccagggcgcgctcgccatcccctgcgagaccgaggccttcaagtacatcctccagtgcgtcgagcgccacgacaacggcctcgccgccggcgacgtcgtcgacggcgtcgtcgacgtcaacgaccgtgcgccgccgcgcgactagtagcagtttcttcgattgctttattaattaattacttaattaattaattagctcgcgatcgagacggagctagccgtcagaaatgattaatcgtaatccatgggggttgtaaacttgtaatggaactgcattttgttgtacgctgttgtaacacagtattcctagatgaaaaattaaaatgacatgtaatatttgattgttacgatctagccaatgcaatatctgtcgagctcttcgcgtgttactccatcggtctcaaaatataaaattgagtacgttgtactagattagatatatccaattacaaatttggataaaccatgtccaaattcataataagtatgtatgtttaatttgatacgtattttctttgtttcaaaatataaaggattttggatagatgtcaggatggagggagaactagattgctatatttattttgagacggagatattaccaatgaattacaatgggccgtgttttgtgagttaagctgaatctgaaaataaactaatctcttccgtacttttgaatcattcatgtgacgcgcgcgatgatctgtgcgtcaagtttgtccagttggacgtacggcatgcatggagcgctccccgctgttgccagcgttttcaattttatttttgttttcaattttaatacttgtgtgattttatccgaaaactaatcagaaagacagaacgatacaggcaaaaatcgctcgcataattgagtgttattactttgtctattacttaattaactagtacgtacgtaccatcaatcattttatcacacaaaacataaagttaattttagcttagctctgccgatctcatgctatgtcgaagccagcagcatcatcgagccaagatgtcaaagactatttatttatcactagccaataatcctaaaaaaataggcacgatattaaagactatttatttatcattaggaaggaagcccgcgcatatgcgcgggcaattcacttattgtttataaaaaaaatactaaaagatatctcaccatattcactataagaatcattacctagaataaaaaaaaaatatttattccgtaaaatagaccataaactttaatatactatatgataatgtctattatattcaaacaaaaatcactttattatcaccatccttcacaaacatacgagttaatatgtgttttgtttttttcttttattatgcatctaatcacttatgcattttcatgggtaatatacgaaagaataatttatattatcaaaattgtttatgctagttattaacattattaagatgatattggcataattataaagagttataatgtggttccacgtgctattttcgatcgtacgcatgtatgtacgtacgtatgtacgcacgcacatatgtatgtttttcatggtgaatatatagtagtctctcggatctatataatttctcttggcttttttttacaaatattttcctcttgtaggagataatgtttgtatgtgtattcacaggatgggctgcaggaattca

SEQ ID NO: 19889 - DNA, 4499 bp, Oryza sativa
  unsure (1)..(4499): unsure at all n locations
tgtgacatttccaatcactatttgatcaattacacaacaaattgcttcaataacgaacaaattgatgtgaccaatgtggtgaatgggttgtcaattgattttttacatggatttctcatgctactcgggttcaggacaagaaaaccacctgtaacataacagagttaccattgctttttcaggggcccgcacaagccgacctgagggattcaatagctcaagtgaagtccgacattgttgttaaggtactcttatcttgtactgtattttcagttttgattcataggatacttttttgcaatactttggtatgcaagtcgccctgttaactgaaagctctgaaccatggtttgaagtctcgattgaactcctaatattcgttctcctttatatatggctacaacctattatccattattattttgaaaaataactcgagttatacaatttgtcgatttggacatcataattcataagccattatattttgtgctcctcacttatgcaattttgcattgttctgttagtccaacattctattatgccctttcctttcacattggtctccggaaaggctagtcatttgatgaagcatgtgctgctggttttactgaagagagtggaaccttgggagatatttgggagactgtttcgggcagtgacctcgtgttgctgttgatatcaaacactgcataggttaacttaggctctagctgcatgattttagttgccacttgatgttgttacctttaccaatgcttgtttaaattgtgctgaatttcatggtcctgtttattaaattgaatctccaatgccacatgccatctgctgtcacacaatcactccttttatcccttgtagatgcagcaaagcccacactcaaaagagagatagttggtgatggatcaggagctctgagcttggcggtggagcgtgatgctttgctccaggaggactccatcgtttttgcgctcatcaagcagcagcctacactcccgctgccgaagctaccggtggccggtcccttgcggaaatggtaattctatcatttaccggtttcttcttctgttgaattgtagatagatccatttgatttgatcctgatcaagttctatttttgaactgttgtagttctttcacatgacaacttgtggttaatcaaagctctggacatctacagaagaacaaggaatatggtctgtatntcatcatgtacctttattttgtttttattattacctagagttacatgcattttttttccttctgtacgaaggcattgggagaactaaatgatctctagaacataagacaaaaagcctatctgatttctataatctttgtcagtttaaaactcagtaggaacttccaattcccagttctaacagaggcaattatctttaccttatcctgtaactgtttacttttcaccgctgatacttttctatctattgtcaacttgaaagactaggctgatccataatatttcctatattattaattagtaaccttgagctgttctcatagataatggaggagaatgggttattgttgtgaacatctttgtggctgtttgaaattatcatgtatcttttccttctttctcgctaaccttatctcttctcctcctctccacacatgaaccagccacggcagtgaaaccaacgggcgaacgcgttgaccaccgaagtcgccaccatgcgatttccaccaagatcaccataagccggtcttcgcccaataacgttgccataaaaccccaggtaagttcctattgcttgccttgatccctcaccatatcttttgctttcgatcattgatccctgtccacactcttctgggcttgggatttgatgctgtatgtatgtgatgatttgaatgaggggatacgactaggaaagtaccgtgtgagggatttatatgatattagtgtcgtttgacttgattagattcaatctggctttttttaggcaaattttgctacaggacatcacaattgtgtggttttagcttaggggcaccatgaaagtgaagttttgggggaagacatcccataaccacaaaatttcccataataatttatctacagtatcaactcctttctcagtaaccacaaaagaagcttaccaaaaatatacaatgcaggcaacaccaggaatacatttgatgatgtgtgctccttagcacagaatgctcagctatcatctcacatgaaacatatcacagatattgcccagactatacatccttcaaccaggctttacattgtcgctatgaactccacattcatgaaacaagacagagttgtcagttccactccaagctattactctcttctagctgcattggttatttttccatgtccttacagctatataaaacaactcacatataatgtcttttatagtactttggtaaggaatttacaggtagatatataaagccgctgatgcaaaacaagaaagccatcggtatttgtcagtgatatgggcccgggggtacccacactaaagggaaaaaagtcatttcccccagccacgtggtcacgcggcccgaaacccctggcgggggaggtcggatgcgtgggcagtagatagccaagaggtggccgtgtccgccgagggggttcggggtaaccagttgcacccgttgggcccggggggtgcgttaccccgaggccctcgctcggccgccacgtggcgaccgagcgggcggaggtaagggcgctgccaggcgcatttatgggcggcgtcccaaccaacccccgtcgcttttaatgcgacggggcaggtcgtgcgctgcccagtgatcgacgtgcgtcaatcactttgaccaggtcgtgactggctgccagcggataggacaggcgtcagcgcacccacgacctgcctattcaggcggcgtgggggcaggtatgccctgtcccatcaatggtaggggatcgacgattcgaccggtgcatcccgcgtgcatgagcctccaaagtctccaagaatttataagggaatgatgggggatgtcccccgtgttaggcgaaggatggtgttgggccctacatgaggttgcgcggccgccttactttttgcctaaggcatgagtggaggccccaccaggttcgcgcgggcccctccttgaaaaagggacgggtagaggtggtgcatgtggtatccccttgaactataaaaggagaaccttgccgcccgagcaaggggacgactttcggaagcttgacccttaggaaagagttagccaaccctctccctagggtttgagaactcttgtaacctgataagcataaatcctcacaggagtagggtattacgcttctaaacggcttgaacctggataatcctgagtctccctcttgatcatcatccaccacgctagcgcgatccatagaggagacacgctcttgatcatcgcgtcctactcccccggtcgaactcacaaaggggatctcacgtccctccgctagagagaattactcctctacagtattcaggtccagacactatagggtgtttcaaccaacatgctcctatatatgtcaacagatggtcgttgcaacctaaagaaatgatggaaggactttgcagcaaacattggcatacacctacacacaatttgcagtcccccgagaacagtacttgtgagctgttatattctataaaggcccttcaaaaatacgtgaaaggagaggggtgtttttgaaaaaacgccgcgcactacccccaagccccgaaccctagccgctgcctccgctcacaccatctctctctcgtcttccctctccctctcgcaccgctgccggcgctggcgcctccgcctcctccgtgcgtcgtcgccgagcgcagccgtatccggctccaccaccgccgtcgccatacacctccgcgccgtcgcggcgaaggtcgcctcgcgccgaccgccgcctcgcgccgaccgccggcgtccggatccggcctccatgtggtcgggggacgcagatctgaccgcccccgtgcgccgggcaacgtctccgcctccgctactgccgtcgccatcgccgagcgccgccacttccgccttctccgtcgccgagcgccgccgcttccgccttcgtctcgctccaccgctgcagcgccgtcgtccgctgctgtcgcaatcgctcagcggtgctgctgcggccttcgccaccatcaccgactaccacttcttcctcgtcctctagctgtcctggtaaatcgaagctcctcccggatctacaaggctctggagcggaggtagctgcaggcgaagcagggtgtcgcagcgacgcgactgttaagctgcgtggcagtgtgctcatgcagctgttgtcctaacgagcgcgcgtggtggcacaaaagcaacaacggcagccgaagtagtgcagttcctcggtggcggcgctatagcaatccggagcagcagaggtgtgcgttctacgtttcctctcttttcattgttgttgttggctggggttgacgttggcatcgatt

SEQ ID NO: 19890 - DNA, 1144 bp, Oryza sativa
tcatttgtttttcacaggaacttggcaaacaacaaccttgaaggacaaatccctgataatataagctcatgcataaatctcattagcttgtaagtttcatttgttctctctgaagttctatatcctctccgatggcagggctcttaactttagctttgtaacagcaatgcttatggcaataaattaaatgggactgttccacgttcattgcacaaacttgagagtataacttatttgtaagtgttattggttttaggtgattttccttcaagcctgccataaatttagttctgttcatagtgcctaatgatttgtgtttccatccgtagcttctacgaatctgtcatcaaactatcttagtggagccattcccattgaactagcaaaaatgaaaaacttggacacatcgtaagtaccagaagttaatttgcattctgcaattgcttttaagcaagcgattctcatgatatggcgtgttagctgatatatttgaaggggcttatcctgtaacatggttggtggttcaattccctcagcaattgggagcttagagcatcttctgtgactgtaggttctatagtatagtacttttctataaaaaaaataaaataaaatacttgtattatgtcatgacaacatcctcttattcctatagaaattttagcaataataatttggttggatacatctctgctgagtttggaaacttgaggagtatcatggagatgtaagtaccttctcacctacgcgttctctgctctgttcctttgggaataatgcagattcctcttcctttgttttagtgattttttacttgcaagaaatgaatagtcaatcattttaattgccccagtggatcatctaatcgatagtaaaaaataattccaaatcaatgtggacgtaaagaagccttaagatttcatatgaacaaaaaaaactcccaaaccattcatatatgtcgttcctaacagcaatgccgtttgtaacaccaactttagtgcaaaaaattatctctaaattgactggagggattatgtgaatatgaaattgcatggacatttttgtaaccacaaagatatatgccgaccaaagttcatccatctaactgggatttgggaggcattgtagatttcagcagtagaca

SEQ ID NO: 19891 - DNA, 921 bp, Oryza sativa
aattcctgcagcccgataattttctttcaattttttgatttgcaggtgagggcgacttcactcatgctactcaggaccaggatcatggtgctccaagctctcaacgaactaccattgcaccgggagtccgacaacagcaacaattcagtgacatacaacaggatagctctagctcattcagtgcctctagctttgaaagtggctatccaacgtatgtgtacaaccgtccccaagcttctgattatcctgctactacatgggtgtatgaatggcaagagccttagtggtatgctcaattgtacgctcagtggcaaacaacatcatcatggacaggtcaaagttgggaggaatacaaggcggggttgctacattcacatggcttgatgctcatgtccacagaggagtacaatatggcatataatcagtggaatgcgtagctatgcatgtccttgtttatttcctttcattcgaactagaattgtaatcgtggacattatactgtggactctattgttattgtggactatattgttattctggactgtattgttattctggacctacatgtggacatcgttatgctttgaaatgtgagattgatgattgttattgttgttataatgttatgaattattgtattgatttgaactccacaatatagagtaggtcatgccgaatttttctgttgtataaccacatcttaattaactaaaatactcacattttagtttttttctattatttttttcatttttcttatttcagttccaacatatcgcggttaccgtcctcttaccgcggttaccgtaccaaaccgtgcggttaccgtgtccataccgtggattttgaattcaaaaatttggaaacgaaatttgtgcggtttttcgtggtaaccgcacggttaccgcggtaaccaccata

SEQ ID NO: 19892 - DNA, 2484 bp, Oryza sativa
ccagatctgatggcacgaactcaaggccgcctgatctgatggcggtgagctcgtggctgccgatggttaggcggttggtggagcaaccattgtcctcccaccaaccggcttcaccctttccgccgccatcgacaccttgtcgctgtgttggacgaggggctccgcctcttcacgcgcagccagccgctgcgtccgatagaatcctcctcacgcgccgcgaaccatcgatggaccagctgaaggaaccgggtgggccaagcggtggagctcgcagccatacgtgtcgtgccgcacggtaagtgctatatcttctcaagcaccaagcgcttcgaatttgtagttgcagagagcattctgacctgcttctattgtcaggcgtcaggtagagttttgggtcaatgcgattgcattggagcttgaattgattggtgttttatttatgaactgtgacagacatctctgcaagagctcaccaggcttgggataaagcacgtggagaacctggtgattccgagtgtcagaaatgatgtaaggcctgctaagcttaaaaatgtatttgtagctttgtttagttatttggaaattgcaatggtgcaacagagcgtgatgatttgatggggattctggaatcaagcattgcaaaattgcaaatgcagaagaatagtagtgccataatttgttcagaagcatagtcccccattttccttcttgtgatcacgcaggcagcattttttttcactgttgtcggttcaaccggattcctacccattcgtgcaggccagcttagtagggtttttccttgctacctcctctttgtgctactctggattgataaaaataatcttttttcccttacaagataagtgcattaggcttcggtcacaggttcctgcaaaataatttttctgttgatattaataaacatcctgtgatatataattttagcttttcaaaattctctatctcaggattggggctttttggttccttacttgattggaagcatctcattgatagtattagctatcggaagcatttcaccagggtatgtgtttgttgtctctgctaataagcctgtgaaagttgggaagagccggcatcaaacaatccagatgtctgacatattctaagattctttaaatggatattcaagcagcaaaacttatcagcttaattaatttaatgttatgtcactcaacatagactacttatggcatgacaaataacactatctgttttatgaatgctcaatgaaaatatgttgcaactttatcaaggatatattgtaattttccattccatcatcacagtcttctgcaagcagcaattggcgcatttttaactgtttttcctgactatcaagacagagttgctaggcatgaagctgctcattttttgggtatgtctccagttctgcaataggagtatgtctgaaaataggttttttactgactatagtttattgaatattgaagtgccttaacaaccaatcgtgacaacagttctggagcagttttagtataatggttaatgatgatattgtcattgtaaagaattatgctgaactagccatctaggtaaaggtaaataacattgatcggaagaatcacttgaaatatctgaagctaacttgagtagaactaaagagcaatacaaaaatattttttgaagctaagctaatggttagatgagctggatatgaactaaggctgtcaattggatcactccattagatgcaagacaatcatactgacctttcagattaattaagttgtatattctcagatttttcaggcccatagacagttgacagccagtcagccactgaaaaagtacactattactagcttagtttttcttttcctacttctacttgacagattaagtcttgttttttactatatgcttttaacatctatttttggaataatagttagctgccttaggatgtaagccactagtagttttccttaggatgtaagccactcctagtttcttaggatgtaagccactagcctataccttatggtgtaagccactagcctatatatatgtttccaaccagccatggttgatagagtggagaatagaaattaaaactagccccaaacctgtgttccttttgctaacactacttggtcagtgtactacttaacatttttatataaataatatcgtggttgtgattgggcatctactggaaaagaactggtaggtcaatgaatccattacggtgcttgtgttgcagggatagttctctcgtgttgcactccaggtgtttgtagttttgccttacggaagagtagtttcagttctgctccatggcttgcagtggttgattactaggggttgatcactagaggtgtgattcatgcttgtcagtactggtaagaaaattcacatattcctgtcatcctgtgtttagtgaggacttcttcttcatctattacttccactgatcagtcttcaattttgggcaagctt

SEQ ID NO: 19893 - DNA, 630 bp, Oryza sativa
gattttatgttatcaggttatcatttacatcggcctgttcaaatttttaggatcatgggattttccttcatggtatttgtgctatggtctcctgttgtgattcctctactgccaacacttgtacaaagttggacaataagttcttcaacaggaattgttggatatgcttgcattgttggactgtatgtgtctataatgatacttgtcatattgtggggtaaaagaatacgtggctacgaaaatccagttgagcaatatgggatgaatcttgcatctgtatcaagggtatgaactgtcttgcctgtgtaacactaggtctttgtataataaagatttgtgtaatgttcccgtcacatatataataacttgcatatttcatttggttgcaggtacaagaatttttgcaaggtcttgctggaggtataactgttgttggattggtgcattcagtaagcattttacttggctttgcagctcttcgtgcagggtcatattcattcgtgactaggccacttgatcttctcaagtcttctagtaatgtactattgctagctctcagaggatttgtcacagcaactagtattgctgtggtggaagaagtacctttcagatcatggcttccagaagaac

SEQ ID NO: 19894 - DNA, 871 bp, Oryza sativa
ctgcagcccacattgcccgagacgacatacgaagcaaagcaggttctgtgtccactggggttagaggtccgtagaattcacgcttgtcccaacgactgcatattgtaccacaagcaatatgcggacttggatgcttgtcctgtttgcaaggcttctcgatacaagcgaaagaaaagtgctgacgaaggaaataagtcaaagaggggtggtccagcaaaggttgtgtggtatctacctatcattgatcgtttcaagagaatctttgccaacccgaacaaagcgaagttagtacgttggcacgccatggaaagaaggaatgatggtatgcttagacacccagcggattcgattgaatggaggaatatagatcaaaaacacaaagactttgctgccgaccctagaaacatgaggatatgtctttgtacggatggcatgaatcctttcggtgacatgagtagtactcacagcactttgccagttcttattgcgaactataacctgccgccatagttatgctttaaacagaaatatattatgttgtgcttgttaatccaaggtctaaggcaacccggcaatgatatcgatgtattcctggagcctgttatcgacgatctggagattctttggaaagaaggtgtggaaacttgggatgcatatggtcaggagaacttcaagctaagagttctattgttctgcaccattaatgactaccctgcactcggtaatctttccggacaaactataaaaggaaagaaggcatgctccgattgcaaggaacatacacgaagccggtggctgaagaaatcacgaaagatggtatacatgggtcaccggaggtggctcccgctacgttacacatttagaagaaaga

SEQ ID NO: 19895 - DNA, 515 bp, Oryza sativa
ccattcgtccagccaagtcgcttcaatgcatctaaactgaaatttcctcgttttgattgtaaaatttcagtcacagaagttgttagcttcccgcgcacatcttcgggtacagcttcttctagagctttcacaagagtctcaccttgttcaaccgctaccagaaccttatggccaaaaaacaatatattagcatattgacttatgcctcacaaggccatagcgagcagattatgcgacatgactattccaaggggaaaaaaagcatacctttagcttcaaaacaaaaaaatgtgttgtcttatttaggatggggtttttttttggcacatatgcaagtaattttgacatgtgacatagaaaagttgcagtagtcaacccaaatctatcacaggagagatctccagatgttagaagcatctatacactatgcagattcattttaaatgaaaagagacatatctcaagtttattatcagatgtacaaatatttagtttggtcatagtaagctcaagtg

SEQ ID NO: 19896 - DNA, 624 bp, Oryza sativa
agaacgattcaagctgtgaatcttcctgatggtatggacaaccaattgtattcttctcatatcttttcaggcgtgttgatatggccattctccctctctcgccctcgccgccgccgccacccacatctcctccttcattcttcgattaaagtttttagcgatcatgagaaactaattattgcgcgcctcctgtacgtttttgtttggagtgagaaactaattatcaatgaaaattttgtttacatgctgccaggctgctggaatagtggaagctgtggagggtctactcagatgttgatcgaaatggtgctggatttgggagctgttgttctcaattgccgtgacctatcagtgtcagaccatgggtctgttgttgcagtcaacatcttcctagcgctggtatgcacttgcattgcaattgggcatctgctagaaagagaccagcgtgtaaactctgtgccgttgcactccaggtgtttgtggttttgcttatgtgaagtggtttgaattttgttttgcggtatggtgctttcaggggctgatcactggaggtgtgattctgcttgtcagttgagggaagaattcacacacttgtgttcactgaggacatcttctcaacctatt

SEQ ID NO: 19897 - DNA, 19232 bp, Oryza sativa
  unsure (1)..(19232): unsure at all n locations
tccttataagtggaagatcacggatattatctccgttataaaatatagaagattttatctatataagtaagattaaatgggtaaaatctcttatattttataacgtggtatataattaattgtctgtactttatacgtcacacataatgcaatggttaaaaactctaatattattactccacacgaatgtgcgcgtacattgcttagctagtactcacatctttattcccagttataacatgctaaggctacattttatagccttgattattcatccactgcacgctgaaacatccacagacacataatacgttgaacattaatacgtacgtacgtgatgtgtttgcaacttttgcatgcgcacatcaccatgtacgtgcaactaaccatggatgcttagcggtgcacaacgatcttggtgtacttggtcatgtcagtggtggcgctgcgtgcgctggtggcgagcgggaagtagaagggatagatctcgtagcgcaccctgcagctactgtagttaatctgacatccctgttgtgcgccgcagtattgaccgaaccttgacaccgccgttgacagacactgtgcgcaagccagcggtgacaagtcctgtgtgcactgtgccagcccgtagatgttgatgaacggcgtgtactgatccttcgtcctacccagcccaccactcccagcctgtgatgcctgcgacgttgccttgcccataaccttccctaccgccttctggaacgccttgccgttatccatcgcctgcacgttcacaagaatcaccccggcatctgtgtccgtctgcccgatgaagttctcgttctcgaaccgcatgaagcagtagtcatacctgcacgtagaataattatagttttgaagtttatcagtcgcctgaattcattgttttttcgtatgtttgtggtcatcacacttggcatatataccatattcttgagtcggattggtagttgcagctggtgaggatctggttggcggcggaggcgaggcaggcctggcagtcgctggtggagacgtcgccgcggcattgcgcgagaccgtagatgacgttgttggctttcccggcggaggacgtggcgaagccgccgccggtggagcccttggcgacgaggtcggtgaggacggagttgatgcttgccacggccttgctgttgccggccaagctgttccctgaacagtagctgccaatggagtccatggccatgctcagtgggagcaaggcaaatgacatgagcaccaagcaacggcaagctttgctactgaatgccatggctatgatcactcaagctcactctcactctcactgtcactgctgtgtatcacacctagctagttagaagtgtgtgtggggggcttgggttcactggggaggaatggttggatcttataaagatgagttggatatgggttaggagcgatgtgattgcagcctttttttgactctttaattggttgcatgcaatggttgatgttgacggtcgtatatggagactactacgagcttaactattgctgagtcggacatggcaatgtcgatgcactagtttctgcagatattgcgagccagctggctgattggctgcttgctacgagtcgttgactagttatatttgactcggttaattaggacgttatccacaacgactaacagggactgtatactgtgaagcaaacgaaaatatgtaccaagcttaggatgcaattatgcaaaactaattgttaatccaaactggctaggatgtacaggccatgttttttaatccactagcaaaatatctatgttatatcatcttcgttttatattataatttattttgatattttttctaatcaattattttagcttaatcaagtttatagaaaaaaaatatagcaacatagataacacaaaacaaacatattttcaaaataaatttaatgtaatatttaacgaaactagtttagtgttgttttgttgctaaaattttctacaaaccgatcaaatctaaaaaagtttgaccagaataagcaaaagccttgtgtatcttttgtattaagagaggtgaaatttttaaactttacaaactttaactataaggaaaaaaagaaaaacaagggaacacaaaaggcgtgggtctacatctcgcgacaagtctggcgactgatcagcggacaacgcctcaaatgggcaggtcagctgcgcgctagactgttgctacctccgcggccacgcttgcgctacttcctcccataatttcctttcatagttgaacacccaattgtttcattccttccaaattatccaggctactagggtgacaaatggtgtcgaagctcagtttgtttgctttgtcaactttctttctagcatcacaccaccactcgaagaaaacactattggaagggaagcaaagggcttgcaggatgatggcgaggacatgccaccaaagctgtttggatctggggaagcggacaaggccttgcaaatatttggactgccgctctcgacccaaaagctgacgaccacagcactgcaaccgctggtggactaggttgcacgtcggttgccatattcgaaggccgaacagctgcaacctataacatgaaacgaagggagtagtacctagaaggttcatttgtaaaatatgtcttggagggcttatgttatgaaaattaaactccaaggttgacaaaaccattcaacattaactaaaactaaacaacattaatctgaactcaaccatagttaaccaacaacaaactctgctcatcgatcgactccagcaattgcattgccctctggtgcagcagagtgtgaacgtgatcgctgtcgccccgctctccaggttcttgctccgaccacctcaatgacacgaatgttgttgacggtccttaagtatcaaatatgactgtcaaatcctcaataagaagccggagcccttcgaccaacaactatatccactacactgacagttgcataaacattcaactgtgtcaacaactatatccactacaccgacagttgcataaatattcaactgtgtcagacatcggttagtaccccttcttccttattagggtgatcggctaagttcaattaagtagattaaagatctacatatttatattgctatctactccttttgtactaaacaaacaaatctagtactaggatgtgtcttattatgagacggagggagtaccggtcaatttgctcatcagcgagggcggttggggccgagcaggcaaaccggttgggccgtcaaacacatatctgaggcccgtcgcgtctgggctcagaggacggtttgtttagcaggccatccaggccctttttgccaaacactcaactgggctactgcatcactgcttgtcctcacctgcaggctgcagctgcaaggtgtgtgaaacacggacaaacacgtgcggcctaacatagatgcggccatgggggtcgacgggatcagatcgtacgtgctagtggacagccagcgttgctattgaccaatcgtgatatagaaacaggggctgcttaggcggtatatccggttgaatcgcccctaactctctgaatcttttggtcttttggttacgtatatatgtcacgtcgtctctgcaactagctcgtcgtgcggcccatatatctggcacgagttttggagttcacgatatatgtgaactctctctttcgaagcatcgacccccctttcagagttttcgacgttgatttggaccatcgatgcaactcatgccaatagcagatgctctatcactgctactacagaaaaccggattggtgctggttggggtccggtcttaggtgacagataacccaatcggcacacatagtaggcactaggcagcacccatatatatgtggctcctttctttcttttcttgtttgagaatttcagccatatacactcttcccatcaacccatccacataattaaaaattggtaaccttttaatttcgtgaactatgtcatgatcatatgacttacaagtcgcagctataaaaaattaaaaatgccttccaagctggtcctaacaagttgaagatcaattttcagtagcacataatatataagtttaacacttcgataatattactgctccacacaaacgtgtgtacattgctttgctagtacacattttattcccggttatagtatgctaataaggctacactttatagccttatattattcatgaaccgcatgctaatcaaacgtctccacacacattgtactatagtttatactttagtatgtgatgtgtatgcgtacaagcatgcatgcacatcaccatgtatgtgtaggtagttcttagtggtgcacgatggtcttggtatactttgtcatgtcggtagtggcggtgctactggtggcgagcggaaaatagaaggggtaaatttcgtagcgcaccatgcagctactgtagagtatccggcatccctgttgcgcgccgcaatattggtcgaacctggacaccgccgttgataggcattgtgcacatgtcagcggcgataggtcccgcgtgcactgtgcgaacccgtagatattgatgaatggcgtgtattggtccttcacccttcccagcccgccgcttcccgcctgtgacacctgtgccgtcgccttgctcatcaccttccccaccgccttctggaatgccttggcgttgtccatcgcctgcacgttctccatgatcaccccgttgtccgtgtcagcctgcccgaagaaattctcgttctcgaaccgcatgaagcagtagtcatacctgcacataatacaattattacagttttaatttgctatctttcgtatgttcgtggtcatcacacttggcaagttggcatataatataccatattctggagtcggattggtagttgcagctggtgaggatctggttggcggcggaggcgaggcaggcctggcagtcgctggtggagacgtcgccgcggcattgcacgagaccgtagatgacgttgttgcctttcccggcggtggacgtggcgaagccgacaccggtggagcccttggtgacgaggtcggtgaggacggagttgatgctggccacggccttgctgctgccggccaagctgttcccggagcagtagctgccaaggggatccatggccatgctgagtgggagcaaggcaaaggagacgagtagcaaacaacggcaagctttgctactgatgattgccatggctgtcactatagctcgatctcacagtctcaatgctgtgtgtttcacacccttagatagttgatcaagtgtgtgtaacttgggttctctcgggaggaatggttggagcttatatagatgagttggatgggttaggagtgatgtgattgcagccattttttgactgtttaattggctgcatgcatgcatgcaatggcaggcagatgttgatggtagtgtgagagtatgagactatgggcttaacctagacgtagaaattactttcccaatgtccatgcactaggcagtttctcatgcagatattgcgagctagctggctgcttgcgatgactcgttgactgtatctttgattcggttaattaggccagtcacaatgggggtttcactggtgtgtcatgcacatttaataggggtaagactgaataaaaaatgattatttgcatgaaatggggatgagagagaaggaaagagtttcatcctggtgaaactcgtcagcgtcgtttccaagtcctcggtaacagagtgaaacccccgttgaggccgattcgtttcattcaccggatctcttgcgtccgcctccgccgtgcgacctccgcattctcccgcgccgcgccggattttgggtacaaatgatcccagcaacttgtatcaattaaatgctttgcttagtcttggaaacgtcaaagtgaaacccctccactgtggggattgtttcataaaagatttcatttgagagaagatggtataatattttgggtagccgtgcaatgacactagccattgtgactggccttaggacgttatccacaacgactaacataggctgctgaagcatgcaaaccaaaatatgtataccaagcaagcatgcaaatattcaaaagtaattgttaatctatacatgcttgtattttttttcaaataatctcatacatgatttgatgattgtaaatttcctgcatctaaatatatttaattatagaaaaaagtacgaactacccccaaactattacagcagtacccaacgaggtccgcctccgtcgctggtcgcccggtccgccttcgccaacccatccctaaattgcttcaggccaagcacgcttaacctcaaagttctttagagatcggcttccggaaaagaagttgcaacttgttgatatgagtattctattaatcctattaaaccctggaccgggatgtcacatccaccttcgccacccgccgcccagacgaggtccacctccactgccggctgctggtccgagcgcatgtgcaagagagagttggggggactgaagggattgggttgagggttaagtggcccagcgagttttttttattttgttttgctgactggattgccacgttagcgccacgtgtgtaatttatatataatcaaaaccactcaaaacagtgttagggggttatttgttcggtttcaataatcgagggtgtaaaatgtccggttttcgagttcaggggtgtaattcggtcaaccacgatagtaggggtaatttgtactttttccttatttatacgagacaaacttttgatcggatggactaagttacagcacatttgcagacaaattttcattagaagtccagagttgaacaaaatttacatactactacaactaataacaatatcatctcgaaaaactaacacccctgatcccgcgttctcgacaacttccagattatagattatcacagacacactttctaacttcctaaacagtaatttattaatgaaaaactttcttcatcattattttttgagagttttgtttttttaaaacaaaatcaagctatcaactttctgaatttaattcatttgtttgtgttgaataatatgatcgtaaactcatccatcggccataatctattagctacgtcccctcaacgctgctcaacttagtgtgcccatatgcatggacaccctctatgaattatacatggtcgtctgatgtatgacactacctcatgttgcatcgagctatgtatttacaaatgagcgattttattgtctttgagtgggtatctggatatatcatattttctaatgtaaaatgtatctgggatgacataattattatatatagaaaattggtaactctcaagaaccccaaaatgtatcatctaggtaggtagtaagtagagtaaagtatgcggccggtccttaacgtgttagagcgaggtatcacttagattcatgatcttgaaaaatcgatattagggtccgtgatcttgtttaaatgactcattgagatccaaagtacctttgaccgggttgactagcttacgtgaccatccagagtggcatcatatttgcattttagccccctcgcatccgatccaacacttcttccccaaatcttctttcagcactagtggtgaggacgacaacgagcggctgatggtggacaacaacaacggcacggccaatggtatacaacgacggtggtggcgaacggatgacggcacagcgcacgctgttgagggccgaggagaggggagcagcggtggagggcagagggcgtcgagctccaacggctgagttctatacaagctttaggccacaatggcataggttggaccggcgacaactcagagtgtggtggcggcagcccggtgcggcagcggcttatctcggggacgacacgagtgagctcgccagaggtcactctcgtgctgctacttcgtgtcgtccacacacaactagccgggagacaacgaggggatgacgagcggtggtgaacgacacaaagcaagaagtagtagcacatcaagggccaggagacgacgaggggacaaccagccgcagggatatgaccgcagctgggacggaatccgccggtgtgcgtgtcgccgcctagcgcggtgacgtccacggccttattgcggccgtcgttgccggatccgacggataactcgatgacatcgctgtcattgaggctccgatagtcgtcgaacttgagggaggactggtggatgaagaggtcctcgccgtcgnnnnnnnnnnnnnnnnnnnnnnnnnnnnnngtggcgtcaaaacccttcaccgtccccttcaccctctccgacaccatcttgccctcaccgccgagccctagaagccgctcgccgccccgcttcgctggccagccgctgccaccgccctactcgcccttccgcttcccttcgcctggggcgacctcgactcggccagttccgggtacttgaggcggctcgcctagcgcttgcaggtcccgccgcggccacaacaagcgatggcgagaagggctggccgccgtcccccgcccttctccccgccagtcgcctcccttctccctctttgcgcatgctcgccaacccaccgttgtacccgcctccctcctcgtcgtcattgtcgtcgtcactgccgccgccgcgtttccactgccaccccaatcggcccgcaaccgcaaaccatagaaatcacactaaaaaaagatttagggaagaagggttggatcggatcccaaggggatgaaatgcaaatatgctgtcactctggacggccatgtaagccagtcaacccggtcaatttttcaagatcatgacctaagtgacacctcgctccaactttaaagactggccgtgtactttagtaaatacatgatgccacttggtcaatttgtagaagaaaaaaagggagaaggttacactaagaagttttaaagcagggataaattatagaagtgtcacattgcatctgtgtatacggaaataggttcccccactcccaccagtgtccactgtctagcacgcacttgcgttgtgtgcagtatcgatcagttatactagggatggcagcaggtcaggtcgggcacgggtagagcaaaaccatgcccgaccccatgcccgtcgtcacccacccgaaccctacccactagagttagcagacaaaactccgtgcccatacccatgcccgacgggcacgggtatatccggcgggtacccaatggatctcacataaataataattcgaaagatagataatttaacaaagagaaataaaattaacaatttaccaaattttagttatcgacaataatttgaattacatcacaacttattattagttagtatcacaaatgaaccaagagaaatgggtataaaaattaagagataagttgaaattagctaatagatatgtatcgggtcgggcatgagttaccgacaggtaaaaaatgaaacccgactgttacccacaatgtcttcgggtatcgggcgggcatatccacggataaaaaatcacacccacacccatgcctattgggtcgggtatccgcggatacccggacccatgagcaaaattgccatccctgagttatacggtattacaccttgactaattttctacatcagttcggccgatggccacggctcactgtagctagtggaaagtgaaccaaccagtagtacacgcccaatctgtattccacagagcttaagattaggtaacgacgcatgcggcagccatcgacgatcatgggccatatcttttgctctacaacatatatatatatcatcgatgctagaatttaaatcttaaaacttaattttaaagtttttatatcgtagtttttttaaacattaacgcttaagtcattaagaacacacgcgcgcgcgcgcgcgcgcacatatacacatacatacatatatacacacacacatattatatatatatatatatatatatatatatatatatatatatatatatatacacacatacatatacatacatacatacatatatatatatatatatatatatatatatatatatatatatatatatatatatatatatatatatatatatatatataagttttaattataaattaactctctatcactcacatatcgtttgatgtattatacataattggtcccagatggcggcccaaactaccggcctactgctagtactgtgagaactggacgacagcctatacaggacaggacgcgtgcacgtcggagcacccacgccggcagcggagacacggtgaggttgatgccaaagatcgattggtcgttttttttttttctcttttgtaagggaacatgcgaaatgctctcacgtctttgtattaaggaacgtgacggttggtcgtcgttctctcgatgatgaattaagaacggatcgtgagctcgttcgggtttctattaattctatttggctgccacctaatgacgactgaatacttaatttagtcgtcctctctccatgtggaattgtggatgcggcttacctgcagcaacagcagcgacgagcgacctgctccatccaccgacggcagcagacaggcagtacacccagcattcagcgctgcgccgcgcatcgtccgatgcatgagccaggcaatggaataaaatccagagatctactaacgccgggattagtaccagtgatagtgtggttgaccgatcaatacgatccagtgggcgacctcgaatggatctgggtctgcctaaatatcaatcccaacttctgcaaattctacgggagatttgtgggcagcaggctgtgctctcttgggccgtgtttagattctaatcttttttttcaaactccaatttttccgtcatatcaaatgtttgtacatatgtatggagcatcaaataaaaacgaaaaaaactaatttcacagtccgactgtaaattgcgaaacgaatcttttgaatctaattacgctatgatttgacaatgtgatgctacagtaaacatttgctaataacggattaattaggcttaatagatttatctcggagtttgcaggtaaaatctgtaatttgttttgttattagtttacatttaatactttaaatgtgtgtccgtgtacttaaaaataaattagcacacgaactaaacacagccttggtaaccaagtcaagcagggatccagtagaagatactcccaattagggagtttgactcgtagtaggttttgctcgagctctagacaagacgaatccgagccatctgtcaaagctcacgagctttatcgggctaagctttagctcataacgagcctaacaatatatgagttttatttttttaataaactagtagattaaatatgatataatatacgcacacaatgaaatagcttgtattggtattatatacttcatccgtttcaatttttataatgtatgaccttctagaattgtttatatttatataaatgttaattaatctagacttacatatatgagcgaatatgggcaatactaaaaagtcttacattatgaaatagaggggatcgagtatttattttttaagagattatcattgaaatatatgttgtactacttatgaaccaatctcgatatatagtcgagctgatcgagctcgactcgaatctggctagaagttcaaaggttaacaggctcgagttgagcttgtattgagctcgagccggtcggctcattgacggaagagcagcccatcagcaggtctcgaaggatgaaggggagatctcctccgaaaccagatgaaagaaaaatataagactaatggtaccgagaccaaagcaacttggcagtacgtgaaccatatgataatctgtctctctgcatgcaactgctaatttgcacatgtttacatctaaggtctgatgaggatggttgaccttttgcttatactgtaagtctgtaataaccaggaaaataatgtaaaacaggctatggcctgcccggccggctggttactggttactatcatactcgtttcgatggaacctcgttgctaatgagtaatgaacgtagagcccattaccagcccaggtccattaaaaacttactaccaagtgagttttttctttatgtagctagcccatcaagctcaaagctctcaaaagaggagcaactttattttcattttgcggaacacattaattctgtagcttatcaaagaggctaacagtaatttgtggctcaatcttactcgagtggctctagattagatggggaatttaactatttgccacttttaggtttggcaattatccaaatacctctcttaggctcgcgcttaataatttgccaaaggaaagacatgatttcttaattattttccacttttacatacgtggcgtgcccgcgtgaaaaacaacatggaccccacccgtcagccccttctcgctcattctgctcctcctccggctgccaagtctcatccttctctagatcttggcagcggaagcaagctagcatcggcggcgccgtcggaggcggacctcgcgcagctctcgacggtgaggaggtgcacggggaggagcggcctgcggtaaggtgagcaaggacctgatccatggcggcgatggcgcactgtgttgtcctagtgcctgtcctcgtcatcgcctcctcccttgttgcggcggcgtacggggcggccttgcgttcgctcagtgccaacgaaggcaagggagaggtcaacaccgacaccgccgtcgacctcatcaccaccagccgaacctcaacactgacgcagggtggtctcgccagagccgtggccatcgttaggttggtctcacctttgtctcctttttttttaatccctgcgaagtccaccttcgatgccccgatgccacgattgacgttgccgcgtcgctggttgatttcgtcgctaagatttggagaaggaggctgtgacggccggaggaggaaaaggagaggggaggggctgacgggtagggtcctcattgatttccacacgggcacaccacgatgacatgtcacgtaggcaagagtgacaaatagttaagaaatcatctatctccagtggtaaattattaagcgtaaatctaagaggggtatttggataattgccaaatctaaaagtagtaaatagttaaattccccagattagattggggatgcgtgaagttcaggcgagcaaggcatgtaaacactgacgcaaatcgcaatcacgcaatacatcactacagcagcagcggatcaaagatcaacaactccatttcccaaaatttaatccataatgaaagacatacactgatatacaagagcctaaacatttactaatcatcaacaaaagatagctaggaattaattaaataatacagctacgccaacagtgcgtacgtcagcaccattcaccccacgcttttttagcgcaatgtgtagccacccagcggcattgtcagaaaaagttgagggcttttttggtgcagccttggagtgttggactacaacaactcagtgcgcgaacgaaaacttttagcgtgttatatggatattaatttaaagtattaaatgtagactaataataaaaataaattataaattttgtctgaaaactacgtgacgaatttattaagtctagttaatctgttattagcaaatatttactgtagcaccatattgttaaatcatagagcagttaggtttaaaatatccgtatcgcaatctacacgtaatctgtgtaattagtttttttatatatttaatacttcatgtacggatgtgacagggtgaaaaattattgtttagaaactaaacaggctctaaattataagcaccgcgatattatcagaggtttgatgatgaagtcgatggtcatcatcataatctctctcaacgtgcctgcgagtctcattgccccccaactcccccgcccacgaaatgattcccctgctcgccggcgtatgtcgcaagcaacacagcgatccaacaacgagcctcgcgccctcgcggctccaccacctgcgcaccgccgcatctgcgttttctccgtgctccgaacccgacatccttcgccaccgggtccgaccggccggcccgtacccaaaaagtcaattttcccgggccccacatgtcagtgaggtaccagcccatcccccggtcctaaacaacttaaccaccggtgaacaactgagcaccgatgccccacctcgcagagataattataaagtattagggcctctttgaatcgcaggattgagaaaacgtaggaataggaaaaacgtaggattttaataggaatgtaagtttaaaacagaggattgcaaaacacaggaaaaacataggaatgaccgtttgattgaacggtgagagagagacttaaaggaaagttagcaagaggttgaagctcttgctaagggcctctttgaatcgcagggtagaaaaaaacggagaaataagaaaaacgcaggattctgacaagaattgaagtgtaaaacagaggattgcaaaacacaggaaaaacacatgaatggtcgtttgattggagcgcaggaaaaacgcaggaatcggataagagagatagactcaaaggaaattttccaagaggttggagctcttgctaaatttcctccaaaatccacatgcaatgtgtcattccatacgaatttcataggatttggaaagcttcaatcctttgaatcaaaggcccaaataggaaaatttcctataggatttaaatcctatgaaatttctacataaatcctttgatttaaaggggccctaaatttcctccaaaatctctataggattgtccattccatatgaatttcaaagaattggataggatttaatcctttgttttaaagggctttataggaaattttcctataggattgaaatactctaaaattcctgtgttttcctccaaatctaaggagcccttaaccggggaaatcgctacctaatctggcctaaccgaggtaattatcgagtgggattaaccttcgttcggggcggtgctcgggtcgggcgtccagatctcgggctcgctgagctgtcgccatcgacccggagtccctcccgcaccagctaacctttgcttccgttggaagcgccagccagcgctcgccgttgtcacctgtcacactgcgttgcacggattatcgtttttaattaatcgtcaccagattgttttttttctttctttttgcaaatctcgcttcgcttttggagtgggaggaattaattgtggagttgggtagatcgatcaggggcagcgcgagcgaggcccggttggtagcagtcggtgcgtgtttgtgcgtgtgcgcgctgcttctgcttgcatcgtggtgcgaggaggggagaggaggggtgctgctataaatacggctcagatctgggaggctttcttcctcgtccgcctccggtctaatccgattcaaacccgccgtttccaagcttgctctcctctcccccccaatccttccctcccgagtggcagggtgagcattccgccgctcccgtgtttttttttttgatccatctccgtggtggtggatcgcgatcgcgtgtgtggggttgaggggggtttcgattttgtggtttgggtggtgttggttttttttttttttttgggtgggggggggggaattgtgacgatctgagtgttggtgacggtggatctgtggcgtttttgtgcgtaccaggtgctcgacgggatggcgcagaaggaggccaatggcagcagcaacggggagcacaccacccgcccgccgccgacgccctcgccgctccggttctccaagttcttccaggtgattttgccgggatccgatcgctggatctcgccgtatacgtggcccgatcgctcgacctggtctgattgttcgtgggtgtttgtgtgtgtgtgcaggcgaacctgaggatcctcgtcaccggcggagctggcttcatcggctcgcacctcgtcgacaagctcatggagaacgagaagcacgaggtacggatgagatcctgtagtacgatccgtttcatttttgttcggcttgcttgtctattggggggtttgtggcattgacttgtgccggtcggtgaggtcaagctccgtccgttgtgaggaacagtagctagatctgagtgatctagttagggactgagggttcgagatctatatcagaaacggtaatgaatggagatgcttctgccagatctctggggtgcaagcttttctgctacgttttgcatggcgtggggttggggcatttatgtctgaaacttaagcttgaagcttctctcgagtctcactacctgagaatgttttccacaacgagagagatcatagatatcagtgtcaatgcttcagggatcttgctaggagtacttcattatatgccctgagctttagctttggatctgtttgagaatgtgagagttaatccaagatccagtagcaatgttgtagagatctcgctgctagtacttcatccatgataagcagagtaccatgctaaggcttgagatctttcttgcgcagtgcatatgcttcatattcacaagagtttgtactttgtagaactcaacaatgttgcattgttgccttgtgtgactgcttggcagatttttagctgagaaagtgcgggcctttgatcatgtgttcttttctgttcaggtcattgtcgcagacaactttttcactggttcaaaagacaacctgaagaagtggatcggacacccaagatttgagctaatccgtcatggtattgctacattctcagtgcatttagttcatgaactattgttacatactagtaataaagttttactgctagcaagttttttcgttcaaaatttgagaaacactatagatcttggttagtaaattacaaacaaagcaccgtattataattttggctttgagtcaatgcttacacaaatgcagtcttgagttgtctgttcaacagaatgtacggaatttctgcacttgtcattgaacctctcttagtcaagttcatctttctatcttattagattagattatgagtatgtttatgtgactttctattggtaaattctgttccaacttccaaacaaaagtgtatgctttcatgcttatatagttatatttatgacttatgaaaaagggtgtttggcccaaccatgaaaacaggctgatagatgttatcctgtgctcatcttgattctgtagtgtacttaagacactaaactttttttgcgatcagttctatcgtatcttcaaaagtatattattgtgagatattaaaattttgaccttttttttattcatttcagatgtcacccagcccctgcttgtggaggttgaccaaatctatcaccttgcttgccctgcttcaccaatcttctacaagcacaaccctgtcaaggtacagtctctattatatatataactctgttaagtccaactattcaaatacaaatcttgttcatgtcctgttctgatatttaaatggatgtataatcatgtacagaccatcaagacaaacgttatcggaaccctgaacatgcttggacttgccaagagagttggagctaggttggtgtttttttaatgctgattaacttgtcctatgcaacttatgagaactatataatgaagggaggtttttatgttgtactgcaggattttgttgacttcgacctctgaagtttacggtgatccgcttgagcaccctcaaacagaggcctactggggaaatgttaacccaattggtacgtctgttctatcacaaatacactacatttatcctatattttcttaatctagtgcaaagttcacttacttgaattgatttacttcatcaggagtcaggagttgctatgacgagggtaagcgtgtcgcagaaacactgatgtttgactatcacaggcagcatggcattggtaatatttttagttcatacctttttgtcttgtgatgtactggattgtagttctccttaataagtattttccaatctatctctgtagagatccgaattgccaggattttcaacacctatggacctaggatgaacattgatgatgggcgtgttgttagtaacttcattgctcaggccgtacggtaatgctcgctgaacttctttcaacattctctcaggttgtgtccagttggtcctggagcttattttcatacataattttacagtggcgagcccctgactgttcagaagccaggaacacaaactaggagcttctgctatgttgctgacatggtttgtcaccccttttgaaatgtcattaattaatagctggctgaaactttgatatatcattgcatcacatcatcactggtaccattttaatgcaggttaatggtcttattaagctgatgaacggggacaacactggaccaattaatttgggaaacccaggtagatttacctctgcattcgtttgatttttctctacatgtggtaatctgtactagcaatcctgtggtaatgaaattgattttcacgtccttgtcactaaatggtcataatatattgtgttgtaggtgaattcaccatgctggaacttgctgagaatgtgaaggaggtaagatgaatatcctgttgccgaacatcattccatgggatgtttctgaatggcatgctaagtttccctgcttttaccttgcagttgatcaacccagaggttaccgtcacaatgactgagaacactcctgatgatcctcgtcagaggaagccagacattacaaaggcaaaggaagttttggggtgggagcccaagatcgttctgcgtgatggcttggtgctcatggaagatgatttccgggagcgcctccaagtgcccaagaagaaccaggcctaagctgctgcatcgcatttggcgaaagatgtcactggagcatacttaatagttgggtttcaccattatttgtgtcgcagttcattgtggaatttgggttccaataaattctgatacacctttgttgttcacctgaaatattgtgttactagaatcgtcatacggggctgggctatttgtatcattaccgcttttggagaactctttatacttttgtttgtagcctgtgtactcgcctaaatcaattatagcaatgttgatgaatttttagcttgtttgttttattactgctgagtaccgtttcacatgtctgcctatttctttgctgagtattccaactctttggcctcaaataatctctttgcgtcagcttggaacgtagaattttcttcgatctctgcacaaactaaactaattgttgtgatttcacatctctagt

SEQ ID NO: 19898 - DNA, 18259 bp, Oryza sativa
ccccctcccctcctccccctccccctccccctcccgcatcacagccattcgccacttcaccaccaccaccgccataatccgtctcgccccgatccagccggctcgtcaccgacgcgacgccgccgcggccccccagatcccgtcgtgcgcgcgcgcgatctgctctcggtgagcgcccacttctcttcgtctccgtcgtttttttttccctaggtcggtgtcgggggatcgccccgcccggccgggttggactcgtggatcctctcgtctgaaatttgttctggcgccttgagggggggatagatctggctggcccgtgcggttgtgcgttgtgatctggtgtggcgcggggttctcgtgcgtgcgcattccgcgtttgcggcggggagagggatctatctgtctacctttctggtgcaggggaggcggtgagtggtgccgatcaccgttgttttgtggttcgttcgttcgttctacttggttgtggatcatggtgagcattgccgttagttagtacatatcacaatcacaattgtttaacgtgaagaatttgattatttggtaaattgaaggctagatcatgaagccgaggtgctgtttggtactacgagagagacttcgcacacacacactctctctctctctctcagggatccatgtttatgtcgctccttttctcaaataaatcgatactagatcagttgcggtttttgttttttcttcattttccatgggtgttaactagatctgctttttataattttaactctgtcttggggtgccttttatgacgtcacatgtgaggatactcttctgatgccattttgtacacatcagcaggcgaagatggcggcttacgagcccaagaacattcttataaccggcgctgctggtttcatcgcatcacatgtggcgaaccgcctagtcaggaactatccgcactacaagattgttgtcctcgacaagctcgattactgttccaacctgagcaatctcaacccttcacgtccatcgccgaattttaagtttgtcaagggtgacattgcaagtgctgatctggtgaactaccttctcacaactgagtcaattgacactatcatgcactttgctgctcagactcatgtggataattcatttggcaattcctttgagtttacaaagaacaatatttatggtacccatgtccttcttgaggcctgcaaggttactggtcagattagaagatttattcatgtgagtactgacgaggtgtacggagaaactgatgaggatgctgtggttggcaaccatgaggcctcacagctgcttccaacaaacccatattcagctacaaaagctggggctgagatgcttgtgatggcttatggaagatcttatggccttcctgtgattacaactcggggcaacaatgtatatgggccaaatcagttccctgagaagctcattcccaaatttattcttttggcaatgagaggcttgccccttcccattcacggtgatggctcaaatgtcagaagctatctgtattgtgaggatgttgctgaagcttttgaggtggttcttcacaaaggagaggttgggcatgtgtacaatattggtactgtgaaggaaaggagggtgattgatgtggccaaggacatatgcaagctctttggcttggacaccgagaaggtcatcagatttgttgagaacaggcctttcaacgaccagagatacttcttggatgatcagaagctgaagaaattgggatgggcagagcgcacactatgggaagaggggttgaagaaaacaattgaatggtacactaacaatcctgattactggggagatgtcgcaggtgccttgctccctcatccaaggatgttgatgacacctggagttgaaaggcataactggactgatgagatcaaatctctttccacttcaccagatgaagctaaggaatctagcactgcggttcctgcagccactgccaaaagcaccagcagtgcccctcaaaaggcctcatacaagttcttgatatatggtaggactggatggattggtggtctacttggtaagatatgtgagaagcaagggattccatatgagtatgggaaaggacgcctggaagagcgctctcagctcttgcaggacattagaaatgtgaagccaactcatgttttcaatgctgctggtgtcactgggaggccaaatgttgactggtgcgagacccataaacaggatactatccgcaccaatgttgttggcaccttgaaccttgctgatgtttgtcgtgagcagggcttgttcatgattaattatgctacaggttgcatatttgagtatgatgctaagcaccccgaaggatcaggaattggttttaaagaggaagataagcccaactttactggttcatattattccaaaactaaagctatggtacgttcaagtcgtgtttttaagaactataacatctatccttttatttctctcaggtactaacgtatcttttattataatgcgatgtaatgcaggttgaagagctgttgcaagaatatgacaacgtctgtacgcttcgagtcaggatgcccatatcatcagatttgagcaacccccgtaacttcatcacaaagatagctcgttatgacaaggtggtaaacatccccaacagtatgacaattttggatgagcttttgcccatctccattgagatggcgaagcgggactgcaggggcatatggaacttcaccaatcctggggttgtcagccacaacgagatcctggagatgtacaagaaatacctcaaccccgacttcaagtggaccaacttcactcttgaggaacaggccaaggttatagttgcaccaagaagtaacaacgaaatggatgcatcgaagttgaagtccgagttccccgagctactgtccatcaaggattctttggttaagtatgtttttgagccaaacaggaaggttcctgctaactgaagatttacgggcgcgggcgggagttatggaggttacgagcgcgggcgggagttatggaggttattgcacggatgcagttgtgaccatacttttttttgtagtttttggttatatctggtgttttgttaagatacatgtaggtgaactacataccgttcgatacttaacctatttatttatatattcatagcaattcgtgtgcacggcatgtgcatattattttttttgctttggtttgtgcggtggttcagaatgtatctcacctctacgttgtactctttgaactacttactctatctaaaaaagggcaattcttacatattaatttgggctcaaaacttttgtgattgattgatgagcagccgacgatctggtagcgtgagagtgaatcctccgttcggcatcagcatcggatgatctggtagcgtgagagtgaatcgtccgatcggcagtagcatcggtcgatccggtagcgtgagtgaatcctccgatcggcggtagcgtgagtgaatcctccgatgctccgatcggcagtagcatcgtctcatttctaaatgtattagtcaccttaaagtggtttctaaatgggattagtcgccttgcaattttgcgctacagtatacaaaattctcgcagcaactaaacattaacttccctacaggccgcaatcgacaaagcatggtcaaatacgacggtagtaggtacaacactgcacgatcacgataccaaattacaaattacatcatatgcttttaccatcgaaaccgtgacaagcgaaccgcaaaaatgcagcaaccacattaggcacgcctgaagtatgcatagtgaaaaatggccaacgcatcaaacaaaagactcgcatgcaacaaaaatgcacaaaccaaattaggcacgcatgagatgcagtttagcatagtgaaaacgcctgacgcatcaaacacaattcaatatacggtatttaactggcaacattgttcttgcaaaggccactgcgaaaacatgttcaccaaaggaagaagtcaagcagatgacagcaatgcttgagggcaaaaaactgcaacgcagaataaacctcaagcctcaattacaacagaaggagcaaattgaaatttccacatctatcacctaggagctttccacattgcaaacccaaaaaaaaaaaaagtaaacctattttgctttatgtaattgaatctgggcaaagaatctaaacgattatttcaattccagttaacctaatgccatctaaatgatgactacaccgtaccatttccaaaatactgaactgatgccattgacattgcctgacaaacatgaccatcgagccagccatcaaaatttgcctcttataaggttatgaaatttgttattcaacacctccaatcaagtaggccaacacttggatgatactcaaataatcaataaactgagaaatccttattgatgagcaacaagatggatggatccttctgttgaaaactgagtgcaacagttgaaaactgaacggcagggcagaaacatgagcataatagatggatcttcccagcacagttacatgatcatgacatacctagttgggatactaaaggagtttgatggctatttttaatgaaaatgaagatccactgcaatgctaacatcacacagaataagaaggcaatggatggagggccaagaaatgaagtccaaagcctacatatgctgttaagacttgaataactatcaaatatcaatagcaaattttaaatcagaatttgcacctcgatgcttcttcaaactgacgatcagctggctagaagatagaataatcatatgacggtgcagattttgcaaggaggaaatcaactttaaaatgaaagtgacccctccagccgctgtcatatgaatcactaacgggtagaagaatattgctaagcccaaaatcaacaatagcagaatgataaataacaaaaaaagcaccagccacctgcaagatgagaataaaagaacctttaaacacatgaaacagaagcaaataaataaaaagaccaataaacagtagtaaatatagataaacagataagagatgatgcatacctcattgaggatggctgagccttataacccttgtacagagaggaacaatgtccaaataaccatgcaacaatgccgttgaagatgatgtatgttaaaggagtcagaagatacgagcacctcatacatcttcagtaacttctgtatgtggagcaactcgagcaggccttcactccgcagaaaaaggaacataagtggcaaccaagtaatattcataacagtgttcaccagcatccacttaactctagttctatgtagacacataaaaccgtacaattcagtaaaccaagacccgacaaacaaaggttttgttgttgccactgaacatggtagcacaaatagcaggaacaagcagataaacatccttcagatttcatgttgaaatatcaacaccgtgaagatctagttggtctgcatcgcatctgcatggtatttctccaagtcagcatcaagttcttcagcagactttggctggctacgctctttgccacggcgaccaccggatccaccaggaccaccactgcctcctccgccaccacggcgcctcccacccccccttggacgaggtctaccctgcggtagtccagctgggccaccccttggtgcactgtaacatttcaaaaacaataaaggtaagttggcaagatcttatatgaactggagaatgatcagaagtgcacacaaaataacaagaacgttttgaaaagcaaaaaaacaaatcaatcgataatgagatatcaacatctctgatacatagatacaattttaggcttttagcaacaagtgcaattataaacaattaacagaaagcatcacaaacaaccaatgtatataatcagtcaccatgtttgacttgaataaaaaattcatgtgcaagaattttctgaagatgatgaaatgaaatgaaaaatcatgcaagtgttattttgtggagcacagatatcaaattatagaaaatactcagtagtattttagcatcagccctcacaatcaaaatacatcacagcagtgatgagcaatcatgcaaaactttagcatacaaacaaataaaggataatgtagcaatccgaacatacctcttagcaacatttctaacgtagcctccgttatttgctggaagagcagctgcagctgtaggagtattggtcccaagaatctctattttcattggcttaccatcaagttgcacattgttatatttcttcactgctgcgacagcatcgccacgccttgcaaatacaacttcagctgttccctggaagggatagacaaaagtcaggctatcacataaaaaacaaaaaaaaaaacaaatgcatgtaaagaagtgtaagattgaatctgtaccttagacctcccacttctgtcatagtgaattacgtatttcttaagatcacctaattcagagaaaagctcctgcatcattaaaaaataaataactcagaaaaatgcttaagggaaaaacatgtcacatgaagatttcaggcaatttctactggctaatgatatctacttaaatgatcacattgacatggaatttgatgaaataggacagtaaaaaaatatcctagaagtagacaataattaattgtcttaaaaaattcaaataacccatgggtcaacatacaaatcactaactagagcatatcactatctttgcacaaattaatcaagaccttttttcagaggaaaaaagatcagatctcgatggaccagaattatttaacatcagatcgaagctagcagtatgaacaaaaccaaaatattgctggaattttacacatgttcatgctagatctggcgaatagcttaagctaatcacatatgcaaccaaatatctgctttcctctagcgctaattgctcagaagcgactaactcaacgcgattattatataccttgatatcctcggtcgagacgccgaagtccaaattggagatgtagagcttggtgccagtctcgatagccgagaccctcccgcctccgccgctgccgccgccgccgcctgccgcgacatccgagtacatgtcgtgctgccacgccgattcaggggcctggatcgcgtcataccacagtgagaaaaccacccgaccatccatccacatccttccccgcctcgccgtcgaaaagcggaagcccagctcctccgccgacggcgcgcagcaaaccctagccccacgttcgatccgttgctgttcgtaccttgggcggctggtagggccccgccctgttccccgacctcttgaagggccgcctcgtcggccccacgccgccgccgccgccaccaccaacacccccacccccgccgccgccgccgccagcggcagatccgcggcggccgcggccggacgaggggttggccttcttgttgttcttgatgatgtcgtcgagcgtcatgtcgagggtctccgccatggcggctgctcgggggcgggtagatctggcgcgctagggttgggcgagcgagcgagctcgacgacgaacgaagaggcggcggattcgggatttggggggtggaggcgagagcggcgttagggttggggaattgggagatttttttcgtcttttcggtggcgggcgcgataaaaataaaggggggagacggacgcgtagggataacgcgtggtgaggcggtcgcgagagagacccacgactccacgagggcgtgatgcggacgggaaggagaggagaggcactgattggattggatattgggatgcctgcagtgccgggtcggggtctggctcggggtcgcctcgttccgttgttccgagtatttctcgctggagtatcttgggttcgacctcgagtgcttatcttcctcatgttctttttttttcgtggcaagtcggcaaagtcggttgactagtactcactctctgtttctcaaaatatgaaggtttttaatattcagactttatatcataatataagcaattcaaaattcaaaaggtaacaaagtgacttaaaagaaatctttttgacgtaaacttagtatttcctagataacccaggaatccttatatatcgtaatggaggagtatttgggacaaccacatgtcgataaaaaaaatattttaaatgatatcatttaaagtactccatccgtttcacaatgtaagtcattctataatttcccacattcatattcacattcatattgatgttaatgaatctagacatatatatctatctagattcattaacatcaatataaatgtgtgaaatgctataatgacttacattgtgaaacggaggaagtaatatacatatataataaaatttcctactgcacaatatagaaaagagctagtaaaaaatgattgtctactagaaagagaaggtacgagagatggaaacattcttttatgtacagagatagaggtagcaagcgcataaggggaagcaattgaaatcaaataaaaaatgtgatgccatatttttagaaaatgtgaactaatatggacaattgtgttaataaaaaaacatttggattatgcatgcaagatagtgagttaagtctcacgcattgatctgttgagtagaaaaatggacaaagtaacaaaataaaactcttatatgtatgtgtccttagtgtttaaaagctggagctagaaaatacctctaaagtttcaatgttcaaaatttagcaacagctgataagcaaacaggaagatacggaagttcttctacagatagatgcgagaaggaagaagaatactagtgtatgatatgtgtgggcagtacaagtttagccaccaacatggcataaaaataggtgaaacttgcccaaacttgaaagtccaggtgggaaatactcagtccggtagcacgtgatgaaaaatgaacatccggcgaagtttcgaaggccgtgaataaacatgtgctctttcttaaccccagttgccactagatggtcataattaatctcagagagaaccttggaggttggggccgtacatagcacaagttcagtcttttgcatgaaacaccttgtgggagaactggagaagacagtggaagatacttttctcaagcagacaccaaaactataatttctcccatgtataaaaggagatccgatcgtttcgatgctagaaagagagagagaaaaaaaaactcccgtctactgctccacatggccgtgtttgggatccaagttggcgtgcatgtgctcccaccaaggcaccagccaggctccaccaagcctgccttattcttggatcgattcactgattcactcattaatctatcttcattgtctgagtgcgtgcgtacagtctgttcatgcacgcgtctgatttttggtagagatagtaaccgccactgaactgccattagcaagagacgcatggagttttggacacagaaaacaacggcagtaaactatacaagttctggttttatatttattctgcgagtttgatttgatcgcaacaatgtttgcttacaactgcaattgtgttgctgttcatgatgataacgattgtatccgagcaaaaatttgtcttttcggtcaaatgccaagacagcttcgatccaaccagcctcacattccatgcaacaaaaccttccaagagtggactcagggcctgtttggttggtgacctgacacacatgcctgatgaaaactcatgcctgaagctagcctgaaagtttaaagacatttgcctgaccaggcagcctgtgagatgagttgtttggtttgaaccatgtgcctgagaagaataatgcaacgtcaaactgtaataattactcttaacagataatattaactcaacaaacatgatcaatcggtgggaagaatgaaaaaagcaagaaaaagaaaaagtatgtaattaatagtgggacccatagctttcacatcaccttaatcttgctagcttctcacttgtctgagtcaggcgttggaatttcgtcgcctgagccaggctaatcaaagcggctagctgtcaggtcaggctaccgcaggaacacccaggacgccaaccaaacaaggtacaggcatgtctcaggcaagcatctcaggtcaggcacaaacacgagggcagcaaccaaacaggccctcacacagtcagcttcagcctggaaaggctggattagtaattaaaaaggataatacgcgtcatgtcgcatcaaaagatgtcgagaaagtaggcaataacaaaggacgtaaagcctatcagtgcctcatcaagttgggtggattggcgccaaacaaagaaaagcactataacaacacagccaaccgatatggaacatgttacacactggccttttggacagactatcaactagagcaaataatggaagagctgatacagctgtaggaggtccaagacaaaaaagaaaaaaggaaaaaagaaaaaaaaaagcagttgaaacaataaagaatatgagaggaagtttgtgtagattacagtttcaatttgacatttcttagtaattgtgatgacagtttcagatgagccccattgaccccggaacataccactagacatagttgtaaacaacgtacaaaaacacaaactcttttacttgacccttttagtatcctgaatgatacggaccatcggacgctcacactttctggcatatataacttctccaagtataatatatctctagaaagaaatcaacctcagcggaagccgccttccgtccaataggagccaccggtggttccgttctgattgctccccttgctgggggtgctgtgattgtaactatcaaaattgtcatccttcccatcatcccagccggcccaggagtcactgctttggcgttctttcgcaggctcatccttcttgactggctcatcccaatcatcccaggaattggaattgtaattctttgatgaaccatcatgagaagaagaattccacccattaccattggtctcacgctcaaacctatggtaaggctcactgccctgctccctgcgttgccaatcatccccccagccattcccaccttccttggcatactcctcaaccttttgtgacgctaacgccattacccctttcataattccccatgttctacttccaatctctgcggttttattggcaacaacatttacagtttcattcaccttctgatcatagcccccttccctcatctgcattccagacaagcacaaatcattaactgtgtaagacaaggacaaagctctccggcaaataatcttaaacacaacatgttttatttagttcaatatagtccatagtaacattgattcttgaggagtaaacgatgatcacgagatttcaataattaagtccttgataggaaaatgaggtgggaaatataagcaaaaatgtactcacttaataatgctggtagaagaatatggctcaagatacagtataaatgatattaagagattaggcttgatgtaagacaatatcaaggagacacgccagtaaagatctattcatctatattccagtattctgatgagtgcaggttaatatatcattacaatcagattgaaccatgcaactaggtaagcacagtaaactcagagaaatccatgttctataaaaaaactatactctggaaattcaacttgggatattacaaaatcagctgacaaacaaaaggtacctttgattggaactcttttgtgccaacttggacaacactggcagcagactgggcagcagatgctgcaactagtgaaagccgtccaattccctggagatgaaatggtataggagttaaactgatggacagatgaaaataaaaggtgtaatactggcacaactgcgtctaactagatacacacatcaccctaatactgaataataataatatcaagaactgtttaaccaacacacagatttaacctggactcaacaaagataatgatatatgctattttgtgggcatattaggaagagtattacaaataaaacggcttaagcatgcttaactattctatatattgtccatttggcacagcgaactctattacaacagtgtcttcaaaagctacattttagtcgctgcaggaaacagggcatatcaaattttcaaggtgatgctaagacctattggcaaagaatgtatagcttgacaaaggccacccaagatacaaaagtaagcttaaaaaaagagcagtgtaattatatctaagagagaacctcagttcacaatttcatagcataaaattaacataagtaaaagatgatatatcattggcaacagaaatgacttcagggaagaaagcagcaagtgatgttcatgtaacaattgctgcaatagtgcaatactgccattcaacctcaacctagtaataccatgagcatctatagcgttttatcacttgtagatctaaagaaaccagatttacgatacaacagtatatccctttgcagatagatgatctaaatcccttaactacgaaaaatacgttacaaactgggtaagcacaaatttgtatttactcctttgaagaaagatgatctaaatccctaaacttccacgttataaattgggcatgcgcaaaactgtttattgcaacagttagctaaacatatatagaagtatagaacaagtaataccgacgtagcaagaatttttacctgggagacgacctgcatgacatcaccctgagcagcagcgccgttccgattcgccgacggcgccgggctggagccgaacccgacgtatttcccaccctgcgagggcgggatcccctcgggcttcgactcgttctccgccatcctcctggcgaagaagctgtccttgttggccgccgacgcctccagctgctgcctcgtgtacatgtcctgcgtcgatttggacctcggcggctgcctccctgattccgcccccgactcaccgaacgaccccaccgactggttcctcctcatgtcgggccggaaatcgtcgtcccagtcatcccatccgccgccgccgccgccgccgcctccggcgggcaagggtggcttcctggtgggggcgggcgcgccagatccgggggtctccttcacgacgggcgggtcggtccacgggcggccctcggcgacggcgacgatgcggtcgcggtacgcggcggcggcgttggagttgtacttggcgacgtggggggtctccttgggcacgccccgcgcggcgaggaaggcgttgaggcggtcgttgccgccggcctccatcttgcggagctgcgcctcggtccacgagtccatggtgacggagcggacgaagctgatgtgcacgccgagcccccggtgcttgcccgagcactcgaggcacatgaacaccccgtacgagacgctcgcccactgcgggttccgctgcgcgcagtccacgcacgtcttgttccccgcctgcccctgcagctcccgtagccgcctcgccgccgtcgacgccatcgccgccggatcggatctcggatccgggaggagaggaggtgggtggtggtggtggtggtgatggtggccgcgggacgcaaggcgaggggaaagggggaaagagtcgccgacacgagacggggggattggtcaaatacgggctgcgtggacgcttttgccccccgtcactgcccccgggcggtggcgaggcagtcccggtaataacgctcgctcgagcaggggtaggtttgggagttcggtaagccgtggccgaaccggagaaggggtatcctctcccgtgtcgccgataccccgggcccagcgcgcaggtggtagaggaggctgctacacatggaacgtacgatatttagcaaaaaaatcggacgttgttcacccacatatctgactatatataaaaaaaactatagtagttaagcagctacgctgcaagcctataccctactctcatgcatgtatacatgtaatctctctctttattttctgtaccctttaaactttttcgttctaaattacttatccgattttaccattgtgttctttacaattaaatttttacaacaaaatcttacttggctatatttctgataaaatttataaatatgattatattactaactgaaacatttatatattaatagaaaaaatacacgtgcgttgcaatgggagaaggctattttaatcgtattattgttagattttttttatttaaaaggtatatgggatttttattttggagtatagatatctaattcagaatccttattaggatgatggttagttggttacatcctgtacatgctttattatggtctggtgagaattttgaaacaattaggagtccgactctcgtcccaagttagcatgcgagatttttaaaagaatttcttatacgactacttatgtatttccaaaaaacgaacaaacttaaaaactaactcaaataaggacgacgtatcaaagtatcagcggaaacatcttcaatttttataatagtagagatacgtgaaacaagaagttataattattaaaacattagaaaatattcactgcaacatcccaatcaacacgtgcaacatttataaatgaattaccgaaacatccaataataccacatgcaacattcacaaataaactagtgaaacgtcagaaaaatatttattgaaacatcgaaataatgccatgcaacattttatatgtgttttagaaaaatcaaccttttgttgcaccataaaattgttttatcacttgtacggataactcagcccactctaaaaaaatatttctgagagatgtaacttataaaaattactaaatgcaacaataaccaccgtcacatgaaacattaggtcccaactaatgaaacataaaaaaaagattcaatatatttgcaaatattgatttgttaaaattttatatcattcttgaaacgttaacctgcaatttttgaagcataaaaaaatatttgctgaaacatataaatagatcatgtgcaacaataactatataaaaattattggctacaataataaccaccattacatgaaacattaggtcctacatttgaaaacataaaaatatatataatgcaacatatttgcaaatactttattttgttaaaattttatatcactcttgaagcgtcaagttgtattttttgaaacacaaaatatatttattaaagcatataaaaagaccacatgcaacattacatctgaattagtgaaacatgagtaaatacttattgaaacattggaataacattatgtgataaaaatcatcggaatattgtcatgtgagatcttgttataaagagttaattgtaacaaatccaatagtataattagttcataattccgataaatagtttaagagaaaagatcatttaaattttaaatccatgtgacttgcatgtacttgtcatttaaattggatgcatacacttgtcatgcacctgcactactactactccattggttgcatgcatttttcctccttcctcggaagtatgatgataagcattttcgggagagttccagagtttgctggtggtggtgggggaaaacgtacgaaacaatcggggatgaatgaatgggtgattgattcggttggcgcgtcgtagcgagcgagcgcgagaggcgcgggtggccaccggacgcggcgttgtttcggggcgacgcacaggtgggtgggtggatggcctccgagcaccgcgcggcccgcaaaacactcccatccaacgggggcggacgctcctcttcctcatcttctctcgcacatcacaaagaggctgagacgtctcaccatttacgagttcctttttttcgtgaaccaaatcacacctcgcctgcagtgtctcgtgtcccagaacgcgattgcgttttttttttgcacgtttggtttccatatccctcgtctcttgtactcccttacccacatttggcctagccggaggcggtagccagggcccagggctgcttcttatggccgcgcaggagatggaggttatgatggttgcgatggcggcggaggcgccggtggctgtggaggtggaggcggttccggcggtggcgggggggctaaacgcgacggtgcccgcgttgtacgtgggcgatctccacgaaagcgtgcgggaggagcacctgctcgaggtgttcggcaagattggcaccctcacgtccgtgcgcgtctgccgcgacaatgccacgagcaactccctcagatatggatacgtgaattacctctcccaggctgacggtatacaaaaaacctgtgcatgatctgtgtcttattaatttatctcatgtgctattagcattattttgatcgggttaagtgcataattgagttttgcatagaggtggtctcagtactcgtgcaaatcaaaacacttggtatatttacaaatctgcatgacattttgtatgaacaatgtgtcactgaacaagttaaataacccagatcatcgcacttattttattgacagtgtgggggttgatgcatgcatgctatcatattaaccgttatactattatccatagaagtagttggatgtattttaggatgtatagcttgtgttccgctagctgctgccacatgatagaattcttagttttaagaatgtgtgcgggcatcgcttgttcctttctttcaactaaaaaggtgcgaaaatctgatcatatgcccttcgcctagattaaaagtatttacccttttggcccacatgcaagccaatctcccaaaacaatgtgttgttcactaattatgttaaacaaagaagttacagaggaattgaagttgatgtggtcatgtcaaataaggtttagtacaatgtatcctgtatcaacatgatgaggtcgattatattgtttaacatatatcttcttgttacatttgtcactttgatttttaagagttgtatttgtaatgagatgtataatgatttatcttattcttgaaaaataactctttatttttttaatctacttttattagtttgtatgcaagtcattaaattgaccatcgctatcttgttgtgactttttattttgtaacatttgcttatattttgtattattgatttattttgtattgaaatcctagaagcaacttatccaaccatgtgtgcctttcaattcatgccatgttttatactaatgatttagcacttactttaatgttcttgttatctaaccaacttttcttgctaatggatattgataaaattctcattactttttaaacatttgatagctgcaattgctttggagaaactaaatcatagtcttattttggataagccgatcagagtaatgtggtctaaccgagatccagatgctaggagaagtggggttggaaatgtgtttgttaaggtaaaaaaacaaattcctcactatatactttcttggtgtatattgccatatttaactgctactttactatggcattttgcagaatcttaatgatttagttgacaatgtaagtctacaagaattattttgcaagtttggagatatattatcttgtaaagtcgctaaaaatgaggatgggacaagtagaggctatggatttgttcaatttgcgttgcaagaatcagcagatgcatcaattcaaaatcttaacaactctcatttttgtggcaggcaattgtatgtttacttctttattattactcgtctttgttatttgtttattctttgtccggtcatagtttggtttacaattatgatcatatttatgcaggcatgttgctacatttattaagaagagtgaacgatctacaaacaatgatgacaaatatactaacctatacatgaagaaccttgatgatgatataacagaggaacttattaagttaaagttctctcagtatggtttagtaattagtgtaaagataatgaaaagagatgatgggacatctaagggctttgggtttgtaagttttcaaaacccagaaagtgccaaaagagcaaaagaatccatgaacgggatgctacttggtaatagtccacttatgatattaaaataattaaatagtgaaaattcattaagtagtgaaaccttattattctattcaatttgatatacaattgtttgtgaattgttttattaggatcaaaaaccttgtatgtagcaagagctcaaaagaaagctgaaaggaaacaatatttgcaacgcttacacgaggagaagagaaatgaaataatcaccaagagcaatgtaagttccatttgccctctacaatctgtttttttcatctaaaaatgcatctctctttttttaggggtcgaatgtctatataaaaaatattaatgatgaagttggcgacgatgctctccgtgaa

SEQ ID NO: 19899 - DNA, 3687 bp, Oryza sativa
tcggtctacttcatgtcttcatcatgttggtttttagtgtttttgcaacagtgctctatttcaattagtttcaaacttccatagtttttttttcaacaacattagtctctactattgtaagcaaaagcttttatgcttaattgtaagtttagtattattagattatcatactcactagatgttgttatgtgacatgtcactatgaactaagttgttcattggactttgtagcattttgttacgaagagtttaacatgctatccttttgaatttacgcagcgatttagccatgctaagtatattccaaatgacatcatggccaatggattggctattcatcatggtgactctatttcatcgatgaatgacgcttttaacaacctgctagctactgctccacccgaggaacagaagaacatgcttgggaatagactatatccgttggttgagagacatcatgtaaaatattttgcgcatatgttacattgacataccttttcacttatatttggaatattaaagggacatacttttatattaatatgacacgccttgttttttgcagcctgaccttgccagtaaaatcactggaatgttacttgagctaggtaattctgaagtggtcatgctactttactcatcaaacatgttgtctgccaaaatagaggagtgtgtcaaactgctccaagaggtaaaacccaaacctgaagatcaagaggccctgcaccctggtttcctcctagactctgctggtgtaaacgccaactaagaattcaatgccaatccaagcttttgaccgtgctaaatatattatgtatttgtgttttagagatgctaattagatagatgctctttatttcatagtttatggaactatattattgggcttgttatagaacttactaataatgcctaggatttaggtagaaatctcgggagtttttcttaaacggagcttgttacgaatcttagataataaattatatatgatggtgttcttgtgttatatatattttatttggtttagtgggttggttcttaatttttatggatgattcgaaagtgtttggaagttatgctgcctataactatcttaatcaggttgatcgaaaagttagagaccaaatactcattgtatttatttatttccttttcttttcttatcaagacattgtacagcttaggtaaaatacaatagaaatagtgttttacttggttacatgttggtagccgattggcttacgtagagatagtggtgaatgtgtttgacgaattgaagtgtattgtatactacatgtgtcttccacagacaattgagtctttgcacaaatgcaccatgtaatgcatggatgttgcaagcttgcattatatgatagctcattgtggatggcttgttttggcccaattataaagttgcacggttactttatcccttccaaaaactatggtgtatactatattttggttggtaaaaacataatgaacataaaaaactattaaaaacagaggtggttttcttttgatgatgaaatgaaatgctttccaagaaagaaatacatgttaactgtagcattcagttgacaatattccattcatgttctatagtttgtttcatttctaactccattgagttacttgctattagcttctcgagcgtcgccatccatcggaaactgattggacttgctttttttttgtctcaaacttgtggaagccagaaagaatttgcattgttgttggtagtacatcaaagttggttggataactctttttttaaaaacttaatggtttttagttgattccctattaaagttaacattttttggaaagaattccaatgtctttagaactcatattctaatctcagaataagacatgatttgtgttgtattgagttttgtaatgcaaacaatgatgtcggagggtgaactcctcaagcgggggattatgagaccccccccctttagtttggttgggggcagcgggtgagaatcgaggatacggtggaagatgtgatgtagaaggggtcgggccctgttacgccctgaaattcatgaaccagaatttctaagctgaatgtgcattaaacccctatccaggaccagccagggtacacaaacgacaattgttgacatacagatccacgtcttacaaaaatacaaaagattataaatgcagcggaaaaggataaaagcgagctaagcctgaagacttgacacctgcagcgaggcgactccattccaaagacatccttgacggcagcgacgaaaccaacttcatcgagacatctccaactgagaagaacttcaactctagggtgggggaaaagagagcaagactgagtactacccactgtactcagcaagtcataccggaagaggaggtatgatgcaggaaatatccaagggaggctaaaggtccttttgcataaagctagcatttaaaagcaacagctgaaagcagtaaaacagctgtagtaattaatcaatattaaccatcactgtcaacgctacaccatgttgagtcaggcccaaaccaccacctgaactaaccagttcattagctaactagggtgagactaatcacggtgaatctggtcgactgcccataaccgtgggcacggctattcgaatagttttactctgattagaggtgtacaactgtacccacaagacacagccccacgacacgttaccatgtgccgacatgccaccacgacataccggaaagaggccgtgacaggacccttcgcataaccccctctaaccgatcgcaccacaccttagggttcggccccgtccccaacaggcaacgggcagcccccctttcgtgccgcggtgaatccggaagccgatcaactggacaccccggccgacccaactccatcacgcccaccctcgcctgggtacgtcggctagaggaaagctacactacaagcccagccgttgcccacgctggcttgtggtaagtacgataaattcttctagggcctctcgcgaaccggtccttaatcgccatgggcacgactagcaaaaccatgcacccacagcccaccatgtagtgtattttaattaactaacacccttgcggtagcactaatccaaagctattgccaataatcaaagtctatgcattaatgtgattcccccattgtgtactagttgaactaagtatggctaagcattccgtaaaccaacatctaagcatcttaatacccaagttatcaatggcataaggtaaacaagatatggctgagtagtaggacccatcccacatgatattgtaaaacaatgcaatatttaatagaaatgcgggacatttgtaaattgggtacaatttgatcaatcgtaatgcatgacttgccttgctctcgcactaatgagaccacagcaacgtcttcgagaaaccgcagatcgacgaaacgaccgaaatctatgcgacaaacaaagcacacaagcaaacaggctataagactactgaaacaggaaaaaaaaaaccatttttaatggattctacgcatttttatgaatttactgagacttgaatggacttaatcggagctcggatgaattagatatgaattttagaagattatctatgtttattactataaaagaaaagccttaatgagttttattacgcaataaaggatcccggatgacgtcagcaaaagggggggggggtggc

SEQ ID NO: 19900 - DNA, 1131 bp, Oryza sativa
cggtggcggctataggggcggcggtgcacggccggaggcggcggcaagcggcggcgctagcggcgaacggcgcggcggcgttagagagcacgggaggagacggctagcgcggaaaaagagagagagagagagagagacatggggagcgttttataggggctcgggaggggcggacgtggccgggggcggccggatttctcgccgacgacgtgtgaggtggagagagagagttggggggattcgaattgaatctcgccctttcgggcgcgcgcgtgggcgggagaaggcggggcgtgggggcggcgatgtgggggacgtgtgggcgcggagtggggcgcggatgtggaggaagcggcggcgtgggcggcggtttcggcggcggcgctgccgtcggctagaggtggaagaaggggccgacaggtgggccccacctgtcggtgacccgtagagaggagggagggagtgggccggcccagcaaggaggaagggcgtgggaggaagtgggccgacggcccaacaagaggaaaaagggaggaaaaaggaagaaacagaagagaaaaggaaaaaaaaggattttccagggattatttattgcactttgcttattttaattggttaaaattatttccaaggctctgaaaattccactgaaaatcctgttagcatattttgacatgtagaacccaagaaaaattccacatgccaattcctattattatttgcatttattaatttagggattcaactctaggttaaattaaacaatttcttcggacgatttatttaacaaattttaaagcaaggaggggaacttcagggcgtgacaggccccttaggaacaatgagacaaaaggggtttatacaggttcgggccgctaagaagcataacaccctactcatgttcttggttgattgagtatggaatacaggcacttgaatctgtgagacccaagcgtgagctagccaaataaccgatccctcccctttctccctaagcaaggtcctccttttatatctcaaggggctaccacatgggcctaaaagtctacctagggatcaaggaggacattctttacattaactacatgtcttgtttcttgacttggaatccacatgcacaagcgcggtagc

SEQ ID NO: 19901 - DNA, 536 bp, Oryza sativa
  unsure (1)..(536): unsure at all n locations
tcatgaagtgttaatccgtctgaagtataaatgctacggtacctgaaaccacaaatatcctccatttatgaacaaaacaccaagatccctttttgagtaaaaaatatttcaaacgcctctatatataatgatgatgcttacggttgccgtcttctccccattccaacatgcttttcaaattgtgaaggagtatactgcacctcaaaagaggaaaaaaaaaacgtgnnnnnnnnnnnnnnnnnnnnaagaaaggcctcagatcaaacttgggcaattgctaagtttgggacagatacctcaatactgcaacattcacagattatacctgtcccaagtttatatccttgctttagaacctacaagacagggaagtgtgaatgttcctgagagttgttacaatttctggtgttgggaaaggataatgtagttcatttaactatttagaggacctctccgttcttcaacttgtaagttaacaaagtatagtctggaaggcccccctccttgaagagcatcgggtgcaaagtgttatctct

SEQ ID NO: 19902 - DNA, 24382 bp, Oryza sativa
ctctttatacgtcaacacttgcaaacattttcatcttgatgttgaaggtgatttgcatcttttaatcatcccaacctctccttcagggttctactggcattcagttattatcattattttctggttacatgaaagacgacgtgtcatcagctgttgagactcagcttgcagaatcttgtcgcctcgagagtggtacacattttagatgatgcaaacacccctgagaaatcaagaagcattgcaggcagctgattgcgatgcaaaggttaaacaattggccggccataagccctccctaagagcaaggctagcaaagctttttgacggcggtaacatatgtccatgtcatctagagttgatgattgtagattgcttatacaaaggacaaactataagttggctttatataagcgtgaattggacttaattattatatgcacagatgaacaaaaccaagctctatatctatggtccaccgtgcttgagctgttgagcataaaactaacactgaaccggaggcccacaaaccatataaaatgtttaatatggcctaaattatcgtgctaccacccggcgcttcagcaagcactcgctctcttcgttttcatgttttctccctcctccacgtaatacaacgatgatgtggatgttgttatcaccgactgaagaagtgctattatacctgctctaacggtgtttggttcatcggtcatttttgtctatttacttaatcattatcttgagcttgaactgatcctgacatgttaaacaaaaccaatgagggatcgagcaatggtcaaccagattcagagttccagaccagcatcgtcctacctgacactcgttgccacgtggcagggagagggagagacaagagcctaatccaaaaaacatctctttttttcctctctcactgctgcaacgatcctgccacagccggtgcagcaagacgccagcaactgatcagtaaaatactaacagacagtaacgcagtttgcagtagtgcaaatctctctcagaaaaaaaaatactgatgtgattatcattattagaggttgtagtagtaataaagtgctagtactaatcagctactaatcatatctgcatgtaaaaagaagtcaaggcgaaacggccatgagaggccggagctgaacttatttaatttttgtgagaagtggcaggccctcctattaattgtggccaatcgatccgcccagttttcccgtgtgctcctctgaaatttctcggcatgcttgtgatctcttcccatctcatgtgtttgatttggcaaagcttggaggttataattagcagcagcctgagttaaaacggcagcatctgagaggagaggagagggaggccaagcaaacgacgcaattaagcgctctgcttacgccacacacgtagcagcagaggagtatttagcagccattgctatgccttctctgccgtagcgtcgacattgctcttgcgatctagtgcctgcctgtgcctgcatcctcccattgtaagaacttttgccggtttatgttctactttgtttgggccatctgcattgcaagagaattcagtagaaagacacgagcttggttgttcttgttcgtgtcaaacctgtgagcttgatagctgcttctgtttctttctgtgatttctggatcttgtggtgtattctgggattttaaagatgggcaggtcttagtttattggattgattgtgatgaattgtgtgtctctgaaaaataatacaaattcatccagaagagcttgactctgttctggttcttcttttaacttttgagcaatgggtcttctctgtttcttgtctactctaaactactattgattctttttcctcttaactgcaactgaacgttgtgaacttgtgatctttactgtaattctctaggtgttgaaacctgcaggcttctggtgctgagagcataatcatagataatgtggaactgctctgcaccatcgtctctgctcataccgttcactgacgatacggtaatttcccaactgccatgacattttattttcttctctgtcgaatttatttaacaggtttcttcagttgcagtgaaatgcgaagcgtctaattcaccttccacaactgtaggctttgacagaatgtaagtgttggattcggtagtgagggccttcaaatgatctttcaattcaatatctttttttagataatggaaatggtatacgatctttcaattcgcatgaaaccactgaaaatttcttcgtctctttggtcaggatcgccgcggactatgacctgttccatcacatgagcttctcgccgtcgcttcagaatcttcagtcaccaacgtttttcaccacgagaagttcagagagctacttgggtaactccactctttcgaaatgctttctgcgtggatggtgagattgttttactttgatactatttttctgatgaactgataacaacaggagagagctcgatctatggcggaggcgccaggcctgcactcgcgcagttcagctattcccagccaattgctgctacttctgctgctgtatgtaataatcctcttcgcctacctgaaaccttgtgataatatcatcaagccagtgaagtttgtgttattaatttttacgtggtttgggaaatgcttgtttatgtcgtcagcatttggtgagatggacggcggccggggagccgatgaccggcgacggcggtttcaggagctccaagaggctcaagacagcaactacggcgacgacacaacctccaaggcatggggtgaagtgccatgcaaagccaagaaatcaaactacgaaggtagtatcatttttgagtatctgatagtgaaacaattacagttcttgtaatcatcacttcatcagtgttgtcagtgtaggggctttctctcgttcatattggctatcttttccctctcactgccatcgtaaatgcaggcaacatgtaagaagaggagccagaaactgggcgacagaatcacagctctgcagcagttagtttcaccttacggcaaggttaattaatcaacgacctagctagtgttttctatccatgttaatcatcagtgattttgctgatctgagagcgttaattttctgaacctgatcgtccgagcagacagacaccgcatcggtgctccacgaagcagccgcctgcatacggcaactccaccaacaaatccaggtaatcgcgcgtcagacatcgtagccaggcacgacgagtccatgaccaaggtttacaaaaccttacgagtttttaaaatcacgataaacctcatggtaatagtacaattttcacgataatcacgtggttaccataataaccgttttaccgtaaaatgatgataaccccacccaaaataatttggtgaaccctggcatctgcaacccaatggactaagtcgttttcgcgtgtttcacatgataaaaaaagcctgcagaatctcagtgtttttcacttcctcttcagattctgacagcgccttaccctggaacaagctcctcctctgcatcgtcgcagcagcaggtcgtattttctgttcttgaaagttgcagccatgtcatgtccttctttactgcaattgcaacagttttgtggctgcaggatgccggaggaggaggaggcacggcgacggagcttcgccggcgaggcctgtgcgtggcggcgctgtcgccggccgtcgtgagcctcgcggcagagggcggtcgccgccgcacggacgtcgaggatcagaagaggatctggttcagtaatcagtagctgcaactgtaaattaaacgagacgtggcagctcgtttgaacttactctaatcggagttacgggaatactactagtttggatgtttgattagcagtcacgcgtccacgaagttacggggctgtttggttcccagccacactttaccattacttgccaataaaagttgccacaccttgcctaaggtgaggtgatcaaattgttagccacaacttactaagcctaagggaatcttgccacacttttttgagccattgacacgtgggacccaatttgttggaggggaatcttgccacaactgtggctacaaccaaacacctgtcaaatttgcctaaccttaggcgtggcaaactgtggcaaagtgtggcttgcaacgaatgcattaggcgtcctttgagtcaataagaagcaagcattacggctgtaaaataccaaaattgggcatgtgtaaaggtagcagctagcaacacaatgacttctccaacattgagcaaccttttcatgttcatgatattcgcatgtatttctggaaactttgccgtaagcccgtaaccaactctttggccgagttaatatcttgctaccatatgtgttgtaaaagtaattcttgtttgtcagcgtttcaagatgtttacaaattgctacatcgatctagcttcaaatagactatagcctatgtttatttgggataggttacatgctcaaacaacctctattgcacttgtgttcacgtggcagcttaacttttactcaattggaaagtgttaacaaccctcttctccaatcagaaattgcaatagtatcccattcaactataaagtgtttggagaggttgaagaagaggaaactaggagatacacaaggtttgagaaagattctagatacaaactagaactagaactgagatatgaccttgaaagaagtagggaggatgaggaagtcggtgttgtctattgatgcctgagcacgagcattgcagaagtgtgtgcttttgttacccgtctcttgggcctagttgggcctaacgcagaccagattgtagcccaacaacatgtggcaaagagattctggtgccaaccgatacatggcccgtggtaccaaatctaaagcccgtcgctaccagatcagatatcccataggtaccagtgataccctgtcagtaccaaagtttgatacccatttgtaccagtcgatacccatcggtactaggttagtacttgttggtaccatgaggaagaagagaaagctgcacgcaccaagagcacacgtgttgtcctcttccttttctcctctctctcacccccacatcacaagacccccgactaaggatcagcaaggtattgttgactacagagaaaagaataatgagcttgagaggaagaagaagcttgatggaggatgttgaatcagaacgtgaaacgacagcctcgaaggaagacactacatgagataatgaaagccccaatatcttcctctgcaatggtaaaaaacaaaaaactaatagctcgatccttcctccccccccaacctctcctatcttttatgtttttctcctttcttcctatcttcctccttctatggtcctagaccgagccctgactcctctctcctctgcaccacatggccgggagaatttgtggcatcattgtcgccaccatcaacttgacccacactgtcgcgacaaaaattggatcgcttccatgccgcaacagccaccgcaaatcgttgcggtagccacatgccccgtcgagctcatctcctagcacgagggagggagtcacaaataagatctcatcccatccgaccctcgaacgggatactgtaatatggcattcccaatatgaatacaaccacaatttcgcttggtccatcttatttttcttatctaggttggggcttaggagtagttggatggtgtccaacaaacatggtcttttggaatatttgttagatattgatcatttaggtattactagtaacatatccttgcactataatgggtctggtcatataaaatagggatggattgtaataagattaaggataaaacattggatctggtgaatacctatgtatgctaaccgtgcgagcacagtgggagaagggggtggaaagaggacaactccaattttaaagcagtagagattagttagaatattttattctacatccatcactgcttgtgccacatgacagtatccagtgattatgttgatagatcttgaatatcaaagtagcatgctagctagacattttctcgaaccgaagattgatctaacttcatttaactttttgtcacctttaagatgtggcaattaagtatttgcctcaaagtctttgacatgtgggtcctcatgtgcctataacatgtggacccagtgataaatccttaattatcacttataagagtggcaaatagttaattattcccccaaacatacacataggtctgcacataccgttgttactttggaagtatggccgtgtctagttgtttggcctaaattttttttacgtatacgaacacacatttgaaatattaaacgtagattaataacaaaacaaataatagatttcacatgtaaactgcgagacgaatctattaagcctaattaatccgtcattagcaaatgtttattgtagcactacattgtcaaatcattgcgtaattacgctcaaaagattcgtctcgcaattttacatgtaagctgtgcaattggtttttttttctcgtccacatttaatgttctatgtatatgtctaaatatttgatgtgatggaatttttagaagtttgaagggaactaaatacagcatatatgttttttttttctcccgaaaaagaaaaaacaacaacatagaattgactgcgcacgagtccacggcccaagacctacccgctcccggccctctgaccgtcagtccgtcaccaacccatgggccccacctgcttgccgcctccaggcctcgcaccctaaaaaaaataaaaataaaataaaataaggactaaaaacccggcccgctcccacgctgtgtcacacccacctgccacctcgccgcgacgaccccctcgccgccggccgccaccgcgcgtcaactgccggcgatgccgcccccttccctcctgctcctccatccacgcacgccgctgccgcaccaccaccgctcctccttccggacgagctctccgcggccatccaggatggtctgcgccgctgccgaggggtttatctccgcggcgccgatcctcctccccgacggcccgtggaagcaggtgggtaactggtttccggtgaagccgcgggggcgttgggctgtgggtttttttttttcagtatgctgaatctggtggctggttgctgatcgggtgcgggttcaggtggaaggcggcgtcacggcggcgaaggggttcaaggcggcgggtatctacggcggtctgcgcgccaagggcgagaagcccgaccttgcgctggtcgcctgcgacgtcgacgccactgtcgcgggtaaaggctatcaccaacactttctattcagttcactcgtagtagcagaagtttcttcagagttcagacttcagtttcacttctcgttaccatttctcagcaactgctaacggctgcagaatgtgtatcaatgcgtgctcgttaggatgaacggctgtgaatattttgctgttctgagttctgagttgcgttggtgtatcggcttgtgcagtgccatatgaaatctgtcggttgggcttagttattgtcctgttgggttcttttcaggagcttttactacgaatgttgttgctgctgcaccagttttgtactgtaagcgtgtccttaattcatcaaaaacagtaagttaattctacctctcatctcaccttttgacaaataaatggaagtaataattcattgaggtattctatgttttcaatgtattgttttctaggctcgagctgtgttaattaatgctggacaagcaaatgcagcaacagtaagtgtttctgacaaccgtatccgttccgctggctctgtactgtattcgaaaacaccgtggctagtattgatatacttatctaaataatttatctcagggtgatgcaggatatcaggatacagtggatagtgctgatgctgttgccaaggtacttacttgccgattggatgcctataagttggccaggcatcaatgatgttttctctaattggctatcggtttttgcagcttcttaatgtgagcacaaatgacatactgatccagtccactggtgttattggtcagagaataaagaaggtacagtgctgccacaaccaaactatggttgagtgactgtactaaactagtaggctaacctagtacaatttcatctgacgcttgggttttgacaatgcaggaggcacttgtaaattcacttcatagacttgtgggctcactgtcttcatccattgaggggtatagttagcacgcattgcatgtaaaatgcatctgcaagtgtcatttctatatgactatatctaacttattacctctgcccctgtcacagtgcaaattctgcagctgtggccattacaactacagaccttgttagcaagagcatcgctgtacagacagaggtttgactttcttagcctcgtattattctcattaggtttatttggtttgacattatctttgttcttatcatctctttattgaaaagttagattggaggagtgcctatcaaaataggaggaatggccaaaggttctgggatgattcatccaaatatggcaacaatgcttggtgtaagttctgtatcaatctcattttccacacagtcctactcctctattgatccctttctcaaggcatgtatgagcttcattataaccctttttcttacaggttttaacaactgacgctcaagtcagcagtgatgtttggagagaaatggtccgaacatcagtgagtagaagcttcaatcaaataacagtaagtactgagaaaccattcctcttgagttgattagcatgtcaacagttactcaacctacaaaagaacttatcaatcttaattactcacatcacatgggtaaatatgggcaaattaaactgtaataacaaacaagagaactgtctgcaaaatgctcctaaatttagcaagcattgaggtttagttttctttgtgttatggaaatctaacgggcataatgcatcctctgtctactaatttggtatggttgttatggcaatttgatcctgaaactagtaggcaaacatcttgattgtttacgtcataattctttaggtggatggtgatacgagtaccaatgactgtgttattgctctggctagtgggttatctggtttatccagtatccttactcatgatagcactgaagctcaacagttccaagcatgcttagatgctgtaagttttacttcccccaagcttttccttttcatgtgactccaggctccatgttcttgtctccatatttattttgaaatgcacttttctgtagacttatcagattactccagtctgaaatttcttttcttagcttcccataggatggaccgatatgaatcttattttcttcttggttgcagagtttttgatgtatttttatttacagcaaactgtacctataaaggaaaaagatgctgacctatttatctcctgtaggtaatgcaaggtcttgcaaaatccatagcatgggatggtgagggtgcaacatgtctaattgaggttaagcgcttagcatttcattcacttcgcaccatcagcatagtatgctgcattttcttttagcatgatgacttgacgtttgatatacaaattgagttatctggcaactgctgcattcaattattcatcatatcaaatttcctttcttaatttcttcggtgtgacacaagcttctaaagtgcccattccctttgtaggttactgtagctggtgccaataatgaggctgaagcagctaaaattgctcgttcagtggcatcttcctccctggttaaagtatgatactgtttagcagcaaaattttgctaattaggagaggattgacacccctctgtcattcgttagcccagaaagcctgagttgttaaattattttttatcaggccgctgtatttggaagagacccaaactggggacgtattgcttgttctgtcggttattcaggcattcagtttgatgcggaccagcttgatatttcccttggagctattccactaatgaaaaatggtcaaccactcccatttgacaggttaagaaaccttgacaacatagaattattttttttattgacgactttgaatgaattgtaatttgtgtagatcttacaatagaatttaaaatatctactgtttcttcatagatctgcggccagcaagtatctgaaagatgctggagacatccatggtacagtgaacattgatgtatcagttggtaagcattcaacttgttgcataactcgacttcttgttgcgtggctgaatctgtagtatgttcttgtgtcacaatgttagtcatggacttctggttgcatcatttctctagaaagcacaaatgtgcctcttgcatccaacatatatttgcactgaaccggagtagttttattggcttgatgcatttgctttggggtatcctttcttattccttgatttcctatttggcatggcacctttagttgaagaaaacttgaacagttgcgcacaaaagtaaatttgtttttaggaaagctaagattacgtcttgcccagccgtgttttttacctgaacaaccagatgcttcattatcattgtcttgtacgaaattgtttgagactggcatatgacgcatgttcgttgtgtttatctgccagggaggggaggaggaagtggaaaggcctggggctgtgatttaagttataagtatgtcgagataaatgcggaatacacgacgtgaaagtcttacactgtctatgaagaacggtctccgcttgatggaaatggaacgctgttcggatgcagctaggcatctgagcgatctgtatcatattgagactcgccctttgttgtatcaatcggctgaacgtgcattcttttgtaagtgtaaggaatgcgctatacaatgttacggcacaataagtaagctgtctgccatgccatctgattcaattctaatttataacagtgacaggggatgtttgggcgcacgccgaataaagtttgtatttttgtgtgcaatcatgtatgtatatcgtttctttgggggagaagaatcagttaagctccaaattcggcttgctccatggcacgggtttttggcccggccaagcacggcatggcccgactgatgttggccccgtgcttgggcctttgtctcggcacaataggtcggcttggtccaacgatctggaggcaaaatagatgagggagctaaaatagacttattccaaccttttaaaggcacagtctaaagagatgagagacgcaaaatagacttattctagtcatataagaaacggcccaaagagatgagagaggcaaaatagactttttctaaggaggagcacgatgggctttcgtgccttcgggtcggcccagcacagcccgagtcttattgggccgtgcctggaccgttggtgcaacacgtgggcgagtacggcctagcccgcgtgtaggtcgagccttgctaggcctactaacctcgagccagggcctggtcttgcctgggccgagcaacccctttggccatctataatggaattttttttatttatacttttttttattaaaatatttacaaaaataatttgttgttttgaaaatttacaaatctaatcgcctgccgccctttgggagggcgatttttaaaaatcgcccttccacagggcggcaagggacctaaatgtaaattttccagtataacttgttagctctatgattttacaatttaaaattatattatataaagtcagatgaaataaaactttatatcaaaagtgtagagctcaaggagatctacaattttgtagttaataactttttcatttaagatgtccaaatattcgttacaaaatataaaacacatttaaaaaaatctcagatctacatttcaaacgatattggatggagataaactttatataaaagttgtagatcttgatgagatctataactttgtagtttatcacttttccatttaaaatcatttggagtatcgaataagcattattagtttttaagcaattaaaaccggtgggaagggtttgaacacaaataaaaattttatatttagatcccttgccgcccttggagagggcgatttttaaaaatcgcccttctagagggcggcaggcaattagatttgtaaattttcgaaacaaaaaattatttttgtaaatatttttataaaaaaatgtataaataaaaaaaattctctataatggcaggcaagaaacattgtgcactctctcgtgcactgcatcatgtacctagacccaatatcaagttaggttggaaacattgatgatgctcttagtgaatagatcaaacgagatagtgtgtgtttaaatcatgatgcagaggagaattatatgctagctaagaacattcatgtgagggaaatttatggttcaagtatttggatatcagatagcatgattagctagggcttgaatattggtggggtttccaagcaaagtggaactttgaggttcttctatatgggccctttctcgaccatatgggccgggatctataatagcaacccatgtatgaagatggcttagggtttggtccatgccaaaaaatgtatagagtacaatttttttacatggacctaaccatgagccatctccatacactggccgctatcatagatcctggcccatactactaatagactcattattgcgactgtcatagactcttgtatcggttcaacggagttcttgtggaattcgtgttatgagatcatgttgacaatgtgtgattcatttccttgggcttgtatatgtgtctatggaggctgatactccttttggaaccttttggtagatgcaactattttcataacctctagcttcccaagacaattcaaattctcattatagattatgaaagtttccttgtgagtggaagtgagcttgatcaaagtttggatggagtttgataaagccgccctaaaggcctaatgggcggaatagtttggatagttgtgttgtccgcctggttactaaacttgtctgagcaatcgaggatcaacatgctagacaatctgtcttgtacatattggcgtacgagacagtatgtttgtcaaagtcagagttgtataggctggacagttcccttgtgcaaattggcgtacatgacaatatatttgtctaggctgatgttgtacaaatcggattgtctaggccaaccagattgtttgggtgaagttgatcatcgacaggctagatagcacgcttcaatggaccgtattgtctgaattgagataggataatccaccagttgaaaggtcctcggactatccacctcttaatggcccgatagttagtttctcatcgaccgttgctacggtgtaaagggccgagctatcaaggctgaggcgatgactagtttgagtgattgggctataaataccaaatgctataaacttgcttcaagatttttgaagtaatgactagtttgagtgacatgagcaactaaggccctgtttctttcagcttaggattattataatccaacttattgagtcagattattataagctggattattataagctagaggaaaataagctgtgagcttgacggagcgtggggctcctcaccgggagaccgcgcgggcccccctttgccggttcggccgggggcgctaggtgaggttctaagcactcgatctgtggaatgtttcgcgagagagcaaatgcgcaagacacgggcgatgtagacaggttcgggccgctgagaagcgtaataccctactcctgtgttctggtggatctgtgtatgaaggagttacaaagagctggagagcaagagagttcaaactctagaaaccctcttcctctttctctcctctacgagctcaggtcttctcccccctctttcccgagctccccccttcttaagtgggcaaggtcttccttttatatctcaaggggatcccacatgcaccacttctacctactcttcttttgggtggggactcaccctatcttcccaaaaaagaaaaactggcttgcgccttcgcctggaagctaaatcacaacttgtctttgagtgaggcccagcgtcatcactcgcctgacaccggggatctccctgttactccctcattaatgggcggagatttgccatggctgttgtccgaatgaccctctgatgggatgggccatacctaccttcactccgccggaagcaggcgcaacgtgggagcacggttgtctgccgatgacgtgaccggcgtcagaccagtcacaaaccggtcattcttgtctaccacgcgtcagtttagcatgccacacgtcagcccttcttcataaaatgacttccttgtaatggttgcgatgaagcctggtatgaatctagccgggactgacgtgctaactccaggagtcagcacgccggctccggctagggacgagtgcctagaggctctcatcattccgacgggacggggcgaggcgtgcgaaaggccgcctgttgccacctaacccgcgatctgaccggtctgtgaccggtcacacactgtgacctgtcacggaccgaacgagtgtgctgcgctgcattaaatgcggcgtggggcgctcgtccaacccgcaataaacgcggttaggtgagcgccgctgtgctcacctaacccacacacgtggcgccaaacccacagggggtcggggcgccccagccctcggggccgaaacgggagcggcccgacccctcggggagacagagggaggggcggccacatcaccctcgggcccgacccccccgagggggtcaggccacgtgggtgactgcagctgccccaaacctctagtcaagatacccccggtcccatgtcaccgacagagctgtttctttctctagattattggaaacctggattattgagtttgcatggctaaagtctagaatgccctcaactatttttggatgcctttgtcatcattcggtgactttatacaacagatataaatttgatgtagataaataaaaaattgacaaatatttataattatacattcatgaatatttcttccacatatataatagacttaaaaccaaattattatctcttagcaaataaagcatcagcaatactatcacggaaggcatttgcgtccccatcttcgtctcccatgtgactggcattcccttgagatgaaggcatcggcatgtagttttcatcattatcacacagatcaaactcttcatcactcaatttgctatctcgaataaaattatgcagcgccatgcaagcatgtattatttttgtttgcttgagcatcggataacttggtaagtccaatagaattctccatttcatttttaaaacaccaaaagagcgctcaatcacattacgaagcgatgaatgcaagtggttgaacacctccttcttgccactaggacgtggaccctctcgaaattccggtaaatggtatttggtccctttatatggagatagatatcctagttgatttggatagcctgagtcaacaaggtaaaatttccctgttagcataaacataaaccatgagacattattttataattgatgctagttcgacgagactgttaaacggataagagaagttaccaggtggtggatgagggaagatagcggcatatttgcgcaaagcatcattgaacaccctcatatcatgtgccgatccaggccaccccgcaacaatgaatgtaaacctcatgtcaaagtcacaaatggccaagacattttgcgtcggatatttatttctacccacatgttgaaccacctttgatgcgggcacaactactggtatatgtgtcccatctattgcacctatgcaattgttgaaatggggctcaaaccgatcaccaagtagtcttgggtgaatagttgtgaagtttgggtctctaggtttgacaagatcttttgaaaggagatagatactctgcaacacttcattgaattttctactgattgttccttttgacctctcaaatcagttcttaacttgaacaaatgattgtggagccccaatggtccacaaaaacattcctaaagcttcaactgaatccatcttactagttgacttcagaccataagataagaccaacaaattatgtaacctctcaaagagtggcctactcattctaaacatgtcataacaatcttgtggaacttcaaggtttctcataacccaagcatgacccgctaaattagcttttttatacttggacttgttcaaataattttcagcatagaacataccaaatgatgtcaacaccggtccaaattttctcatcatatctagttgtctgctagcaacaataatagtttcatcctcctcctcatcgacatcatcacttccatacatgcccatctacaaacaatgcaacaaatgatatcacctcaatagtcacagaaagaccatgttgatggatcactaaacagtagttcatccaatcaaaattaaggcgccatattacatggccaggcaatacataagttcatgcgaataaataagtagcaatcttgctaatacatattgtctgacaaagtaaaaacagagataactagttcatgcatataaataattagcagttttctactgctgcccttccttctcgcaccatctctgcaaccaagagagccttcccgccttggtggtaagagtcttgaacatatcacgatgttcagctttcacaaataatcttgtagccatgaaatgctccgcacttccttctgctgccccacaatccaccaccaaatccatcacctccttaatggaattgaacctaaattcaccttgcatcaccttgttggcaatatcacaattgatatccatagtggtttgaatattcctcattatcctaaccatggggttcttaaccttcttgtatggactagtggcggtgctggaagaccctcgcttcaatggttttttacccaatgagcaatctaccggtgtgtcgccaaggtcatgtacatcaccacttgcatcatcccctccagcattttctccaggtacgttaatccagaaattaaatgttcgggttgtttaatagatttgctatacaattaaatagataatccacgacaataatatccttaacaatatataaatcaattgaggcataagttgccttctttggatatggttcctttctcgcaactgttatattagaagttccaatatagaaggaatttccaattcttttgtcgtattatcctatctacttccacttataacatttatttagcttatagttttaaattcgctccgttacctccctctaggccggaaccaacaaaaagaaagtttaaaacagtagggtgaaaaaaaaacaaaacttccaaactcaccccacctctttccttattttttttcaaaagttatcatacaaaaatccaatccttaattattctcttccaaaattttatcaacatgtaaggtgtgtttagttcacgtcaaaattggaaatttagttaaaattagaacgatatgacgaaaaaattagaagttggtgtgtagaaaagttttaatgtgatgaaaagttttaatgtttgaagaaaaaaattggaaataaacaagggctaagatgtactaatcacaaaatcaccaaatcctcgtgttcacagctcagagcgccatccacctcaccgtccgcctgtgtggcgctgcttttttccccaaaaaagaacaaccatcccgcgggcgggaaaacggacgcgcaaaaaaatttcgtgctcccaaattccctctcctctgattggcccatccgcccctcccacggatcgcgcccccgcgaaccccatccgagccgtccaaccaccccacgatccgaccgtccatctcccctcccacggatcgacgggcccaccaccctccccttcccccaaccgtttaaatacgccaccccatcggcctcgtctcgccatcgccatatcgcattcgactaaagaaaagggaaaaaaaaatcctcctcgccttcgacagcagcagcaaccagcttagctaggctagccatggacgccgccggagccggagcgggtgggaagttgaagaagggagccgccgggaggaaggccggcgggccgaggaagaaggcggtgtcgcgctccgtcaaggccgggctccagttccccgtcggccgtatcggccgctacctcaagaagggccgctacgcccagcgcatcggcaccggcgcccccgtctacctcgccgccgtcctcgagtacctcgctgccgaggtaacaacgctcgcccactcccccactttgtcgtcagcctcatctgcagatttcgatttgtggtgctgatctggtggtgtcctctctgttcgattgcttaggtgctggagctcgccgggaacgcggccagggacaacaagaagaacaggatcatcccgcgccacgtgctgctggcgatcaggaacgacgaggagctcggcaagctgctggccggcgtgaccatcgcgcacggaggcgtgctgcccaacatcaacccggtgctgctgcccaagaagacggcggagaaggccgccgccgccggcaaggaggccaagtcgcccaagaaggccgccgggaagtcccccaagaaggcctaggcgtcggcgcctcgctttgcttgtttagctggagtagattggacgggatgtgtgtctgttagtagtctaatgctgttgatttaatctatggtggtgtcgttgaaccttgtgatctgtgcttgtgtctgttcaagaagataaatttaagagatgttaaatttttcttcagagatgtttccattcttgctccttatgctttggctgtggagatctgaattttctcaattgtcagatccgatcttgtgagatgttcgaatttggttgcttgggttgggcgggtaacttaaaatcacccaaatttgttggtggtgtgttgggcttagtgccgcctcaaaaatttggtgtttggaatggaaatcaccgaatgcctaagtatgggtatctcagcatctgtgattttgttggatgttgaagtgattggttggaatttgcattttgggaggcaatctggcgctctggtttgaattagtggagggggggaatggcgggaagccgggtacgaaatgaaaatgtgtcttgggatttcgctatggcattgggcgggctaaatccatggaagtttggtgctacttggcgcctcaattgtgtcttgagctgtactccatttatgggccaacaggcaaataaacttgctcctcaattccgctatgaacttattttgggtcaagatccacatccttatgaatagaccatctctgtatttatgttactacctgtcattttggtgttgaacacgggtaaaattaaatgtattatgattgtgatttgttgagaatagaaaataggtgaggatattaagaggtagaaggttgtgattggttgaaaaaaaaagttattatatttagggataaatgtactcctaatttgttactcattctgtaaaaaaaaaaagagctaacctagtaggggatatgatcagacctactatgaatctggacagccaggaggaaggagtcacatccgcttctaggttgatttttttggacggaggaagtatattttaggacaaatgaaataatatatttgaaagatccatttttgtaatagggtcttgtttgtaccctccttaagcaaggacatttattttttagaaaacatagtacaacataggcgctcataatacgcactcactctatgaatacgcacatatatatcctaactctacgaacaatcatcatgagtacgtcgtctaccattaaaagaataattagtcgtaaatgtaagtaaatgtgtcaaagtctatgtgtcgaatttgagtgagctagttccaccataaagaatctaaccatttaagttacactcatttcgtcaagggtatttaattttgatcaactatataacctttgtacctatttccatatctcacagagcacgcttaatttttcctgtagtgaactaatgatggattataatattatatctgctagtacaatttaattttgaagaaatggttgtatgctcctgtaaacaagaaacttccggcacatcctcaggccaaggcaactcagtagtacaagatttttttaaaatctttttatatttattaaaaaattaaataaaaaaaatcatagcacaattggaatcgtccccatatttggactggaggaattttatacaagaattgaactaattactgcaaaattcctacatagaaaggagcccttacctatcctaggttaatcagtgcattctaattaatttaattgaactaaagtgagataatccaactttagccatgcccatagaactataacctcttagagcatctccaatagaatggccaaatcactcttcaagttaaattctagcaagttttgagaaaaaaaccactccaacagcctctccatccgactggccaccaaattggctcttggctacgccaaatttggccatcccgcctgcctagccaaattggctgctagccatgggccccacgttgctcccccccccccaaatctctcctctctctctctctctctctctccccgcacagatcaatcgccgccgccatcgtcgtaccgcgccatcgccgtcccgcgctgtcgccgcctcccacctgcaccgtcgtcgccgtccgatttcctccgtcaccaagagagctccgcgatgacgaggcaggagcaagggaggctgtgttggcgacggcaacgagggagcagcgatgatggggaagaaggggtcggatccctctccggcggcagccgctttgccttcttcccccgtgtggactcctacgcctccttcctcgccggattcggccggcggcgtggaatcagggggccgcgcgacctccgccgccgtctggccgccagctgctgtcgtcgccaaggtctgggccgccatccttcgccgtctggagctcgacggcgctcgactacggggagtagttggcggggagagggagagcacctcggcgagcgtcggcgttggggggccgccgtccatcggcatgcgtcggcaacagcggtccgctgcctgcgccgatttgccgcgtccgcgtccgccgcctccccgcatcgtcgtcccaacgtcgcgccactccctagcgccgcctccgccgcctccaccgccgccggattcagggtggggggcgtgacctccactgcctctgcgcggcctccggccccgcgcgtatttggccggcggggtggattcgggggccgcgcggcctccacctctgctccatggccgtcgtcgaggtaaccgttgcaagccgccgccgccatcgccaatcaccgcgtcaccgccgtcgccaatcacctgcacgggaagagggccgacagaagaggaagagggagagaggagtagaggctgacgtgtgggtcccagtgtcataggcttgtaatgaagagtgtagatgaaaagaatattggagtgaggaataagtttggcttgctaaatcgactgaaagctgactatatgggtatttagagagtttaatttggagagacagttggagatgctcttaggtaatgtgttcataggtccacatggtccacatgtcaatgatcacattactctgacgtagggtacaaagccatccaaaaccagttcatcggatatacatcacggctttaatacttttgagatcaaattcaaacaatatcgctttatagatgacacagaagaaaacggtggaagaaatagctagtggagcaggggcgggtatatgggtcatccagcattctacgcacatataaccttccagcccgggttcataaattcaacctaaccttccaacaacaattttcctgtttgaaagctttcttttgtcttaaaaaaaaaacaaacaatgttgttcgcaaaccaatactgggctcaacaaaagtcacaaaattacgcattcaggacaggagaagtgctcataggtcttgttggaactgagccagattagccatgtacgagtacggtttaaggcaggaaaactgcaccagttcagcaacgatggtgatagactatgccctatgcagttttattcttttgcaatttccacaaaaattagtcttccacgaatgatctgccaaagaaaagatttattgaaagtttagtcttacaataaaacagactaatcaggggaaaaaagaaggctggtttagtataaatctatgctgaatacgaatcatttccacatgaagaaagatctgaatgaatcccaaaataaaagcattctgcagtgacaaaaatggtggagggccaacatgctagcaagatggatatctaatctcaaagtttatggccaatctagaagatattttctttgggattaacagaataaaaagaactatataagcaacacaatgttcacaatgttcctcacagaaggaaataaaccacacagtttggtccacatggttttacagaaaaaggcagcaaaaagtttgcttcacatgatttttacagtaaactagccaagttctcaatctgggttgaacgtaaaatactataaatccctgcttagtgtctcgatctcatagaactacaaaaattagttctgttccacaccatgcagttatgccaaagattacaaacatgcaacacattatatcttgaaattaggtacatcagttttgcaggcaaattgtccttttcatttagtactccaggtaagtgcctcagctaatgtagttgtttgtaaagagtctaatcagcggagagatcagttctgcagtcaacttgtccttttcatttagttgtccagttaagtgcctcatctaatttagttgtttgtatcagtggattttttttatccccttagtatctgaagtagatcagagataacatcacaaatgaggcccactcaatctacgagggtaagtgttatcatgaatcacgataaaccactctaggcttcaagtaattaagctagaaatgtgtgtgtggtgtgcatgtaccttcaattccaattgaaaaccaggtagaaagtactatatacagattttcagaactcttctcagataaagaagaatcaaaactaacatcagaaaggtaaattgcgggtcataggcaagataggggatgagcagagcaaatacccgtccatccatttccttaacagctttctctccgtctgcttgagaagaatatttaacaaaaccaaatccttttggccttccagtttggttctcttaccaatcgagctacgcttgataaggtagataaagcagagtgaaacttgaatgccaattaagagcaacaacaaagatttaaattgcctgtgctgaaaagcatgtgactactgagtactgactagtaccttcctcaacagcgccaaatggtgagaagacatttttaagttcttcctctgttgtgtaaaatgatagccctacaaaatcccaaaatgagtgaatggatgtttaagctgtatgagcaagcaacatcaaaacatgatagaacgagtggacaatccactaagaacataacttgcatggctttagcgtgcacaaatagcagaatatctacagacaacttatgtgttctactcatggtccatgtgaacaggtgagcatctcacaggctcagcagattagggacttctaagtactctatcaccaagagaataaatcagcatctgtcaaactctatgagctctacaacaacagctagctagtatgtatctaggctgtaattctctaacccgctagaaagcatcctctgatcgatccttcattgcaatcaaaaggaatcatattctgaaagcaccaagcctcaacaacttaaggcatgccatagctatcatattcagaaaaaaagaagggctaaaggacacaccatttagtgctcatttcatccaccacaccccccagaatcacaccagatcaagaaaccccattcactcatgaagttctgacgcacagatcatcacaagcggacctgtgaagcagcaggacatcacatcacaggctcacacagatccaaacattttgcaaaccacaagattattacgtaggcggcgaaaatttaattacatggagatgaacttactgctcacaaatatctccgtgctgaaaggcttggctccaaccatccgagaggccaagccacccagccgcccacctcgcagcatcatctcctcaaaccctagatccccaaatcgcaatcgcaaagagaaaagaaaaacacaagatgcgaatcagccaccgacaataaataacactcgacacgtctattacttcaaatccaagctgcccattatgatcaagcacaatttacaaagcaggcacaagtttgcaactactgccacctagcacactgcacacgaggggaaagggaaggagagaagcatggcatcgaaaccctagagagacaggcctagttgctggtgaacttggt

SEQ ID NO: 19903 - DNA, 5416 bp, Oryza sativa
acctgcttcaggaccttgaagatgtagatcttgtaggtctcgacgctcttcttcgccttcttcctccccttcttgtcgccggcgccgccctccttggacgacgccttcgacgccggcagccgcttctccgccttgggcttcttccccgccggcgccttctccgccgacttctcctcgccggctgcgggcttcttctccgccggcttcttctctgccttgggcgccatcggagctgcctctcgagggatcggctcaaatggagagagagagagagagagagagagagagagagagagagaggcgggattcgtgaggaggaggaagaccttttcccttcgcgtggagttgaggcaaaaggggaagaaggcctcaattatatataggcgcgtggtggaaccccattggtcgacatgggtgggaggcggatcgatgacgtagaatttctccagagccgttggatgcgggagggggagtgaacgctcgggattgtagtagtactaaacaggctacggcccgttgtgcttttgtaggggcctaaaatttggatgggctaatgggcccaactagttttgtacggcccaaattggcgtgatatatcgaggagaggttttttagtggcggcgatggagcagcggcgtcgtgtggccttggttgcttcggaatctcaccacccaacccgttcggattagatagcccgcttcctcctctctctctcagctcaccacacctcgagtcgccgccgccgccgccgctgctgctgcttacctcctccgcgccgcgcactccttgcactagcccatggcgacggctatgatggctgcgaccgccacctcgtgctcccctcgccgcgcgccggtcgtcgcgtcgtcgtccgtgcagccgcccaggcggcagcagcagcagcaaccgcggaggggattgaagcagctgccggggctcgtggcgacggcggccgtggccgtggccgcggcgccgctaccggcgctggcggagcagatggagaaggcggcgctgttcgacttcaacctgacgctcccgctgatcgcgaccgagttcctgctgctgatggtggcgctggacaagctctacttcacgccgctgggcaagttcatggacgagcgcgacgccaagatccgtgccgagctcggcggcgtcaaggacgcgtccgaggaggtgcggcagctggaggagcaggccgccgccgtgctgaaggcggcacgcgccgagatcgccgcggcgctcaacaagatgaagaaggagaccacccaggagctggaggcgaagctggacgaggggcgccgccgcgtcgaggccgagctcgtggaggcgctcgccaacctcgaggcgcagaaggaggaggccgtcaaggcgctcgacgcccagatcgcctccctcagcgacgagatcgtcaagaaggtgctcccatccgcgtaatggccgccccgccgccggccgttcttgcctcccaaacaccaaccatctctcgtaaagattttctccgtgttttatccgtgtgtatacgctgcttctcctaagaatgtaatttcagtgaacttctcgtgataagtataaaatcaatgatccttttgctagaaattggattgaaattataaactgctttaataagtgcttactgcattatttgtgaggattgtgaactgaaacaatatatcaataagttttttacaacttccatatagaaatttttttaaaaaaacacaaggcgaaattgcgcatgaaaaactactcttcgtcctttcctatagaacacaacctacttgaaataagaaggggaggtcgcgtaagtctatatggaggtgggagctctatacgcgatagttgtggtatagtgtgaggagagagacacactatatcacaacaattaatttcaattgcagcaaatttactttcttcaagctatcaaatgaacataagttgggataattgcaccaaatttactttcttcaagctataagtgcgcataagttgcgccaatacgctcaaacataagccggcaaggctggaatatctatatctgcgactgacaagcactgtcataaaacgataaaggatatgtaacatctattttagttttcaatagcgatactctactgctaccttgtcccaacatgctgggcttttgcttcagaagtttctccaatgatctggatggctcgatgatctatccgctggaaacgagttgttctctcctatgcgccatattttggaccggatggcgtgtaaccgcgtaactccagcccactctgctatgcggacctggtcaggtcgaacccgaacccagcagatcggtcggaccggggatatccgcagcaccgcaccagagccaaggcggaggtagggttttagccggcggccatggcgctctcctcctcgctgctccaccgcctcctccgcggctctacccccgtctcttcctcctccgccgccgcctcctcaatactccgcgccaccttctgctcctcctcctcgtccgcccccttgcccaccgagtcgcccctttcctccgtcttcggcgacggcgccgaggtcagcaacgtgccgccgctgaccgcccccaagctcttcatcagcggtaactctcccctccctttgtttcacatcacatttttctgcataagatggatatatttgttatgaagatgatttggggagcccgatttctcggtataatttgggatggctgtgtgtactgtgctgcgatgttatcatgttttatgctaaatcagagcaaactagtgtgtttgctttctacagatctgtctctgagtatgcttcttaatctcatgctctattctgctctttgtcaatatctttgcccgtatatgcttacatgaacaactgaacccactgactaataatacagctgagtcttgtcggcattcttgaggaagacatcatatcctgtactgtcgaattctattacgtttctatatttgttgttgcatgtactaatactacatttatgtatttgaattagactttattttttatgtcatgctgtttttgtttgcatgctcacatatgcctaatgtgatgcaacacaggcctttcaaggttaacgacggatgagaagcttaaaaatgcctttgctccctttgggcagctacttgaaggtacaaagcttgatccaagtagtaaatgttttgaccactggtagctttcttcacaactcatattgatgtgtgttatactgttatttattatcttttggcctcgtgtagcaaaagtcattacagataggatttctggaagatccaagggattcggttttgttagatatgctactttagaagaagctgagaatgctcggcaggagatgaacgcaaagtttctggatggatgggttattttcgttgatcctgctaaaccaaggcagcagaagcctgctcctcgtcctgacactgattcatcacacactggcttcacaacaaacaaaactgtaggatggtgtggttagtcactgtggtgttatagctaaaaaacttggatacacatgtttccatgcctcattacattccacagttgtctacatgtctcataatattctgtagttgtctgatagatatgtcattcacatggattataagatgttcatgatcattgttctaaatattgaacaccaaatttaccgccaattgtagaaaaaaaaatgataattgatgattcgtggagccacactattgtgttactttaacattccgtgccacccaattttgaaacttataactttgatttaaattagtttaagtgttcttttattattttctattttttagctttggcttctaaaccgttaagagtctaagtataaaagtccagtcctaagaatataagtttaaaagtccacccctaacattatttctcgttaatttcaaattagtttaggtgttcttttattgttttctatttttcagattcgacttctaaacagcgaagaataaaagtataaaagttcagtcctaagaatactaacaacagaagtatttccagctctaaaattatttttcgttgatctgatatgtcacggcttataaaactgcagtaaaaaggaactcagcaatcagcgacaaatcttctgccctgagatggtatgcataccatacagatacgggatacgggtacaagtgtgacaggatattaatatgcctaattgacattaagaaagtaaggaactgagaacatgtgtggcaaatgatgtacatcacacacgcaaccctctcagcagagtatataatgtcagagacgcttctattcttaggtacttcagcttcgaatcattcactcgacgttaatcacaaaaactactcttttttttagtatttcttttgccgattactacttgctaaaaaaatctactgagatgcctctactctcttctctatacatcttgagcctcgaaccatccattaaaaagatggcaggctacaaaaactgtcctgttgctctccaaaggtaacattttatcctaaaaaccgcgtaatcggtcttctcaagcaagtgatttctgcaccaagcttaggttcgcaaacatcaccaagggatgtgccatcagcatagaatgcttctgtcaacaagcacagcatcaatagtgcaatgtcagtactgttgttggagagattactgttgttggctagtacaagctaatgttttcagcaaccacaggtaatgcacaaatacaaggaagggttgtattacctgttcatctgacaaaatagtgtacccaagtttctcagaccagattggtgccatttcaggatcaacaggtgccgtaagaagacggacattccaggcctttaaatgcgcctcaattagacttagaagaagcgaaaaataaccctgcagagagacatgcaatggctgagagcaaatgcctttatcacttcaagtagtccgaaaaaaaaacataaaaagcctgattcgttaccacctgcaggctgcagttcggcaactaacaattgtgcaacttaatttttggcatggcaatagaaacacttccaaaatgaggctatctatggtagtactccaatatttttaaaaagaaggaactggaaggaacaaaaatgatcaaggaattccaggaatgcgaaaaatgctgcatgaagggtctgcttatgcctgtggttccataacaacaaaccaaatataagtcatgatcctttgttcaaaccacaatccaaatcattaaatttatgttttggcttaagctaaatccgatccattgttccgtgggtttctaccttttcagggaagaccatttgttaacatttccaagttaggtgcacagcatctctcttcttaagccaaagaataggtttgcctttgtgcaaatatgcaaactagattacaccagataaataacagagttcattatggactaaacagttcaaatatttcc

SEQ ID NO: 19904 - DNA, 13819 bp, Oryza sativa
  unsure (1)..(13819): unsure at all n locations
gatagaacatggccgcaagttttttttggttgtttggttgatagatagaagtgggatattgccacccggcagagaatattctatgtagatgttggatatgcagctccaggcaaatcggccggatcccacatcccgaagtgggatgagtcgcacgactctggactcgcgcgtgcgctcacctctgccccaatattttatccatgtcactcgcttcctcaccgcatcaactgtagccacaatctacttcttcccttcttccggtggcacagggggcagcactagacggcgcaggggcaatgtaagtggcggctgtcgagggcgctcggcggagcatggcaccgctggacagcgctggggcgttgtgggcggcggagcacgagcgacgcaagtggcagagaccacggagtagtagcagccagcaggtcgcgcgctcggccgtcgaggtggcgtatgccaacaggcaatagcaggtcctccgtagccctttgccgccattctggtgcccgggttcaggagcctggtgatgagcagttcaatgtcttcttcttgttttttttatattggttcagaacttcagatctgatgtttttttaggattgggatggtttttgttatgttctgtgtagatctccgtgtataatctgatggtgtattagattttgatatatgtgtgcagggtgaattttacagagtgaaaatgttatcatttataaatagtggctaaaattaatttacaacatgataaatattactcacaatacatgcaacaagcatacatatgcatcaagatgaaattgtttgccaatgggggtattctccaccatcttatccagtggtaaccataacagtccatccatcctaccaaacaaaaaaattgactcaccatatccacatgtcatccctccaaccaaacaaaaatcttgtttattccactctccttaccaaacataaaattggatggccatatcccatccatgcatgaccaccaaccaaacacaccctaagtgcatgcaagactaaaggcatccctgtggtttgattcaagaaaaaatgactattaattgatgtattgctctatttttcttgtgtttaggatgccacactattaagagggatatgatatacatataattggagtaaacaatagtactcaaaccatatttttcttccaagtgtttgtttagttatggtcaaagtgaagcatgtaggcctacgttgttaattttggtaattaatattaagcactaattgtggactaactattttatttgagtgagataatttaagagagggccacatgatgtgtataccaagaatgattaccggctaccgcagattaaaattgatagtgcaaagcaatgagaggaaggtgataaatatggttatgtttttaacgatcgaagcgttgggtgatcaatttgctaggttttctttatagctttaccgtactatttagagggggtggtaatcttgacaaagaggtgatctaaataacacattagtgcatgatgagggtttcttgtatctttggctttgatctttatttctagagctagccggtcggactgagcctatccagtaccgttttggtgttgcaacgatagcatcgggcaaattgtcttggtacagagcattcgtcgtgcacgacgaacaatgccggtcagaccaagcctgggaggctaggagctggtcggatcgggcccattagttggtcagacctgtgaaagtcccaaattgcttggtagcacggaggccacggttggtcggaccagcccttcgccagcggtctaatggccattgcatttattgcacccccaacatatagattttgaactagtttcagggcggctagccgtttagattgggcccctcaatggtggtcggaccaatagagcacagagttgggggattttgacccccaaagactagttttggtgggttgggctataaataccccccccccaaccagcaggaggggaacttcctaggcacttcattcaattcactagagcccttgcaacactctgacaccagttaagcacatttctctcgatttgtaggtgtttcaagagttgattaagacaatacaagtgcattgcatctttgctagatcttttatgcagttgctcatctctgagctttggttgcgactttttactcttggaggttaccacctcctagacggcttggaggaattgtggcccggtgatccctccggtgaagcttgtggaggtgacctggtgttgtttgtgcatggtttggacctacgaagtggaggaagaattaccggctcccgccttgcccatccatttacgaaggggttcgaaggcttcgtggtgtgagcgatgaggttgggctcacctcaaaggtgacataggaagctagcaagcttccgaacatcaggtgaaaaattcggttgtctcttctccacgattcacatttctagagataattttagcccaaatcgtcctaggcttgcaaaacataatttagttagttagcgtgtgatccctaaaacaagcctagtgtcatgccttgattttcttgcagggatttaaaaatcattaagtaatttatttatataatttattttaaaatgtgaatcaatttacaagtgcgtcttgctacctctatggacttagtccactgtaggtcaccctccctttgagccgccacgcggggcctgctcgtcagctccgacgccccatgccgatacattaaatccactttcctagttaaaaaataaatctttctccatgaggccgtaatcccccgtctcccggagtcctgctatatactttctttgtcctaaaataagttcaattttagccaactcacacgtaccaatataaaaccaaaagactataatatccccgctttatcaaattccaatgtatttattccctactttcacaggcaatgatgattaaaagtaaacttaaattgagataaatgggagagggtaaaaatgatcttattgtagaacggatggagtaactactttcttttgcacgagaagtcagtcaaaaaaatggcagtcttggcagttccatatgtacaccacagtttggttggaagatatctccttactcagctcatcttatattttttccgattttgctaaacatattgcgacacatttttccaataatattagttgaattctggacggttcaatacactttgggatttgtgcatttttatgggccggagcaaatggtatgctgcacgtgcgagataagggaaggtctagacctgcattactccctccatccacaaaagttacacctattacttttatcaccaaaaccaatgagaaattaaatcatcttggatgttacaaaatcaagtagtgaatgtaagcatacaaccaatgagtatttagatgactccttgggttctaatcaaacatttaatttatctatttatttaactcttgaatacataaagactacaaatagaacaacttatttagaaaaactcaaatgtgaaatatgtctaacttttgtggatggagggagtattagattagcgatagtaataaatactttggagatagcctgcatgggcgtagttgcctaacaatcttttatcagggttctctatgatgcttagttttctggatttgctagaaaacttatgcaagttttttacccctaaaacttttagatttgtgaccattagatcgccttgagatttatgtatgaaggaaaaaaatgttagaaacaaaatttcacacatgtcatgcgtaagaacctagtgctaactaaccaaaccatagttgaataagttgtatagtagttacatacagttacaatgtaattacactttaaatatactatagttacatatgaaaatttttgattcaaaaaacttgcggcggttttttaataatccctagatttttaaatttaaatgatttttcatggattttacaacgaatacctacaagaatactcatgaaaattacattgtaactagtgaactttacattgttccatcttcgtttcatgaacaagtgattgatcgtatttttattgcttaggttgtcttcttatgcacaagcgatacttatacttctcgtttttgacgtgcatactccctaaaccgccaaatgataccttttttttgcaaaaaaattctatgataagtcgttttatatgataagtcgttttgacttttttctagtttaaatttgagcaagttgataggaaaatatagcaatattttcaacataaaacaaaacatattatgagaatatattaaatgttacttttaataaaactaatttggtgttattaatgttactaagtttttctataaacctgattaaacttaaataaatttaactattaaaaagtcaaaatgacttataatatgaaaaagagagagcgcttaattaatcatgctctaataaaaaacgacatcttctcccgaatacttgtgtagtaatactcgagtggtccaatgattaaggcccaacaaagatctgcggatgcattggtgcacggatggcgtgccatgtaggagcgaaaaaccaactgaaatcataattttcttatatctatttagttacggaagatatctcttcatcaagaaatcaagatcagttctaaaaagaaaaaaaatcaagatcaccttttatatattttcctccggagacgttctctgtcttcttcctgctcctgccgccgtgagcacccctgcctctcgtctcgcggccgctgattgcttgccggtgtacgggatcgtcaaaggagcttaacggcgagacgatgaagccgccgtcgccatcaccgcagtagacggcggcgaccacggcgcgagtttttttttaataatccctagatttttaaatttaaatgatttttttccctagactttgagaggtgtcaataatctttatagatcgcaagatatacagagctgacatgaatctatactcaagaactgattgcccatagccccatactattgcgtagatgaaacccttcaaaatttacattgcctaggtgatgcatattctgaattttgtgtggcagcacaatttaattcaagcaatggaatcagaagaataaaatggcataattgctcatgtaatcccttttctatgtagaaagttctccacaatatgagtgtacaaaccacattcctgaattctaaaacagtgcatatcaacatatttactgatccaaaattactcttcaagtattaaaccagaaagagtaatacagattcattactttactgaaagtatataggtccataagataaaccacacgctggagcaatagtatgaaggttaatcaggaaaacataatcagccattagcctcattgcctctaacatcgtcaaggggaacaaaaccacaactgcaataagaaatgttaaatcacatcaaattactcaggtgagcaataccatgccaaacattttgataagaacatgctaaatctaaagtatgtaagagtaaatcaggtgagcaatacatggcgcacataacattagtctgggcacaagatgactaaatctggatcagcagtttcaacaaacaatatggtgctctttagtctttacagctgaatatgtattgacatgtatgcaatgatgtttatggctcatgatctgaagatccaagttattttttaaaaattccattagtccatggcccaaaagctgactgtgctcttggaaaataataaatagagatattctaaaccataggattgacagtatatgagatacctaaaggtttaatttaaattatttatgttcattctggatcatatgaaaaggtcaaaatggcttaagtgaatttttattcttcaaatatatgaaaaggtatatataagcataattattgtgcactgaaaaatcttaaaatttgacaacagacacacactgtaggggaaaaaagagaaattggtttaaacttctctataggggaaggggcccagaggatggctggcttaatgctatgaattgggttatttgtggtaaatgccagtacaagtgcaagctacctttcatgagatataatcaactgtttagcttttgcatggttcgtacccaacttgcttttgtgtttctcataacccctaggaaggatgttgggataatgtgaaaagaaataaatccacattgtaaaaaccagtaaagccaatcatagcgtcttcagtgtctctgaaaatatcaacaaaagcattaaagcatgcagatccccagctgacaggttaaaacatagtcaccatgcaaaccaggacaggtttatatggaccattcgcaagaaagtcagaggagcatatatatatagacaaggtagagtaaaccttaatgagtgaagatatatagcctagccatgtgacgatcccttttttcttcaaaacctcagactctaaaagtcctacagtattagtcaatcaatttaccatacaataataaggtacaagaagaaattcttgagaatttaaactaacagagtctgaagtgaaacaatacaaataatatatgtgcttgctgcaatccttccgaatttaataaaggaatcgaactaccagaatctgaagtcaaactataaaaatagtatatgtgcttgttgcaaatgttcttaatcgtgcttatatatagtactgtacaatgtggatctagatggaacagtcgacgtggttgaagaagacctcaggcggcgcatcggtgggtggaaaccagaaggtagctgtcggcgaggaagcaggtggagaggtcgtcgaggggcgcgacgatggcttcgatggggtgcggcgcaggattgggaatttgggagacgagcaagctagtcatcggctgcggcgacgcagaacgcggcgggtgcgaggtccgctcaccggttgatggcgatgctggtgtcatgccccgccgcgtgagctacccgacatgctgctttgttctctcccggtcgggccaccccggcgtgcacggtggagaaccccgcgccgccgagcgagtcgtgcagtaccatccgtggcggccgcggggaagggttcccctctggctcccatgtagccggggattgaggcggcgatggggaggcgccgcggcacagcagcggctgggggcgggggtgccggggatgggcgcgcgcgatggggaggcgatgaggtgcccctgagggggcgccggggattggcgcggatatgaggaggcggtgaggtggggagaaggggttggagtggagggcatgggggaggaagagctatgtggcggcggcaggacgaagacggccggaggagggaatgcctgggttgtgggaaagggaggggatttgctactgctagggaggtggaggtggagcgacgacgagggatcgacggaggatgggcacttgggatcggggcggcgtcggggaacggaggtcgtggcacttggcggagaggcagcgagcggggaggcgcagtggcgctgtggagagcgatgggcggcgatggcgttgtgtggatgggagcggggacgggatccgagtgagaaggagaaggaaggatcgcgccgtggcaggatcgtgaaaggaatctcgtccgtaggatctagcagatctaaaggttaggaataaaagttgcaggaatcaccaccaccattacgaccttgtataggagtagagtatctagggtgagtttgagaagattgggaagatatgcaaaacgaggtgagtcattagcacataattaattgagtattaattattttaaattttaaaaatagattaatatgattttttaaatcaattttcctatagaattttttttttaaaaaaaacgcaccgtttaatagcttgggaagcgtgcacgtggaaaactaaacaaactctctctctttctccacccaacgaacgcagccttagttacggaagatatctcttcatcaagaaatcaagattagttttaaaacatgtcaaaaaaagattagttttaaaaaaataaatcaagaccttttatctatttttctccggagatgttctccgtcttcttcccgctcctgccgccgtgagcccccctgcctcttgtctcgcggccgctgattgcttgccggtgtacgggatcgtcgaaggagcttaacggcgagatgacgaagccgccgtcgccaccaccgcagcagacggcggcgaccacggcgcgggggttcgaggttacctgcgtgaaggatctcctcccgctcctgcagggcgtccccgtcacgtatcgcttcgagaagcacaacgtgagtcgcccatctccacggctcactgacggatggggcccgccccctcccctccccagccagcgcacgcgctcccctcccctcgcccccgcccggccgccgccgggtttcttcctcgctggtttttttttttttgtgtttctctctgttttttttttcctctctcgctcggtgaaataaccccaactccccgcgcgcgcgcgcaggcgaagctcgaggggacggtcgccgccggcggctacgcctgcgcttgccccgcctacgcgggctgcgactaccgcggcaaggtgagatcccggttttttcgcctcccctcccggtttttttgcgcggagagagagggggtgaggatttttttttttttggttcctcaccatcttcttcctcttctccggcggcgtggggggcggctgcggcgcaggtgctgtcggcgctgcagttcgagaagcacgcgggggtgacgtcgaagaaccagaacggccacatcttcctccgcaacggccgctcgctctacgagctcttccacaagctcagggaggtgcccgccgagaaattccccgaggcattccggatggccgcgggggtgcccatgacggtgctcgccgccgcggccgccgccgccgctgaggaggcgccgcgggagcgggggcttgggccggggcctgtggcggcggagcagcccccggcctcggcgacgccccgaccgcgcccgaccatggagatgctgaccgaggaggagaaggccggtttgtctctccttggcttgaggtgagtgacctccgctgcttgactttcgtcgggaaatcgctgcgcagtagtactgtagtggtgtgatttcacggcagaggtgtatttggccttcccatggggatgaattctatagtgactgggggaattgtagggtattttgtcaaagctggaaacaatgacgtgttagattagtaaaattagtaggtagttgcaggattatgtcgggcttaattcgattttttgagcagggcaagtggctcaaggaccgaaataaattccatggacggcattgaagggcttgctacagaagcgattgggaatgcaccaagcagtgaccatgcgatgcttgatgcagaagagatggggaatgcagctgctcagcgacctaggaatagtggtctttccacaaccacaactgttaaagtgccggtgacagcacgcaataaccatgcaatgcctgatgcaaatgaggtgaggaatgctgatggtggtcggtcagcaacccttgctgttaaactggaggttacatctggcagtgaccatgcaatgtctgatgcgaaagagttgaagaatgcagattatgagcaacctagggatagtgtgctggcaacaacctctgctgttaaagtgcgaattggagcagccaatgaccatgcaatgcctgatgcggaacagacaaggaatccagttcttgagcaaccttgggatagtagcatgttaataaccgctcctgttaaggtgcgggtgacagaaaccaagtatcggccagagagtatactgaaagatgtaaggggattgctgtccactggtcttcttgaaggcttcagggtaacctacaagaagaatgaggtccgtgtggttccttcgctgttgaatctgacttgaagtctgcttttgatttatacctgaagaaaaatatgtttcttttggttatccttaggtggagaggattggaagaataaatggacaaggatattcttgtggctgctcagaatgtggatatagaaatgtcagctttctgttgtctctattagcgaaattttttatgtctgttcccatatattatctgaaaatttgacctgacattaatcatgtttgacaaattgcagataatgaatgcatgtgagtttgaacagcattccggtgagtcgtctaacaatcaaaacaatcacatattcttggacagcgggatttctttatatatggtgatacaaggactgaaatacactaaacttgatatgcttggggatgtgattggaaaagtgatcagtctccctccaaatatgattcaatacgaaaagtggaaaggtatttaattgagtacctagcatttacagctttctagcttttgtatacttcaagatgctaagctttctgttgggctatctttttttaaaaaaatttttatgtcatttagcttcgtttcaactggaaaaggattatttcgatgatgcaccttcagatccttgttcaactcaaaggtgagttaccgtgcatgtgaaattttagtgtgtcttgtattcaggtttcccagaaacccattggtgtaccttgatttatatgttttgttcttaaacattgttttccggcttgaacttttcaataggttctctaagccccatagtagtggcagcttaatgctatacatctgccagtataaatgaggtttcaatttaagctcatgtccaagcatgagcaaattctttagtattaccattttgagttgtatgctacctcattttatcaagaacatttaggttatcataatccaccagagactgactccagcattcttgaaaactcaatttctagctcacaagagtcgaatattgccttgacggattccttgaaagactcaaccagcaacgccagttcaatcctcaactggagttcattcaggaggcgttcagataggcagttcaaacgaggaggcactgagacttcgactccaatcttgagtagaagccctgagaaagagatatctgatctatctacaagcacttccatgaagagtgaagaaactcctagtgagaatactgcagggcttctcactactgatggtataaaacataattctgctggacctgttgcattgagatccacgtcttcagagtgtgatcccattaatatgacatttcctttgtcaatttcagttacagtaattcaagatcctccaccagaccacaatgttgactcaaattcaaaagatttggggcaaccaaaagtgaggtaaaaggttaaacctacaacatttcttgacatttgtcacatttaggatatacagctgcaataaatggagaaatcttagctctcgaatcctttttgttttatcttttctccagagataacactttgcacccgatgctcttcaaggaggggggccttccagactatactttgttaacttacaagttgaagaacggagaggtcctctaaatagttaaatgaactacattatcctttcccaacaccagaaattgtaacaactctcaggaacattcacacttccctgtcttgtaggttctaaagcaaggatataaacttgggacaggtataatctgtgaatgttgcagtattgaggtatctgtcccaaacttagcaattgcccaagtttgatctgaggcctttcttnnnnnnnnnnnnnnnnnnnncacgttttttttttcctcttttgaggtgcagtatactccttcacaatttgaaaagcatgttggaatggggagaagacggcaaccgtaagcatcatcattatatatagaggcgtttgaaatattttttactcaaaaagggatcttggtgttttgttcataaatggaggatatttgtggtttcaggtaccgtagcatttatacttcagacggattaacacttcatgagctggcactgaaactgcaggatggtttaagttcaaatgtaaatattgatgaactccctactcttacttcaggtaacttaatggatcttttagttttctgtttatttcatccaagtggcaatgtgcccttatgctttagttatttaaaattttgcattttgagggtcattgcaataatcacgatctctgtagaattattcaataggttctttgtgaatatttgggcatgtatgtattagtgtcttcgtgtttctttgtttaaagaggggaacctatgtatatagtctttatgtttacctgtctaaaagaggggaacctactgtgataatggcattatcagttcatcactttgagcaggaagattatcatgtttttgtccacatttgatctcttgatgactcattgccttcttagttaagaacttgagactataggatcaaagaggtaagagcttgtttgctccaatatccaaggtgaagccctatgtcttaagtttctgggtgaattggatggtgcatacaataaaaatatggtgacagagccaggatatcctaagattgagattaggttgctgtagtttagaaaacaatttcaggtctcttgagcctatgtaagagccttataatgaagcattgggtgaagtagtgcatgaaacttcttaaggagcaagatagccgcattgctgaggtttagtaatagagctcatgctttttatgggcaacttagatgaaaatgggacatctatacttgatttagtacatgaagtaactactcattttctttagacaatgaatgaagtaatattttgtcaagtaaagagtgaaaaatattgaatatatttgcaagatgctgcctcgctgggaaatattcagaagatgattttatattttaattgttgtatgcgcatgagtacctaatcttctgttgctaccatgagttatgttaagctttgcatctaaaattagataagaggtagaaatttaagcttttggacaatccatttacgtgcttttgagccttagatttcttgacagaacctaatgactactttaggaccacgaggtttatatctgaaaaatagcatataactgtttcagcatggggacactggcacactagtcaactaagggtttggaaccttccctcctagcacgcaaaatggagtgacgacttagcgcacgattaattaaatattagctaaaaaaacttgaaaatggattaagatgatttttctaaagtttcatatttatttatttattttgcaaagaactcgctgtttagcagttcggtaagcgtgcgcgtggaaaatgagggggtagaggttagaaaccttcagtgctgaacacagcctaattgtggcagctgaagaatcacttcactatcttactgaggaccaactttggcatagataaattatatgcagagactatgctattcttgcaattcatgcagatctttatggagcatactcaaattttttttctccataacatggtttagaatttctttttgttgtgcagtacccctctttctttcttttttgaagagaacattatcgtttttctgttatgtgccaagattatattaccaaatcattatatattctctagactctacatcataagcctacatataagcacaaaaacataaaaagtccaaggaattaatgctgaaataataaaatatgtctgagggggtaataagcaactccctcattcttgttttatatgtgggactgttgcctgttggctaaagttatgcagaggttagggtaattgggcacagggcatgttgaacagcctgcttatattttacaaagagaacagtccgtttctgttggaatctgtcctttgaactggagaacttgtactctttctctccatgctttctgaggagtaaagaagtgaaggatggtggaatattgcaattttcagagagacattgctgtcttcaaaccatggttct

SEQ ID NO: 19905 - DNA, 1031 bp, Oryza sativa
tgcgaattcggttccctacgcgacagcgcagcccaaaggactgggcgatctcccacaggaagttagccaccctgtagaatgcgtgcattgcgccatgcgctccccgctacccgaggcaccgtttttccatgtccgccagttcttctgccccatccgcgccggatgcgcgcacccagtttctcgacctgctgaacgccgccctgcatggcaataccctggtcaaactggtattggcgcgccatgtcggtgccgaccagaccttgcaacggatcattgctaagccgctgcaggtcaagggccagccgtgcctgtcgctggtctatcgccaccagacccgtgacatcacccgcaatctggcgctggagcaggcccaggcgctggtcgccgagctgctaccggacagcttccgcaacgcgcacctgttcgatgccgacggtgaagtgcagttgaccttcagcaagaagggcaagcccagctccagcgccacggcgcacaggcgccacgcgaagctgccagcagcagcggccatgaccgcgagaagaagcgctatctggagctttcacggccgttcctgcgtgacctcggggttactgacgcacaaggcgcgctgataccgtcgatgtcgcgcaagtggaagcagatcaacaagttcatcgaagtcttcgaccacgccctggccagtgcaccggtgccggcggagcaggcgctacgggtggccgacttcggctcaggcaagggctacctgacctttgccatgcacgactacctgcgcaatagcctgggccgcgaagcgcaggtaaccggcgtcgagctgcgccaggacatggtcgacctgtgcaacgccgccgccttgcgcctggagcacccgggcctggagttccagtgtggtgacgtgcgtagcgtggtgcccgaggccatcgaagtgatgattgccctgcatgcctgcgacatcgccaccgactacgccatccacaccggcattcgctgcaacgccgcgatcatcatggctcgcggtgtaccacagcagatcc

SEQ ID NO: 19906 - DNA, 1157 bp, Oryza sativa
catcaccttccttgctcacacgttcttgctgctgccggtgattgtggcatatctcccaatgtgtacgtctcaaattatttcaggaaagaagcaatctttcatacatggagtgaggagatatatgggttcgggatctcaggatcctacacaacgctgagtgcccaagttttttatattccagatccatctaagttaagggtgaaaaagggtcgacgccaaactagacgcatcagaaatgatatggatgagtcagaagcaggtgggaggactttacgctgcagcaagtgtgatctgcgcggccatacttacaagaaatgcccgaagaatgcagaagttccaagcggcgctgatgctagtccatctggacaggcaagtgatggtaggcgaccaactggtgaaggaacaacaagcaggcgcgcaaggccaaggcgtcgtcgcgcagcaggcgattccatggtgtaacaatgctttcgatttaggaaataaaatgatgtaatgagtgttcggactaaatacttctatcgtgtaatttcaattcaatcttgttgtactgagtacctccgactattgttgtactagtagtattgcgaactattcggtgtttgtctcgtaatgttatcgtgatgagtgttcggactaaacacttttgtttgtttgtactcttgtttaatatgtgttagtaattcgcttatgaacatttattacttatgttgaactaattatttatatgtttctgatcaacctatttgatgcaggtatggcgtacgacacaccggcgctgttgaaccgtgggattgacaggaaccaccgctcgttcctgtcagcagtcgagggtgcacagctcggcaccttccgtccacgcacgtcgcgcgagtggttgcgtgtcgacccccgtcacgttccttggtacgcgtatgttcacatttgaactcaactttgctttgttttgcacttatgtttgaagtttgctctatacaggttgcgtgcggcaggccttctaccactttgtaggcttgttgaggcggcggcggacgaccgtgacccagcgaagcggtgggatgcagaccggtcactccttgccgctcttgtagaccgctggagacctgagacgcacacgttccaccttccctgtggggagatggctccgacactgcagg

SEQ ID NO: 19907 - DNA, 2675 bp, Oryza sativa
cgggcacgctgggacttcccggctggtccactacgcacgggccatcgcggatgctcagccacaggacgtgccgcagtggagctggggttctgccgtgctagcagccacgtaccgtgccctctgtgaggcgtgcacgaagactgacgcgggagcgatcatcgctggctgccctatgttgcttcagctttgggcagccgagaggtttgccataggacgaccagtggtggacagcgcaccctacggggttggtcgcagcgcgcagtggccagaggacggtcccacgatggggacttactggtgtcgacgtggggttagtgcaacttcgctgcgttataagtttatcagtcatcttctttttttttccttcacataacatgtctaattccgatcatgtttattgcagcgtcgttacgctcacgtccaggtgaaacgtggttacccggacttcgtgttcgagtttgaccgtctccagccgagcgacgtcatctgggagccgtacacagaagaggccgtcgctgcgagagcaccgctaggactttcgtccttgtgcacacgcgaccaggcttactggctcaccatcctgccgatggtgttcgacattttcgttgagcctcactgcccgcagcgtgtgatgagacagttcggacttaggcaggtgtttccgggcaacgtgcagccgaccgtcccccctgccgaccactcgtatgttcggattgttcatttctaaatttttatgataattacatcatcgagccatacaatttacctctcttcacaggttgactcgacggggacagctagcaggcgcactttgggctccacgtgtacagcagtacgttgacgactgggtgttagctacagaggaggtgatcaacgagctcttcccacacacggaggagaactaccgtgactaccttcgctggtaccttcctcgcactcgtgcgcgtgtgaccttcactccagacgccccagagccgcacgttgccgctgtcacggacgcgtatcccacgcaccgtgaccgagactacttcgtggcggtacgtccaatttgtattacttccaacaattatgtcatttatcttgcataatataggacaactactgaattttttatttccatcttgcataggctgatgcggcacgggatatcagtgccgatatcaccgcagtccaggtgaggttgagcagaggtttgcacttgactgacgttgagcagaggtcgaccttcgaccggatgcaggagaagatgcgtgcggtcatgcgcgtcttctcctgtcgcagcgccgtggacgtcgtacctccagctggtccggtacacccacggcctcgcggtcctaccgtcggagcaggacctcgtttgtcttcgagcgcccctagcttcggagcagtgcgacctacagcaccggtttcgcacggtacagttcagcccagatattagttcatttttgtttcagcttttgcacgaatgtgtcaccatgatttaactgcacgtttcctcatcgcaggacctcgtatgccttcgagcgcgttcgcaggcacgaccggcgcttccgcgagctccgcaggggcgttcgccacctcttcgggcgcgttcgccagctcttcctctcacggagcgtcgatccctcacccacacggtactttactttttattaatactgttaaatacctgtacgaaactgatggtccttgtccagcaggatttgcagccgggatcttcggtactggggcctcttcgtctcacgccggtaggactggtcctactagccagttctacgacgacgacttgcacggtgcagaccaccaggacgtactaggctcctctcagcttggaggagctccagaggcgcacactcaggagcagccagaggtcacacctgtacaggcaggacgggttggccgtgccgtacccccagaccgactcacgtactcccaggggcacattagggcgcagggtaggagggacaggggtaagaggcctcgtcagtagtgttctacctcttcagtccttatgtgaccgtttcttttggcttacaaacttgtaaagcagtactacttttgctattactactgcagtactacttgtgtttgtctcgtctacgtagttcttttcattcgtattgtgctcgaacaacttatgctcacaacaacacactttcggcgcttcacggtagtgccatatccagtagcgcgcacagtccacaacagcacacatgaaaatggaagcctattaattggtaatacgtaatctacaattgagattatgtacaacattcttcactacaattttacattttggcagcaaaccaaatatgatcaaatgcaattttaccttaccaaatatttggtagtgccaaaacttgcttatattttggcactaacaaaatatttgtacggtaacattccaaatatgccctaaaaaataataaaattgtattttaccagtcttggagattttaatcttgtatagttttcaatataaaaagatttgataactattgatatttatataaaaaaaatatagagcacagtgcaaaatcgccctagcggagggcggcaagggggccgcctgcaaaattccatgccccctcgccgcccatttgcaggcggccccccgcacagtgcaaaatcgccctagcggagggcggcaagggggccgcctgcaaaattccctg

SEQ ID NO: 19908 - DNA, 20822 bp, Oryza sativa
gccctcccagagggcggtaggagactatttccgttaattttcaaaatggaaaattatttttgtaaaacttttaataaaaaaaattataaataaaaaaaattcgtcagtgctctcagtaaccttgggcctgaaatgacaggcccaagtatgcaatcgcacaagaatcaggcccaatgcatttcctatccttgtccttgttggcagcttagaacttcagatatctccactgcggcactgccgaactgtcagtctttgacaggcaataattcaagatatcttattaggttagtggtacattagtaataacgatcaaattaagttatatctaagccaaaactaacgagtaaatgccaaaacacacggaatgaaaccgacattctgaatgagacaattagctgcaaaatattcaacagtacggagccaaaacttcatttatatattatgtctgatatttgcacgaatcttgagtacagtgaacaaataagatcccaaagaaatggatggtgcaacagatcagcttgctgtggatgccgaattgccgatgatgctggctctgatgtagtatatgagcaatctcacttttggagatgcttcaaaacctggtggtcaaaacctacatgctccttccttccgtcccatttaaagtgtgttgtgggattttttgtctaacatttaaccgtccgtgttatttaaatttttttatgattaatattctattattattagatgataaaacatgaatagtattttatgcgtgacttatttttaaaaactctttcataattttttttaaaaagatggacagtcaaacgttggacacaagaactaacagctacggttagaataaaacggagggagtataatggtggccttttcttcctctactccctagtaattgttcatcttttgtcttatagctaagcaaacttttcttttttttgaaagagggtaggcaaaaactcttgcttatgagcatcattattgatcatgcaactccaattgcggaaaggtgcgcaactttgagcagcaaaaattcctcgtgtaaaacatgtattccctgtccaggatcaatgttcagaatctcatattagctatgcatgcatctgagtttattactaagaaaaaataatttgacttttatattacgctttgttaatcaggagcttaataaactatgtatattttgtatgctgctccatatatataattaaggagaaccaaacatttcaacaggttgtggtcatttgttgaacgtaaaaggcaaatgtctaaacctattagtcgtacttagtgtacaccaaatcaaaattttcagtgatataaaaatgttgtaactaacttcaagtattaattgcaatgatacacatataaatcttttgcatattcccgaaaaaagtggtataaataattatgtcaaaccataacacgttaagataaatgtcataagcatattagcatttcaaacacataatctgatcatatatatagctagtatgcatgtggagtgcttgaggtgaaactttgccattatatagtatgtgatcacatattatcgtgcatatatacataaattctgtgctttaatcattagctctctagatatgcactttaagtatattttactgttttctagagtaaaagttcaattagaaatacttacaatccaccagatgctagatctatatcacaaattaattgatcgtatatattccaagaaaaccaaaataatcatatcatcactttattattgctccaatctgaactacaattaataacatgaaaaaaaggaaattaacctagctagacagtgctaacactagaaggattcttgtacagccaggatgatcaactggagctagctgatgaaaatacacaatataattaatatagatgcaaatacaaccatatatataacagttcttggattcggtgattaatttgcatcaatgacggcgccagctgctacctagtgatctgcaagctaagactggatcaggagagtcaaagggcatgtgaggtttgtacaattgacaagcagctagcaagcatcgatccggtatttctgttagctatctactaactaactaactagtatacataattaatgtgtgatgtttgttattcccatgcataatataggtcatgtgatgtgcatgcactgtggtcttaagccaagatctagcttagctagctagcagctctgcctagctagctagttgctcatggcttaataactaatcttaaattatattagtgtctacctgcatctcatgatcagctagtgagactcgtcctttcaaccattagtttattttcgatgcatctgaagccattattgttcttttttacagtgtaaggaattctcaagaagattactggtttttattcttgtgacagacaaactttgctaattaacaggatatctactagaatctgatactacaaaaaaacagcttacgaattaccattcatctctagcccattgatagttctactccatattaattcatcagataattaagtacacaaaccaggcatctccactgcctgaacggcatgtaatcgcatccttaagctgttatacatagtgtgttcgctatgtaattagcaaccaaagcaaagaaattctcgaataaagagcatgcataccctttttcagggaaataacatgcgtacttagaagtaagaacaatcaagaaaaattaactgcataccttacctagtagtattatagctatatgatctataatcatcgaagataggaagatcacctcacagacgactgcagctaagaacgcaagacgtctgaacccaacaatgaagaacatgcaccatgaatatcaagaactcaagacggagatcgaagttttaatggctagaggaagcctccaaaaggatcgcatgatccgtcaagctgcttgtagacgacgaccgccatggaagcgagcgagagcgatgaaggatcaatgcgatccctttggatgcttccccaagacattgctgctacaccggctggcccttctctctttctctctctgaattctgaataagtctgaaggtctctgcagaggcatggaggagagaaggtgttgtgcaagaaagctccagtgatgaggcccttatatataggtacgcaaccttgctttgcccataagtttattcacatttgctttagttttcctcccaaaatggaccaatattttatcctcttccaatttaagtttgcccattcctccatgatcacactgtaaaccataattaatagtttggttcttgaactgtaaattaacttgttaaaaagtactacatgccaaacattaaggggacgttatttatatatattatatcatatagtcataattaaaagtgagatctataattactgtgttttgttgtactagatggtacgttcggttttgtaatgatcaagaaagttgttagtagtggacatcaaaatcaaatatatgaatctctagagggcgcatatgcgagataacattgttaataagtacatgtttatggtttgtttatgccgtaatcaattatggttgcatcattagatgaagcgtaaactggggtggttctccccaagatgcctttaactttcccctaattttagttctttctagctagctagtttgcaaaatgggctttgcaagaagcaatgcatatggatgatttgattatatacatgaaagcaaattaattaagaaagttggatgactgtatcagcacctgccagatcttttggtgattagggacaccattttttttagctagattaagagatgcatgtggccctgggaacaactaattgcagccattcaatcattaaattcagccattacaactgattccccctacccttctgcttatgtgcccctaaactgctttttctagctgctattctttcatcagttgagaccccttgaagcatcttttgcctcttatcttaatgacaagtgcttactagccttttgcacagtagctagccttggttaatatattgaaagaaagggtcctagattgcaagtagaatggcaaatgtcctgcagatctgagtactaatcctgccttatatgttaattgtgtctggtacattcgccgtttgtcatgttacagaggttgttacagtgtagtaacatgctagaacaataatgtcacttttgtcctcctgctgttgctttcccagttttgctacagtgctgtaacatgcatatcatccaggatgaacaaaatctagcagaaatagcagttgtaggccaacattcagacagttctcagaatgttgttgtaacatctacaccattatgttctgctctttgtaattaggaattgttgaatcctacaaaaatggatactgtaaaggttgcccaatttggacaagcaagtaggagtagacatttgagcatggtagattggcactagtggatttgcttccttctctacaagatcagcatgggtacattcactaggaataaataaataaataaataagtgaaaaaaagccataaactcctcctatgcatatactgcctttacagatgtcttcaggaagatgtacccatcatgcatgcagggaagctcttagtattatcaattgtcagaagataatgaatgccataagataatgaacaacactctttttggatatataatcaggaactgcatgatgaatgaaatgcaggtactacatgttacacctctcccaaagttaagaaggttagaaaaaagatttacaagatgatgtgtcatatgtacagtgataccttggcatctaacactgctgatttgtttgtctgtcttgatttggctctttgtttgtgccgaaagaggagatgtgaatatatgatctgccatgtgcattcatatgattcctcctgacaaagtccaaacattcttttgtgtgtgatcaccagatgcaatcttatctctgaaagcaaagctcaccatcagctccttgtagggcattgctcattgctcacatgtgctcaatccaaccagagtttctcaattcctacactctccattcacaacagaaaccaataatcaatttttgctgcagtgctagctagctgcctcaacagcatgaaggccatgcactcacatgtaaagatccacacaaaatgggcatatgttctactactcacatgcaaaggcatacatgcccatgttgctatttcgtcgctcatgatgtgtgaaatgtgagctccgatgtatcggagtcggaggtgcgaaaaagtatcgcaggccgacggttcttcgacgcaacaattattgtagaaattcagggaattcaggactagtagactgatgtgaatgcgctggaactgaaagtctgaagagctgttcaacaatgtattccacactaacattgttgatctcaggataagcatatttgaataatgctatttcagtcaaaagaacatgtgactgcaattatatattcagtaatacttggtgtcctaaacctaccaacattcagaagactggatggaaaaacttgatgaatactactgtactgcacatcatctgcactaaagaaaaataaagaaagaaaagaaacactttggccactagtttctgaaatcctaaccaaagtactgtattaatttgatctctgattggtatatcaaactgtcacaaactgaagctagttactatactaacatataaaatgagtatcttcatgatgattgaaattgcgatcgaggaggatcctgttggcaatctgaaaaacaaagatttgcctcacctaaaaggacggccgttttcagatgttatttttttctgcaagattggccgtctcacctcacatgcatgagctgcaccagaaagaacacaaaatacgtcgctgccgtctctcgttcagcacatggattgcagcacgcatgagctacgaacctcgtgagcatttctcccctttcttcccccaatgattgaagagtacacgccacagcaagatcgccgcccaaaatttggttcagagatttttctttttttctttttcttggtttctttctaattactttcttccagcttgctcaactttatggtcattaaccaaacaaagatgccctcaattagtagcactaactgcaacctgatctgatctgatgacggtttagatagcggcccaatcatttgcgccgatgattagctagccacagccggtactgtattatgaaatcaaccaatttgctgttgagttggttaatcatcatacaatgtgatgattacatatatataatcacactagctagctagacattatggatcagccggccaagcttagactaatttcatgagaaattcaagtggagcaactggccatgtaacacttggaagcatgatcgagcatgccagttggactagcattcttttattttttttttaggaaatcaaatttgtattcttttcagtctgaaattagttagccgttttttaggaacaaaatgtaaggaattcaactccaatgttactgggcctacatgactaaggcccaactacttcatggcccagactttatttcccagatttcaagctgggcttttacataggcccattcccttgcctgttgcgcagcaggtcgaatcgctgcattttcagttcaaaacaaagctaatttgaattcgatttggtttactgcacaaaataggaattgaattgaatttgatatctgcaagtctagtatgtcatatattcttttttattttttgtcaggtcggtcaaaagttggctgacctaatttcattaagataaggagaagattaaactgtcgagttgggcgtgggcaagataagccacccctgcttgctctaagtagtcaacaaatctaggataaatagctggcaattgatcatgccattctgaagcttctgcagttctgctccatgccgagcggattgatgcagatcagtcatggcatcgataacattttaatgtttggatttgtgtgttacctttgattgatgtgatactctcctgccaatattttttgaaaatggaaccactgatgatcatgggaatttcataagtagatatgaatgtaaaaagttccaaggaataaattatatatagcttaccgtataattcccgatgcctttcatgcttatgatatagtcttcatgggacagtttttgggcacgcatatacactgtccaatcgtgagtggaaatgcttgtgtgattgagtgatgaattcagtccatcctcttctccattttcattatttttcttttttttcgaagtattttcattatttttcgtttccaaagggaaatggaaagcaatatataggccgttgatttcgctacgagtaataacaaacagtacagatgaaactaatgctacgcgcaggcacacctactagatttattttttttatatagtaatccattacctaagaagaaaatctacacgagttttgatttaatacccaattatcaaaacccattgtttcaaaacacatcttgcattttcaaatgaaatgtaaatactacacatgactgccaactaaacaacaacaataaagttaaacataattgctagagaacttctacaagttttttttttttttgccttcaaaacttttagatctatgaacctcatatcacctcgaaatttatgcatgaaggaaaaagaaaatttcgcacttgtcacacgtaagattctagtgcgagccaaccaacctatagttgaatacaagttttatataagttataccggtaattgcactgcagttatagtgtagctatagtgtagttataatgtaattaaatttcaattatgttatagttatatctgaaagtttttcaaatttgcggcagatttttaatactcccaagttaaattaaactatctcggctgtaacaatgcttcattcaggcaaacgaaaatgttcagatcaagagagaatacttgtgcgtgcacgtttcgaaccacacatagtttaacacttgcatgctcaggatttctgcagcgaaagaacagaggaactgcactgtgggactctgaatagccgttctttttttttttttacggatcaaatttcattaaggttcagtgaatgcccttttgtcagacaagtatggaacctcgtttgctcatggctaaacttggcaggaggaaatgctcaacccccaggcggaacatccaacgaaatcgatcgtcacggttcaaaagagcaaaagctgaaaacaagaggagctctcctcacaacatggtggaatatttggttggaaaggaataataggattttcacaagttctgttagatcagagatggacgtagcttattttgtcaagcaggaaattgaccttcgtagctcggcttttaagcccccttgatctgtaatttttaattttattttgctcgctctggtctgtattgtacggtttttctttctctaatcaaattccggcagatctcctgccgttgatttcctcaaaaaaataaattcattaaggtttagagaaaatagttacatgagtataatctcaatattaaactgccagagttatgagtggctgaacaccctcaaggaagaaaccgagacaaagaaaaaagaacaaagactacatctcctcacgagattgcaaaatgcccgcagtcttccaaatagagatttctacctggacatcattgacgagcttctccgccaccttcaactctgtgtccaaacactctcctccgtttcgctctttccaaacgaaccagcacactgactccgaatagccgttcctctcgtcatcttaaattaggagcacgaccatgatgctgcacggatgatctaagatgctgtacaacttttcacgattagtcgaagctgaaatttccccaagcctctcatgcttattgctttcatgcatccacacacgttaacagtagtaaatgtttaaacgtgctaaaagctgcttcttcttcttggcaagctatgtgcagagaaaatacacaccgtttttgttcagttggttaatagatcctactgtataactgtcttgctacgcttcgggggaattgttcaaacccaggagcgattttgagaaattccacttgttctaaactggttgtacatattatatgtgcacatggtagctagcatgcatctcgtgtatcttgagtagagaagaagagatgccaaacaagtgtaggtgcacctccatttacatggggcttgtttagtagagcttcaattgttaaatttagctataggagttggatatggagtgaagttgtggagcagcctaaatctagctccacctctctagttcattgtgtgagaacgtgatctagtcagctccgctctcattttgggtggagctaaaattgtttggctaggtttcagctccaggagagatggaggtgtaagtggaacaatgccaaacatgccaaatgccaatattattagtgaaatccatgcagctctgaatatataaatgtagctatacctatacgaaagggcatgtagcctagtggttacagttacctgagtagtaccctaaggttctgagttcaaattttctatggagcgaatttcagattgggttgtttgcgtggctaagttccctatttcaatggccgtatatatccggttggatgtagaggcagggtaaaaaatacccttctctaaaaaaataattaaaaaaaagctatagctctaagtagatgtgtaattaagatgagctagcatcaagagagtagctaaattgattaggttgttgttcttggcagcttatggattgtgaattatcgggggcaagtttccaaaattttcttttaaaaaaaaacttatttatcagtatttttgaaaccagctttttcaactttgtaaattttaatttgttcatttgtgccccttaagaattgtcagaaaattcagttttagccattatatccattagcagggtttacagaatgattaaccgacgaaaaaaagttcagttttttttttctgaaagccggacttcccgggccggatcgataatacaaaacaattaaattacaggatactaattaaattacaggatggataatctctcctagtttctttgagcccgcgataattcgatcttacttagcgattatgacccgcagcggagtagctcgatcgttggctgaagatacactcgtttctcccctatcattagactagagcgacgattaggattatcagacctccaaattcttttctgataattttcgaacgaattccctttttttactagagaaagatattttttacctcgtctttttatccaattagatgtattcagccttttaaataaagaacttatcctctaaaacaacacaatctaaaatttgctcatatgaagattgatatatgcagtcttttaaattaggaacttagccccttaattaacccaatctgaaattcgctactatgaagatttgaactctgcaaccactattgtatgccctttcattgggtgtagatcctctggagttggttccgaatccaccggatggatttcaggtgatccaagccattgtttaatttcaatggaccagattaagcaagttacttgcttttctccctatctctacgattgcacacatcatcctagttaattactattttccgggaatataacacaaagttagaagcagaataatacaagtagttagatacttatatttcctagagaatgtagattgtaatattaccgccaatagattgaatatatcattaggagatcaacaccaaaaagaaaacatggcacatacatgatgcattcactatgccatttaattatgcatatatagctcatcgtcactaggatagcaaatcaaaacaccatgattaatcattctgagccgcgtgaagaaaaaatttagtcactgtggctgtgtttagatctaaagtttggatccaaacttcagtccttttccatcacatcaacctgtcatacacacacaacttttcagtcacatcatctccaatttcaaccaaaatccaaactttacgctgaactaaacacaacctatcttgtttctatgcgatgtcatatcaagatacagagaggggcttcagttctcgtgcatgggattaggcaaaaagaaagtgacgtggctaccgtctatacctcctataaagaaacaaatggtccagatttgtagaaatccacccggtggatttggagaactaactccaggagccgggatctgtacccgtccagatcattgtcatgattcagaagcagttcctctgcttccagcgggagtgaccttttacaatctggcacgcgtgttccggattttagtccagtcgttgacgtctcgacagagatgaaatttcctgacgcttctcatgcttaattatgttcatgtatccatgcaaacataggcttatatagctatagcttgcttttctctccccttaataattacctctgatataactattttgctatgtcgttatggagaatcgttcaaataatcacagaagaaaagctatatattttgctactatgttttaagctagcatatatgcatctgggatccgattcaggtgcagtagctagtatgactgcatgataaacagtcacactagcatcgcacaatttaaaatggacatcccagatatatctgagcactgtagcgatttactgtggaagggtactgttctgattttactgtgccgaatcctttttggtcgttagattttgacatggagggctcggattgcgtgcagtagttaccgtgcagtcctagtagctactgcatcagatctcaatcccaattatgcacctggtatgttgagcgcacagaccaggagagagaggcaaaacaagctagtgtgtctgtatatatataggcaaggagcatgcacccacttattatacatccctgtaaacatatgggagtagtacatatttgctacttcctccgtttcaggttataagacttttctagcattgcctatatttatagagatgttaatcaatctagacacacatatatgcatgattaattaacatctatatgaatatgagtaatgctagaaaatcttataacctgaaacagaggcagtagctgtaaacattacataattaatgagcattatggactagccaattaatcgagagcgtattttcactgtatacatcctttctggatgtaaaggccagtttaacccattacaaaaataattgagagcgtactacttatctatactttcgtcccattaagtgtaccttacacattccaatcaatacctttgacaaaaactcgacaaattaattagtcctgtagaactaatttatttttttttcaaatcactgcaaaacccacccaactggttaagcatttccctcgccaaaaaatgtagttagaaatttctttttagaaacaaaataataggaattcaactccaatattgttaataggcctacatgaccaaagcccaactacttgcggtgcccaaactttcctgaaatcaaagctgggcttttccttaggcccattccacccttgtctgttgctccggtggaatcgctgcattttcgattcaaaacgaaagtggatttgaattcattttgccaggtcagccgaaaatcgaccaaccgaattgcattaagaagataaaaaatcgagctagttacagaacgatattatactgtcgcaaaggtataagccccccccacccacccccgtcgcaaaaaaagaaagaaagaaaatccagaaaaacaggaaccaggagaaactcccacgtggtactctctatgcttaaacacttcagcttccctccaaatcagcatttcatctctaatggatctgtaaacttgcgctgttgcgcaatctttgtgatcaaagattctcgagttgcgctctttccataacatccaacataccaacatggcacctgtcgccaccattccgtgaagtgttcccctccatcctccggaaaggaaaaggagaccccgagccaactccttaacattctctacacactgtttgtgaattgacagccactaacaagtgttgacagcttgggttgtttcagatggagtgaattttagattgggttgtttgcggggctaagttctctatttcaatggccgtatatatccggttggatgtagagaccgggtaaaaaataccattctcttaaaaaaaaaaagtgttgacagctcccctccacattgttgcacaaagcgcaagtgtcactgtgcggcgcccaccctcttttctgaaggttgtcagcagctaaaatctcgcaaaagaggagttgaatccatagattcttgccccttgctgggtacggagtcaccacatcgcacggtaaatgaattgatcttcaacacgcatgatctgagatgctgtacggcttggatcgatctgacgaagctgaaatttccctaagcctctcatgcttattgtattcatgcatgcacacaagctttagcttagttatatattggggccttattaatcaccaaaatagtagaacatatttaaacgttctagcttcttcttcttggctagcttagctatttgcagagaaagcacacaccgttttttttggttcagttggccaatagactctctcgtactgtaactgtcttgctcgcttctgaaaaattgctaaaacccagaaaggatttggagaaactccccatgctctaaacttgagttgtgatgtatcttgagctgagaaatagaggtcgaccaaactagtgaagctgtatatataagcatacaatgatatatacaagggtatacaatgcagtccggccatgtagggattgcactaataaatttaaagcatacagtacatttaatcatttattagaggagatcgaatagacacggtgccgcatctgtccagcagccaggacaatttttagatgcgtgcatcaaagagatcaggctactattacagaaatggagctcctagctagccaattaaccgagaaacacaatgaacaaacagagggtatgaggagttatgtgattgtatcgtaacagtagcaatatctgtgatctctaaattcatgatgtctccaagtcccatgttgtagtatatgggcgaatatatatgcaatggacaccacaatgcatgcataaatttcctatccatcgctatgatctgttctagcttggttgccaatatgtttatctcatatatatccacacatgtagaaacgtggggagattggctctggttggcacactatcggtctgagatatatactactagtatcccgggtttaatctttccgtttggatgtttctatcggagggtaccgatatactgaaatttccaaaaatttgaataaattttagtcaaatttgaacaaaatttcgccaaattcacaaaaaattgaaaaaaaaactaaaattttttgccaaaataatcaggggagggtccgatatgaccgtgaattttaaaccctgctagtatcatgcactgggttgatgcacagtgttgatattcattgggtagctatgttactcagcaaggtacaatcagttgatccatgcatgagcagtggttaattaagattcataattggatttttttaaggaatacctccttaaatatgagacattattgtgaaagggtaattccctgtgttctaaattggttgtatatgtatgtgaatggtgtatagtagcattcatctagtgtgtatcttgagcaaagaagaaagagaggtcaaacatgtgtaggttctaataaaaaaaaagtgtagctgattggtggtgtccatgcaaacatgcttccatgcacctctctgtattacaccatgcacatactctgaacggtttggcagagctgaattactgcggccatccttcttaaatttatactactgtttccaaaaaaaaatactatctatctattatatactaaaagtttatgaaacatcctaaaaacgctcctaagtcgatacatggcacccctaaaaacgctcccaagctgccaagtggcgctctaataaattagataaacatctaatcattgattttcacttagcttggtggacccatcagttttgaccattagattaaattctcatctctccaccctaatatacgatggttgcatgctttggtcccaccaaaataattagttaagagtaaacaaacgcggagaatcagttatttctctcccgaaaaaatcaccgcagtattaattcttggaaagaaaaccgacgttgtagatttaatgcaggagcctgggtgtgtgcttccctcatccaaaaaattataccatcgaaaactttttaagtgaatatcacctttgcgtcaaaaaagtgaatatcactaactgctctaaactatttacagagttaggttcagattcatgaatattgccctcaatagttagtttctgaatttttgatgtttctgtttgattaccagggcctgatgaaattttcacagatgctaaatctcactacattaaattctcatctctcctccgtaatatatgacggtttcatgctttggtcccaccaaaataattaattaggagtaaacaaatgcagagaatcagttctttctctcccgaaaaaaaaatcaacaaataaattttcagatgcaaagccataggaaaagaaagcaatgcgcctctagcttactttttcgaccaatatcaacgacatccatctacattttttcaggaacgagcagcaacaactaaggttgaaacaatcctaatcgtatcaaacaggtgagtgatgcaagcagcaacttccatctttttattgtttgatctcttaacatagccttccacttctctatttttttaagcatataatttcgcttttttacctacaattttatactactcctcggtgatgttcgtattctgatctgttgctactagcttctacaactaagcgatatatcaaagctcttgcctcttggacaatatattcactaattaacatcgggtatttgggtgctgtcagtttatttttgagcacttagtcaagacgtcttgatgctgcgtgctttgccaccataaatttgttaattgattttttagataatcattttggaaaggtaatgcatgccgcttttttaggagaaacatattacaaacacatgagtttatatacacacgcgtacacttatccatagaaaacatattcgagagactgagccaatgatatatcttcaaattagtgaagtcatcataaacgcctcgctattgataggaacgttgcctactaaaaaataattagccataaatatgagacccatgtcaagtctagatgttaaacctaggtgggtaagttccaccataggtaactaaccagccacactcactaattgcagataatgtggagcccctcttccctctccttaactccttttttccatacattatttgagataaatgtagtatataaataatagataaactattgtaatttttaaattatatatacaatttttttattcgaccacaattatattctgtagaattaaatcagttcatatcgatttgaccaattgcgttatatctcacagacaaaaaaaacacgaaaacatatgttatagtgtcatatatcacattataatcataaataactaaaaatagctctaatatgtttgaaaataaagtttactacattatgttatttaccattaacttaatatatgatctatattgactatactttaatctgtaaaataaaattatattttaggtcatatttttattcttggtctgtaatccaaacggacatgaaaattattaaaaaaagataacagtatggagtatatatcactatatattctttatcggttataataatatgtaccattaaattagatttacaatataacaagaaacatgtcgtatctttgcgctttacatgtcatttgagaattataacaaaacgtgaaaaaacaatttaatgatatgggtaatatcatcacataaatatgcttactatgtagggtgcactctatttggcccaaatcagttcacaaatatgcgcgactgaattagatttacaatatcaacaagtagcaagtcacatccggggccttgcatggcaatcaagaattatgacaaatcatgacaaaaaataacaatatggattatatgatcatataaatatacttatcatgtggattccaatctattcggactatacggggataatctaaaatgtcaattcaatttaccaaatcatgtataagttgtacgttttgtagactacaccctaaatattaagtaaaataacggatggagtacacgtcgtgttttctcccctttgatttctattaaatacgtatggtgtgtgggtattttgtatatactaagtttggttaattagggaacataaacaatactaaagttatatatgagaattcatgcattaaaaatacacttcataacaagaacttacttaacaaaaatgtactttagtctatggtgcttaaatatttataaattctctaaacatactaattatttctgctcttatttcaaactaaattcattttctctacataatataagagatcatatgagaaaaaaaagaggagggagaagaagtaaatagaagtctgccattgaacagatagaataaagacatctataacatacaagaaaatttgttgattaaggtttataaactccaaatgtaagatatgctaatttctaaaaaacacacacacatggtacacataatagttccatatgaagcaacactattgttgtgaaacaatagtttctcataaattaaaaaccacatggtttaaataaatttgatttagaatttatatgttgaaaggtaattagaagaaaattaaaagcgacattcacaacaatctcaaataaattattgataaaaaacatgttcagaatagagtaaaaaaatattttaagaaatactcatccacacataagtattcataattaacattaaataaggtgtcccgcgcatatgcgcgggctacctttctagttgttgtaaaaactttattaataaacatttatctgaatactttttaaatcattttccaaaacttactattatttcattaatttggttgtgccctttaataattttgtcacaaactcaattttagtctccgcttaaaaaaaacacaacctagaaaatgtatacagttagggggcggaccttggtttgagccaggccccacaccagcacaccggataatcggatattgggccaaagagaaattaaaattacatgggtgaaactgcatgtatctacacgagctttgatgcccagatcagaggcctgcgcattcccttgtatgctgatgaattctaggatatcggcaagggaaaacattattgttttcttaatttttagtcttaaaatgaataggtcctgagatctcccgcagacatgcactgatgttccaagttcccgtctagcattgcccagttggcccaatctgaaattccccgatgactctcacgcttaattaaataaatatatatacatgcacgcatggtcacaggctattagcttagcttgctctttattagtacaatatatatgtttcgttactctttctagcttgcataatctggggtttctcttgagcagacaagaagagatcgtcgttaaagtagtgtagctgcgtatatatagacaaggagaacagtagtcgactagctgccctggggtctgatcgagttctcaattcaattattatattgtattactccatccgttacatcgtatcatattataagtcgtttgatttttttctagtcacatttgtttaagcttaaccaggttcatagaaaaattagcaacatataaaacaccgaacttgttttattaaatctaacattgaataccttttgataatgtgtttgttttgcgttaaaaataataatatatttttctacgaacttgatcaaacctaaaaaaatttgattaggaaaatagtcaaacggcttatcgcatgaaacggatggagtaatttttttttatatataggaattattattgtagtactaaatacacacatgtatgttgtaaatagttaattagtgtgagtgaaacatgtcagatgaattcagttcatcctcttctctgcttttgtttcacattttgtatctttcactgaaaagtaaatacgttttgccctggaattaatgtgcatactcattcgttccatagcagttacacagtaaaaacaaaacaagcaaatttgaattctagttccaagccaaatttatcatcttaattgatccacagaagtccctgaatgacatattgcgcaatcagacgatcggatgttgagagtctgtcctgattgttgggtttagtctcaccttggtaattgatgatgggggagcacgacttaaaaggtgggggcagtcctcacccatcagactagtcttttgagttgtataggttcaggagttaaagttgtgactctggttggacctgtggtgaagcaggcccaacgtgacttgagtggtccacggtttgtgggccgggctgcgcacttctaacactcatgaggtagccgtttctcatctcgccgtaagagtgatctaaatttatctagcacgaatgatccagggtgtgtttcagcaataaagctgaaattccctgatgcttctcatgcttaattacattaattcatccatgcacgtaaacacaggcttatatagctagctctctctcgtttataattacctctcatatagctattttcctatgttatggagaaatcgttcaaataatcgtagaaggaagaaagctgtttttctagtatgttctaagctagcatgcatctagtgtatgttgatcgcacagacaagatgtgaggcagaactcaagtgtatgtgtctgtatatataagcaaggagagcatgccgtcccactcattattagccctgtggatcgcactaaacatacaggagtagtactctgtcaagaaaaaaaatcgtagctataaatttggacacgtatatgtccagcttcatgattagaattaggtttttaatgtaatggaggtggttatttgctacttcctccgtttcatattataagactttctagcattgttcacatttatatatatgttaatgttatacgagcattattggattagccaattaattgagagcgtaccttgtctatacttccatcctatctagtgtactggccttgcacattccaaccaatactatagaactcgacaaattaataatatctctacacaaaaagaactcgacaaattaattcgtccgggttaataaaggggagatgagaatttgtcccatcacattattttttattttgatttatttttatctttattttttttgttattttaataaatttatggctgtgttttttacgacagaagatggagatgtaacctatttctattacccacataattagttagtcctgtagaactacttcaatttttgcaatcgctacaaaactcaattggttgagcgtttcccttgcaggaaaaatagtcaggcattttttaagaaacaaaatagtaggaattcaagtcgtacaggcgctggtatgtttgagtggaaaatgtgagatgaattcagttcatcgtcttctctatttctgttctattgttaaattccaaaggaaacaagtggaaagcaatgggtcgttgattcacgagtattaacaatacagatgcaaattacttctaaacgagttaatggcatattcttttttttttgcggggaagttaattgtacattcagcgagcttaaatactgacatcgatttaatggacaaaatttcaaaatccgcacaattgtaatacatttttaatttttcgaaagatctataaacactatacttg

SEQ ID NO: 19909 - DNA, 6534 bp, Oryza sativa
ttgaataagacgaatggtcaaacatgtgagaaaaagtcaacggcgtcatctattaaaaaatggaggtagtaataagctaagattatcttctcttggaacgtaacgttgcaggtaactatagagagaagtagaaactagctggtcaattgctagctagcttaacatgtcaggtgcgatgccgaccaattgtcagcaaatattccggaacaagtctcagaaaagtgcacatatttgggatcgactgctcaactcactgatcccaaatgacgagtctcttccagctatatagacgatttatgtgttgttcctctacatctgaatcatatgcactggaaccagcgctgtgagaggcacggaagcagaacagtttgctcaaggattttaccgtggctcatcagatatgcagccactgaacattcatattccccttgtctctcatacctaacagtttatagcttctttgcacaggccgatcgatgtagtttaaacagccacaataatatgaatttgtctgaaactctgtagtctgtacacataaacatatggagtactatatctttatgatggcacaacgcttgctagcttgaagactaagctggtggcaaacgtcaagcctatatatttgcgactgatttgtattgattgtgcagggttattttgtaaaacattttctagtttaattattttttaattggaaatctatattcatgtacatgcacaatggattattccagcctatatatacataaagttggtgtgtaatcaaggaaagtgcattgattatttttgctagaaatttcatttgtgtgtagtaccattttttgtctatataaagccagcatgactcagactcatgactctagcctactctactgccagcgcttgctatcgtccgggtagtcttggtcttagccattttttgtgttttctttcatgtacttagagccaccagatttgttttattggaggtagatgatataattggcttgggaggcattggtaacatgagaagtattgggtagatagagagaagcctggcatcaattttattaggaaggaaatatgaacatactctctagtattgggaacataggatcaagccagcacaacaaatctgtccatgaattgctgaccatgcagtaggtaacatggaagaactatctactgcgaacaggcgaacggcgatgggtacatcttcgtcaacgatcttcagccagggaagtaaatatcacgctgaagggttaatttgatccatgtcactctaaatttgccgatttgaaaaaatgtcactattatttgtgatatcggctgagtgccattgggtacgagtccgggtcaggtaacggctaggttggcctgtggaatctttcacaactgaagatgcccgctcctgatcaagttacaagagacagagcagcgacgaccgaactattgtcataccggagggaacaaaaacggaattttgtaaaattgaaaccatgtcattgccgtcacatttttttttatcttcttccttcttctcttttcttcttctccccgtcagcaaactctttgatgcggcggcgcacaggcggcatgggcggcagtgtcgatgcccagatcgggacggactagggcagtgcacatcgagcatggtcgtcgtccggtccttaggtggatcgaggcagtgcagtatgacgacgggctcctacattcttcggaggcggtggggctggcaaggtctataacgacgcagatcaaaggctgacggggccagcaagctccatgctccgcccgctgtcttcagggccggctctacaattttgagggccctagggcaaacttgacaacatgatccttaacgctctctcccctatagagagacgtgttatatgtatattcacattttttgggttgttcagattaatgtcattttgtcggtgatatgggaccgggagtatcatgaccagaggcttgaggcagacgcaatcgcccacgtggcctggcaccttcggggacgtcgggcccgagggtgaggtgtccgccctcctcctgatttcccccgagggggggggtcgggttgcgcttgccccggccccgagggccgaggcaccccgaccccttaaggaagtctgcgccacatatatgggataagtgagcacagctgtgctcacctaacagcatttattgcagtctggtcaagcgtgtcacgctgcatgcaacgcagtacagcgcgttcctttatccggtctgtgaccagtcacagaccggtcagatcacgggttaggtggcggctggcggtctgacgcacgccttgccccatcccgtcaagacgaaagcctctaggcactcgtctcaagccggagctagggtgttatctcttagagatggcacgttagccctggtcagatttataccaggcttcatcctaaccattacaggcaaggtgttacacgaagaagggcaaacatgcacgttgttaagctgacgcgtggtggacaagaatgaccggtctggcactggtcgcgtcatcgacagacagccacggtcccgcgtcatctctgtcttcgggggaggtgggggtaggtgtgggctgtcccatcagaagggctcccggacagcaaccgtgctgatctccgcccattcaagagaaaaagaacagtccagtttggaaagagaagggtgcatgtggtatccccttgaagtataaaaggaggaccttgcccatagagagggggttggttgattctttcccagattatgagcttagaacgggggagaagtcagctcacacttgtagctcattcatacgcagatccaccaaaacacaggagtagggtattacgcttctcagcggcccgaacctgtatagatcgtcggtgtctcgtgttttctggctggcatacgatatttccacatacagagagagtgagagcttgagatttcaccctaagcccccggccgaactggcaaaggggggcctgcgcggtctcccggtgaggagccacgagctccgtcatctggcgcgccaggtagggggctcagcgtgtgttttctgagctctcatactcttccgtgtgcgccaagtttcccttgttctgcctaatggccgagcaagcgaaggcgcacgacctctctccgagtgtgagcggcgacgacggggagccaaacccacgccgtcgagctcgtactcccccacctccacaccaaagtcctaagcagggggaggcgctcgagagggttgataaatccgcagcatcaccggtcgcgggtgatgcaggagaacggcgagatggggagcgacgcctcctcgtctacggcgacggcagcacgcctcagggcgcgcttcaggctgctggcgcgctcctacgtcacccgcccgtcgtccatgaccctgagtctccagctcagcgatggctggacaacgtggccaacttggtcatgacggcccagcagcgcctgggtgctggtggacggtccgccaccaccaagacctccggcgccgccaccaccggttccgtgtcatcaaggcggagggcgcggcgagcggcggcggctgcacgtcattcggctgccactccctcgtcgacaccttcgactcgggaggatcagcatggggagccggatgcccgcctcaacatcgagcgccggcgtaatagccgacgtactccccgtgcaacggagggcgcctcctcgtccagagtgtcacctcgacatggacgtgaggaccagccctccgtgcccccggctggtggtatcggctgtagagcctttgtggcgagtcttcggaatgtccgttggcccccaaggttccggcccaccatcaccgagaagtatgatgggagcgtcaaccccaccgagtttctccaggtctatacgaccgggatcgaggccgctgggggagacgacagggtcatggcgaatttctttcccatggccctgaagggacaggcgcggggttggctaatgaacttgccacccgcgtcggtccactcctgggaggatttgtgccaacagttcaccatgaactttcaaggcacatatccgcgcccaggtgaagaagcggacttacacgcggtacagcgaagggatgatgagtcacttcgctcgtatattcagcggttctgtcaagtccgcaacaccataccatgcatccctgcacacgcggtgatctacgcgttcagggggggtgtgcggcacaaccgcatgctcgaaaagattgcctccaaagagccccagactaccgcggagctttttcagcttgcggatcgagtggctcgtaaggaggaggcatggacctggaacccctccggtcccggagtggcagcttcggccgcccccggatccgctgctcagacagggcggcgggacaggaggaggaagaagaggtcggcccattccgacgacgagggtcatgtcctcgccgtcgagggcgtttcgctggccacccgaaaggggaggtctgcgagcgacagaaagaaggccggcgctccttgacctcgactacttggaagagcgaaggcggcgcgcggccctccgagccgcgcgctaccagcagagcctgcggcgctaccatcagcgccacgtccgggcccgatcactctgcgtcgacgacctcgtcctacgccgcgtccaaacgcgtgctggactgagcaaactctcaccaatgtgggagggtccgtatcgagtgatcggcgtcccccggccgggctccgttcggctggccacgggcgacggcacagagctgcctaacccgtggaacatcaaacaccttcgtcgcttctacccctagtgggggtcgggtgtcaggtttcgggctcgggccaaccccgcacccccccgggcgtgcagggttggccgggggcttatcttttttctcttccgtatttcaacaaaagcattttcgatttcctaaaggctgtgtctgtgcttttgtttcctttttgaagaatcttgacttgaaataggtcactcgtgctcaaccttgccctcgggggctcggttcggtcagctaaaatcgccaaacggggcccagaaccgagccgtgccccggggcgtggtgaactccgagggggaatcggcaaaaacccacaatcgggtcacccataaccctcggtcaccacgttcccggcctggccagtctcgacatgtggatctccccaggcactagccccgacccgagccatttgaggactaggacctgggcacgagcccttgatcaagccaagacacagaaggaccgcggcacagaccatcctcgtctcatacacacaacaaatagaattgacatagaaatttcctctttatttggttgcagattaaattagtctatacaagaagggggcccgaaggcctcggaagaagaaagaaaaagctattcaagattggcgggggcctgggggctcactccgacgcgcccgggtcaccagccttgtcgtcgttatcgtccgcaccaccgtcgccgccctcctcgtcggagtcgagggcgaacgcgagccgaggggccgtaccctcgaagctgtgaacgatgtggtcggcggcgtcccggacctgcgcgcgtgcgccgtcctcggttccgaaagggaactcttccagcgctgcccacggggagaagtcagggtccgagaggcccccaagccgaacggcggcccaaggcccccgacggccagagttggccctccgcctgcttgtccgacggtgtcaggcgcccccgaccctcaggatagcctcggggccactgcgggaaggccgcgcctgtcgccctcttaccccgaggatatcggcgcagaagccgagggcgccccgcgctgcctctcggatgaagagcgccctggagatgcggcccctagcgaagaggatcggccccgccgaaaggtgcagcggcccgtctactttgttagtgaggccctccgggacgccaaaacccgataccctcgggcccagaagatgctatacgctattctgatggctccgagaaaagcaccatcaccatatctccaggcgaagcaaatcggctcgcccagattcgtgcgctgctcaggtaatgtggcagtcttgaagagaccgcccattatggacagccaagtcaccattaccaatgtgcatggattgagaccgttgggtattttgcccaactacggagaccggtcccacctgtcaccaggctttaggggtggcgtcacacctgaccgcttcccttgggaagggaaattgctctggcataacgccgggggctactgtcggtgatatgggaccgggagtatcatgaccagaggcttgaggcagacgcaatcgcccacgtggcctggcaccttcggggacgtcgggcccgagggtgaggtgtccgccctcctcctgatttcccccgagggggggggtcgggttgcgcttgccccggccccgagggccgaggcaccccgaccccttaaggaagtctgcgccacatatatgggataagtgagcacagctgtgctcacctaacagcatttattgcagtctggtcagcgtgtcacgctgcatgcaacgcagtacagcgcgttcctttatccggtctgt

SEQ ID NO: 19910 - DNA, 32592 bp, Oryza sativa
  unsure (1)..(32592): unsure at all n locations
cagaatgctcccaaatctcaatgtctcattggtcctcctctgaaaactcaccttcctgattaccatggtcttctcatggatatatgtattggcatgtgagaatttctctatgtatgtctactagaacgtctcttgatttttgtgcttccatagcataataataggcctaggaggtgtcaggagcgtcttaggttttaccctttctttgctagctacgatcaggggtttgtacagttgttcgatgtacatggaatttccttggaatattcttttgctagtatggcggcatctaatccaaattgcgctctctagagttgaagctggtagaaatacatcagtacgagacaagatgaaagtgtgccgatcgaaaagaactgggagctcagagtagatggatcaaaacacggatccttcgtcgctggcagccgtcaccggagaattaggaggaggatgaggcaaaggcagcaatgctcgctttcgggagaaagcatcggaggtgttgtgaaatgtgaaagttctaagcctcacattgataatggtttaatcaaacctaagcaataggaaagaacataagattagaaagtctaattatttgcaattttagcaccaaccacgcagcaggcgcagaagattgcttattaatttttctttttttacattatgatcgcttattaattatgaggtgatattgtcaggcctcctcgagaactaaaaacagccatgttaataggctaatagccaccataaagctcactctgtgactatgtggcctctctgtttcgcctatatgaagtctagatgattacagtacatatatgctagtctgctcgcaatgctcacattcgtctccttagccttgctcggtctgcctctagatcaaacttttgccgtttcttttacttgcatatgttttgcatcaccatacaagatatgttttatgtgcatatcatagtgggcttgggaggggtcgagaatgaattcagacagtggaggcggttcagcatcaaattattatgcacatgtgcacaaaacatatgcctaggtttcagaaataaacaaggaattggtaagaacaatatgaaccttgcagcaattgagggttctggtgaaaccgatggagacgacaaggctggagtgcttgatctcatcgctgcttgatgttattgggagttttcacccccaagtaggcgttggctgatggtgaacaagttggtgacctgaaggaagcttgatcgtagtgttgcttcttcagttcggcgttttgtttcagtactgttatctgttagctagatgtttggatgcagtcctgagatcttgtcatctggttggcctgcatacccattgttgcgtgaaatttaagctggttcccagcaacaattctatattgctttcagtcaaaagcagagcgtaaaagccttttttctaaaaacaaaaaaaattgatccttggcaaacagaaagtttatcgaagatcggatagatatactagaggttccattttttagtgaaaaacctagaatcgctaaagggaagttaatgaagatatatattttttttagaataagatgaagatgacatttttgtgtcgctaaacttttcagtaaactttgttttgtgtggcttcaaccaattaataaaaggtgagcaaatccaatactagagatacactaataaagttcttcaacttcttgatgtcatgaaagagattagacattcagagtctgatactttgtttcagacagacagttcaggattggcatccctttttctttcagaaactttgtattactttgctcagagtcctacattatgcagattatttttcttaagttcaatccaaatgcctgaatgcgtttgcttaaatccaacttattcattcatcagcaacagcatgtgcaaataattaggcatttaccattccaagtactatacagtttgcagacactgaatatcactttggtcagaattcatgtgcagtgatgtactcccttatcacaaatattagcaaaatatatgtatgctccatccattttggaatctataaaatctcaatgtctgctctcaatgatggacatctcacaagccctgctcccagtgccacttgtctcagtatgctacacatcgatgtatttcttcgaaaatatgcaataggcttgggaggcatcaggaatggatgatgctgcaatactgtatcttttcaagttattttacatatccgcacgccaactcggatcagctgcagtcaaacatcaaaaaggttgcattttgtatcagctttgttgattcagggccatatcaacttgttcatgcgagtctgactgtgagacagcggttcgactgctgcaatcaaagaaaaaggatcactctcctctggcctacatcatcagcggagcgaaggatctcatattgggagtgagaacttattgtgacaaagattcacaggccccaaaatggtgttagtcatttgttagctaatacagctaggtatgagtctgtttcagacttttggttggaggaaaattgtaatctaatctcacatttaagtatgtgagggcatttcttatgagtaatatattcccccttcccgcaaaaaaaagaaaaaaaagaaaaaagaaggttcatgcggccacaagttgaacagaggtgttacttgtattgaagccttggccgggctgctccagggagaaggaagccaacttttcaaaacaacatgtcatgtcgggatttcctgtggtttctaatttaaaaaggtagcccagaattgaatctccatttgtgatacagttcagttcaatcatcagagactcccagcccatgtgactaatcgttgacgatcatatttaacacagaaatatcagcagtacctcgtttcctgcattttcaacttcaactaatgaatttgaggtgaccgcgtcaggacatgcagaaattagattgtaaaatgtttgacaaggtttggtacatatgcatatccgtgtattaaccagctgacataattctccagatggaagacaatgcatcacgtttcaaacacccaacccacattgctgccacagaagcatatagaatcttggtaatacacatattcgtttaccttgagagtttcttttcccatccttgcaaggggcgttacatcttacgacacaaaatttgagcataatgctcagaggtgtacacggatggaatactcatttgctcttcttgacctatatggtacaacacaagacacatatcaggtaaagctttatcctatcaacacctacaaaactgtctggcctgtagtcactctgatacagttcagtctcacagtaactcattgccagaaatctctttgaagcgtgtagccattttgtaaagatctcagctctcgtcgtcttcgtctatgctggagagcaagctcttcagggtctcataggtcatgaaggcaatccctacactaggaacaaccttcaggtactcagggactatccctctgtagaagccacgaaggccttccttctgaaagatttggcggatggttccagttatgcttgatttacagactgacgatgtcccagctgccccttgcagttgcattcgtctctttacaagatcaaggggaaatgtggctgcaatatttatagcattttaccaatggaaatgctgtgagtcagtattcagatgacagaagtcatggtgttctttattcaataaagttttacaaaaataagaagaaaggttaagaggagttaaacatggcttaccagtagatgatgcaataccagatagactcccagaaaacaaactaacaactgcaggggaatcttggggcctgaagcacgtccacagccatcagttggaaatgaccaaaatagatactcaaatattattcaaacgagagaaataatgatgtattgatgttcacctttccatttgccaatgagacctcaatgattcatatacagtaaagctgattgctatgctaggtccgactccctgtaacttcaaaaattacaggcagcccaacttaaaaattgacatatctcagtaaaaggttcatggcctaccaataatgtggccccaaggcccttgtacaatcctttgacaccctcatctctacaaatggtagacactgcatgaaagatgcctttgtaatacctggttgttttctgcacaaatttaagattaaatttctagtgaatgccaaatatgaagcctcccaatagttgaaataaagtaaaatacactaagcccgaagcctgcatcatacaaaaattaatattttggagatattaaagatgatgtttaaattcatcaataagcaatgttttatttggaaaaaggatagcattacctgtgttgccaaacgagtacggacaacatccaagggataagttacagatgcagcagtaattcctgccaaaccgccactaagtaaacgagcaacaccaacataatttgagtcttcatcaaggccaggaaccctttggagaaactgcaatgatatttcacatcatttagctaatgataataaaatgcagaacctcatcataattcatgcattaagtgctaacgaactgcttacttttttgtagcgctcatatgaataaaagctgatggcagaataaggtaaacgatgcacaattgtcaccagattgcctttccaaaatgctccaaatccttcttctcgaactattcgtgaagcttcatgccatatgctgtacttctttagagctgccacatctgaatgcatacctgccacctgtcagatcagtatgtcaagcacgtgcaataacaaaccttattcagtagttataatttaatctaataccaggcacagaacagaaataagtagctcgttattatgaagcaggaatcacaaggtttagacacatagttaagcataacaatgccatgcatcaactctgtatctagtaagagaataggggaactccatatggtatcgatttgctgcttttgatgcacgattggaccaactacctattgttgaccaattattttttatacaaagtgaggtgagaacactttatatcatgtatggaagtaatttgagcactaatcagtatgtacaacaaaaataccaaattagatcctttctggcacctttacagtgaacaaaggaatacttaaatgcgcaaaaaacaatatttataagaagctttttcttcagcgacacacgatggtatgttcctgcctctatacaaaccactggctgccatcacattgggaacctatttttttcctataaccctttgaacaataatagactgaaattaaagaaacaaaaggaatacttgccttctgttcctgttagatttcagtccctgctaactggaacgcctacaatggcatgaaaaggattgttccaaactgccgttagccttgtgcgggcacaaattgaggcacgtatataataagatttccataggtgcccaaatctccaaagttttctaacacgctaagaaaggaaaattattcttcagtgcgatattttgcatctaaagttgtcaacataataaatacaaattttaccggagaattgaactagtaagaaaatgtcaatacacgaaaactctgctgccgtttttagcttccattgacgactaacaatctaacagcaagatgcttcactatagtacctcactattacaattcaattcctttcaaggtgcttttgtgccaagcaataagtagcggtacagcgcttataaacaaagaaaagcttccctcaggcttacattttcaccagtcactactcactactggagtactcccaccgtttctgagtgacaaaagaagtcatatttgtcttatgctttctttactcccagttccttattagggcacacaggattccaaaacaacaacacatggtatgctgtactacaattgtactggtttcacccacaggaagagaaatccctatgtgttcaaaagggagactcctttatggtcaaatcatttattaaacacatgttaaagcaacacacaacaaggttattagtaacaaacgtcgtagctgctcgtgccaaccaatccctacatccaaaaaaaaaaaggaggggaggaaacatcttcctccccgaattccacttgcgagacaaggaaaattaacaaaattcgcctccgcagtagcagtagctcccaatcccctcctcctcctcgccgtatccagtacatccacccccaatactgcccgtacggacgaagagcgaaatctcaggcagggaaatgctggggggacgcgctcacctggaagaggatggtgaggcgggcgagtggggcggtgcaggtcttgctgacggcgccggcgaagcccccggcggcgaggtgggcgacggtgccgatgtggcggcggcccatggcggcgcggccgccgtcgacgacgaccccgacccgcgcctccgtctgcatgggattcggataggggtagggctagggttggaatcgaggcgaagcgaagcggctggtggtttcgccgccgcctggaggtgaggtgaggtgaggaattcgaagcagagagagagaggggggggggaaggttgggcgcgtagtgtcatccacctcctcacgtttgttttaccctaccttattttaataatgataattttttttccattattgtgtatgtagtacgagtaagtacatgtttatgtttttttaaaaaaaattttgtgatgtggcacaaatttgagtaaaaactgaaggaaaattttgagttaaacatataaaagatattttgtttgggtattgaaatttattttgtaatgcgtaatatgttgttttttttgggaaaaatataatgcaaatgtgcacgcttatggccctgtttgggggagcttatctcagctgcagctttttccaaaagctgcttctgctagaagctgccccaaacagtccacaacttttgagaatctgtagttatatattctgaaaaatgaactaagaagctagaacctggagaagctgggtttagaactttttcagatcagaagctggctaccaaacagctgcttctcagaatctaaagctcccccaaacaggccctatataggcacacgcagattgttcccaacaatcggcacacgcaaatgttatccatatgaacatcctcgagaaaatagactaagattggcaaagtcaagtcacaacaaatacctcactattgatcgtcattttgtttattactagaaaaataattaattgtaaatacgatcatctgttatgagtcggagactcaagcccacatgtaccaaaaggaatttaaccaacggagcgtttatgtcatgatcttcaaatctaaattgcattcatggagatatactctgtgtgaaccaaatgtcggagcaaaccaaattcggtatatcagtatatgtcgtttaaccttttctttgtacgttgaaatgacttgttggtgcaagctagtatcaaattgatgtagaaaatacgctaaactaaattaatcaagtgtgctgagagttcaccgaatttggcaagataaggtcatgtattgaggacatgtctagctattggctaagcaataattaatgaaaaatgaacacatcattataacttgtatatcttgtccaagttgcaatgtcatggattcatgaaaacagatgcagtaggaagaggataggcaacagcctgaaacaggaaaggaagcctgaaacagcttaggcatttggccgcccctagttttcttcagaaaaaccagctgaaaccttgccagatcatgcagcattgagcatggtcaatgtcacctgctagatagtgtcattgtcacttgcgacggacagagatgcttgacgattgtggattaattggcctcgttaataatgccattataaactctgaatatccaccatacttagttttgtcttgactttaagcaataataatatacttaaatcagtaagataaaagtatttacttttataaagatccttctgtgatttgataagacgttagcaactcgatcacacatgtcattatcaatatttttttcaaatctggattatcaatgattattcgcagaagtgttctctttcaggctagcaagctgtaagcctagcagcgattaagaatgtgactctgggcttctcgatggtacaagaggatcgatcagcccattttgaggcccaaaattcggagctactacgaatttggcccataagtagagaacggataataaagcagttgggccttcggaacgggatactggccaacatgcgggccagatctactctgggcctccgtggctccaagcgagggagcaacagtttccggcccacgatatccgaagcgatgggcctcccggacgtatggaacgttgggccttcactaaggcccaaagtttacaacgcgaacacaaagtccggtccataatccgacgaaggcctttataggacgcagatatttgggaggatcgctatcaattatagcgatctgtcattcttacatttaggtccctatctggatattaactttttacaatcaggtcctcgtcggcctcgtcatcgtcgtggatccatgggctactccgtaaccgcgaggtcgtcggccgctacgccaatccacccatgacttcttcatcgccctgcttccctcgcaagcatattccgatgatctcgccgtcatggagcgggatgccgccgccattttaggcgctcacggtggttgtcggggtctgggagtgggagtggacgacagttgggggcggtaagcagcaaggccacttcacggaggtagcggcgccggaggtggcaggccgaggtggaggcggaggcggaggagcggcggcgccggagatggaatcgagcctcgtgagtcgtcgtcgacggcggcggcggcgagagagacaccgagcccgtatcggtatcagatttaagttgggccggaatccgattccagcctatgtaaaacaaacgggtgaataatcaattaatcatattattcaaaatgtggccgattcaaatgtgaataatccgattccaaatgtggccgaaccaaacatattattcaaatccaattcggactacactaatcgattcctactacgaacggatgaattatcatggcgcgagttacaaatagctaagcgaagctattgttttattgttaggagagcttacaagggatcaaggtggtaataattaattaacacatccacgcacgtacgcgtaagtgtctcactcgtagggcaccatggtgaccacccggagcatggcagtgagggaaaagatgatgaagaggaagaggttgtcaccggtaccggcggcgatggagttggcgctttaccacgataacatcgtccacgtcgcctgccttgtggctgctacctcaccggagccaattgccgacctactcagtctacgtgctacatatgttaacttgttaatataaacttatttatatatgtatatggaaatactttgtatattgactgtgtgtgtattggtggtaaacacgtactgcagctgcaaggccatgcacgcggcggtcaaggagcgcgacgtcgggaaacgtgtgcgctggagaggctagataacatgaagtgggtggagaacgagcgctacctcgtcgccgcggacaacccggacacttgcttcatcatcggtgtcacgctcgtcttcgcacagcaggacatggcccagggccttttcctccttgacaaggctgccaccgcgggccacaagacagcggcctacgtgctcggcctcctcctctacaagtccgatgaggctcgcgccactgggaaaaagtacatcagccaagttgagggcgacggtgatgaggcggcgacgaccgatgccgggaacaagaggaccaaccaggagtgccgacggtgccgaaagatcgctgaggatgccgtccaggaggtgatgtggaaggtcgttaggaggcgtggccaattgctagtcctacctgaggacaaccaccagtgcacaaccatcggttgtggtctggagttgggatgggaaggctacgaaggcttttgcagtgacagttgtaggattaagcatgaatactccaagttcttcacagaggtgatgaactacttgccatagttcccaaacaaccaccagttgtggtctggagttgggatgggaaggctacgaaggcttttgcagtgacggctgtaggattaagcatgaatactccaagttcttcacagaggtgatgaactacttgccatagttcccaaacaaccaccagttgtggtctggagttgggatgggaaggctacgaaggcttttgcagtgacggctgtaggattaagcatgaatactccaagttcttcacagaggtgatgaactacttgccatagttcccaaacaaccaccagttgtggtctggagttgggatgggaaggctacgaaggcttttgcagtgacggctgtaggattaagcatgaatactccaagttcttcacagaggtgatgaactacttgccatagctgtgaagaactacttgccatagttcccaaacaatcagaagacgtgtgaatttagagaaaaactatgtgttttcagcaaattagatttgcatgtctggtacttttaagtaacgagtgcacatggctaaagggaaaggaatgaaacaaagcaacatcagtgtagatgaaaatcacagaatatcctaactgaagcatttccattggttccaacatccaggttcatgactcatgagccattatgatactgccaaaaaacttggtcacgacaacgaccttaaacgcctaaataagcatacattcacaattcatggtccatgtatacttatagaaaggagcggttcacagccctcaaaactaatcttatggcaaggaaatgattgtgttaatcattaattcctaacaaaatccttcagccgcctcagccagatgaggtattctcggctgtccttgttgatcatgtactcgtgtaggaagtttgtggccatgggcgtaatcccgcgcatctccaggtacttgtggaatgccctttgcaggttttcatcaaggtcactgcagcagacaaagggcaaggtgttgaacattagcactcggtgacagtgattagttgaagaatttgagtgttcaataaatttaaatacactaggtttggttttcttacttgaaatcagggccctcatacgtgatcatttcatcttccccactctctgatggcatcacagacaaggcatcgatgaggatctcatcaggataggcagtgcagatgaattcaaggcttggtccctcttctcccttcgagatggtgacagttagaggaatgctagattttggggccttctgagtttcttcctcctgatcatcctcgtttctgtcctcatcagcctcattctcacggtcaggttcatcgccagtcacaagactgggcatggaaactagaacctcaatattctcaccctggtaagttcttgtgagagtaattgaattaaagcccttttcatcactaattttaaaggggaagttgtcaggaatctcctcaacctgtgtcaggatgaaaaagaaaatgaggctctcagacagacagtgacagaaaattgctcctggaaaagcatggaaattgttcaaagcaaagatgaaagtaaaacatagtgttctcagaagaaaaatataactgggagttcaattatttctgaccctcatggtttctttttgcattgtatgtgtacaactctacactaaatcatgccataattaaaatttgatgcaagactagatcaccagaacgagatgcttgatgtcaaaacagcagggattgcaaagtcttatatctgtgtgatagaaactacacttcctttgttggtttttcttctcttcaaacaagcaagaaatatcaaacagtgcatgatgcaaaagcatggatgcttttaggcttggaaacttaggagcataacccaaaaaggtcgttagaacaccatttttccagcccaagtacataacattaaattgaccagcactttaatgcattaagcttatatatgaatacaaaatataagtatgtataatatgcatagagtaatcaagctggcatgaaaacttaaactgtacagttcgagaaaaataatcaggtcccctcaaaaactcaagaaaaaggacagggactagacacaatgattcataaaacaccaacagagttttaagcagcagaaaagtttcaaaataaaagattttagaaaccaacattaatagaataagactacaggggggaaaaggtaataataaagagcacaagaggttataataaagaacacaaggaacaagagcaaaaggaacattgagttcttacacagagaaacacatgaatcattgcacaaaattaagcacagtacaatatgatcaaacacaaaaatagtgccataactgcaaagaagtgacacccaaaatatatttataatcaagagatgttgaggttaaacatgggcatgaaaaagtggaataccaaatatatatttgtaccaagtactacctcagtctcagcagagcaatgaccacgctataaacataataacgctaccaatatatccttgtaccaaaatactaccacacaatctcaacagaacaataagtatgcttcacgctaccaattgcagaaggaagtagaagaacaaaatacctaaaataagtgagtaaataacagacgcccaattcccactactgaaatatactaagaacgtaatgcaaaccagcagatgaactatctaacaaaggcagggctgctactttgattccatccatgctaatatgaacaaaattacagaaaataaaggggattcaggatgccaaaaaaaaaaagaggctcttcttttacgacatacggacagagcgaaatagcaaaattagtgagatcccgggaactcgcgcacgcacccggtcgtggtcgtcgctctcctcggcgaacttgatctcggcgtcgatgatgcggaggagctcgccatctgagctgggcctcgtggagggggccgacgagaagggcatcgagcgaggctgcggccgcgccgcggcggcggcggccagggggcggagcagggcggcggcgccgcgggtggtccccgcggcggaggcggaggcgcggaggagggggagggtggaggtggcggcgcggcgagcggcggcgaagagagccatggcgacccgtgcggcggcgcggacgaaaggttagggttttcgggggtttaggaggagtttttttctggaagatggggaggcgagaatttgtgttgttttaagaagggaattttttttttaaaaaaaaggtaggggcatgggccccacctgtcattctgtcaaaacttggtcagtatgttcattcgatctataagcaatattcttcgcttcttggagaggaagaaaaatagttctgtcgccataacttattagacccgttcctttttcattaaaatttaaattttacatcgattttccttagcaatattttttaaacggctaaatggtgtatttatatgaaaactttgtatataaaagttgctttataatatcaaataaatctattttttatgtttgtaacaattacaactcaattaatcatgtgctaatggattttttctatatcctaattttgtattcattttcagtaaaaacaaacaccactttactcccttcatcgaaaaaacatttctagataggaacctcggcataggcatattcaggttcgagatagaagtttttttttacgcagggagtaaatgttcacatttttgacaaaaatgcaagaaactgtgaaaattcaaggttttgatgtgggacaaaagctattccgtgtgaaatttttgaatcacttttgagaattcaaatttgaaacattaaatttgatggggatttttggttttaccaaaatttgatgaaaaccttcataccattaccattaggagttggaatccggcactcaattgaaaagtnnnnnnnnnnnnnnnnnnnnnnnntgcagtggagcctaactcccataattttgaggtgccaatgactatctccttagtttaactcaatttgatcattccaatttgtaagctagctattcaataacaaatagtattatacatgatgaataaattgcattaatggtacatcaacttaacatgcaagtgcaatttagtgtaaaaacttgagaagtaagcgtggtagcgcaacaatttgatatgtgggtacaatctagtacaagaatctaacaagtgagcgcacggatgcaacgccttgcaaggttggtgtgatttgctataataacataagaagtgatggaacaactaaatcatttcgagcattttttctatactcattttgtttttttacttattttgttaatatactgtagatttctctaagtatacttaatttgtgtcattcaggtaattaaagtatacttaatttgtgttatatggtgggacaagtagaaagggcaaaatctccttatattatgggactgagggagtagtagcatctacgcacagtgacacccttcgccggtgaccatgccaattcttatggacaaggactgaaggacaggggacaacgaacaataagatgaatagatgatgggatcagggctggatcggcggctggccctgcatctgcatgttcctctcttgctcttcgcgcagcttgcgcctcgtcaccagctccatctcttgctcttcgatcagcggccgcctcctctcttcctcctcaagctgcatatgcaatcccgagttaccgccgcgcgactggagcgggtctaccacatgagcatgtgtcagcagagcccataggatcgttataaactcgccgccggtcgccatcctggtggcgtgtgccaccgccctatccgacggggagatgtacagcatcaggttcgcccagaaagcggcgagcaccttccaccgctctctcgtgtcctcgatcctatcgacgaggtacacggcgacactcgcgccctgagacaggatcttaagcacgttcaccgtgtcgttgctcgtcgagttgtccagctcgatcatcttcttcaccttctcctcgtcggagtcgtagctgtagatgatgtccttgcttttctgcgccatctcgtggtccatcactattttcgagcgccccagctcgatcagcttcttgtacttttccccgtgggacttgcagccgccgaggaagtcccgggcattttgcagcgtgccttgaactgtcgacgtgctcctgtacgtgttgtcctgcactagctccggctggaacgctagcaggtacgcgcagtaccctgacaacttcattgcgacctcgtgattcctcgcgaactcgtcgtcggtggtggtagcgccgttctccatgctcagcccgtagtcacagatgctagtggcaatgtgccacttcaggatgtaattagcgtatgggttgccgagcaagacgtcacgatcgaggtccatgtcgatgatgcccttctgatacaaccacatcctcccgtcggtgatgttgccgttgcagttcttgagctcacggagcacggcgtggctcacctccggtgtcaagcggatggagcgagtcatcagccatgagtccagggccttggcctcgatggagaaccatgataggaaggtcttgatccagtgaggatgaatgttgtctaggaggaagtattggccgatggttcccttccagtacctcgtgatggtactgaaatggcacaacaccttgagtgggacctccatgagcgccctgtgccatgactcattgcgcacgtaccgacacatcatcttcaccttgtgccaatcagagaagatgaaggtaaagaactgataggactcgaggaagatgtaccaaacgattaccaaacgggtgacaaggaggtcaaggttgaagccatggatgatgatgttgctggcatctccaccgtctccgggaccaggccgaagcggccggtatcggagaaggtccggggagaagagggtgaataggcttgtcgtgaggatcgcgacatacacagcaaggtcaggagccaggctgttcttgatagatggataacgggcatagaagaaatcaaagaggaacccaagctcggcctcgaccacccggtacgccctatcgaggtcttggtcatcggcgaggagccccttgacgacgaagtcccatgacttgccttcttggaaagggagggcaaaacgaccaacatgatcgacggcaaaccttaacctgagcatcttgaagagggcgaaggacaggcataggtcccgccgccgcgccacaccttgatcccttcgaccgtcgctcaacttcagcagtttccctttgcattgccagaccttctcgacatccaccgtctccggaaccccgtaggctacctgtttgacttgctgcccgaactccaccttctccacctctttgccatcgacgaggtagatgtactccttcatggtttcggggtcatagttgcccttacaagatcggacgccggtgctgctcggtggctcatgctctatgtaatccaacacgacctggttctccttggtgagcccacgggagcgattcgtcgacaggtacgccttgaccctcaaccccaaccgcaccacgctcaagctccagatatagttggccatatggcccgaggcccgatggcccagcccatggcacgggaatttggcccggcccaagcacggcacggcccggtagcaatcgggcccatgccggcccggcatgactattgggccatgcctgggcctatggctgggcacggtgggccggcccggcacggcacggaccgaggtcggcacgatgggccggcccggcacggcacggcccaacggtcggcacgaccacggcccgtaccaacggtaggcacgagcacggcccagcccaacagacagccaggccgcgccgtgtgcgcccgcatatataagccagcgagcgccgcccctcccctccccagtcccctctcgcctctcgctctccgcctctccgcctctccgcctaaccctaaccctagccgccaccgctcaaccgcctccgccgatccgcctccgacgctccaccgcccactagatctcctcctccaccgtccgccgctcactcactcagggcctcaggcgcgcaccggtgagactcaccgagtcgcctcccttccactcttccagatccagccttcctcttcgtctccgatcgatgcctcgcctgactcgcatgaggggcgcatgaggatgggggccaccggccacgcatggtcgcctgagtcatcgtccttccactcttccagatccagccttcctcttcgtctctttcccttttgttcttcttcgccagatcccttggtcttctcgtagatctctgagcctatcgtcttcaacggcaactctggtgctccggctgcgcagttacaagcatggaaccatcatttttcttttttttttctccatttccgaccctaaccttgagtgttgttggctgcttgcaggtcgcaagcccgttgcttagcggcagccgccgttgagggaccagagtgcctgcgatggacgacgatcctacctctgtcaactacgagttgaggactatggggatgcgcggtgatgacgatgatgatgtggaggaggatcgtgtggaggtgttcggcaatacctccgacatcccgatccatgtgaatgtcgatgacgacgacccgccggtcgacgacagtggcaatgggacgccgactggctctagtgcgacttgtaccaacaagaagaccaaaacctccaaggtatgggatgactttgaggaactttatgaaacgaccaatggtaatagggttcgagtctctgctaaatgcaattactgtcataaaactttgagtgctcgttcttctgctggcactggacatttgcttaggcatattaagtcatgcaaacctagaaagcttgggtctaatgctttgcctcagtccatgcttagatttagtgcagatggttctgttattccatgggaatatagtcctgaagttgctaggtttgaattgtgtagattgattgctagagaggatcttccaatcagttttggtcaatctcctgcttttgtgaactatattaaggttgctcataaccctagatttgttcctgtctctagacaaactactaccagagatttttataagttgtttaaggatcgtcgttctgttattattgatcgtctcaattctgctagctctattgctttgacatctgatatatggtctggtcatgctaaggaagattatttgagtgttgtagatcactttgttagttctgattggcaattagaaaagagggtcttgggtcttaggcttattgatgagtcacatactggtgctaatattgctgagcgtgtgattgctgttgctgaagaatatggtattactgataaggttttctctattacattagacaatgcttctgctaattctaaagctatggacacccttactcctgctctgtctggttatattggtgatttatttttgcatcaacgctgtgcatgtcatatcatcaatttgattgttaaggctggacttgacaagttcaagcccatgctaaatgacattagagctgccatttcattcttgaatgcatctaatcagcgcattgctacatataaaaatgtttgcattgctgcgggttatcgtcctcgtatgtttggtttggacatggatgttagatggaattcaacttatctaatgcttaagcatctcataccacatagggaaccattcacagtatttattagtacacaacatccttttgttaatgaccatccattactcacagacttacattgggcatgtgctgaatctgttttgtgtttccttgaacaattttatgattcaactgttgttttgtctggtgtttattatccaacatctccattaatcatgcatcacattttagagattgctggacatctaaacacatatggcaatgttcaaaaccttgcaaatgttgttggtcccatgaaaactaagtttatgaactactggtctaaaattccaattctttattcatttgcatttatcttggaccctagggccaagattagggggtttagtaaagtgcttcagattatggctcaactcattggtgatgattactctgcttatttaacaactgttagagcttcattgtctgatacttttgctaagtatgaaagaaagtttggttctgttagattgcatagttccactattccaggcccttccactggtaagaaaaggactgcatgggggaagatttttggttctgttgttgctgctgggcttggtgctggtaatgcaggtgccagtccaggtgctggtaatgctggtgccagttcaggtgctgggcttggtgctggtaatgctggtgccagtccaggtgctgggcttggtgctggttcattatccaggatgacatctgctactgctttgcttcaggcagcttcttcaactgctaatctcaatccttctgaactgtctgcatatcttgacagtgacactgtcaaccaatatgatgatgacttcaatatccttagttggtggcaacagcacaaactaacttatcatgttctttcaatcttagctaaagatgttatgactgttcctgtttctactatatcgtccgagtctacttttagcttaactggcaggatcatcgaggaccgtcggcggcgtctaaaccataggctggtggaaattctggcagtgatcaaggactgggagctagcagatgcaaaaagtcagcatactactgagaatgtggagcttcaaaatgcttatgagaatatgtatcttgatgatgaaattgatgtaaacccttgaactggatgattgtaattgatatgaacattttagctatgggctgtactcttttcctttctagggttttctcacgaggtgtgtgtttttacctagaaaggtttttaacgaggcaccattgcataatcacagcttatataaaccccttttatattctaactttctgaggtttgtgattctaagatggacttgatggaaaatagtagatgacttgatgtatgcatttgatgaattgatttgaactgattgtaaatctgtgagactgtgacttgatgaattggtgacttgaagaattgttcatttgtttgtaaatctgtgcttgtaaatctgtgacgtgatgtatgcatgatttgatgaactggtgacttgatgaattgtttgtgattctttgacttatttgatgaattacatgtgaatttcatgaatttgatgtgttatgtcaatttgttgtgttgaattgaacctttgaaggggtttttttgccagggcgtgcctaggccggcacgggcacaatgggctagccgggccgtcgggccagcccggcacggcccgaggctacttgggccgtgcctgggccgtggttgtagcccgtgggctggcacggcacggcacggcttgttcgtcgggccgtgccggcccgactgacctcggcccaggcccggccgtgcctgggccgtgccgtgccgggcggcccatatggccaactatagctccagaggaggaagaggctgacgaggaaggtgccacggagctggcctttgtagtagaggatgaggaagaggaggtagacgacatagagggcctggttcatcatggacctcgtctgctggctgctgtcgttgaagctgaacgccgtcatggtgtcggcggtgccgaggaggaggaggaagcaggcccagacgacgaatagctcgttctggatggacgactactgcatcaacccgattgtgtaggagatcaccgggtagttgaacatgaaggctccccagacaaggagcctaagtagggcgccgccgtggtggcgccgcctcgagttggataggacaaggacgctgacgaggaggtagcccactgtcactaggacctcgatcctcgccagctgcccggaggagctggaggcgaactgcttcccggcctgggtcgcattcctcgctgaagcaacaatttgatccatggtggtgtagaagaaaggaagcaaggtcaaatggaggagatgagagaggctaatgatggagtggtacagagcattggcgtcttggagtaggcagtctctatataatcgtcatgaataaaactggacgctccgagaagaccgcatcgaccgcctcacaccatcgtggagaaagaaatgactagagccaagtcaatatctatatgcacatggagagacggtagagtcaaaactctcatcaaaatcaaatacgaataaactacatcgatttacgcatggccagctttatatggttgattattgcacgcaactcgaaattaatacctctcaagcatggtaaaatttttcatatgtatacacatgcgcatccacctaatagggaattattctaacattaatttctttgtggatcaaggagttgaagacggtgctgacatcttgatacataattatggagtaaactctattgtcagttcttaaaattgtattgggatgtcactttgatccataatgttatgaattactcacctagatttgtaatctacgtttaatgtatcacagcattcaaacatctttgactaagaataactacctcttggttgttcgatcccggtggccgaaacttcacatttaggctttccaggtaaccaccgtgacaacaaattaaatttgcatatagtcccttattactaacattgcctgtatttcgctggtgagcgtgccgatggtgtattgcaggcttgcagccaatattaatagtggtcagtcattcccaaaaaaaaaaagaaaaaaagaaaaaaaagtggtcagtccacatctcaggcttcaccattggtgagagaaatcccgtacgtcattggtgatgatcgggacctaatgtatgatgctgcttcccgcgatctgtgagtgagtacgagcaattccaggagatggaatttttagaaaaatatactgtatattttataaatagaccctagaaaatttattacacgtatgaacccctaactcggcgccaaagtggagtgtgctgtaaaatttcaggaagactaacaatacagtatattctaactcatttccaataatttatttttatttatcaagacttaacctgggaagagatttttgaaaacaaaaggaaactcaacaaattaggtgcactgaatcatgatatattgatttgtgaaagaaccttctcaaatcatccagtgagccaggtatatgcatcagaatcctccaatgagccaagcatatgcatctgatctgcccacaattgtcattatactatatgattagcattcctccatgcaagccaagttgccaacggagaatcaaggatctaacaagttccatcagatcagggccggccctgcttgtgcccttttatcttcctcttcttcaagtagaataggcaatcccggggcaccgccacgatgttgaagcttgtctactacatgggcatgtgacagcagagcccaaatgatcgttacaaactccccgccagtggccatcctcgtggcgtgtgcgaccgccctatccgacggggcgatgtacaacatcatgtttgcccagaaggcggcaagcaccttccaccgcttcccggcatcctcgatccgctcaacgaggtacacggcgatccttgcgccctcagataggaaccgaacattgtgctccgtgtggtccaagcgccccagatccatcagcttatcatacttgtcactggcggactcgcatttggcgaggaagtcgcaggcattctgcagtgtgccacgggccatcgaagtgctcgtgtacgtgctgtccgggaccagctccggctggaatgccaccagcagtggtgtccatgctaagcccatagtcacatatgcttgtggcgatgtgccatgtcagtatgtaccgtgcaagacatcacgatcgaggttcaagtcgataatgcctgtccggtacatccacatcctcccgtcggtgatcttgccatcgcagttgttgagctcacggagcaccaccggcatcaagcggacggagcgagtcatcaatgatgaatcaagggcctgggcctcgagagagaaccatgagaggaaggtcttgacccagtgaggttggatgttgtcgaggatgaagtattggccgatggtccccttccagtacctggtgacagtgaaatggcacaacacctttagcgggacctccattgccatgactcattgcgtacatatcggcacaacatcttcaccttgtgccagtcggagaagataaaggcaaggaattggtacgactcgaggaagatgtaccagacaatgaccaagcgggtgacaaggaggtcgagattaaagccatggataaggatgttgttggcagcgttgctgccaatgggacctgtatcggagaaggtctggagagaagagggtgaacaagctagtcgccaggatcacgatgtacacagcaaggtcaggagccagggtgtccttgattgaggggtaccgagcgtaaaagaagtcaaagaggaacccaagctcagcctcgatcacccggaatgccctgccgaggtcttcgtcattggcgaggagccccttgacgacaaagtctcggcacttgtcgtactgtaaagggaagttgatatgaccgacatgatcggctgcgaaccttaacctcacttgtggacacttttcgacgtccaccgtctctggaaccttgtacgacacttttatgacctccccattgtccaccttctccacctcctcaccgtcgacgagatagatgtactccgaggagccaccttgaatgccagcgctgttgagcggctcgtacttcatgtactcgtacaccacctggttctccctgatgagcccatgggagcggttcgttcataggtacgccttgaccctcaagcccagccgcaccacgctcaagcaccagaggaggaagaggctgacgaggaaggtgccgcggagctggcctttgtagtagaggatgaggaagaggaggtacacgacgtggagggtctggttcatcatggacctcgtctgctggctgctgtcattgaagctgaacgccgtcatggtgtcggcgctgccgaggaggaggaggaggaagcaggcccagacgacgaacagttcgttctggatggacgaggactgcatcaggccgatggtgtaggagatcaccgggtagttaaacaggaaggctccccagacgagcagcttgtgtagcgtgaggccgtcgaaaccattcaatcagtttttaaacggattgaaatcattcaatggtgtattgtcatgaaaccattttttactaggctttagcgggagaaaccaaagtttgttgtcatgaaaccattttttgaaaagagaggctggccgcacgaagatctctgctccctctgccaacgggaggaagaaagctgcttgcatctatttgtaaaatgcgacttcactagacgagtatgggcgctgatgcaaggatggattggcattggcttcttgccgccgacgatcaacgactcaagcctggcagaatggtggatgatggcgagaaaatattttcggatgggctacaggaacatcaatatgaatctaacaattacgtcaatatgaatcttttaagagaatcaatatagactttattatttgctaatgaaaaagaaatgatatacacctacgtaccacatgggaaggagctgacaccatcgtgatgagcaaaaataacaaagactaacagctagctaagtcttctaaacttcattatttgcttaagaaaatgaagtgatatatatacacatctaggggcgagcttcaatttattcgtggatcaaggcgctgatcaattgctccctccgtccctaaatatttgacgtcattgacttttttaaatatgtttgactgttagtcttattcaaaaaatttaagaaattattaattcttttcctatcatttgattcattgttaaatatactactactactcaagtttttgaataatattcacaaatgtttttgaataagacgaacaatcaaacatatttaaaaaagtcaatggcgtcaaatatttaggaatggagggagtatttgcttacggccaaggccgggatgttatctattccattatctaaaaagttttgcttacggcaagaaaacgattgtgctaattgttacaggctaacaaaatccttcagctttctcaaccataggaggtattcttcgttttccttgtagatcatgtactcttgcaagaattttgcggccatgggtgtgatcccacgcagctccaggtacttgttcaacgccttttgcagactttcatcgaggtcactgcagcagacagggcaaagcaaattgcacataagaactcggcgattaatagttaagaattaattagactgctcaataatttaggttttgttatcttactcgaaatcaggaccctcatctgcgatcatttcattgttgtcatcctctggtggctgcatcaaggacaaggtgtcgatgacgatctcttcaggatgggcagtgcaggagaattcaaggatctgtccatctccctttgagatggtgacggtgagaggaatgctggatttggagggaacctgaatctcttcgtactcagattcatcgctggtccatcttttctcacatttgaccttggcagtggcaggctcaggttcatcgtcactctcaaggctgtccatggaaacctgaagctcaatcttctcaccatggtaagttcttgtgagagtaattgcattcgagccctctccataattgattttaaagaatttaaagattttaaagggggagttattagggatctccttggcctgtatcagtatgacaatgaaaatgaggccctcagtcagacagtcacagcacattgctctcaaggagagcatgaaaattgttcaaagcattgaacttatatatcatatataattgcgcagagtaatcaaactggcatgaatgtatagttcaggaaaacaatctggttatgcataatcgcagagaaaggtacaggaactagatagaatgattaaaacttaccagcagagttctaagcggagaaaaatttcaaaataaacgactttagacatcagcactaatagaacaagaatacaggagacaaaaaagtactacaattcataaggcacaatagcaaggcatattgaattcttatgaggaacgcacaaaaccttacacaagaattaaacaaggcacaacaacaatgatcaagcactaaaatagtgcagtaactgcaaataaataacaccaaaatctactataatcaagagaagttgaagttaatatgagcatgaaaaagtggaatagcaaatactccacatcattgtaccaaatattacctcaatctcagcaaagcaattgcaatgctgtaaacatgattatgctaccaattacagtatgaaaattactccttttctttaaaaacaaagttaaataactaatcccaatccctactatagcaacatagaacataacgcaaacaacatatgaagtacctaacggcgacagattgcttaagtttatttcatggtaatatataatacgactaaaatcaaaacaaacaaaggggattcaatgatgtcaaaagataattctctgatgatagagcagaagatcgaatagcagcatttgatttagtgagattcaggagctcgcgcgcgcacgcacccggtcttggtcgccgtcgctctcctcctcggcgtcgttgatcgcgttgtcgatgatcctgacgagctcactgtcgaaggcgggcttcgtcaagggggccgacgacgagaacggcatcgagcggggctgcggccgcgccgccgcggcggccagcgggcggagcagggggagggtggatgtggcggcgcggcgagcggcggcgaagagagccatggcgacggtgcagcggcggatgacgaaggttttagtcagggttttgggggtttacgagctgtggagaattggagatgaggacgacaatttatgttgttttaatatggaaaaaaaaatggaaaggaccattctgttatcaatcatgtttgtttgcttcttggagaagaagaaaaaaaaatcgattatctaccaaatatcgttatccgttaattaaattcaatcaagaattgttgtccattagtatagatagttaataaattcaattgttcttttacggattttctctttacccccttgctttgctcattatctaatcatcattgtcattatcagactatattactacctctattcacatgtttaagcattcctagtagcggtttaagttttgaacagacatccatcgagtaatttcttttcacatagaatatcatttcagccatcacaattcacaattccacacaaaattcagataagcagcaccaagaaacggtaaaaggctagtaaaataagcactgatatcataagtgccaatagcctcagattgactactgggcatcagaaatcgcacattgcagggaaggcagtttccccggttgttgcattgcttcgcataattctagtaatccttgttacatatgcaggtatgctaaaaggctaagctaccaaaaatcctgccaaattgctcggcaatttctcattgccggacgaagtccttcagcttggtcatccacccgacgtactccttggtttgcttggtcaccatgtaatcgtgcatgtagttggtggtcggcagagtgatccctctttgctccaggtacttgaataggcccttctgcacattcaccggtagctcgctgtagtagaaagaagcgattcgatgaggattatgagtagagatggtgctcaagaaggattgagaaatggagattgaaaccggtgttcttacgtgaattcagggccctcgtaagggaatttctcatctccttctgtggctgcattctccactattaacatgtcgtcgatggtgatctcctcacgaaaggctgtgcaggtgaactcaagtttgggcccagagcccttggagactgtcacctttagagacacgctgctatctccagcgctctcgtcttcctcttcatcttcatcatccttgctagcattcttgccctcaccctcggcttcttcgtcgtcaaactcagggcccccttctaaatttggcatgctgacaatgacctcaatcttctcatctttgtagtcccttttcagaataaccacactcatcccttcttcgtcaaggatttcaaaagggaagttttccggaacaggttcctgttgcaagaaagataaatgggtaagatgaaacacctttggaatattcaataacagatgttaaatgccttgatgtcaaaccagcatgtcaattttacagctagatgtcacacctgcagaggtaattttacagctttgatgtccattcattcattcacttttcagggttatgcggaaaggattattcaacctcaatgccagttctaatattgcccttgcctggagcttccaattgatcaaaatattgaacccaaaccatcacaaactctatcatcagtcccactatttgtctattccaaagtcataccgctttaaaagaatcattagaatggttcaatgatttgaaacaaggaaaacgcttaagaaacgatttgcttacacaagggtataagacttctctccagacattcaggtcaaacatgacaaaatagatgcaagaaagttataggatccttgaaaaccagatgagcattgcatagctgacgcagggaataaatctaaagtcttaacaactctctgaatgccagttgcaataaacaattgccaataaactatcacttaaagaattcagacacctagactaatggcttaagataaaataaataaatagaagatatcgatgcatgagtaagatgaacaaattctctattctctaactgccaccagcataccgaagtaacaatacgtcatcagtcaccaattgatctgtattaagagagaagcgccgaacgagactgcaaaagtaatctattttaggtgaaagcaatcgtaaatatatttcccaattgtagtgttcaattagctagagatgcccattatttatcaaccagttaccagtcgacgtgtagcattcacgcaagacagcactataatttgacaaaacctcaccaaaaattcatcatccccacaagacaaaatcactgtccaatatgacaaaataatatctcatttggcgcgccaaatcagtcaagtttcgatgacagtagtacagtatcgcgcaagagaagagcgcgcgtctcactctcacctgctcgtcgatggcgaggtagtcctgcgcctccctgatctccgcgtcgatggctccggggaggttcccggcgccggaccccttcttcttcttcgccttgaccttgctctccatcaccacctgccccgaagaggcgctcgacccctgcgccgccgcgcgcagggaacccgcgagcggctgccgttgcagcgagagcaagggtgttcctgcgcgggacgcggacgagacgccggggaggaaggcggcggcggcggtggcggcggcggcggcggagacgaaggccatggcgaacgcggtggcgaagcgaaggagagaagagaggagaggggaggggataagaaaagggaagaggggttttggatgacgcttatacctaccgtttagtgggacccatctgtcgctgacactacttgcctcctgtcctctttcaacgatttcgtttttacaaaaaatcaacagaacttgcgtatgggtttcttgtgcttgtgaaattaattctccttctccaaatggtctagcactatgatttgatacaacatctgaagctgtgtttggctcttgtagttggataatccctcgtgcatcattaattaattattaggtttttttttaaaaaaaaagtatataaaataactttcttatataattttttcgtgaaaatatatcgtttaccagttttagaagcgtgcacatagaaaacgagataaaaaagctaggaaaatagatttttttttaaaaaaaaaagaaaatagagagaagaaaacaacatttagtgtagtgcctggatcgattttcatcaaagaaaggaacagtcaagcgctgcatgacaattaaaggatcatcattgggcatcaacaagaacatttaatttacaagactttgctgtgctacacattggaagcaagtgcttagattacatatagtagtaaatagtattatgcatgtttaattactgtttctgattctgattgagagcctgcaatttggcaggaacaagatcgagctactatacaaacggcagagacagagacagagacaggggcccccatttgcaaggcctttcctgtcaattcatcctgcctttattattatcgattgataattccaagataagaaggagaaaaagaagaagaattaaaaacgcgggaattattactgtaattaataatcctccaagagaagagacgaccatgacatgacatcacaggagctgggcgtcgcggctggccggagaagggaagacgggcacctcggcgaagcggaggcggccggagtcggccgcgccgccggcgaggcggacgtagtagggcgcccgcggcgacgccgacggcgactcgttggtgaacgggttgccgatcggcgtctgcccgccgttggcgtagtggacgatcgccctgtacaagaacggcagcaacccctccatggcttcttcttcttcttcttcttcttcttcttcttcttcttcttcttcttgccaagcaaaaacaatggagctaagcaaagcaagaaccctctctacctctgtctctgtttggtggtgcaactgcaaaggataaagaggaagaaagagaggcgtgtgggtatttaagggcacaactgcagattagtataataaggtgagccttgagattttttttttgactaaactaatcaatgctgattagtggataacaactggcttagctttgctcagctaagctactagctagctagcacaaggaaatggtcaaatgagagagccacatcaattggagaagatgatgatgggatgcatgcacgcatgcctgtggacttgtggataggaaaatggattttttgtaagcagaacaaagatgctgtttacacttcagggggacacacaaggtgcattagttttttgtgatgaaacagctattggaatttaaggtgtcacacaggaacaaatcagggggcaattgggttttgtggtgactgctggtttctgattggaattaggtttaaaataggacagcttctgctgattctggtctgggtgttaggggagggagaccaatcctatataatcatataaagaatatcaatggctttgtgcttgaaggaagggaaagccacaaaaaaaaagggaaaaaatgatgcacagatgtggtttgaagacaagggacatcttacctgacctcaaaagggtatattgtaatggagtttgttgtgttttccctcttctttttctgtgtttgttagtgaagcttgcaattgaggcctcaactaaccctataattaagacaaaaaagataaaaggctaaatccgaagtctggtgaaccatcgttctcaggtatcccaatagaaagaattgggtcgactttaagcatcatccaagtcgtgagaatgacaccctactaggtcagagtagcagacaaagggtagatatatattttttctctctctcttgaactgagtacattacaaactgctcacggaactgcagctggttcaccaggaataactgtaacaccaagaagaataacagggtacaacagtgtgaagttcttacatatatatcctcagggcttcaatttgcacctcttggtaacacataatttaactttccaggaagaattttctagcagcatgtggcaaatctctctacataagctacctatgctcaaggctggctggctcttaatgtgacaattcctccgtgtaaaagaagcgcaagtcaacgggggtaaacaggatattgcttacaaaaccggcgaggcaacgatccaggtttcatggatacacatcacctagatcagaacacgcctacgagctaagatggaagatttgacagtctggtttgtatttgttcttggaagcagcctgctcaaacttcttcaatggcccttcattctctctcaagccagtctggataaagtatcgcgaccaccacgaagaactccgcaactttgcctgtgaaaaaaaacagtccatgtcaccaaacttctagccttcgatatagctcaattatttatattgtgttctagaaaatactaatgcatgcataacatcaaacaaatcaacggttattccattcctctccaaacaagtaaccatcaatagcattaatggacagcctaacagactaagcaatactagtcaataggcaacagcatatttgtaactgccaacatacagaatgcaattgaaattatattccatgatgtgatatactcatatactactgtataatgaaaagaacaccatacatgcaacatcgctacaacatcaataaaatgctaagcatgaatatccagaacatcggtaacctattaaaagcataaaaccattctacaacttttataagctgcctttctggatcatggacatggaatgcgtcaaatcaatccttttgtgtcagtacggtactggtcttagaggtcatat

SEQ ID NO: 19911 - DNA, 15886 bp, Oryza sativa
atactccacagaaatgttaagaaacaagcactttaaaaggtccaaaagtcaaaccatactagtactagaataaatgttacagtattgttttaccattctcatttagttaaaagaatataaatatcattagtatggggctatgggcttattaggatgcatccaattaaagagcactagaaataccaatgatgattgcacaaccaaacatcaaataaacgaagcttcattttaaatgtaagatctagggaaaatgaacaatcagtatgctatcacttcaggtctgaccaaactaccatgacatttaaaacgaggggaatcatcatgtacatctacaaatatagccgtttatgtgtcaactatgatcatcaacaagtatgcgattaactcaaagaaatacataccggcaaagataacaagaccatctgtagaaatccttgctaaatctggaagtgttttgttcagatatcttggggtcaaataatccaaagcatctgatacgataacaaggttaaaggaatcttggcggtatggaagagggaacttgatatcagccatacgaacaaagcccttgcgcacaaggcttttgcagctactatcagtatcctccaaatcataaggctccactccccatgcttcaaccttcccttccttcaacaagttagaaactactgtacaactatcagggccaacatggagaaccttatgcaactcattgccatatgcctttttaagataaggaagtgcttgcatgacttctggtgtacaagaacctgaatgcaaatgcaaaggaaaggttgagataatgagaagcacaaaacttttcccaataacacgtgtgaaaaggaatacaatggagattcctaaaaaaatcaattactaaaccctcccagagagggtcttataagttataactatcatgttccaatatattttatcaaaatttagagggttatctattagtatcatgaagcttaggataatacagtaaactgcgttgctgtttgtaccacacatcagacactcagacagccaaattacattggtatgacagtgtcaaaattcagcaggggaaaaaataattatcacatggtccatgttgatcatgtcataccagttgaattctttatatactgttcatggcctaatgaagaataacaccgaaggcatcaacaaagaaaaaaaaagacagaaacattcatggagaataaaaaaccaaatgcagtatctccagaatgcttatatgaaggattgcacaacacctatttcttactgcagcgagtatcagaagaaattgaagagataaatcaacaatgcattaagagaggttaaaagatgacagcagcatatgatttggcacacaaagaataatataccttcagacctgctcacagcttctctgctagtaactgttacacctggccattggagaaaaatgacaattagaagtatgagctggtccacgatatttggcactcgagtatgagctggtccactttgctatctctaggagcaggacaattcaacgttaaaaaatcacaaaatatattcatactacagggcaatctcagttaacaattgaatatcccaagttgattttgttttgatatttcagaaaatcatgacagcaacaatgcagtaccaataagaaaatgcaggtacaatgctgcagcaatgtcactgtgcactaattgtgacagcaacaatcagtgatggcatctagcacgcccacccctacctccaaatctattatttaagttgctactacctttctttaatagaaagcagagaatcaacagaataagggaacagagtgaattagtatgagttactctcactacggttttttcaccattttgcaatacaagctaaacggaacaaaaataaacaggtgaagaagaatattcaagtggagttcaagctgacctgagccgctattgaagtaggcgatcagaataatgacaccctgaaacccccaaaaaaaaaaacaagcacacttctgtcagctgagcacatgagaaatcctaacaactaaattgacaaaaagaaagatggaaaactaccaggaccacgagggcgatggtgagcacgggcggcgagcgtgacttggggtgaagcaggccaccgacagacggcaatcccccatccgccacccgccggctcggattcaccgacctcctcgacatccactccgagccctctccaatccaagccgcccaacctctccccccacccccgctcgatcgatcacctgctcgcacccaacaatatcatcatcccgtcatcacaaacaaatgcccacacaaaatcacacccccagcacgggcggaatccagatccccctacagcccacagatcggaacacccccccccccaacgcagcagcagaagcagaagcagcagcagcagcaatacctccgatggaagtggcggacgcggcgggcggcggaggaggagggggaacccccgagagcggggctagggttcggggaggagaggggattcgcggggggcggcggcgcggatctgaggcgagtgaagcaagcagcggcggcgaggtgggtggcgatccgacgcgatagggacgggaggagtgaatgatacggtggcacgggattttatacggccgcgtgcaatgcaagggtggtggtgggattagcacgccattagcgagggatttagtggagcacaacccgaattccgagacggggagatgggggaatttgggggatgtcggtcgccgtcgcctgctttcactgacaggtggggtctacctaccggtcttttggttttccttttcttttctttgcttcgctggccgtcggcctggcccggtgggttccggcccaacccactgggctgaaagtacttactactagtacatgttattactagtcaatggtcaaataggtctggaaaattgtcaatggtcaacacaggaaatttggtagctatatctgaaattttagtgtacctaacactaacgaatgctccatcgtgcaactctctggattattatgccaactgattagcacccagtatttccatttcattcctgcccaggaaaccaaatggtcaaactcgtgtcacggattcgcattacatttgaccatttagtcaacatcatttctatctcttagagcaggtacaatagcaggctataagagcacccgcaatagtaaagtaaggtgctatctataaaatatgtacatctcagcaatagactagattaatagtaaaccatttcaatagtatatctacatgggtatctatagctctctaatccattgcctcgtttttctctatagactatctccatgttagtagatagctttgctctctcgcttcatttaatctcttccaagtagaaaaatatgctgacatggatcttttgtagagagcttatagataactattgtgggtgccctaagccagctgcaaacatattttaagtagataaatgtagagagagaagggtagcaggctacagatttgtagccagctgcagcacggactccaagacacagtgtgagtatgacaggtgagaccaagtattaatagtgtagtatgtaactattgtatgaatgagctattatattgactatagatgaattggagatagtagttggctatattattgaacttgctcttaagcatttgcacatttattcatgtcatgtgatcgtgtactactcctctctgcacttggggaaaaaagagagaacatggcggcaatatactagtagtagtgatactattcagcaactaatttaatcagcaccctcaactctactggatctcttcctctgtctctctattgttcatcatttgcagaaaagagtctccttcgtggcgtttccagtggttgtattgaccctgatgcaaaaagttaattgtagctagagtgagctcaatgtaatgtacatacagggagacacaaaataagtgcaatggacagccattggtgtgtgcatgattgcaacattggttacttacccatcagcaattttgcagaggtattcacgctgatcgtctcgcagtggaacatctgtaaaatctggaaggccaaaaaaaaagagagagagaaacttagatgtttgatgatcccatcaaacaatagtcaattcagtctaatgcaattttggtcagcctctgacaaaatcaaaactctgttgaagcattttgtagatgagtaagaggttggttagagattgaaaaaataataattgatcatattaatatgtcaacaatccgatagtttgcagataaaaggagtcatttagtttggcatggccatcagagagacaggaccagtaacttgcctgctccatatatgttggaacctttgaacgtcgtgtttcctgtggcaagtgccccttccaagttggcatttgtcagatttacctgtgaaatgattcaagagacacaccatcactcgattgtcagtttgtcactaggttatgcaagctagtaacaaactatttgtgctgcaaacctgtgaaatccatgcttgacaaactggtagtaacttaatcagaaagtggtcaatgactttctgaagaaagtgaggacttatgtaatgaccaattatattatgtaacgcaagcttgttcaatattgctatgatgccaatgccaaattgctatcaatttattactggtctaatcagtaaaaaggaaaaaacaatccaggctttctgaacaatgcaatggtcaatgtggaatgtagtagcatttcaattagcttgctatcgctaatgcttttctttgagcaatatgcagtactaccttcgatacatttgccagtgagaaatctgcacctctaagatcagcatcagagagatcagcacctgaatttatcaccagaaaactctgaataatcaatgcaactagaaccaaaacatcagttttgccatttcagaacttcacattggggaagaatcactacaactactgtgataaatggaacatctaacaaattcacaagcacagcatcagaacctgtcagatctgcatcaaagaagctcgcgccgagcagcttcgcgcctttgaagttcgcctgcctcagtatagactgcaacaaaaacataccaagaaaacagcataagctttgcaattgcatttgctgacaattcagatactcttctggacatagaattcagtaattcacccacaagaacagttacaatttatctacagaaatatgatcatatccgagttcaagaactgaaacagaaaggcaatgggaacaatcaaagagagtaccgtcttgaagtcctgcctgatgagcgtctggccactgaagtccttgccggtgaggtcctgcccccgtgtcacctgctgcccgtacgggcctcctcccttgaatgccagggccgggtcggcgacgaggagcgaggccgcgacgagcgcggcggcgccggcgttggcgaggtggaaatgcagggaggaggaggcggaggagcgcaccggcgtggcggagggtggggatggcgtgagcttcagactgcccaggatggtggggatggccatgatcgatcgtcgtcgattcttgatgctctccgactccggtggtcgtcggagttggtttctttgtgtttcttctttagcgacggtgtgtttatccgtcttatctgttcgtgggttgcttgctcagtcgaccaatcgttgatcgccacgtcggctgttctttcctagtataaaggaggagaaaataaaaggaatttttccagccattctgatatgattcaggttttatttttttattaaaaaatggaaatggttcactttcttgctactacaagtttcaatataattattttgcggagaaatatgttttatttgatatatcttagtgtttgtatgttcagagttactccctctgtcccataaaataccaatttagcactggatgtaacgtataattttttttagacgaagggagtcggtgaaaaagtgtgtgctaccatcataagaactacgagtaccagatttcctaaactattgaacacgttttaaattcaccactcaaatttaccttgggtttttaagcaaaaaaaaaaactttactgccactaccgtgatacttcctgcatcccaaaatatacatatttctagcacagtacattatttcaaaatgaaactatttcttcacatacgttctcctctcaaccaatcatcactattctcctttacctacttttacttatcaaccaatcacacatttcctccgattattctcacctattttttattaataaccgtaccaacctaaaaaaaatgtctacattttgggataagggaaacaatttggcaaaaagatctatgagcactcatctgtaaaaataaataattcattagggtgtaatttgtaaattgtcttgagtctttacgaacaaatccctatcctgcataccgccatcgtctctttctcgtcgtcgccggcgacgcctcccgccgccgccgaggatgccagtgagggtggtcgacaccgcaaccccatcctcccagcccacctcaggttcgtccacctccttccccactaccttctctatgctatgcacccacccctaattttgctgtgtaatccaagctttagatctgatcatctgatagagtctaatcaggtatcaggtagcttgtggggtttgatatagtgcgattttaaggtttaatctagattggtctgagttgtactgagggtatctgtgttgatccttttggaatatactcaattttttataattttggccactcacgctatgcgttatttggggagagctcggatggttttgtagctaagctgacaactaattgtaatgtattgtatatttttgaggcgttgctatgcttgtggctttgtgtcaagtgttcttctgtttcaggaggccttctatataaaccaattgttgattttgttcacctgcaattgaaatttcattagttattttgtatgtatttctggaaatagatagcccgccgtgccaatgtgccatactgattaaaatgctgcaggtcaagatgcaaatgctgggcatccgtctcctcctagctgttccctcttaagtgctggaagagtaagtctttttgtgctgttatttggaacttgaccaaggatcgaatcttcttatcggtgttgtttatggaactgaccagaccatatgcttgtaccattctttcagtgttatgctggaacccagaatgtctctactatacaaaaagaagaagcttggaaagttaatgtgcggatcaatgactgtgatcttgaacagggttatttatgtggaacaatggaagcagttaatgttcccttagctgatacccctgtgagctactacttccttttccactttgactctgatctttatgttccaaattgttcattcgtatactaatttagtaggcaaacagtttgttccgataaaatgtaaaataatgctatgttttacttcttgttaccattatctgatttgcgtagcaatttgtaaataatttccataggtggtaacattctgggagggggagatagtggatgctaaaaattatacatttttcactggcaagtgggaggcatcgtgagtagttaactatttatgttttatccttgatactatcatctacttgttttattaattgatgccctagtttagggtaacagtccaaacttactcatcaaacattattcctgcttatgcttttgcagcccagaggatgatattagacactggtccaagttcccatcatttacacctcttctggtattctgttgcctatcttcgtgttgttagttgccacgatttgttaggatacatttctcacttatgtttctccacagagtcagatagagacagatggtggcaagtctgtggacttcagcaactatgcttacatattcatggtactgcaccatctgacctttcatgtatgtgccccatttattgaaatacaaagtcataacaacttagcattattctgatgctacatgtagagatggaaagagcagtactttgtcaatgttggagtggactgtgggttgaccatagctggtttctactatgtctgcttttcatgtagcgatggttccattagcgggtattattatgatccaaacagcaggtaatgtatatttcgctggcactttttattgcgatgtaacaactaaattctattgaggaattgaagtgatataaatatttcctgctctctcaatttacagtccgtttcagaagcttgaactgaagtgtaccaatgagaaagattctggatttaccttttcatcctacgagctgcagtgagagactgacaggcctgttgtcattatagtatttgcggatgttaatatacacaatgtgtgtactgaactcataattttgaatggcgtcccattaaaagagctgagatggcatgtttgtaacagtgattttgagcaagatgtattttattctctttgtaatatgattataagctggtaaaatttctaatttgaacctacctgtgtgttctttttgtgctaatcacggcatggttatgtccagaataaataagacaagaatgtgagggctagttgctcgttcaaagaaatatatatacttctttccagagtaattgtagttctgcagttggaggatttttgttttctttcaatatttctgtactgcctacattgtggaatttgtggtcactgattgtgaatctaatatctgatactgagctttatctgaagagacacttaagattgaaatcttgtacattagtttctggtacacagccacagaaacctccttttggtttcacatgcagccattgtaaggtatgatgtaattctatgaacaaagtatacttgggccgaacactctgtcttcgcctccggtcttcggacattgtaaggtaaacatctctctacttatcttgtttcatagagtcttgatctcatgcttcaagccgtagtcaattctctaatgagtaaaattcttctgcatctgcattgcacaggcttcaagttattgctaaaccctataataatattctgcagataggactacccttgcacacctggtgaagcttaccttcatacacacaaggatgggtggacagtggaacaggaggtaactcttctctcctttctggcagaaaccaagaatacacttcctttgccctctgtaccaaaggcctctcaacattctcacaccaggcgtcaaacatatcgaggacagcctcagtaatgacttctgagagtactttatcaccttctccaggtgccagcttcagcatcatgtatctcttgaacgatacgatcttctctaacatttgccttctgtcaatattatatgatgacatcgcgccttggattatagagaccatcctgaggactgcctcacagactatagcatatgcatgactgaatatctcggttgctgtttctgacagttctttgctgtgccaatcattttttacaggttctggcccctgttctaagattggcgcaaatgttacagtcttcggtttggttgtgttgacacggagctgctttgattccctcagcatttcattggcttccttcatttctgactcaaacctgctgctgaccttgaagtatggttgctccttgtgtgcagttgggctcgggagtggggaattctgccttgatgatgcttccaagaaaacctcaggtgcacatgctgattcacacgctacgatttacatggaaaacacaagtattactcttcatcataacaaaattatactataattgatatcttgactgaatttaactggagattgtccaatgcatgcaatattctgaagtctggcagacatacaggaatggggatgtcgagctgtgcttggggatccgtagtctgcatcgttgtgctccttgctgtcgtctgcactgggtcctgctcggggggtccacatcatgtcttcttgcggcttcttcttgtgatgcagcaggtgcatccatttcttagccttgctcttcaccttgccgagaactggcttcttctggctcccatttggggtccgcggcgatcccatcggactcaccggcggtgcccgtggcgaaggccagtatcgttgttgctcctcccattcatcgactggattttggcctgcaatattcagagacgctgagggaaatgtcaatcaggcatgatcatttctttatttctaggcaggtgaggcactaacatccctgtatcattacttccagaagaataatttggaacacattgatcaagctatacattttccaagatcgaaatgtcatgagaaattatgaaacatgcaggaatggtgaaatttgagatgagaagaaaagaaccaagaccgacaaatctattaccattttggacggggtgatcacctcgtttggtgctgatcccgcgcttcaattttctgatttcattcatgatttgtgcaagaatggaaccaaatcctagagctttgggaggagctgatcaggcaagaaatggactctatcctaaagttggcaaccctgagggaaccaatttctgagttatagtggtgacaagggctaaattctggtggagcggttaagttgccaacctattctagggggtgtttggtggttggagggtggccatgcttttcttggagccatcccagatcataaacgaggttcatatgtttttgccacgagcagctgaaaaatgtaaggacatacatcatgcatgtgcgggatgttttgaactgagcaggtttagggatattttgatcaaatgtaatgttatttttgtagaccgaaaaaaaaaaaagcgatcctaggcttcctagcgctagataaagatacagaaggttcgagtttcatgaggctgaagacccagattatggaaaattcgagtaaaaaaaaacagaaggttcgagtttcatgaaatttgagttgcagagagaaggatgaagaccgaaaattcgagtttttagggaagtttcatgaaatttgagttgcagagagagggatgaagaccgaaaattcaatttttttacccaaaaaacaaaaaaaaatttcttgtcaagaatgggattcgaacccatgccctttcggaccagtacctgaaactggcgccttagaccaactcggccatcttgacagtttcgatatggttttattgacaatttataataatgtgtgtagaattcttcgcgacggtaaattatacaggacaataaaacgctgactatataacgtaaccgaaaccaaaattcttgacgaaactcaagaccctctctgtataatatgcaagctaccattgtcttacattaaaaggttctaaagctaacaggccaatatacataataaaaccataaatgccacagtaaaattacgccgaacaccgagttgcttcaaaaatggttactgctattgcctgtcaataaattgacttgtgttctttgttcataaatatgtaacaacattgggtgtcagcatatccatgttagcccatgctgccaaagatactacaaggagtaaacaatgttgtaccgatgaaacaagttttctccatgctctctgtaatctgctaagctgaaggtgtgcctcccaaacttgctggaagctgcaaaggcagcagcgcccctccatgcatctataagggggtcggctgctctaacaagcttcaggggtgagaggtagggccgaaactgccggattccggattccagccgagggatcatgcctgggatcaaagaacagcctccagtgacaaggatggactggcaaaggcgctccttgacagcctcgtcttccattagtcgcctaagtgagatgctgaccatctcatcgataccagcctggtcaattcctatcataccaggctggaacaatatttcagggcaccggaaccgctcgatccctatggaaatcctgtaatcttctgctgtaagagtccggaccttaggaggctcaggagtctgttggacagcttcagctttgttcacaaatgtagggtccatatcctgcacatggaagcatcaaatagtttatgattgtaaaagaaactattgaggtgtgagatctaagtaagacaaaatggccatcacggctcacaagcaagattgcttgaacgtgagatcttacctggatcttagaagcaattcgagcaagttctgattcatcatcatcgttcccatcgtcgtcgtcgtcattatctttgctcatctttttgtagactaaccaatcttcatctctcgtaccaaaagtgtcctcgcccttcccccgatcaaatgcagcagatgtgagcaaccgcatcctttctttctgggcggcattaagacgttccccacggcctactccaccagatgaattatgattaccattggtcttaccaccattgagtttctgtcgcttcctctgatcaaccctatcagaaagttccgagtatcgagcacggagctcttcaaggtataactctgggttctccctggatattaaagtaaaacatatcataaaagcagcgtatagagcgcatggcaaatatttatgacagattcgagaaaaatttatcccttttcatagagtgtatatttcattgatatgaggataatagaatagtaaattgaacattgtttggaattgcagaatgcatgcttgatttccagggcttatatcagcacgaagcgtatcacaagaacaaaaactaaaaagatggctctgaaataactggttaactaacccagtgtacttaaaatttcaaaaaagaggatcttaagctgaatgcagataaactaattatgacggccgtatgaatgataaatttcagactggggacatcgcaacttacaaacgcctctcttcttcttgcttctccctcaatgcttcctcctcagcacgtctctgcttggcacgcattcgaccttctgttgtggttttaagtagtatctgtttcttcttctcttttaactgaaagtatacgaaagtgaaataagaatagtaaatatttgaaacatggaaaatatctaaacttggtataatagatatgtgctcatgtcacacagtcgcaaaaggtctccccaaaacacaagcaaaaacaaacccctttgctacagatgataaatggacagacacacacctgttctggtgtcaatgtttcatcagggacagacacaagtggatacttatcaaccccagaagcatctgctttctcttcgttaccattggactccccctttgccttccttaaggattgtgttgctttcaaaatagcagatttgatttcctgctgggaaagatacccagatctacctaaaatggctgttgcttcttcttcctcagctccatcaagttgctccattagttcctccaaataagaaagctgtttttcaagttctgctatcttctgcgacctttttgcagcagccatatctcgcaaacgttgaccagccttttccttcaaagctgcttttcttgcaagttcttcctcagatggtggttcttctacaggaggcgggacccatggtagctgccaatacctagttttttcttcagcttcttccttattgttctgccaagtggatcaataaattcatagtgttgaaagaaagagctagaaatgtaacacggtagaaaagccctgtgcattctatagatgaactggatttggaatttacattggtaagaaaacaaacggtaaataaaagtttctcaccttaaatatctgcaactctgacatataatcaagagctacgtaacaatgttccttcttcagctcttcagccttttcccatgtaatgcttgcactactcaatgtaaagtggcaacgattagacatggtaggaaaaaaaaatgcatggagcacttcagaaatatgctgcgggcacctacctgtgatagggatactttagagagaggagctgcctcagaaaatctgtgatgtgaaagccaccaacgttggttctgcagcatgcccccaacacaggttctccctttaaaaactgaatgcatatacacagcaaagcattaatcagaatgcatatgtggacaaagaaagaagattttatttcacagaaccactttgatgagtacaacataatatttttgtttattgattgtttcaggatcatgacaacaataaacaaattgtgaaaaatacactacagagaagaatagtctaacttggattggatgagttagtatgcagcctaccatggaaaagtaagcagaaattcaaacacacagggctcaaaatacaaagcaacttttaccaatgtagttgtccggaagcatcatagattagatggaaagaaaacaacatgctgtgtctggagatcaagaaaatacatcccgacttccatgagcaaaatgatttagctaagaataggggcactctttctctctctctctctttccatgagcatgttatatagcattacccactacagattatccaatcagagttttagaatctacaatgcattcaacaatactgtgttcttcaagcatgcaatgcattaattttccgaacatctgacaaggtaatggaaatgcaatggcaaaggatttgtatgttgcacaaagttaagaggaaggcatgtggaaggaccaaacttactggaacaacatggcatgttccatgttcacacgaaatggccagtccatcttctccacaattcccaagtttctgattgtacttgtaactaaacacatcgtcaatgccaaaagctgaaactcacataggaagaaacatctttagcatcgacaattcttacttcaaaactaccatgcacaattgataacaatggcacaaaaagataagtatcattaccaatggatggcacgccatatgtctcaaaaagtagttctgacattctggctcgagaaaaggatggattgcattcacactctgtcataagaatgggatggcccacctgcccagcattactgttacttccagcagcatgaaaccaaacaaatagctcatgtgggaaccagaaaattctaaggtaaaaggatgcatacaaatatattactatataaccaaaggcacataacactttctattagaactatatgatactaatgagaaaaatctgttcagaaatgcctgctatgcctgggttattttttcactgtcacccaccatacacttgagaggagaaagctcactgatgaagataattgtccatgtctgtcatatgtctaggatggatatgctgaatatgacattcacttgtcatttaacttgcctgttttagaggctgagagcctgatactaaagtttcccaaagactttgaagcattacgttcaacttgtgaacgtcaactgtgtcactatgcaatatattcataagaaacttaattctgaacccgaaaccaactgaccattttagaactcacatgctaaattcaagttttaataaacactacatagtcccaatcattgcacacacttcacttatacatagaactggcatacaaaagaacccccaaatttcatcatttttatttgagagggactaccccacatttactagtgcaaggtaaagcaaagctgtcaaaccaaggaaacagtacataagtcaactacattcagaatatattcatagtacagatgatggcagagtgcaatttacctctgaagtggcacctagtcgatcaaaaccaaagtcaagaatctgcaacccagacagtaataataccagatcaaagaaatacttaaaaaatgtttgttacacaagcaataaaggttggagtgcaaatatcaacactctgaagtaagcaatcatgtgctgcactctaaatttgtgaaacataacaatatgtattggtatctaatgtcataaaggatatgtgaactatgaaagatattatcattaatagctatagaatagagcatactcatagaagcaagttagaatatgaatttctaacttcagat

SEQ ID NO: 19912 - DNA, 2941 bp, Oryza sativa
ggagccatcggtgaacttcaattgtccttcatctatggccgattgaacctatcgtcgaaacacattgcaatcattagtagaatgagaatgagaatcatgccatttacaatatactcgacgtttcaactcttcttgagatggtatgacatggcctttaggtaatctaatttgtttctcttgtaaaagataatcaaaaatcttatcacacttggccacatcaaaactatatttaacctcactttgtcgatctttgcgaggagtcggcattaggttagagcaaacaaaaggcttatttttattagtccatgaccattcggcaacatatatatcatgatcaccctcctcctcactatcactagcctcagggtaatcaaccacattaacattaggccttttgtcatatggtctaacaagttttttattatccttaacctggctttcttgagccagagccctttgcatgagttgactaacatcaagaaattgttggctatctagtctttctctaagaggagcaattaaaccattaaaagcaagaccagccaaatctctatcagttatattcaagctataacatcggtttctaacatccctaaatctcttaatgtaatcaatgacagattcattatacttttgcttaaccgatgtcaaatcacataacctaagctcagtttctccagtatagaaataatcatggaatttttcttctaattgaacccaaatatgaatagaatttgccggtaaagaagtaaaccatgtaaaagcattaccggacaaagataaagaaaacaagcgcaatttaaaagtatcactattagcctcaccacattgcgccaaaaattgacctacatgctcctatgtggtcttaccatcctcaccactaaacttggcaaattcgggaactctataattacggggaaacggcacattatcataataatcaggatacggctttttgtaaaccctagcacgattcctagtttcgatcccgaatctatccataataatatcactaattatatcctccatattattaggcccatgttgattcagcggtggatttggtggcctaataggttgtgtttgtggcacaatatgattatattggccttgtctagtatcgggacgataccccctagcaacatcattataagcattaggaacatgtgggggaacttggggattagttgtagcagtagatataggaggatcaaatgtcctaagatgatacaaataactagcattagtcattggatctatccgttgtatcggtataatcgcgccggtctgaccggcccagggcccggtcggactggcgtccagaggcacggtcggaccggcctgagtcccagtctgaccggccgtctggccggtcggaccgacggctaggtcgcggtctgagcggccgtcaggcccggtcggaccggtcgtgtacaccgttccatcggttctattacccgtttgatctaaaaccgagtttaaaaactcgagggtggatgaataggcggttttaaaacttttggctaaaaccgagttttgtatgcggaaacgtaaatgaaaacggttgagaggaagaagctagcctatgttgaggtttgcaagcctagggtggtaatagcacaaataaactctagtatgtaaacttactcaaagtaaatttgcacaaaataaaagagacaggtgacaaaggatttttccaaccgatatttggaagtttgccaacttcctacatcaccgttgaggtaagaccaacttcaccgctcaaaccacgaagccaccacaagcccccatcgtcaaggggtgggcaaggtgggagccaacccacgaagtggtctcccaagcctctctcactatggttgttctttctccactccggagatggcgaacaccaagccactcataatcaacactgggcctcctccacaaccttctcggagaggtcaccgggcaactactccaaaccatctaggaggtggcaacctaggatgcttgccgaggatgatcaagtgtcacactagctctaacaattaagcaatgcacttggattagcttaacttactctctaatacctcactagataaactaagtgcacaagggtgtgtgagtccacatcagtagataatgcaatcgagtaccaaaacattacccatactgctggggagtgggtatatatacccccaaccatcaaaactagccgttggagtcgaaatccccaacttttgtgctctgccggtcaaaccgccatgggatggccggtcagaccggacatttctagccgttgcagtgcattaaatgcactgacacaagggggctggtcagaccggccacgactcggtcagaccgccaacatctcggtcagctggcctcggctctagcggctctggatcaccaagacgagacctctcttcaaattcagggcagcggtcagaccgctatgggagctgcggtcagaccggacaacacactccggtcaaaccaccataagggttgcggtcagactgcaggtcacttttcagctcaattggacgttagtaaaacgacgatatctcttgactcgggtctcggaatttgactttcttggactctatggaaagcttattcaaagggttatccaactcatgaacaattaatccaagatacacaacttaatttagggagaaagggctcacactccaaaggatatccatcggacatacccacaagatgtcgctcactccttttggacatgcatgcccacttctctctttgtttgggacttgagaaaactcatcacacttggataaacatgcccaccaaatgcacctacatgcatataaactaatatggcacaagatcaatgcgttcgcttcatagacccctcttgatagaatgacgcctatctagcaagtcaggtctacaccaaacactaacccggggaaagactatgaaaacaatattagtt

SEQ ID NO: 19913 - DNA, 3421 bp, Oryza sativa
tggaagaattttactcaactgcataatattggcaaggaatgaaaatgatgagctagtgttgggttgagatgatcaagagatactaccatttgttgagaaaccacttgtatataggaattcgaatttgggatcaaggaatggtagttggctttggtagcaaggatcaacttgtatttctaaaaatagatcatgatttcagcaccatcctcattaatgctaaggtataacgtttcagcgccaccaatattagcgttgacatatagttggacatggcatgatttgctaggtcaaaagatgctcagcgacatatctcttggtgttgatctctttatcatctagaaaacaaaaaacagcttatggaaattatcaattgaagctagccaagtggtaggtatagaaatgtgatgtttctatctagaggacaagggttcgattccctacacctttttttatttgttttgaaagttcacgtgctttgaaaaattaattaatttcttttatagttttgaaactagtcacttttattcatttcaaaatgcaaacatataattattgagcgaaataatttcatcaagattaacaatataatttaaattctcgaatttgttggcttcaaatttaacataatactaatttacaatcaaaacctatgtttttttggaaataaaaataaaacaagcattctaagaaaaatcctgaaaaaggtcattcccctcttgaaacaaagccatcttcggttttggattaatttaaggttgttcctttttcttctttacaacaagaaataccactgacttgatagcactatcatgcactggttttagcacgtgtttaacaccacgatgtataaaagaattgtaattagtctggccctcgtgtgttgcattaagatcaaattgccatggtcttcccaaaagcaagtgacaagcattcatcggcaccacatcacattctactttatcaacatagctcccaatagaaaatgtaactctcaccttatgagtaattttaagcgtgcttgcttgattcatccattgaatataacgcggcgtaggaagcctttgcatagataaagataaagcatgcaccaaatctgagctgaaaactaccaccatcaattatcaatttgcataccttgtcttgaattttgcgctctgactggaaaatattgtagcgctgcccctttgcatcaacattagagccatctcattgtactgcgcgtgcaagcatagataaaccattcttttgttcggcaccatcatccatagatgaatcatcaatatctcgaaaccctgcagttagaatatgatcaagctgtacaccttctgaatttcctaataaactctcagaaacatagccttctttagtcatcaacaccttcttccaattatgacaatctctcatataatgtccaactatatgtcaacgctaatattggtggcactgaaacattataccttagcgtcaatggggatggtgctaaaatcatgatttatttttagaaatagtttttggcaatgtttattgttgaaataagttctataagggcatgtacaatggaggccacaagcaccagtggtctcaaaacgccacgtaggatagaaccacacaaaggtacccacggtggaaaccactccaaaacatattttgcatgtcagcccctatctatttatatgccagaccttgtagatatcttattatcaaacctattaaaactttatattttgaacccgatagtaaccaaaagaagtatatgtacatcctcaaacacattgcgacccactgtcagcctcttcccatccccctcgcttttttattcccccctctcaatctctctctctctctctcttcgatttcttctccaccgagagcctctccgccatcgctttcttcccttctcccctcccctctctggcgcgatttcgccggctgctcccctcccctttccggcgtgagctcgccggcttctcccctcctctcttaggcgcgagctcgccagctttgccccttccttctctggcacgagctcggcggcggggagcagcggtggcagcggatctagcgccggggggagcagcagtggcgccggcgatgtgctgtcgacgacgcgcgcctgctggcccatggggacgacggtggggacgaggaagacggcgaagcggcacgagtctggcctccgtaccggcggtgacggatctggcggcagccaggggcggagccaaacgaaaatgaaggggggtgcctgctttcatcgtttttagcgtcatatacagttgtattactaaatacttgtttacccaataacaatagagaagccaagtaataatatttttgttaagtagataaaaagtcagaaattgtgtacctattctttgtcaaattaattttcagcaaagaataagtcatgaaatgatttgatataaataaaaataagtatcttctttatcaaatttgcaggtcgttgtcaaattctctaaatagtttcttcttaccatgtatcttacgttaggatggtaatcatcaataagcctagatcatattccatcatctcttctcacttggtaatcattcagtacagtagaagggctgaacttccaacattgttagtataatctagtacttatcatttaagatatttcttcatagcaacctattcaagaccaaataaatttgttttcaagatttatgttcgtgcaaatgatgagacttgagagaaagagcacacatgagggacgggactataggaggcaggttgctcctatatacacaggtggcaagctccagctgttgatggcttgccgtcgtcggctatctgtcctctacatctctgcaactgggagccctagcttgatcaaggcgtgtgccacataatgaaaaaattgggagcagggaggaaacggaaggggaggagggctgaccttccgattgggggcttaccggcgggcataggagtgtcacggcagcgacgagcgagaaagattgaggagtcgcctcagagaagaaatggcgtcacggaaggaagacgaatcgataccgctgactgcgtcgtacgttgtgcaaggcttctagggaaagcggtggctgttccccagtattgggccggggggtgcctctatggtggagataggaggggataacttgtttcatattttgtgccgggttcctgggcaacccctgggtttattgggctccgcccctagcggcagcggggagcagcgacaacgaccacagcggcagcggcggatctgacaaggcgacgtgagcagcgacgacgaccatggtgagatggggatttggggtaggtgcacgaggggactggatgaggcgacgctcggggctccgactcctccaacgcgaggcttcggctcgtggcttcgcggctccccagcccaggtgtggcgctttgagcggttcctctgca

SEQ ID NO: 19914 - DNA, 14604 bp, Oryza sativa
aggctcaactatcaggctgaagcactatttaactatctggagtaaccagttgcacaaaatccacagaagatcccgttcccgtgctctgttgccaattctcccccaccaccatgctcctcgccgcgcgcggccgccgtcaccccttcgccgccgcgcgcctccttccgatcccgctttcctccggcccctccttcgcctcctccaccaccaccacgacctccaatggcgcctgttcgtcctccgccgcggaccccgacgccgtggccgccgaggtggccaccctcctctcccgctgctccggcgactggaggctcgccgtctcctcctccgacctcccctcccgcctctcccccgccgccatctcctccctcgtccgacgacgcccgtccccctcctccccgcgcctccaccctaagctcctcctcgacttcttctactggtccagcccccagctcgcgccgtcggcccccgcccccgatgccttcgcccacctggccatgtccctgtgcgccggctcactcttcaacctggccaacggcctcctcatcaagatgatccgcgcctacccgtcacctcccgtcgtcctcgcctccatccatcgcgcgctatcggattctggccaccgttcgccggcggtgctcgacgtcctcgtggatacctacaagaagtctgggagggtgcaggacgccgcggaggtcgtcctgatgatgagagatcggggcatggctcccagcattcggtgctgcaacgcgctgttgaaggatctgctgcgcgcggacgccatggctctgctttggaaggtgcgagagttcatggttggcgctgggatttccccggatgtgtatacgtactcgactctgatcgaagcctactgcaaggtccgggaatttgatactgccaagaaggtgcttgtggaaatgcgtgagagggggtgcggcctgaacaccgtaacctacaatgtgctgattgctgggttatgcaggtctggggctgtcgaagaggcgtttgggttcaagaaggacatggaggattatggactagttcctgacgggtttacctatggcgcactcattaatggactgtgcaagagccgtaggtcaaatgaggcgaaggcattgttggacgagatgtcttgtgctgagctaaagcctaatgtcgtagtttatgccaatctgattgatgggtttatgagggagggcaatgcagatgaggcgtttaagatgataaaggagatggttgctgctggtgtgcagccaaacaaaattacctatgacaatcttgttcggggactatgtaagatggggcagatggacagggcttctctacttttgaagcaaatggtcagagatagccataggcctgataccatcacgtacaatctcattattgaaggacatttccgtcatcatagcaaaaaggatgcttttcggcttcttagtgaaatggagaatgctggtatttcccctaatgtatatacttatagcataatgattcatgggctatgccaaagtggtgaaccagaaaaggcaagtgatctccttgaggaaatgactacaaaaggattgaagcctaatgcatttgtttatgcgcctcttatctcagggtactgtagagaaggtaatgtttcattggcatgtgaaatttttgataagatgacaaaggtgaatgtactccctgatttgtactgctacaattctcttatatttggactatctaaggtgggaagggtggaggaatctacaaagtactttgctcagatgcaggagagaggattgctgccaaatgaattcacatacagtggcctcattcatgggtatctaaagaatggtgatctagaaagtgctgaacagttagtgcagcggatgcttgacactggactaaaaccaaatgatgttatctacattgatctcctagaaagctactttaagtcagatgatattgaaaaggtgtcctctactttcaagtccatgttagaccagggagttatgcttgacaaccgtatctatggaatcttgattcataatctgtccagttctggaaatatggaagcagcatttagggttctttcagggattgagaagaatggatctgttccggatgtgcatgtgtacagctcgttgatatcaggtctttgcaagacagctgacagggaaaaagcttttggtattcttgatgaaatgtctaagaagggagtagatcctaatattgtatgctataatgccctaattgatgggctgtgcaagtctggtgatatttcttatgcccgcaatgtcttcaatagcatattagctaagggattagtgccaaactgtgtgacatacacaagtttgattgatggaagctgcaaagttggtgacatcagcaatgcattctatctttataatgaaatgctagcaaaggtataacaccagatgcttttgtctatagtgtacttaccactggctgctctagtgctggtgaccttgagcaggcaatgtttctgattgaggaaatgtttcttaggggacatgcaagtatttcttctttcaataatttagttgatggtttctgcaaacgtggaaagatgcaggaaactttgaagttgttgcatgtgataatgggcaggggcctagtacctaatgccctgactattgaaaacatcatcagtggacttagtgaggctggaaaactcagtgaagtgcacacaatttttgttgagttgcagcagaaaacttcagaaagcgctgcccgccacttttcctcattgtttatggacatgataaatcaaggaaaaattcctcttgatgtggttgatgacatgattcgagatcattgtaaagaaggaaatctggacaaggctttaatgctgcgagatgttattgttgcgaaaagtgcaccaatgggctgctcgtcctatcttgctatagtggacaatctatgccggaagggaaaattaagtgaagcgttgaatttgctgaaagaaatggacaagagaggtatttgtcccagtgagaatcaatgcttgatactattaactaatcttcatacatctggatatatccaagaacacaatacggtacttgataatatgttgtgtcacaagtggttacagaaggacagcaaattctgtaattcagctggtgataatctggaatctgtcaatgcagaataaacatagagcagaatccttcctataaaagaaagtctgattctattattcatgttgcgaatgcatgtcgtagccttgtttttgtttattgatgaggaattaaacagattaattttttcaagaaaatgctcttgtcctgttagttaattgttacacagggaaccttcagccaactttggttgctctgcttggcatcttctggttcaggaggcatcatcatatattgaacaaggtgagctctcattagcacatagccatttactgcgaaaaattggtattaattgtctctggctgatcttgttgagatttctgacaggttgttttcactgtcttcgcaccatctctcatgtttgctagcctggcgaagacggtcacgttttctgacaggttgttttcactgtcttcacaatgcaagtgcagttactacaaaatctgcccaaattccatttccacattctaataactgccaaaatcaacacaatatgtatagctcagccagactttctggattttttgaactgtaagctctttctgaaatttataaggattcttgcagaagtgagagactctctttctgaagtagtagacaagctttacatatctagctagttttctcattcagaacacttttcgaatatctgggcagaccatatatacaatatccaaattttgtttgctgggtaactccactgcactaacaaaagaattctatcatgtaggtggtttatgccaattaacatagggatcacattcatggctggtggcactctaggctggatagcatgtaaaatcttgaaaccaccacaacatttcagaggaatgatcattgccttctgctcagctggtaactttcctaggtggattgcatgtttttaccctcatatttttgctgaataatcctaatgttaggagtgtcatcaactgacaaaaaaatgcaggaaatcttggcaacttgctcctgattgttgtcccagcagtccgtgacgaagatggcaacccgtttcggaaaagacagcagccgctgccactctcttgggctctcctattcatcattgtccatggctgtaaggaaaaaaaaatctcattcactgaatgatcagctgaacaaaagaactgacacacactgtatctgcagcttggtggcttgtacatatggacgcatacgtacagtcttatgaagaagaagagaggtcaaatgtatcaccagcctaacagcattcagggcctggacgacagcaatgaagaacatcatgctaagaaattcaaagcaaatggtgaagctgcttgcgccgatgaggaggcaactcttctggtgtcagctaaactggctgaacacaacgaggagaaccaaatggtaggctgaacaaaacttagtactattaacttgtctgaaattcaggaagctccattgctgtctggagagagtgagattgctaagaaaggctcgtggacaacaacaaacttgaaggacaccatccaccatgttgtcgaggagctgatggcaccaccaactctatctgcggtgtgtttctgacaaaaccagcacaatatttcatctaatcaaccctgtcttggactaaatttggttattcttgcttcagatacttggatttgtttttgggctagttccatggttgaaatctcttgtcatcggtgatggcgcccctctcagagtcatccaggactccatccaactgatggggtaagttagtatttacagtgttcttcttcatagagtatttctgtctatttttcagtgtttatttttcttgtcttgcagaaatggcacgattccttgcgtctccctcatccttggtggcaatctgataaaaggtaggatgtcaattactcatgaagctgtgtgttttctgaacttgctctggatgtgcatgagttttctgaacctttatctgaatgtttgtgcagggctaaggaagttggagttcaagcatacggtgatcattgcgatcgtctgcatccgctacatgatccttcctctagtggggattgcagtagttcatggtgcatactgggtcggattcttgccacacgacccgctgtaccgctacgtgctgatgatgcagttcgcgctgccacctgcaatgactattggtaatctttccctataacagatgccattttcttcgtactatctgtatttaaatatatgatgctgatgattttatttggtccttaatgtacaatgttgacctctattttctgttacaatacaacattttttgtagctaacaaaattataatattgtaaaagtacttagcatgaagaaaaaaacatacctatatgattttttatgtcttacactaaatattttgagagctgttgtgatcaaagttttataaaagtataataactgaataaaatcaacggtatcatatatttaaatacaacgagagtacttattttgcgaggcaataccatttcgttctaaagcatttatctctgcttccagtgagatctcatctgatcatacctcttgcatgtgtgtgatctaatccaggaaccatggctcaactgtttgatgttgcccaggaggaatgctcagtgatatttctgtggacttacctggtttcttccatttctctcaccacctggtccatgatattcatgtccatcccgtctttaggtcaaagtgcaatgatttcagcatttcagctaactcaaagggaggaggttgaagacaataatacgcctctagaaaagagtcgatccaactgaggcttgttcgtgtcaccgtttgcaccacctgtataaaagaagttgagcagtttaggcacacggttttttttctatcccaatctattggttcatttaattggaatggttttcatcttttaagggatattcaaattcactgtttttacatgtcatctaatagtcatgaaaaatttaaattttttagtaagatagatcaatatatacgggtatatcacttcagatacatataagtttattaaaaagttgatctatacagattgaaaaaaaaaaggctatgaagtgtgtgtattcacaaacatattttagatagatcgaatttaaatctatgtgtttttgaagtgatatatcatgtattaattaatcttatcgaatttacattaccatctattttttcaataactatgtggatggcttgaaaaaacacactaacggataaaatgaattttcctatttaattatttctacatatttgtctgttagtatatgcccgtctattgagaggtaataaaaccaccacatttactttggagttctataattcatcaccatattaattaaagaaaacaagaaataatactattaaattatggttggctagattatagctttaactagacgatacacaacgcgttgctgagggattccgaatcttaatgcaagttgaagtgtgtgcttgatataggagtatattagaatgtgtgttacaaagtatggggcatagatgcgtacagccaaacgaaaggaacgtgtaaatctaagggggcagcacgatgcataagtagtaaagtagatgctaattcatttattgttgtcattaccatcttcctggagaaattgagaatgctttggagccttggaggtgttgtactctgtgcttatttgtagtataacactacaccacgacataggtacagaaacgcttgacctgttgggataagtacttaggctgtgttcgcatgcaccttttcccatcccctcttcttcgttttccgcgcgcacgtttttcaaactactaaacggtgtattttttgcaaaaagtttctatacgaaagttgcttaaaaaaatcaaattaatccatttttgaaaaaaaattagctaatacttaattaatcacgtgttaatggaccgctccgttttccgtgcacaggagttaggttcccatctccctcatccgaactcagccttataagagaaatggtcgtgtgggctaagctgtgtaactggtggtgtgggctaagctatgaagctctgagcctctcactgtgaaagaaaccaatacatatgcatcgagacaggagccaatccaatctatttcagaactaacatgcgtatctgacctctttcttgatgtggagtatcttaaataacatttaactatggatatattaattaatataattttatcatgtaaagatcgtgactgaaatactaattagaaaatatcatccgcttaacatgcccatcggtgtaaagtgtggcacttgttgagttatattctaaggctgaaacggagccgtgtttaacgcatgattaattaagtattagcttttttaaaaaaaaaattggatcaatatgatttttttaagcaacttttgtataaaaactttttgtaaaaaatataccgtttagtagtttgaaaagcgtgcgcacggaaaacgaaaaagaaaggttgggaatgggcacttccgaacgcagcctaagtgatattgtttgccacatccttcaatggcaataaccaaaaataacatgtaattccgggcaaataaacgttagatagcaaactgggaaaataattctactaagtatgaaccatgctgtaaacattgaattcatatggtaacgaattgaaatggtggttttattttggagaaaacattaaatcagtcgaccaaaaggaaagaggacgctggcgtacactgacctgtgctagctcgctggagcgattgaagaagatgatggtgaaagggtggtatatgaatccagcgagaacaaacttcagcagcaggagcaaaatgaactggcctagtagatcgacgattatttgcgagaattatatgaatatataggtagaatggaaagagggaatctgaaacataaatatattcatccattaaaattgacccttggctacctatcatgatggtatctgttctcagaagcaattgccttcgctgccaccatcgagggttgtgcgtgtgggagttcacttggagtctcagactgctcgcatgcctcatcgatttggggaggctgggggatcggatgctctgggccagcaagttaagttgggctggatttgaccagtaaccgagcttttcgacataggtggacaggtaactaaaaaagcttggacatgtagatcgtatctaacggctgaggatttattgatgacgtggctctatgagaagctgctgataaggacacaactagctcggatataaccataactaccttatgtattaatcaaccaaaggtgcatatattctacattagatttactggttatatatttaaacaaacattgctacacaatgaattttgtgtgttttcgtttgcagaggtatttgcttaggcgaaagaaaagagaccgagtgtaaggaatatatggatgattaaagaagttgattggggaccaaaccaagaccttctccaagtccacttctacctcaccacatcacttttggtccatagaaaacaagagacaaagttctatatgttttggattcggattcgggtctcctgacagcatcaacttcaaacggacttagccgcttatctaaaaggaatttcggtgtccatgagtacttaatggaaagcttatggagtctattttcagatggttttggtcccacatcaaaattcctactgagctaccgggattctgcaaaacaagccacgtatatcatccagttcgaatctgatttgggttttgggctttgtaattgtgtcgtgggcttagcccaagggggtgtgcgccctagggcaactctaggacgtccctaatgatacttattcagtagccgtcatcgtttagagtcgggttttgcttagattattctgtcaagaatagattcgccgctagatcggtttgtgaaactccaaattcgactacttaatcattcatatgcaatttggttgcaatctatcttgttcttgcttgtgttctttgattcatatgcagggattagccttctcggcgaggtcaaccgggtttcagtacggttgataactagagaagacgtggtgctgcgattgcggggctcagtagcatgttcattcagaagccggatcgagttgtgtcgcgactccgcccaaatcaactgtttatcaatacctatcggaagatcgggacctaacatctctcattagctgttttataggagtggattgcaactatatagaaaagaaggatatgcacaaggaggttaatgcagtagtgcgaaaatggtaatataatattctttgcctgcttatgatcttcacactggttttagatttcttcacactgtttgttgggcactagttatttctggggaacttttagcatcagatgcagctaatacattgcacataactaaatggtgctaattcctgccgtatactccatccattctaaattgatctacatatttcatagatacaccaagaccaagaaaaactaataactctctcatactatatttactctagcaacaaacttgatgcatgcaccattcccattattttctagccaatatcaaattaagatattgcatgtgggttataaatacttatgtgcatggatatatacatcaatgtccatttactccaatgcacaaataacgaatagacttaatgaatgaacacaaatatgtaaattatttaggaataacctcaaaaaaactatatgtagatcgatttggaatggagggagtacaataatacaatttattattgtaggatctgttagtgtttggctattatttattttgaatgcttttagcctcttgtacttatatcatgaagctctttttgttgttacagcagtgtgggaagtatattttcttcctctgacggaatggataatttgttcccggtggaatgctttctagtgcacctagcatgttctcatggcaaaggcgacactatatctctggaatacgaacatggcaaagggttcctgctctatcagggctcatttggcagcccggcctattcccagggcggccggtccgggcggaaaaatttcatgggcccattttctggaccggccagatccacgtcccaagggaaaaatcccacgtgtcgggaggtcaggaaaatttcctcgcgtcgctcgtgtgccgcagcgacgattcccctctcgcgaacgaaggtcgccggctcgccgccgctccccttgacgtcgccgccgccggtccttccccgagaaaaatgacaatacgccactcttatggtgtggtcctaataaaataccattcaatataaaatgtacatgataaaataccatacaatacgcagacttcaggatattttgtcactatggagagttttacctattttattttattttcttcatgtttctttttctcccttgcacgtgaaataactgaaatgcccttggctgatccaaatagatcagatcgatctatacttcagcagtcatatccaaaagtttcagattcgtagtaagcagacataaaaataacaggcatagacaaaatagaatcaaactcaacttttcagattcatagcagcagaagaagttcttgtccaaccgagttccaaggcctgcggctcggctgatggggaccgaacgagtgagctgcgctggggagagagacagggagagagacagagggacaggggagtgcgggcgcgggcggcggcgctagaggagccgcgcggtgggtgggcagcgctgcggaggtggcgggcgagcggcagggcgtggtggatttttggatcgacaagggattgatctcatctttgtaaagaagacgagggcacttcagtcattccacgtggagaaaagaaaacagggcgaaaataatataaaataggtgaaattcttcaaagtggcaaaatatcttgaatgtaatgtattaagtggtattttatcccgtgtatcctattgagtggcattttgttgaaaccacatcataacagtggcatattgtccttttcctcgtccttcccctccagcgagatgcaacgccaagcctccctcctccaagatctgggttgagctgctcttcacatcctctcctttttctaggttttttatgtgatgcacgagtttgtggttgagtcccatctttactcccggcgctcctatcgtcctctccttcttcgggattctgcctgcacatcacccctagtgacagttgtgtgggtgattggatctccccagtgaggtgactctattactactctttttcctttcatctccctcttcaactagggttcttgtagattttagcaagtcaaatttggacgttaagggacaataagatctgtaggttgcagggtggattctaattgaacttcatgcaacagatttgaaagttcatctctgaaattgcatcttttttctctataatcatggattgacaaaatttggtgtacatatagcagctaacagctcgttttggtgtacatatattcagcttactcatcaatgttcctgtaataaaaataataatatgatttgcagtgttgcacttcccattgcaatgtaaacacctgtgttctgtagctctccttgaatttttatgttgttgtctgaagactaaccagccaatgaaaatatatcttttattcttgcccaaatgacagtccagtagcttgctgttttgttatcagatacatttatatgcatgctacattgttttccgtgctacattgcccaaacgacagatggatttaaatatttagtttaaggcctgcactgcagagtgctgacaacgctattcctctccttgcgagtcgcgcccagttgcaggatgccaattctcaggatccccgctttcgcactcttgtgcaagttgattggtacaactccgttttcatggcaagaccccatccagtggtagagatgaagtatgtggactggatattcatgaggcacaagaacaatgcagtctttaatgaagtaatcaaagtgtgtcaggcaaagaatcttggggagatccttgctcttgagtatgattggaatgaggagattattgggtagttctatgctacagcatattttggcaccaccaagaagggcactcatttcatcaagtgaatgactatggggaaacaatacagagtctccatgggtcagtttgctgctgccttagagcttgatccagaggatctgacgacgcctcatctctttgatttggaagccttattgatgcacaggactagcttcatgtatgagaaaggaactccttttggttgcatgggtaccactcgaggtatgcatcccaactataaagttatctattccatttccaggtggtccttgcttccaaaggttggggatgccacaactgttcctaccaagcatgctcacctcctttgctctatgcgctaccagtgccctgccttcagtgttatgaagctcatttggtttgagattcttgagaccatctatgatcctaagagaggttgcatttatacccccatacattatgaagatgattgaggaaatgataggaatttacttctccaaacaacgtgattagaaggctttccaccctcatgctccttcctcttctgctgcggctccccctcctccatcccggtctactagaggtttagcttcagccgctccttcagttgctcctcagcgctcgagctcttcttctaccatcaagaaggcacttcaagctatcttttgtatgggcaccaagatagcaaagaaagtcaagaagattgagaggcatcagaaggaagattggaaggctgcaggcaaggatgtgtcagatgtttctgaggatgaagcttttgaggacccatttgctgcatatgaggctgctagggatgtggctgccggtgagggtccctctcactccttctgtgagaactccacgtctagtgatgatgatgatgatggggatgaggtgccaaatgttgagtcagaggggactgatcctgaggctgctgtggatgctgctgtataggagagtgatgctgcgactgagaaggttacttctgatgatgcctctgagtggattccctctaatgccagcactgagattgtgcctttcgatggagacgaggattgatctccttcatcccttgtggtttggtccctttttggtgccttgatgccaaagggggagaaaattgcaatcgaaggaggtcaagttatctttttcagccttgctgccattttgacagtttgtccggaagttccggacctttggtcttggaagttccgggcagacttctttgcccccctttcactcctctatctatatggacatgtaaaaattctatgtgtggatgtaatgactgttaggtgctaagtataatccctgcatcacttcatgctatgattgccttatttcttgttttgtgatgtgataattttatctttttcggtgcttctcatgtcatttgcttttaatgtcatatttatttatcgctcttattacatcccatgaatgaaaagggttgaaggaaactctccatgtttgctcccttcctaatatgcatatgagcttcactcatattttccatatgcatattttaagggggagtttcattcacctctatcgattcaaaacttaatcttatatcaaatcctttgtgagctttaaccttattgtcatcaatcaccaaaaagggggagattgaagttgcatttatccccctagtgggttttggtgattaatgatgaataaggttaaaggactaatgagtttattgagttactcaggtgattagtcccaaggtgaacttaggtgatcaagagatgcttggaggacccccccccccaccaaccatcattcaagcggatttgaaactcgaaggacaataggatagtttaatatttgaaatcgagttttaggaaaaaccgtactattaagaggggctccaagtgtggttctgggatataaaaagtgctcttagtgagatccaagtggtagaatatttttgggagctatttttggaaatggctctggcccggacagagaaagctggccagaagttccggtccctggacccggaacttccgaaccttgtgagttgtccgaaagttccgggtgtcaggaagttccggactccttccagttcaaaaatgtgagtaacggctagatgacgttacctagctgttatatatatccagatcacacctagttcttttttttttggccatttcacttcagttctttcataccctaggttcttctagcctctcccaagatctctttgcttcctccatcaaatctagagacattcttgtgagattgagagaattgatgagagtgtaggagtgatttggagaaggtttgaagattaggtttgattgagcactttggatatattgtgggctgtcacttgggcttattactcttggagatcttctcctatacggttaggtgtcgcccgcgagcttccaaagatcttgtagatgtcctgggaagatttgtgaaggttttcctcacctccgcaaggaaacgaggtaagtgagtaaagattcttgtgctgagatttcagaggttctcctaagtaaagcaa

SEQ ID NO: 19915 - DNA, 16425 bp, Oryza sativa
tccccccaacgtcaatattgggctatcgcgttgtcacagtggcaaggggtggtgccgtcccattggacgatggcgctggctactctggcacaccaaaaaggacttttttaaataagttttctcaaggatatatttatataataagtttttgaaaaggaccaaattgtaaaaaaaaatcccgtctcttccgttccccctcaagatctaggatttctttcaggcctaccagccacagttctccgacttataacgccattcaccgttcaaattatttcgagaatataaagcaagtgtaatgcacatgctatgttagtttttgtcagaaactaacgtgcccaaccacacaagcacttggcctgtgaatgtggacattttgcaaataggaacgggtactaggctactagctccctagcaattacttgctctgcaaagaatggtaacaatggtagtatgcccattttggtagtaaaccagagccaactagaatactataaaaagccggaattgctccttccctcctacaacattgggtttttagcctgagaacgatcagattctgaggctgcaaatggtataactacagtacaacataaggattaaacttctgactaatgcctgtaaactgtgccattggaatgtgccacagagtcgtcctgcagaatatcattgacttctggcaagaaaccactctcaaagaatgctgagtggagggcttgaacgcactgctttgcctcactgtcatggaccaccaaggaaatgttcacctgtttaaggatgataggtttctttcatcagtcaggaatcacacaaaattgcaatccatcatcaaaatcaaacatgaaagaaaatataagcaccttggatgccccttgtgagatcatctgaacattaactccatttgtacgtaaaacgttgaaagcctgacaaaatgagaatggatatcaaccatgtattgggaagaaaaacaaaagctgtgttccatgctgcttgagcaggatatttctgagatgtttcccacaagctagcattaaacagatattaaccgtagctgaaattggaacttcagaacaacattatggatgtagagacagttaaagttaggggacaagcatttaccttttcaagaatcaaagatgacctctgcacatttccaattaacgaaattatcgatctatgctgcagtaggtgaacaactgctatcttttcaagttcttcgatgacatgatcaagttcctggcacatatcactagagatgaactacaagcacatcaagctggaagatgcatcattaattggaacctagtaacttgttcatttgtgtcgaaatatgctagagtcttcgaagattatcctcaaccaataatttgtttttataatttcaagatttcatcaaaggcacaactaccactttttttttactgagcacaacattcaatattccttatcttaattcttgaatgattcatagttctagtatatttacttccttatgcaatataatgcctgcggttgaggtcctgagcagatttaaatatggtagtggcagtttttttttccttggtacaaaataaaaaatgaagaagactgctcaacaagatcccaaaaaaaggcagcttggacaaaaatcaaataatcatgagaaataataaagaatggattcaggtccaaacatttgcctgcttgatcaattcacgactccagagttttgatggatccagggtcaaagatatgctgacttcacttgtagctacacaatcaacagagatgcccaaatcttcaaaaattgaaaagacctgaagaagcaatacaaatattacaactaaaagaataaaatacaagattaaacttaagaatgtgtaagctctagctgtaccttagctagaaaaccatattgtccaagcatccgtgtgctcactatatcaagcattgtaatatttgatttaagtacaatactagtcaaaacagtctgaaaaagtcatccaagactcaataagttgcaaccaacaagtagatgagtccaatattagaaaatagtcaagcatcaaaccttactcatatctctagctttagtaatgagtgtaccaggggctcggcggttataagagtttttaaccctgacaggtatatcaccttctctagctggtcgcatcgattgtggatgcaaaacctagaattagttagtaaagggatttctgtaagcagataacaaatggatatatagaagacaaccaattggtcactaaattattaagctaaaaagtaaaccatctaaaagggaaactgttttactaaaagaaaacccactgaaaaaataacattgacttttacaaatggatagataaataaaagtgataaaaatcatgcggtacctgtgcaccaaaataggcaagttcagctgcctcatcaaatgtcaagtatggcacaggtttcgcatttggatgaatattaggatcacaagttaaaacaccatcaacatctttccaaacctattaggatttaggaatatgggaagaaatataagttcactgcattgagaattaaaacaaacaagtaaaacaggatgcttagtaggaaagtaaatttgagcaagttctgataattacaaacatgagttggtgatggcgatggagagtatgaagctctctctatgctgacattacacttccaatgattaaatggactttttgcatggggctaatggagtgcatttgacgaaaggctaacgtaatggcaacagggaacaaaatgggcattttttgtccttactgaaaatagtaattgtcaatggtagaggttaccagaggcaaaataatctaattgcaagatatggtatcaactgtaaaacaaacctggatttctcttaatcccaaggctttgccaatggtagtagctgtcaggtcactaccacccctgcctaaagtggtgattgcaccagttttccatccctacaagttcacatgtgaacactataaggacagatggagacatggagtatcggtaccattcaattaaaatgtgtaaaatgggttagatggccaacctttccgagaaaaccagtgactattggaatagcaggaccagtaacccagtccccatgtagcctctttgcaatggcaggataagttgcttccagaatatcagcgtttgtgaaatcatcagtggttataaagcctatttcaaatgcatcatactgcaaaatatcaagaatcaattaattatagctgtatcaaaattctgggtttagctaaagtatcattggtataacttcaaaaaatacgttgggtatttcttatctaaagaagcacctgttggatagaaaagaattaatataaattcagaacacttgtacatttgtattgttttcggtacataaatgacttttgctggctgactgctaggctatacgaactaaaataatactgaaaatagcagtaagcactggctatattcagagatgtcaaacaagaaggaatatttaaatcaacaaggtagagcggataaaagaaattcaattgaagagaatatacctgacgtgctttcaccccaagtttattcaaaagtgccgcaaatatccttgttgacatgcattcaccgaaggaaacaagatagtctcttgtcctaagagtaagctctttcatcatagcaattcccttaagaagttgctcaagctcatccgacaagcctgcaatatttcatattgactatggtaatttctatgttgcgtctatcaagggtaattgatgtaccaaagaaaatggaagctaatgtaacattacagcccaataatgatctaacaatgctttccacaatcactctagacataagcaatttatactaaagcaataaacaccatacatttagcatagtataataaagcaatgccagaaactagatagagattaatacattatgagtaaatttcagaaacctaactaccctttgtgaaactaacacagaacggcagttgtttttacacagaatttcattaaaccatactttcaagtatttccatcatattcaacagttttcttgataacaatgataggcttctgagatcgatgaatgggtgcaacctaacaaataggaatgaagtttgagaaatcatgctacatgatgcacgcatgttgtcatttcatctaccctatagttcaacaagttgttttactcattcatcatgtgacacatccaacgattgaaaatcaactgatgagttccatccgacagcgtcacacctccctcccgatccagatcagatcacgcacctccctccccacccagatcgcgctcacccctcccaggtcacgagcgcctcttcgacacctgcctccgacgttgacaccggaaaccgcaccgccctcttcctcctcgacctccgtcgattcgtactcatgctgccatccctccgccgccgatttcgacacctcaccgatctccgacaaagcgacgccgccgctgcgtcctccgcctcaggcgccaccaccgccgatacatagtcacgtcgacctcaaggtccgttcactgcacacaggtaagctcctccccttttttccaattctccaggaccacggtgcctaaccctaatcgcgcccctcgatcaacctctctcaagattcgccatcatcgccataaaatcgccgctgacctcgactcctcccgtcgtccactgactcgtcgctgcaggggggctggcaactcagccaacaagacacaggctcgctatccactccgtggcgacggccgccgtacccaaccttctgcggcctaatacaccggcgctccatctgccgacgcctgattcctgaagcagtggccactccacctccacgaccgaacagagtgacagccatcttcattgcttggtggaatgcctctaatttgagctggtactggtacaggctgcctataagtatatgcagtaagttaatttgagcttcataaacattgtactacagaggcttgcaacagttggggacaggaccaatttataaggatgacacccttacattgccactctgccatccgaaaataatcaggtacccttcacttgattagttgatttttgcatcaacaagaattatagctgctaatgtgttcattttcatttatctgcacactttgtcctcggaagtcaaaactgtaaattcactaaagtatgcattatgttgatctgttgtttaaaaattcagtaaatagaaacttgtttagcatctgccaaaatgttgtttttcagatagcttacacttgctgcagtagttactattatccagtgatttgctgctattttggcagtgttcttttaggtaataagatcactgttcattcttgcttcctacagctgcagatgttcttcaagccgtgcagttgttgatcaagttcttcggacctactggacactggataactgatgccaaatgtccttgttaaattgttatatagttcacgatatactagagtacaattagcactatctgctaggtgcttatttctaattgtatagtcagtggtaggtaataattgttgcattgataaacaggtgcattagaatcttcagttctccgtaagatagtcttgaataagtaaatatgccttttggtctgtggctctatgctgatgaaatcttccttctagatgagcttgtgtgttgttttgcaaaataaactttgagtgcaaacgtacaatttattgagatgtcaactttgtgtattttgtagtttgcactactaagtgttctactgttccacagatgggtgtagctgctgccaacttatctagcagagggattttcagtctcttatttactactgaggatgatcaggtccatttgttcttacactggggtttacagattgtgcattagatgaacacaaatcacattgctaaaagctgtttcttagtggttcggcaaacctaggcagctagatggccggggttggccggggcatgggtgtgtgttttcacggtaggagggctttggtctctcctactttgtttttttttcctttattttcttccccttaatgaaatgaaacgcaattctcttgcattttcgaggaaaaaaaacattgctaaaagctgagtacctctcatgtggaatataattgtttcttttcctttcctttacaattatcatgctgattagaatagttaaagcttgcttttcattgtagtgcagacattttagacataaagaaagaaggtaaacagagataaggtaacagaagcatccatgttcttccaaggtcacagcacactgaagtatattttttctttcccagatcacatagccttaatgtccagtttctacttatggcagcttattgggatgtgcgattttatttatctcagtatttctcatcagttaaccaacaagctcttgtattatttgtcttgctttattctgtttttttttcagaaagtaatgggtctttaacataatagcataatatttatgttgccttaaattttgcagcgatggttgcttagtggcaaaatatggttggttctcttttccttttgcagttgaacttagattttaattatttgttgacattaaacgaatgaaacgggttcaaatattgcaatctttgttgtaaagtgctacttgttcattgtattatatgtactgttgtgtaagcaactaataagtatagatataatagtgatagtggcctatagctaaatcaagcatacaaagaaaagtctatactagaatgtactatctgctatccatttagaagtaccaatctgataaattttgccttgtagacagcaggagcttcaattgctgcttcaaggtatacaaggcaactatgactcctccatcaatcataagtcgaggcattggctgacaggtaaatgaatccaattaatatttatacatttgagtttgtcctatctttgatttgaaacgttgaccatcctaaaacataaccttcagggtatgagcatcttgattgattcttttttggatggccaatgaaacctcagtttcagtgtaaggcttagttttttcttcaacttcctcgttttccgttagcacgcttttcaaactgttaaatggtgtgtttcttaaaaaagtttctatatagttgtttaaaaaaggcaattaaatccattttttcaaaattataatagttaataattaattaatcatgtgctaatgaggtttctcgtttcgcgtgcgtgaaaaaatttacctccttttggaagcatcgaacggggcctaagtataacattagaggataaatagaactggcagatcctagattgctcagataatttgcctgtacttggaaaacacaatactcaatttatgtgtgtacatggacagcaatactttaaactgttcaatggataagacatgggatgcaactgatgctttcatggctggtaggttgatttctctttcaaaaatacatgcttaatgtttatgttctaaatgtacttattagcgttggtatcgtactaagtatttttattatctatctacgttaacatctcaatatataggtaaccatatggtaaatcctcgatgagggcgttgatacaagtgcattgggttgaatgttgaagctggccagtgcctccatatggaactatgggagagatggatttgccgatttataaaaagaataacaacgttactcctcctaacgtttaactgggtgatgtgagcagataaaatagaaggaaaattatgtttggtggcaggtgtatagaaaaagctatatttttatgatttctaaaaaaaaatgctagacatcttatagcagataataaattttattgtaaacgaggtattcatcaaacattagatggtgttggatacgcactgattgtgaatttatatattattaggattcagatggtttcaaaagatgaaaaaactgtgatgttatttttactagtgtggctatgtatttaacaatataataacttataatgtcacttttttagtattaaatctatattattttatttttatgcttgattgtcaaaagcatatatattctttatattactaaatgctaccgtagcattagcacggccaaattattagtagtaatagtgttgcaaaggcaaaatgacccatgcagcatgcagtgcacattctactgaccaatttgaacttaacatcctgtattccacttcaattacaacaaaaagaaacaaaagttccctgtgcacatgtttcatgacctcaaagttctccaataccatagatgagacttaaaccttatatagtcggaaaaaaaatgctaaagcaagtgtgaaatgtctttaccggaaacaattgacctatccaatccaagttgatcaatggtcctagataaagaaaaacagcaagaaattaggtaaagcgtttcaaatcaatccacccaatgaaagtaaagcattttgaatcagaatcacacccaaaatgcaattccttaataaaggtgagctcatcaagctccgacacatttgttgcaccacagcccaccgctttctccccagcctagaagcaaaatcaaggagtcagtgcttgagacttatcaaacacctctctatcacagaaccaacgcgcacgagtattcagggtaacaacagaactggggttctggtgcaaggaggtaggtataccatcagaagcttgttggtggtcttccccatggcggagagtacgatcaccggccgctcctcggggaagctgaggatgagatcggccacctcccgcatccgctcggccgacgccactgacgacccgccgaacttcatcaccacggtgagctccgactccgtgtgaccggcattggccccctcccgcgccggctccaccgcgcgactcttcttctcgacgacgaccgcgctggcagccgcacttcgctggcaccgaatccccgcacccctcctccggccccgcaggcaaggctcggtggcaccgaccagcagctcgaaggcagcctcattcccgacctgcggggctgcggcggcaccgcggagagcaaccgccgcagagggccgcgggttgcaccggagagccgccgccgccgccatgtggagagagagtagggagggaaggaggcgccgggtggccgagggcgaggaagagagaggggaacggacggcggagaagggtctaatggacggcgcggatgagaaccggcgattctgcgtttgaacgtttggcccagaatcctccgaaaagaagaggcactgtggaagtgaggcccacgcagccggggagcaggggcggcccgcggctgatcgcgaccaattgccacccctctgatctctttgagcaagtttaatagtatagcctagtactaactccaatacatctataccaatttatacaatagttacttactatactgttaatatatggtcccacatgtcatacacacgttgcgtcttagagtccgtgctgcagctggctacagatttgtagcccgctgctcttctctctcatcttttatataattaaaatatgtttatagctggtgatgtgaccatggttactacggatacaaccgttgctcacatcatggatgaacaagatgctatcaagatcaagtcctctaagtgctagaatccgattcggccacttgctacactgctgatttcaaacggccgccgaatctgcatacgagctccgttttcggcccgtgagtacttgatggaaagctcttggagtcctctttccaacggatccagcctcatcaccaaattccatcctagtcaaccgcagatgaagaaacaagatgctgcatcacctgtcatgggcctttgggcttgtaactatgtttgggaccccggcccatgtagggcccatgtggggtgcgtcccaactaggtggaggaaggcctagaggtcctcccacctccttaaatagttaggtaccactctagattttcttgggttttgtttagattaaaatttagctttgctactttgctgtgtaatcccgtgatcggtttgatcgccagtttactcgtgacggaaccacaacctatcatttgtattcaattcctatctacaattcagattgcttttatcttgttcttgcttgtttcttcgatttgcttgcaggaataaggttgatctgcaccggcaagatcaacaacccacggagaggtgtatcgatcgctaaggcgcaacacaacaacgtcttgtacggttgtagtcgggtcgtcaacgcttctcccaaatcgtagttatcatcaactcaccgaaagatcgggccaaagaacagccttgagtctcgagtggagctcagggttcatcagttggctattactctgctattgtacctgctctgcgtcccagttgttcccaactccccctcctcatttttcacgcacacgcttttcaaactgctaaatggtgtgttttttacaaaaagtttctatacgaaagttgcttaaagaatcatatttatctatttttgaaaaaaaaatagctaatacttaattaatcacacgctaaatgttgcttcgttttacgtgcttagtgctgcctccgtcctaaaatataaaaatttttaggattggacatgggtattaagaaagtgggtagaattaaatgagagaaggttgtgattggtagaaaagtggatgtaggtaagaaatttgaatggtgaagggttatgattgattaggaagagaatgttgatgaagaaattgttatatttttggacaacccttgagggctagggagtatagccttgtttagttcgcgaaaagaaaattttttggtgtcacatcggacgtttgaccggatgtcggaaggggttttcggacacgaatgaaaaaacttatttcataactcgcttgtaaaccgcgagacggttcttttgagcctaattaatccgtcattagcacatgtgggttactgtagcacttatgggtaatcatggactaattaggctcaaaagattcatctcgcgatttccatataaactgttgtaggatcgagatgtcgactagaggggggtgaatagacgatttaaaattaaatgacacctaatcaaaactaacctaagttgctaggctcggtgagggacaagtctaactaagcaactaagttatattttgcaatcctagggtgaaagtggctcaagtatatcactaggaaagtaaatcacaattcctaagtctagtttagcaatcctagggtgaaatgatctcaagtatatctctaggaatgtaaattgcacaaatgtaaattgcacaaatgtaaatgcgacaaataaaacagacaatgagacaaggaatttttcaccgaggttcggaaactcgccggtttcctactccctgttgaagcgtgcccaactccaccgctcaaccatgaaaccaccgcacgcccccttcgtcaaggggtgggcaaggcgggagccagcccacggagaggactacccaggcctcgatcacttggggtagttcttccttcactccgaaggtggtgaactccaaaccactcacaaccggcgccgggcctcctccacaatcttctcggagaggtcaccgggcaacttctccacaagccatctaggaggcggcaaccttcaagagtaacaagcgatgacccggctcggagatgataaagtgccacactagctctacaatggaaagcaatgcacttgactcttggctaaatcaaccctcaaacacattagatggatgaacacaaagctccagtgggtgtgtgagagatgcaaggggtgtatgcaattgaagtgggtgccaagagactccccttggtgctagtggaggagtatttatactcccaccaaccaaaactagccgttgggggcgaaatcccccaactcagtgtactgccggtctaaccggtggtatgtggccaatcagaccgtgctactctacaacggttagttttatagccgttgcagctctatcagagggccccatcggcctggccggtcagactgatgttgagtggtcggtcagaccgcccatatctcggtctgaccgaatacggctccggcagctctgtatcgggcatcccagaacgcaccatcccggccaccagggggccggtcagacagcacaagtgccgccggtcagaccgacattcatgccggtcagaccaccacaagctggccggtcagaccggcttagcgcacgcggttagaccggccctggtaaggctgaacacagtgaatagaatgtgtgtgttgtgaaatgtgagcacaagtctaaatgcataattacctaatgtggcaattaaaatcatctatttgctaggtcattacccctcttaatagtacggcgaagctaaaaataaactagcaaatttgatcgccctacacctcgatcaatttaaaactaaagcactagttttaccatcttcttttttcgcttcgcgccaacaaattttaatccattgataatcatccatgtgcacatatgacgtggtactaacacacaatatataacttaaagagaaacggttagtccacaattagcgcttgtcattaattaccaaaattaacaacgagggcctagatgcttcaatctccccctttttggtaattgatgacaaacaccataaatatatataatcaaacataaaacacatggacattttgcaatgaaatgaaaatgctccccctaaacatgtgaatatcaatcacaaataacaaatatggaacaaatgcactttcattcacatttcaacatagcacaaacacatatgaaacatacaatgtgaacttcacatttggatcaaccaattgcataagatggtcacaaatatatcaatatcacatcaaccatctatcatagcacaagttcacaacaataacaatccaaattatagaagtttatccatatatcatccaactcacaaatttgtccaaagagggctcacaaataatgatctaggctattacatgaccacgaagggtccaaatgacatagagttcaacaaaacgaaaaagaacacacaagatagagtaatagcccatatccatacataatatagaccaaacaccttaacctactagataggaggtagctaacctcactactcctagtcccatcccacaaaataaaaaagcaagctagaattcttctcccccttttggcatcaaggaccaaaaaggcttcactcttgtggaggagaaggaggacgaggcagtttagccaacacgcgcgctgcgagcaggtagcaagtagctatctctatcatcaaaacccgagtgttcttggcagcaactagaggtataagaagagggaaagaacgaccatagggtcgtgctccaaccctaggacgcgcccctaatgggcccaacttggatacacagcccattgggccaaaagaggtgacgcagcaccatggacagaaaacagtcgggagtaaaatgacaattgcggccgctccagaacagatatggacatgtggctagatccatttgaaagtagacttgataagctttccatgaagtacttgcacgcccaaatcggagttcgcatgaagtcgtggcggccgtcagaaattggcgctgccctgcagtccgaatccaccccgcgcgaatcctctcccctttgaatcctctccattgttcctgagtaaaacacgagtgcacgcgtctccggggtataaagaagaggaatatgaactcaagaaagaactcacctgataatttagttggcgtgcacgagcatgggtaataggaccatcatgctgtacttggggggacgtggatgtattgatggtgtttatgtcctcatcatcctctccttcttgcatttgagtcgtcctcgactcaagctcatcatcttctcccaaatacggcttcaaatctgtaacgttaaatgtgggactaaccccgaaatctgcaggcaaatcaagcttatatgcattctcattaatctttgctaacactttaaatggtccatcagctctaggcatcaatttagactttctcatatcaggaaatcgttcttttcgcaaatgcaaccaaaccaaatctccaggttcaaaattcaattcccttctacctttgtcaccagcaaacttatacttagcattcatgcgctctatgttttctttagttgtctcatgcagttttaacatcaactcagcacgttgcttagcatcaaaattcagtttttcaaaagatggtaaaggcatcaaatcaattggagcacgaggcaacaaaccatacacaatctgaaatgggcacatttttgtagtagaatgcaaggaacgattataagcaaattcaatatgaggcaagcattcttcccacatcttgatatttttcttcaaaacagccctaagcatagtagacaaggttctattcaccacttcagtttgtccatcagtttggggatgacaagtagtagaaaacaaaagtttagtccccaatttagcccacaaagttctccaaaaatggctaagaaattttgtgtcacgatcagaaacaattgtgtttggcacaccatgcaagcgaacaatttctcgaaagaacaaatcagcgatatgagaagcatcatcagttttatgacatggtatgaaatgtgccattttagaaaatctatccacaaccacaaaaatgctatcatgccccctcttggtcctaggcaatcctaacacaaaatccattgaaatatcttcccaaggaatagtaggaacagggagaggcatatacaaaccatgtggatgtaagcgtgacttagccttttgacatgtagtgcagcgagcaacgaacctgccaacatctcttcgcatctgtggccaaaagaaatgaccagcaaggatgtcctgtgtcttcttggcaccaaaatgtcccatcaaaccgcctccatgcgctttctgcaacaacaacaagcgaacggagctagctggaatgcatagcttgttagctctgaaaacaaacccatcattgatgacgaatttgttccatgttcttccatccttacaatgcagcaacacatcattaaaatcagcatcatgcgcatattggtctttgattgtttccaggccaaaaatcttgtagtcaagttgtgtcaacaaagtgtatctcctagacaatgcatcagcaatgatgttctccttccctttcttgtgtttgataacataaggaaaagattcaataaattcaacccatttagcatgtctacggttcagtttcccttgactacgaatatgcttcaaagactcatgatcagaatgtatgacaaattccttgggccacaaataatgctgccatgtttctaaagttcgcacaagagcatacaattccttatcataagtagaataattcagaacaggcccactcaacttttcactaaaatatgcaacaggttttccttcttgtagcaaaacaccacccaatccaatcccactagcatcacattcaagttcaaaagtcttattaaaatcgagaagttggaggagaggtgcatgggtcaacttatctttcaacatgtggaatgcgttctcttgtgatgtgccccaagtgaaaggcacttccttctttgtaagcgcattcaatggtgcagcaatggtgctgaaatcctgcacaaagcggcgatagaaccccgcgagtcctagaaagctccgcacctgtgagaccgttttaggagtcggccaactctgaattgccttaaccttggcttgatcaacctcaatcccctgcggagttacaacatagccaagaaaagatactcgatttgtgcaaaaggtgcacttctcaaggttaccaaataaacgtgcatcacgaagagcattaaaaacagcacgtaaatgattaaaatgttcacccatagacttgctgtaaatcaagatatcatcaaagtagaccaccacaaattttccaatgaaaggacgcaaaacctcattcatcaacctcatgaaagtgctgggtgcattagttaaaccaaaaggcaccaaacgtaaatataaaaactaccatcatgagccttcctaagcatataatgagaatcaaacatgcatgtcttagaaggcttaccactggggcaatcattcaccaaatgcccaacctcacgacacttggagcaatacttaccattactcttgacaaaacgagtggcacggtgagaaggttttttacccttctttggaatgaatctaagtccctccttgttaacgatgcaccgttgctcactcaaaatcttgtcaagagtgttcttatccttgaagcatccctccaaactcttgttgagtttggccatttgctccttaagctcattgttctcaacaacaagtgaggcatcacaaatagaaacacaagagctagagctagagctaggcatatccataaaatcatcacaagaggtagaaatgctagatgatgcaatatgaggaatatgacaagaagcactatcatcaagcaagtcacaagatatgccaacatcaatgtgagctccatgttgagtagtgaaaaggaggttgtca

SEQ ID NO: 19916 - DNA, 12318 bp, Oryza sativa
ttagaagagtcattggccatgagacaaagtggagcgaagagtgatggagcctccttgatggcaacaacggccatcttcttcttcttggagcttgcatcatcatcaccttcttcttcggacccggatgaggtggagctctcctcatttgagtcccattgcccaatgaaggcctcaatcttcttcccttccttcttgagcttcttcatgagcttgtagcctccactcttcttcttggatgacttgtctccatcattagccttggaagggcacttggaagcaaagtgtcccttctcaccacactcaaagcacctcaagttggagagagtcttgttaggtattatatttcttctcctattggagttggagccccttcctctctcctttcttcttcccaagagatcattgaaccttttagcaagaagggcaatctcttcctccaagtcatcattggcttcattcaccttgctcttccacttgtcttcaacttcggcttggagagcaatgcacttcttagatggtgaggcttcctccatctccttcttcttcaacttgtacatgtcattggtgttgatcttccccaagaggcttgcgggtgtcatccttgacatgtcggagttgatgagcatggcgattagggtctcatacttctccggtagagcactaagcatcttttgggcaacctcaagatcggtgtaggttgccccaagccccttgagatcattcacaatgacattgagcctcccatacatgtcattcacactctcatgaggcaacattgagaatgtctcatattggatcttgaggaaatgaagcttggcatccttgtactcacttgtgccctcatggatctccgccaacttgttccaaatctcatatgcgatcttaaggttgctcactctatcgaactcctcttggctcaaagagttgaacaaagcattcatgacttgagcattgagtaggaggttgctgtgatcaatctccgtcaagggcgtgccggtgagatagcaaagcctacatccacaatactccaaatatggaagcttatagctttgaggtgagtagacattttaattttccaagtggagtagtttgtggtattgaacatgagagccttccctacatggttcacctcgttcgacatcttctctctaggcggtgaagcccaatcaagagagaccaagctctgataccacttgtaggatcgagatgtcgactagaggagggtgaataggcgatttaaaattaaatgacacctaatcaaaactaacctaagttgctaggctcggtgagggacaagtctaactaagcaactaagttatgttttgcaatcctagagtgaaagtggctcaagtatatcactaggaaagtaaatcacaattcctaagtctagtttagcaatcctagggtgaaatgatctcaagtatgtctctaggaatgtaaattgcacaaatgtaaatgcggcaaataaaaaagacaatgagacgaggaatttctcaccgaggttcggaaactcgctggtttcctactccctgttgaggcgagcccaactccatcgctcaaccacgaagccaccgcacgcccccttcgtcaaggggtgggcaaggcgggagccggcccacggagaggacaacccaagcctcgatcacttggggtagttcttccttcactccaaagatggtgaactccaaaccactcacaaccggcgccgggcctcctccacaatcttctcggagaggtcaccgagcaacttctccacaagccgtctaggaggcggcaacctccaagagtaacaagcgatgacccggctcggagatgatcaagtgccacactagctctacaatggaagcaatgcacttgactcttggctaaatcaaccttcaaacacactagatggatgaacacaaagctcaagtgggtgtgtgagatgcaaggggtgtatgcaattgaagtggatgccaagagagtccccttgctgctagtgggggagtatttatactcccaccaaccaaaactagtcgttgggggcgaaatcccccaactcagtgtattgtcggtctgaccggaggtatgtggccggtcagaccgtgctaccctacaatcgctagttttatagccgttgtagctctgtcagagggccccatcggcctagccagtcagaccgacgttgagtggccggtcagaccggcctcggctcgatcagaccgccctcagcttggtctgaccgaatacggctccggcgactctgtatcgggcatccaagagcacaccatcccggccaccagggggctagtcagaccgtacaagtgttgcctgttagaccggccattcatgtcggtcagaccgccactaggtggccggtcagaccggcttagtgcacgtggtcagaccggccctggtcaggccgaactcagtgaatagaatgtgtgtgttgtgaaatgtgagcacaagtctaaatgcataatgacctaatgtggcaattaagatcatctctttgctaggtcattacccctcttaatagtatggtgaagctaaaaataaactagcaaatttgattgccctatacctcgatcaatttaatactaaagcactagttttaccatcttcttttcttcgcttcgcgccatcaaattttaatccatcgataatcatccatgcgcacatatgacgtggtactaacacaaaatatataactcaaagagaaacggttagtccacaattagcgcttgtcattaattaccaaaattaacaacgggcgccttagttttttttattttttctatatttaatgctccatacatgtgtccaaagattcgatgtgatgtttttgggaaaaaattgggaactaaacaaggcctatatagacgtatctcttctcttctatactagcaaatatgtccgtgtgttgcaccgggtgaatatcaactaattatgaatggttaagattgcttaggtacttataacacatatgcataaaaatcttgaatttgtacatacctcgcaaatatctccaaattatactgggaaatataaaaacatatttcatattgtatacacattcagattcatgtcgcacatgcgtgagatattccaaattttctacacattcagaacatattccaactttcacaaattttcacaaacgggggcagttatagctctggcttcaccttcctctgcaaaagagaaaaggtaaaggcatccgcaatggtaaagaaacatgcactttgtaatattgaaataaaattcactcaaaaatctttagcggaatatgttcaaattctagaaataatttaatatttaaagaaataataattatcttttcattggtttaatttatctaaaaataatttaccgagtgatcaaataattgatcataatttcccagcaatttaaaatgtaaatagtgccaaacaaatttctgtaaatctaaaactaaaattaaatcagttgcttaaaaaataaattgatttcggcctaaaaggctcaaaccgacatggcactctgtggcatacaagcgtgtgtcatggcggcctagccaggctagaaggcctagcgaacagtgcgggcagcccaatgcaagagagatgatggtcgtctgagattctagccgctccgctgaaattgtggggaaaacctagcccagattcttctcgatcctctttctccctgacgatgagcaagcgagagagaggaaacggcgatggtggcggtgacggcagtccagcgaggtggcacccgcgcggcggggaatccatcgcgcggctccaaccttcggtcgattgccgagggacaaaacccaaatcccattctcttctccctaatccccttctctctggcacgttcgagcaagcgagcagcagcgatggtggtccggtgaggtggcgcgcgcgcagcggggaatccgccatgcggctccaactcttttccggctgggggcgttgcggagaacggcacctagccgtgcctcttcccgtccttcacgcgacaatggcgcgctaggtcagtggggtcatgacggcgggcatgtggcggagctggtgcaactgcgaggaggaggtggcaagcgcgtgtcgaggcacgcgcgggcgaagaaaacgcccatgggacgatgttgtttcccagcgtagggccaactgtgtggctcccaccggtggattaggcctccccgaattgaaaaaaaaagattaatttgattcaaggatttgggggtttacttaggtttttctcaatttggcatttcggggaatttcccccctatggttcgattatgtcggtttcaagctatctatccctcctagatatttttttttattattgagttcgattcagattccatgactaacacagatgtcacacctggagttttcccctttcccgtagttctaattcatcaataaatcgtctatagaaattactttggttaaccagaagaaaaaccttaattaacaatgtatttaataatcggaattgttagggatatttttttttcaaattctctttgctctaaaatcattaacatgacttaacccagaatatttagagtatcggagttaatgttgataatttaatttgtcaagatttgaattaatgataatctttctctcccgcctttagtcgtgaatcgtgcccgattcactcccctcactgtccgctgtttcgttttgcatggcgagccgtgtccgttttcgttcttttcctaaaacggcactgcatttattttccaatttgggaaagtcctaatcctattctccatatccctattttccctccccctctcatcctcccactcggccgccgcctccccctctcccctgcgcgcttctccactcccttgtccgattctctcaccctccttgccggccatggcttccctctggccccacctcttttattccacccctatataagccatcatatccctgttttttttttttcctattttccaatttattggagctctagccctagccgccgcctcctacaccaccgccgctagccaccaccggccgccggtgagcagccctcctctcctggcagtatggtttgtcgtcgtgcgttgtccctagggtttaatctaacctaatccctcgttgtctagtgttgttgttgtctccgccagatcgtcatcgccatctcctcctcgccaatcgtcttggtttggtgaggctcctaatcatgatcccctggtttaggtgtttattcccaggaagtttgcattatcatagccaccatgctcattgaaacagttttcttcacccgctttttgctagcccaccgtacatttgggctaatcgacaacaatgctagtccatcgtacatttctgctaatcgacaacaatccagtatatttctgagataaatatcgatgaacagtatattaaaaaaaaattcctctatttgactaaactgcttttgtgaactgccaatggtgccttagcacatatctgattttactgttttttccaacacaagagaagcaaattgcagtacatacaaccaagtataaaataagatggtctggacaaggtaggaaatcactgatactaaactaacctaggtatacaatgatactgttagaggggttctcccttcaagaaaggcaatattttgctgtcgaatatttggcctactccaagcatcaaaacttcagaacgcaacgaagaaaagaccagcaaatgttgctagtcctcatcagaatcaccaaacgtaatctttgttgatttaggagcatctgctttgatttctttgaaatgagatccatatatttgcgattcctgcaaatgaattgttagcaataaggtaaggtcatttctcagtcatgtcatgcaaagtccttagtgtttatttcttagaacttgcaacgttagggcaaggtgttacagcatttctaaggattaatgtaaaaaagtaagtcgctaagctttctgtagcataaagcatcagcatatataacagtattttcatagattgaaacgatttctcgaggacatattcctagttaactagcacggtagtacctatagacatgaacaaagcactctacgaatgagaatgtaacaagatctatttcacagttaacacaaacctttttcttgacgtgtgtgccaaattttgtaagtgcaggaggaacgacctgaccagcctcccgcaaaacattgacaagttcaccagcaagtccctgtatatagttttgaagtgacaataagtacaacttaagttgtaaggctaaacctaagggctaacgtgtggcacataatctccaataccttgttctcttgagtgaagaaggtatgtgcaacacctttcttgccagcacgaccggtcctcccaatcctgtggacataatcctctgtagtcaaaggatagctatagttaatgacaacttcgacatctggaatatcaagtccacgggatgcgacatcagtggcaatctgcaaaatatacaaaagaaaaaaaaacaagtgttaacagatgagaataaaagtgctacggatgcaatgataaaaaggaaataaattcataaaaacacaatattttcagacaacggttgcagacaactgtacatttctgttacaaaacctcagtagcatattttaagtgagactatcggttaaatgatttcacatactccaaaatttatcatacctcaactcttggctcggtttgatttccaaccgtcaactcaaaaacttgataaaaccagaccctcagctcccaaaaccagctagaactcatttctcttctagtttatgtacttggcatccacgtgggatcctaggtggcacaggactcatttgtcatggtatacatggtttcaagagttgagggatggtatttacttggtttaggagttaagagatgaaaattaaaccgagcaaagaattcagggatgagaaagactttttccttaaattaataacaatgttgcaagcaagtagttgaacacttccaactctcaaagtatcatcgatcaggaaatagtagcagaataccaccaagcccaacaaaatcccttaagggataaataacgaaaccacaactagatttacaagggcaaagtctaaaaactagatttacactaagctcacaaataagcaagagagagtagccattaaaaaaccacaactgaactatcaatgcttataagcagccatgtagaaattagttagaattagcgcaccatcaaaggacatgacccttctttaaataaagataaagctttcgtcctgtcatgctgtgccttatctccatgaacagaaacagcactccaaccccttcacaacaagcatgtgtagattagcgaaagtagagcataagtttcacaaatatttaagtcgcacactggaaacaaatctgctaccttctttgtaacattgtttctactcgcgtagcttctctcttgtacaacacaaaaaccaacaccctgtttctgttgcacaaaacacaggcacaatctgcttagatccatatgaagacaaatggtgattaattagtttgttgaagcagatattagtataatactaacatgtgcagaggttcaattaaaacctaacattgaatatatttgtttgtttggtgttgaaaatgttgttatgttttatataaacttggtcaaaacttaataagtttgacttaggaaaaagttaaagcgtcttataatatgaaacggagggaatacttccttagtttgccaaactgagatagcctacaaatagaattgaacaatcagctttggtatgtgactgaatacaatccaaagtagaaaattttgcaagacgagacgaatgacatgcaatcttatacataattttctaagctgctcagcttaaaatcttttgttatcctcaagagcatccagcatgcatgctgattgcaatgcttttgcctatgattttcgaaagtgagactttcatggagactaatacagcaacaagtaaaatccgtactgcaatacctacctctgtgctttatggtatttatcgagcaaagcaactaatcttgaatcccttgacctgtcatccaatacttcaacaatttgcatcacatcatggttagcagcaagatcttctgatccaataacaacctacaacaaggtggcataccacatacggaaggtcagcattaccgcattagcaatcagatattaacaagagataagaaaagagaaactatacctttattggatttggatccataaactcttgggctagctggtggacagcaggaggccatgtagcactgaacataaccgtctgacgtactgcacaggaagaattatatggccatggttgcagatatattcagaaaagataactaggtgtagtaacacataaaataaatggcagtgtcaaattgacatgaaaaaaatgtacaaatgtattccacctacgcggtatattcatcacaatttcaatatcatggtaagtaaaatatgccaagagttatgaatgccatgaggctaaagtggtttttttagcaacgtgatatagaagtatgaaaatcttgagaacaatatttcttgctcatttctgccgtcactagtggctattaacttatgagcacaagtgtgctgaataaggtattaaaaactatggagcaagagggcacatgcaacagactttgtggataagtccaaccagataaaaagggatgaaaggaaaagaatacatgcgatgcaaaggtggacatgcacatacacatgccctgaaaggaagagagtaatggagacaaaccagatgcagtttggcttaaaattgctctgacttcaggttcaaaacccatatccagcattcgatcagcttcatctagaacctttatcagttaccagacacgtctgtgttagaaaggacacttacacttcaaatgagcaaagcaattaaacagaatgaaaattgaccagcgcaaaataaaaaatccaggtaacatcacaggtgtaacttattgaaccaatatttaccattgactatgaccatcctcacgagtcaagtccagttcaacaaaggggagtaggggacagaggagagagggcatggaagagacaagaggaaataccactcaaatcttaaaatgccgaatctgttagtgctggtaggttccacaaccctgatcttgtggatgaaaatacatatacattggtgtgtcacttgtattgtcttctataaatgactacattatctgcttatgtgtatatgcactgtggccatttaacccaatatgaactatgtacactagaaaccagcatagttcctcagccatattattcttaggtaacagcaaattcaagttataaaaatgatataattcctttcatgttgtgcattattaattttatgaaacaatcattgaccagtcaacccaactactcaaatttgatggaaccaggtgagcctttaatgccaaacttgtggcgttattatcaagggggtaacaccaaaaaaaaaaaaaatcagcgaacaaagcaatcttgacatgagtgttgctacaacaccaccgaaagatcaatcatgcacctgcgtttctctctaagcttgtcccatgttaagaatcttagggtctgtttggttgttgcctaacattgccacaactcaatttgccataggtgtggcatggcaaacaaagtgtggccaacaatttgttaggtgcaatgaagttctccggcctccaatgtaatacaacaaatagattcaacaactgcacaaacatattgtttgttaactcaaagtaacactcaaacatcaatgacaaacttcacaaataaataaaattatatatatatatatatatatatatatatatatatatatagagagagagagagagagagagaggacatatcgatgaaaatgatctaaatgttggaaactcgtgaaaatcatacctaaaagttttgtaaattcatgaaaaaaaattactagagattggtgtagatatgaaatacattctcaccaaatctcaaatccaaactcaacttcatttaagagaaacaaaaaagacaaatttcgggtgaatagtgtcatgttactattcacctgaaatttgtcttttttgttactcctaaacgaagttgagtttgaacttgagatttgatgagaatgtatttcacctgcaccatgaatcacaaccattcaatcattccaagatgcgtgcttcctaaatggacattactttcacaaatgaagagttactataggagaaaagatcaaggaggtacatgatgcatgtgtagctctggcatgggacatgtagttctgggcagagatagaggaagttgaccacacatcatgtagtatttatccttcatttgaatattgtttcttttctcttgttatccatggaatttagcatatataaccatttatttaaatgtttaggtataaacattaacttctttactaactagtccatataagtttgaacttaatttgaatagtttttttgttaaattttgattctaggtatataacatccatccaaacttataattagttaggtatgtaataatggattgtaaaataaagttgaatttgagttgtttgttgctaggtataggtatgaataaaattcttgtacctgggtatatactcagaagttgaaaaaaattcaaaaatttgagtgaatttgtgtattacataccttggtgcccgggcaccatggtgcccccatatgggtgtatactaattcaaaaccatagacaacaacacaatgaaatgcatagttaacttaccacaaaagaaacatcattaagacgacaaatacccatttcaataaggtctttcatacgaccaggtgtccctatgacaatatcctgaaagcatataggcagaaaaaagggggggggtcaggaatatgagtatttccgtgtaactaacttctggataattgatacaaaacaaaatccaaggcagcgagtctgctgaatcttcggaaagtaaacaaaattattcaacaatacatttaaagagaacttttcaaatcaatatagcaaattgaaatgtcatcacaatatgatgaatgtctctagaaattaacattcattggtcatatatcataatccagaactgagatagagtaaaaaaaatattgtgtaagtctcatcttaccactccagatttaagggcagaaatttgtggtcctttggaagttccaccataaaggcacactgaacttatcccacatggtgcaccagcttcacaaagtacatctgcgatctaacatataatacaaaatgaatcattcatgtgtattaaaaagcagtagtttttgcagaccatcagatgcctatcttacaagttcatatcatcagtatatgacacctgctgggccaaacaaactatataatcccatacaaccatagaaaaaggtaaaaaatctgaacatgcaactctttcacttcaatttgttcgatactaaaggtccttatcaattagttcgatactcaacgatcttatcatcagcaaaatataggttgtgagctgagagactacacttataaattagagtaaatttcagaaaacctacgtgttagggtcagagttacaaaaccagggtattgcaacttgtggcacataacctaggtcattaggttctaaggttcaaaaaaaaccaccgccctcaatttaatttccagatgatacaacatattggcagatattataaagtgtctatgaaattgtgtattacgaatttatcaagtaaattgaaaaaaaatactattccaaaaatctcccccttttatatgtgaatcaatttctcctatccccactggaagttgcatacatcccttatacttccctaaaagattgagttcaggggtttacctgctgagcaagctctctcgttggcgatagcacgaggacccgtggcacccccttcttagcagatttctcccccattttcctcctaacgtgcatcagagccggcacaccaaacgcaatcgtcttccctggcatcaacaaattacgacgaacaacaaaccatcagcagcaattcgagcacgatgcagcagtactaaccaattaacaaaaagaaactaactaattagagaattttttcagcaccagatccggtggcggcgatgccgatgaagtcacgaccgtcgaggaggtaaggccaggcgtacgcttggatgggcgacggacgctcgaaccccttgcagcagtcgagcacctggggaggaagcgcggtggcggcgaaggatgacagcggggcgtacttggcgtccgcggagcccttcccggtcacggccacgaccttcccaccgccgttctccgcctcctctccttggcccagatcgcccttggccctcttcttcttgctgct

SEQ ID NO: 19917 - DNA, 15501 bp, Oryza sativa
cgtgcacaaaacaaatagatctggaccatccattttgagggtacaaatagaagcccacaacactgcgggtcaggttccccttaccttttttgagtggttaccaacatatagcaggccaaacgggcggcccggcccagcacgacacggcacgccgacggcacggcccactagggcacggcccgttaggcacggctcctgtagcgggccgtgccgtgccggcccacgtgccaaggccacggcccaagcacggcccaagaaggtgctgggccgtgccgggccggcacggctactgtagtggcacgtgggctagtagccggcccactagtacatgtggcccataaaaattgaaatttgaggggaaaaaaagaaaaaaaggcagaaaaaacataatataaaggaaaaaatgataaatataggataaatgtgaggaaaatttaggaaatatatcataaaatatatggtacaaataggataaaatgtggaaaaaaaataaaaaatatgagaaatatatgggaaaaattagaaaatcgtaggaaaaataaatgggccggtgggccgtgccatgcctgggccgtgccgtgccggcacgctacagtaaacgtgccgtgccgtgccagcccacgggctgaggcatcggcccaaacacggcacgggataacgggccgtgccggcacggcccacaggctggcgtgccgtgccgggcctgggccggctacagtactgccgtgctcgggccggcccggcttgacacggcccatttggccaggtatataccaacaccacacgggaagatggttaccgcgaaaatccgcacaaaatttgttttcaaacatttgaattcaaatttcactctttggccgcggttaccgcggtatatgaatggttaccgcgagatattagctagaagaacaaagtgaagaaaatgcaaaaagaaaatgcaggatgtgtgtagaatttggggataataacaatatatatatatatatacacacacagagagacacttatatggggcaccatggtgcccgggcaccatggtatgaaatacacaaattcatccaaatttttcaaaattttcaaattgtgagtatatacctagttataagtattcgattcatacctatacctagcaacaaaataactcaaatttaactttatttcacagtccaatattacatacctaactaattatatatttggatactatatacctagaatcaaattctaataaaaacatgtttaaattcagtttaaacttgttttgaactagttagtaaagtaattaatgttaatacctaaacatttttgaaaaattcaaactcatttgaattgagtatatactcaatttgaatcatggagcccgggcaccatggagcaccaaacaaatttaatatatatatatatatatatataagatacctgaaaacttgtggttatacaatagaaaaattcagcatgaccttttctatattatggacttgaaatcaattcaacaattcatagcataataattcaacaacaacaatcaacaatctcaaatttgaaagaataaggacattcacatgtaggtgaatgaatagagcccacaataacaatagagtccacaatataatgtccatgattacaattctagtttcaatcaaagaaaataaacagtccacaatataatgtccatgattagtccacaatataatgtccatggtcacaattctagtttcaatcaaagaaaataaacaaggacatactaacatatagcatagttatgcgttccactactaacatagagcatagttatgcgttccactgattatatgccacgttatactcctttgtgaacatgagcatcaagccatgtgagtgtgtcagggttatggataccacatacccaatagtaatcgactaagctcggcggggcccaccatatagcaagtcttatacgggatcgtacctcgtatatagaaatagaattctatatggaaacgagaaggactactcggattgtatccatactggtctccctagttctacttggagaaggggacatctatgggtataaatacaagccccctaagaggagagggggacacgctacaaagccacaagccaatataaaccaatacaccgccagatattgacgttagagattagtctagacaaatccaatccggtgcctgcggaggccggcaagagggatctagcgccatctctgatctcgacgagttcatatttgaggaagactaccctgccgtcgactacgagttgattatccatgtcgccaagtcgacgatagttagataggttatcccaaatattgtactagtgtgattatggtggataaagagcaacatcggcttcggccaataggatgtagtgctattacctatcagataaggggctcgaacctatataagaatccctgtctccatctcttttacctcaatctcgcatataccgaccaacgatccccatactatccaaataccctagtcgtgactatcaaacatcgacagtggtgcgccaggtagggggattttggtgctttaaggtttcgacgagatgggttcaagagatggattctccaacaacaagctacttgacgacttcggctgtggggagatctaacccgaccggagtatacattccattgagatcggaatcatcatcgccaacaattcgatctattgagatcgtccaggcttcaagacctttgtcaccgcggagaatcaacaatattcgctgcatgcggaactgatttgataagagcctatcaaatagtgctccatctttcttcatgaagaattgatgaccaagcccttcgctcggcgacatcagctggtatggctagtgcgcaagcatcagcggactaagtccaggccgaacacgatgccgtctccaaaccgagcatgcgacgcttcacgctgcacggggattcgtccgagtacctgtgcccttgtgttaccgtgtcctagccagagatggtcaatagagagtatttgcctaatcaagtcacatacatatacacacacgtgtgagtgtatgacaggtcggcatgctccacaagaccaacaaataatcaagtcccagtttactgcatacatatgtctcctactgcatacatatgtctcctacagagtgtagtagacaataacaaggtaattagtagattaattaatttaattgacctactaatttcgtagatacatccggcatgtatctacaaaggtatgcaatattttatatacaatttaccgtacctatttttcagatcatacaatattatccatgatttattatgttcacctagagcatgtgttttatacaacacctactgtgcaagtgtgtccgatgttaggctgacgacagtttaatactgggctcgccctattttcttcagtataaatcatgtttgtttacagtttacataatgtctgatatttaatctgctcgttatatcctgataatactagaagattcatgcagtcttttgagtacatgcccgatattctctgctatatatcttgtcttctagaattttttttttcaggaacaattgatcactcgagtaggttgtggtcgagtacacccaattattgagaaggttcttgataaatgctgagttatcatacccaacctaccaacgaagtctgacgatctatctcatgtatagtgacggccacggctagactatttgggaataggttattaacggataattcttcacgaacgttgtcggcctgattactcgacatgattgtgaacagacgtccggatatgctataagttgggtatgtgagtcatgctggccacatgagatgcatatgtaatatccaactctagcgcccctataggtgattaagagatgcctactcctggttatcaaccagacagttgcagcgacatatcgccgcctataaatttaaattcacttgtggaccgttgaactccatctatcgttgtcaaagactccatgtctctacaccgggatcgaccaagtgagtatggcaaatattgataaaggaagtcgcgggtaacaagagaagctttcgcgaatacggtttgtttccgtatgcctatcagttgcctataggtgatcgagatacgcctacacctggtcctcgaccagtagatcgtagcgatctctcaccacctaaaaattcatcttcagatgatcgagatacacctacaccttgtcctcgaccagtagatcgtagcaatctctcaccactgttatagcaatctctggacatctaatgcgacaatcaacattgtcgtgatagcgacaaccaggactgactagatcgccgttgtcaccaggacgacaacgtccaggactaacgacatcaggacgacaaccccggacaaggttaacgacatcacgacatcatacaacaacgatgaaactcgaaatccccatacttctagagggcccgaggatgaggtagtcggtccaggagctgaacctccgactacgataattcctcattgtcttcgtcgtcatcaggaggcagttctcgcaagttgcgaggacgccgtccatctattactctagattccctttaggtggtcgaggtacgactacgactggtcttggaccagcaacgcaacgatcctcacaccacgacttcaagcgatcgaggtacgactatgactagtattctaccagcaacgtagcgatcctcgtaccacgacttctaatggttgaagtacgactacgactggtcttctaccagcaacgtagcgatccttgtaccactacttctaatggtcgaggtacgactacgactggtcttccaccagcagtgtagcgatcctcgtaccacaacttacaaaggtcgagttacgactacgactggtcctcgaccagcagtgtagcgatcctctgtaggatcgagatgtcgactagaggggggtgaataggcgatttaaaattaaatgacacctaatcaaaactaacctaagttgctaggctcggtgagggacaagtctaactaagcaactaagttatgttttgcaatcctagggtgaaagtggctcaagtatatcacaaggaaaataaatcacaattcctaagtctagtttagcaatcctagggtgaatgatctcaagtatgtctctaggtatgtgaattgcacaaatgtaaatgtgacaaataaaagagacaatgagataagagatttttcaccgaggttcggaaactcgccggtttcctactccccgttgaggcgagcccaactccaccgcttaaccacgaagccaccacacgccccctttgtcaaggggtgggcaaggcgggagtcggcccacggagaggactacccaagcctcgatcactcgggatagttcttccttcactccgaaggtggtgaactccaaaccactcacaaccggcgccggccctcctccacaatcttctcggagaggtcaccgggcaactcctccacaagctgtctacgaggcagcaaccttcaagagtaacaagcaatgacgcggctcggagatgatcaagtgccacactagctctacaatgaagcaatgcacttgactcttggctaaatcaaccctcaaacacactagatggatgaacaaaaagctcaagtgggtgtgtgagagatgtaaggggtgtatgcaattgaattgggtgccaagagagtccccttgctgctggtgggagagtatttatactcacacccaccaaaactagccgttagggtgaaatccccgaacttagtgctctgccggtctaaccggaggtatgtggccggtcagaccgtgctactctacaatggctagttttctagccgttgtaggcttgtcattgggcccaattgccctggccggtcagaccgacatggggtggctagtcagaccggcctaggctcggtctaaccgccaccagctcggtctgaccgacttcggctctggcggctctgtatcggccacccagagtgcaaccatctggccaccagggggccagtcagaccgaccataggccgccggtcagatcagccagggacctgcggtcagaccggcatagatcttacggtcagaccggccctggtcgggccgaacacagtgaacttgcaatgatgtgaaatttgagtctaaatgcataattacctaatgtggcaatttaaatcatctctttgctaggtcattacccctcttaatagtacaacaaagctaagaaataaactagcaaatttggtcgccctacaccttgatcaatttaaaataaaagcactagttcaccgtcttcttttcctttcgctttgcgccgtcaattttaatccatcggtagtcatccatgcgcacacataatgtgaacctaacttaaaatatatagctcaatagtgtttgtcattaattaccaaaattaacaatgggggcctagatgcttcatcctcgcaccttaatttcaaacggttgagagactcctactcctggttctcaaaccagtatgtcatagcgatctctcatacctccacttcaagtggtcgagttatgactacaactggccttcgaccagcggcgtagcgattctcccactacttctgcaatttgttgaatacaactatacacctggtctttccccggtgtggtggtcgtctcatcatctacatcaacttctgtaagttttatatgtgcaatatttgtccgttgatcccctcttcttatatcgcctcgtcttgaaggcggtcctattgtccttttacgctttccgacaaagcctccgagaaacctaaggggatttcggctggagacgcccagagcagataaggctttgttagatgctaagagccgaacgaccatgtaaaatctggtcatgtaagagtgctcaatggatgcgtattaactaagccgtgtaatcgggaattggttttcccaacttcacgtctaggggctaggatctgtcaacttcagcatggtttgttataagatttaagttgcttttgtggaaaatggctttcccataaaaacagctgggggctaggaagggtaccaaactccgtttgctgagggcaactctagcgaacgtactcttttattgtgacacacagattcaacttattttcaatttttccatacatattataacatgttaccctttaagcattcgctcgggggctatttctatttaatattatgttctgaataatgatttcaggaaagttccattcagcgttgtcgaggactccatgtctctatggttctacacggggatggactaagcgagtacgacaaatgttccaagtgttgatttcaggaaagtcagacatcagaacaatcaagtcagattttcaaggctttgtcgcagactttgcaccttcttgattgctcgagaacggttgataaagctcgacaaggaatatgtaatgaagcgatggtgtacccgccgagatggaatttcttgacttcaatccaaattctcgattacagcaagacgagagacttagtcacatgctccataccttctcggtcgacatcgggacctagacaaacccaatatagtgcctacagaggccgataaggggaatctagcgctatctctaatctcaccgagaacagtcaaacgagcacgacaatagttgttccaaagtcttcggttgagaacatcaacttgttcatttgcattgaagtagggggctactgtcagggttatggataccacatacccaatagtaatcgactaagctcggcggggcccaccatatagcaagtcttatacgggatcgtacctcgtatatagaaggagttccggataagaaaggacaaatagaattctatatggaaacgacaaggactactcggattgtatccatactggtctccctaattctacttggagaaggggacatctatgggtataaatacaagccccctaggaggagagggggacctgccacaaagccacaagccaatacaaaccaatacactgccagatatcgacattagagattagtctagacaaacccaatccgatgcctgtagaggctgacaagagggatctagcgccatctctgatctcgacgagttcatattcaaggaggaagactaccctgccgtcgactacgagttggttatccatgccaccaagtcgacgacagttagatagggtatcctaaatattgtactggcgtgattatggtgaataaagagcaacatcggcttcggctaacaggatgtagggctattacctgtcatataaggggctcgaatctatataaaaatccctgtctccatctattttacgtcaatctcgcatataccctggtaccaacgatccccatactatccaaataccctagtcgtgactatcaaacgtcgacagagtgtaacaaccccgccttgtattcctccaaactttgacctgtctatgatgatgtaagtgtgactatatactggcaagtgtaaactaaagatgtatgtatactacaagtatatgattgaattattttcttattcttcctccacttagcttaaattatattttagtgagagtatcttagttctttcttctgtgtgtcacctttatcctaccatttggattacttatgccctgcatagaccttgatgtatacaagtaatatatataaattattagcatagttctctcttatcatatcttctcgtgggattaaataaatatgataccttaatacttcagggtgaaatgctacaatggtatatccgtgcacttgcggattatacctgtaaccataaatatatcatgaatatttctacataattggttggaattatatttctagtaatgtcgttaagagataccaacaagcatttctaacgccgttatcggggaagattattttatattcacctctgtatgatcactgtcctttgtaggaaaatcttgtttgttttctcttttatgtgaaaacagggtagtacatgactggttctgatttgccgaccaactccaaagaaaatcctaagtcacttgtgaggcaaatctgaccccgtgtcattcctcctcaagtaactcgtggcaaccagaccagtcatctccgcgccaccagagttgaacgatatggctgggaagaccctacacaagtttgctattccctctgctgacaacgtgcctattggacccccaagtcaacatgggagatggtgactttgatttgaaaaccagcccaatcacaatgacgcaggctagcccgttctatggcaagcctaatgaggatgcaagtgttcatctgcagtaattcctggaaatctgtagcatgtataccatcaaaggagttagccctgatgttatcagactccaactgttcccgttccccctcttcgggagagcaaaacaatggttttacaccaatcgtgcaattgtgaatacccggaagaagcgctcaacggcattcctctcaagattcttcacgatgggcaagatcaacgctcttcgtggaagaatatccagcttccagcagacgagggatgaaaccattcctgaagcttgggaaagactacaagaatatgtcgccatctgtcctcatcatgggatagacgagtggctcatcctgtagagtttctacaacggattaaccccctcgtcccgagatcacctggatgctactgctggaggggcattcttcttaaaagacggtcagagatgccgctgacctgattaagaagatgatctcaaacatgggttggagcaaggaacggctccaaacccatcaacgcggcatgcacaccgtcaagtggacggaaatgctcaccactaagttggatctccttatgaagagagtggacaacaatgagaaggacgccaagcagggtaccgttaaggccctgaactctcacatgacatgtgaggtctgtggcaatgacggtcactttgggatggattgtccggaaacccataaggacgtcatgttcatgagcaacaataacgggtatcgtccacaagaaagccaaggatggagcattgctccatggggtagatcaagtacggaccaaacccacagaacattaaggaggtcaaagtaaaaccccgaaggacggatagcctcatcgatttcatgatggacttcctgagcaagaagaaacgaggaaccgtcagtaccttaggctggcatccaataagccggggacacaggccggtcaacctgtgttcctagttacgaagaagccactgaccataccaaaaataaagatggtgtggcggattaaggagaagacacccgttcccgtacttccagaacaaggtgcctcgtcaagttgaaacattggaggtacagtcgtgctcgtcggatgtcatgtcctgataaattcatcccgaaataaaaatcattgtctaaaaggaataatataattaattaaaattcgaaaagaaattggcaaacattaaaatgcgtacaagaaaaattcgaatgtggtctagaggatttttgttaaattcttcttggtctaaaaggagccctcaaattttacttgaattttcagaaaaccggaaataattattaagcaacaacaacctttatcaaagtttattaaaaagaaaaactaaaaataatcctccttttccctttgggccaagtcttcctctctctctctcggcccgcggtggaagtcctccctttctccctctctttctctccctctccttctctcccttcttctcttgggcctcccctcccactcccggcccactccatcctctcctcctcccacctgggcctgccccggcccaagccgagccgcgctcgcccgcgccctcacgcgtgccgtacgcgcgttgaccgcgcgcctcccgcgtgggtcctgcctgtcaggcgcgtccccgacctctagccgccggcctccttcctctctctcatgtgaaccctagcgccgttcctccctcaaatccgctcgattcaaatggctaattccaaaattgattagggggaattaaaccccattgattcctctctctttccccctaattttccccttgaatagcaccattaatcgcccggaacggccacgccaatcccggccaccttccatgcccgccggccgccattcccgccgccgttccccgctcctcccctggccggctccctcgccgcgcctataaaacggaaccccctcactccgttctctcgttttagccttcttccgcgtctccccgtggccgcaccacctctccccatctcctcctcctctttccccggcgccggccgcctccagccacctgtgccgcctcgcctgtgcaccagcagacgtcgccaccacttccctcggctccgtgacgccgtcctcatctccggcctcacctcctcctcgcccgaagctcgccggagtggtctcctcgtcggcgtccagtacctcccctcctccgggcggctactgttcctcgccggtgagccatcctacgctgccgtctcctccctcggcacggtgacatcgcccttcaccctggccttccctcggtttcaccggaacgctgccgccgcgccggcctctccttcctcctcatcgacgtctcctccggtagccccttccgcagttcccgtgcgccggccaacatcgccgtctcctcctccggcatcacagcggtgtttgttcccggtcgtcgttgtcgttgtcgtcctctcgtcgttcccggttgtagtggcgttcgttcctccgtcaagctgcgtccgttcgtcgcctgcgtttcgtcaagttgctgcagccctgtcgtcgtcttcgtcctcggctctgcgtcgtcaagcattgcgccggccgtgtctcgccttcgtccaaggatcgccgccgaagtcgttccctcgccgttcgcctccatcgtccccgagccatctccgccgcgcccgttcgtcttcgtcgtgccgcgccttttcgcgtggtggtaaggatccctcttctcgctgccccgttctcgtcctttcggtgttgccccgtgcctgtcgtgcggttgtcgaccccggtacccgtgtaccggtgtcggtagtcgttcatgtgtgcgtgtggtgaccgtgttagtgtgcccgctcggtagccgcgtggtttcgacgtgtgcagcccgcgtggtgtctagtggagtccgtttgtcggccactcgcctcggttgacacacggggtccgcttccgtcgacccgtggaccgtctctgtgtgctcggtctaccgtggccctttaggttgacatgtggggtctgcatgtcaacaagcgcagcctttctgtcttttccaggctagcgcttacacatgttttatagttgcaaagcctaattataataatccgcaaatctccatgtaacagcattaaacttcggatgaccatgtcttggtcgtacgaaccccgaatcgacccgttcaagtctcttaatatttgttataatcaaaagaaccctgtgctttctttttatgtattgttattgcttctttataggcttgtagctttgcttgtgtgcttcatgtagcttctgtcattccggaggttctcgaagcgtggttcgcggtcgtcgtcgaaggttcggaaggccgttttctctgagcaaggcaagtcacatcatccttgagcatattgaataccagtttatgaaatttttttggtttaaattattgcattaccactttatttaaattcccgcgttatcactgttttatttagcacttcctattaattctggttatagccttatcattgttattgtttattattaccttgttcaccctaggaaaataaaaccccaactagtgggtactgcattcatggttccactagtgtgaattagggtagatgcttcgctgattaattaggcaacattaggtggttttataactttagactttaggaattctcatgtcacttggacactatggaatggttggcttatggtggaattggacatgcccctctcttcctctttcaaaacccctaaaacctgttttccggtggggtttgggtgtatgccagttgtgggaagtagcaccctggccaatataagaattaagctcgggcctctgttgcaaagtactaccatactaaccacatgtctaatgggcaaggcttaactcggtgctcagtctagtcttgaacaaaaggacacgaatagagatggatgaagtcgttgcaacgatggatatctctgaggcaaatgaaggctacgcgagctgcggctcggtaatcgagatgtctaggcaaatgaaggctacacgggccggtgtccgttagtcgagatgccatggcactggactagtacgcgggtggtctcacccctatgtgtgtggcgcacccggtctagatcctgttgctaggggctcaatcctggcctgcctgtccgggataccggccgtaggcagggttgggtcggtacttttgttcacggttaggatgggtaaagggttatgtcacatgtttacgacgggttccaaggccatggaatgcggagtaaagatgtgtcttgtgggtaaagatgtacacctctgatcagagtaaatctattcaaatagccacgccctcggatatgggcaagcctagcaatgtacccaagttagtggtttaattcttaaaattttcttaacaactaaaatatggaatggtaggcctgggttggcttgggatgagctgggacccaggtcgggttgccaattcggtctgaatcattgtaggcctttggttaaggcaggttcgtgagtgttcacgaccttgattaataatattgtgtagctctaggatcgtatttacaaaatagctttgagcaactaagtgtcttttaaatgctgtttactgtaaaacctaacccctattattatccccttgtacccccttgcattaatcatgcatctcccggtgtggcttgctgagtactgtggttgtactcattcttgctctatcttttcccctccttcagtaagagaagctttggagaagaagtcctaggtggagtcttggcttatgccccagtcgagcgcctgtgaagatggagccgtaggcccgctagtccgctgctgtttatttttgtttgtcaggcctgaagtgcctttgtaataatgtaaatattatcgatataataaagatgtgccttttatatcatgtttgtgtggtgtaccctggcttttcctgggactgggattaatacactagcgttctagaaaaggtatttttccgggcgcgacatcggacctaaaacgacgacgcccttgccttgccaacaggtaaattggtggttatctcatatttaatttccgcattgcattagagcatgtttcccttttcaaaattttttgcattcaaatgatttttgagacaacaaatttaaaataaatttttgagcaataataaaataaaattctcaaccagaattcagtgggtcccactccaactagccgttgaatccacaccacgaaatcctgggccagtaggccccaccaagaggttggctaacccaggaaggtggccgttgggcctgtccttttgtggtgcaacggtttttgtgtcccacatgtcataaatggccgttatggcccctctgtataaagaggatggctggggaagagacattcacaccaatgcaactcattttcaacactccctcccaaattcttttgctctcaagtttgtttagcctatctcaactttcatttgctgcaattagctaaggcattttgcatatacaagttttgctttagttcggtgcaagtttaatcagctggtatttgcttacccccgctcgagtagtcttgtacccttgctctttgttgtagccatgaagaaatgattctcgggcatcttcaagagaggatcgagctcgaggacgaaccgacacgatgaaccaagtacaccttcctccgcggatgcatccatgattgatttcgtgtatgttgcgagtaggcaacggctcggtttatttatatggagatatcaggatgcttgcaagatgtatggattgatttcgtgtatgttacgagtaggcggcggcttggtttatttatatgaagatatcaggacgcttgcacgatgtagggagatatcaggcgtaagggtgcaaggggtgaggatgtatggatatattaggtgcaaggtgcgcatgtcgtgagcgcaagtgtgttcctcctgttgtctccaccacacatgacttaagtggttaggagagcaccattcccttttctataataggcaatatggtactaaacatctccatgcatgcgtgacatcccacgaggtgagttttttgtaatttttcaaagaattaatcttcaaaagagctaaaaccaatctattaattccaataattatgtaatcatcccataattattttcgctatcaataagcggtgtctcagtatctttaaagttgaactaccaaatttcatgcatttagcagagccgtaggtgacggcgcatttcttgcatgcaccctggccggttgttcagccactgtcatgctatcgtgcttcgaggtcggtaatggtcaggcgcccactatggccgcaggtggttgtctgctgcacgccggacgacggctgctggcgatcgtctcatcggtgtgcaca

SEQ ID NO: 19918 - DNA, 15855 bp, Oryza sativa
tccagctcgctggcggtgcactcgccacgcacggcggggtccaggagctcgaggttcctgccgtcttcccatagcctccatgtctgaaagaaaaaaaaaagaatatattttctatctattatctatctatctattatatactaaaaatacattaattaaacttcctataaaccctctcaaatcatcacgtaggactcctatgaactctcctaagtcaacatgtggcactgtaataaattaaaataatcatataacttaaactggtgggccaattcgatttatctcaacaaaaaagctatccttcctctcctgccgtacgtatgcatatattactcagtgtgttgtctcgtctcatttcccctagatcccttctccctgtttcttcccttttcgctgtatggtagttaagataacattccgtttttacttaattttactcatatctatttttagtttgtttgaactgttatttcattattagacatgtaaataatttaaggtcaagattaccaatattttactataaaaacttaaaatacgttatttgaactgccacctattctttacatgacaaccaaataatatccgatttttaatttgtttgaattgttttctatttataaatacgtgagtatatccggatttatattactcatattttactatgtaaaatttaaaatatgtaatttcaacatagaccaacaaccaaacaacagtgaaacgctacaaaaattgacatgtatatgccatcatgaatcattctacataataaaaattagaaaatacaaagtcgccatgtgtcaccttttagagccctccacgtgtcacattttaaaaattagaaaaatcttataaaatccaaagaaaaacaaaacatctagccaatggttttcacttagatcgatgacctattgatattattttcaaccatcaaatatacttttagaaaaatcttaatccgcgacatgtcacatattttaataaaaatcttacaaatcctagggaaaaaacttctaataattggctttcaattaaaccacttagagaaactaaaaaaaatgccccctccatatcgccctccatgcatccatcactatatacccactccatcttctcctctctagctcgagctctatgctcttctttcctataaatagaaacaatctataattataagctacacgtctggtttataatcacataaacgatataaaattcatatgcctatattttgttatataacaaatagtacgacatttcgacacaattgacctattacttataagtatatcaaacgtagcctacgatgcatgcccgctcattctggccagctaccttcttagttttatcaaaagtttaactttgtttgggacgtgcatcgaaatgtctgaaactcttaatttcggaaatcgagttccgacagttcaggaattttaaaaactcagttctgaaaatgtaaactgtaaaccctgcacacaactctctcatgctttgttcaactaatcctgaagagggagaaattggaggggattgagggggaataattccacactacaataggtgtgcaataaatccaaatccccctcaatccacttatatatgaaagggattagttgaacaaggcctcacggaaattaattctagctaatatatactacctccgttttatattataagactttctagcattactcacattcatatatatgctaatgaatctagacatatatatgtgtctaaattcattaacatctatatgaatgtgagaaatgctaaaaagtcttatatatatatgaatgtgagcaatgctagaaagtcttataatatgaaacggaggaagtattttctattcaacgtatgcccccaaatgcatgcaggagagatgtgctgcttacatgtgctataaggctcgaagttccttggttgtgcttgccactgatgatctccagtagtagaacgccgaaactatacacgtcttgcatgaatgacaacttaccatccattgcatactctggtgacatgtatccactacaattggaggataagatcggtcaataaataatctgatgaaggtttggaagatatttagagctttttcagatattgagatctgaaaatccagccactacatctatcagatgtacacacaaccaaaaagaaatttcgagctaaaacacatggttatttttatccgtaattaattgtctatatagttgcattgcttacggtgttccaacaaccctgtcagtgatcgtgcagtcctgattgccaccattgtggctgaaaagccttgcaatcccaaaatccgatatcttagccaccaccttaagatctcggtggatgatggtgtgccttgagtccttgtgaaggtattgcagcccactagcaatatctaagattatgtccattctcattttccagctcaacatagcacgcccactctcatctgtttgcaaattccgaggtcagacaattccttttcttttcgataatggaaatctatctagcctctacattaactcacaatttcttaatctacaactatttaagcatatgcatatatattgtgctctttttttcattgccttaagttttgggtgatgttaattattgaattgacaaaatgcaatcgtagcactaatgaaatggtgaatggttttaaaagcaacatacgaaagataaaggcgtctaggctcttgttgctcatatattcgtagacgagcagtctctcggaacagtggatgcagtagccgagaagatggacgaggttgcggtgttgcagcttacagataatgtcaacctcattcatgaactctttcagtctttgaaccgtgttctcctttgagagcttcttcacagcaatttcctgaccgtttggcagttggccctgataaactcaatcagaaattcgtcagtgagttcaaagctgttctttttattagttagttttcataaaacggatttggcaggttcagaatagaaatagctaattttacggctcctttgaaatgcagaagttttacaggattttagggtaatttatctagttccgatgaaatcctaattaaaaaaaaatcctaaagagccttatcaagcacacatacgtgtagaaaatcctaatacaagtgccaatacttttgaactgtagtttgtacgacaatatacttatttgtttttcgcacttttggcattgatgcatgtttcattaaagatttgtagagcattatgaccttgtaaacaatgccaaatccacctcgcccaatttcgttctcctgagagaatccattcgtagctgctctaataatctcgaaaggataagtaggacatccggtgatgaagtcacctgtctcatcaagcaccctgactgcaaaatggagaagccatatgagcaatatggagtataagagagcagtcaggatttggatcctaaaacgttttgtctgttagatactgagaaattaagtataattacaaggatcagttaccttttttgcagcgccgtgcctttctccacataagaaatccaagcgactgtatagccaagacgaaccctgtaatcaccagtgcaatgactaccacaaagttggtgtttttaatcgcgtctgaacatttgagtgcagctttattgagggttaaattgaccaaatatttcatatttcaatcagtagacagaaaatcatcacggcatttgtaggaataatcagcaattaccacttttaggctaaatccacgtaatattgatgtaaatactgctagtgcttccttcgatcaattatatatttgatttcgggagtaccacaaactaatactcccgcgtcaaatgtaattaaccggaaaaaaagacaatagaatggctgagtccaatatatatactatattcctaagcttgacctggcctggttgtcactttaggctattgaaaaggacttgtcagtggctgaacacaagtcatgcatgcatgcatggacaagtctataattcccgatttcaacggaaagttcaaacttatcagtatcaaactcaggcctaaggctgtgtttagatccaggggtgtaaagttttggcgtgtcacatcggatatacggatatatatttgaagtattaagcgtagtctactaacaaaacaaattacagaatccgcatgtaaaccacgagacgaatttattaagcctaattaatttgtcattagcaaatgtttactatagcaccacattatcaaatcatggcgcgattagacttaaaagattcgtctcgcaatttacacgcaatctgtgtaattagttattttttttgtttatatttaatactccatgcatatgttcaaacattcgatggtagggtgtaaaattttgccagggatcgatctaataaacaggccctcagtattttagcttcatggaatttccaaattctctctatcaggacttggaagttgccatcagggcaaattctatatcaggaaaagatcttgcctccaattatttgacctccaaaatatattattagtttttttcccacttgtttgtttttaagatagtattctcaattatttatgtacagtccaactcacggttaaactgacgtagttgacttcagcctcacatgtaccaccgcatatccatgattcgatattactccattaaacaaaaagatcacaaaactaacatgccattttcatctagtactaactgtactaagagttcactttacaacctgaactttcgtgaaagtttgaaacttaaaattatactgtaaaaccagatattaattataaacatttaatgccgtctacttgccaattaagttgccaaccttggcccgaatattatctatttgtaaaaaaagtaaatgcttaaaaacaattaataatgtataaataaggttaatgtagataaaaactacttcaaaatgtagataaaaaccattttttgtgcatggaatagatttagttttgccacactaagtttatttaggttttaaaattcaaatgcacttatgctttccaactgagattttttttcaacaattgtttgaagtactttgaatattttacaatttcaaacgcatgcaatttcacatgtatttcaattctacaaaattaatccctggactatattaaaactaaccccaatatcgataaggttttattcagatataagaacattttttccctgccaagtatagcatattttatggtaggaaatttattcaagttgtaaatgttggttggaaagattatacttttgtaaaataattctttgaattcaatactgtttttatttaaaaatttgttctcaaacttacaatgcattgccacgtcatccactacaagcgcatggtaaagtttagggttagatagtgtgtgattataaagttcaaatatgcttccgaaaattgtaaaaggattttccgttgccagctcgtacattagcattttgtttttattatggtctaatcatgagcttgacttgtgttagaataaatgggctaggcccgatttttctattaaatctcaaaggcccataataaatgttaaagataataataccaccctgggaattaaacgaggagtatctcaacttcaatagggagttattggaggctccctgttgaccggttgaggtggggattggaaagccacacgctcgctggggcgggcgttgcgcctgcttctatccttttgcaacggatcagaatccaaccccgagattgcctccgtaacttgcaatggatcagaatccaaccccgagattgcctctataacttgcaacggatcagaatccaaccctgagattgcctccgtaacgggcaggcgattcaatacccattgatcgcgtcgttactgcggcaacgggcggatctctctcctgcgccataaggaaagggggaacccgatcagatccgctcggttactttccaaacaatgtccgctcggttactttccaaacactggtgttcttcctcctccgcacgccgccgctgggtattgatcgcgtcattactgcggcaacgggcggatctctctcctgcgatataaggaaagggggaacccgatcagatccgctcggttactttccaaacactggtgttcttcctcctccgcgcgccgccgctgggtattgatcgcgtcgttactgcggcaacgggcggatctctctcctgcgccataaggaaagggggaacccaatcagatccgctcggttactttccaaacactggtgttcttcctcctccacgcgccgccgctgcctgtggtgcttctgtctgcttccccggttctgatcgcttgcacgcacgaaagatcggaacgagcagggcctccggaaccacaccttcgcctgagatctgcactgggtaggcgggtgatcaggtttttggggagtgctttcgcactactgctcctcgtcttcagttcgtcgtcgaccgtacgtctgcatcaccatatctgccgcacctgcacctggagctggagcaccaggagctagtgcacagaactacaacaccaacggaggcagttctgcctcacaatccagcagagggactttcacagggtataatcctctactgttattttagtttttgatatttctgttagtcgcagtacaattgcgttctatgtatgatgatgatgcttattctaccttaagcatgctcctgtttatgtttgattttatcactagatcacctcacattgttcatgccatgattattgtcttaatattttggattaaaatatgccgatatatgactatatttccaacaatccaaaaacctgataggtcattttcggtagttggctttgctgctgcactgaaaccacatgcttttgattgttctaattataaaaggtggaaagcacgtgcactactgtggttgacagcaatgcaatatttctatgtttcacggggcaaatgaagtgaaccacctctctctcctgaggaagaggttaagttcgaggcttcggattgcctgttccgtggagcattgatcagtgtactcgctgacaatatagtggacgtgtatatgcacatgctttcagggaaggacatgtgggatgcacttgaggccaagttcggagttctcgacgccggcagcgagctgtatgtcatggagcagttctgtgactacaagatggtcgatgaccattctgtagtagaacaagctcatgagatttagatgctggctaaggaacttgagaacaacaactgtgagttgccggacaagtttgtggcgggtggcattattgccaaattgccaccttcttggttggactttgccacttctctaaagcacaagagacaagagttcagtgtttctgatctcattggctctttgggtgttgaagagaaggcgaggataaaggacaaccggagcaaaaaggttgagggaggttctagtgccaatatggtacaaaagaagaaccctcatgcatcccacaacaacaagaaagtcaagcctgatgtcaaacccaaggctacaaccaattttaagaagaaaggcaagggaaaggcaaagggtgactactttgtgtgtggcaagtctgggcattgggccaaggactgtcctgagcgcaaagacaggaagtctaccaacatggtcattagcgaggagggcggaggaacatcggggtacggtaaattattacctacagttctctctgtttttcattcacctgattggtgggttgatactggtgctaatattcatgtatgtgctgatatttccctgtttttttcttatcaggtcgggagaggttccttcttgttgatgggaaacgggtcacttgcggctgttcatggtgttggtacggtcgatctgaagtttacttcgggaaaggccgtgcagctgaagaatgtgcagcatgtcccttcaataaagaagaatctagttagcggctctctactgtgtagagaaggttttagacttgtgtttgaatccaataaatgtgtcgtatctaaatatggaacttttattagaaaaggttatgacaacggaggcttgttctgcttttctttggatgacatgtgtaataataataatgttgtgaaccatattagcgagaatgatgagtccaatgtgtggcattcgcgactctgtcatgtaaatttcggttgtatgatgcgcttggctaatatgagtttaattcaaaaattcactttggtcaaaggttccaagtgccatacttgtgttcaatcgaaacaacctcacaaacctcacaaggcatctgaggcaagggatttggcacctctagaacttgttcattccgatttgtgcgaaatgaacggcatgttgactaaagggggaaagaaatatttcatgacactgatagatgattgcactagattttgttatgtttatctattgaaaacaaaggatgaagcattgcattactttaagacctataaagctgaggtagaaaaccaacttgaaaggaaaatcaaacggttgaggtctaatagaggtggggagtatttctccaatgagtttacatccttttgcgaagagtttggaattattcatgagaggacgcctccctattcaccccaatcaaatggggtagccaaaagaaataactgtactctaactgagatggtgaatgccatgttagacactgcgggacatttcaaggaatggtggggtgaggcagttttgattgcgtgtcatgtcctgaataaaattccaatgaagcataaggaagtaataccattcgaggaatgggaaaggaagaaattaaatctctcatacctatgaacatggggctgtttggccaaggtaaatgtacctatagccaaaaagcataaacttggaccgaatactgttgattgtgtgttccttggttatgctattcacagcgtgggttatagattcttaatagtaaactctggagtacccgacatgcgtgttggtacaattattgagtccagagatgctacattctttgagaatgaatttcccatgaaaaatacacctagcacttctagtcaagaaactgtcataccccatgagcactttgcaccgatagaacacaatgatcaaacgcttgagggaaatcctgaggaggataagattgtagatactcgtaagagtaagagacaaagggttgcaaaatcctttggagatgactacattgtataccttgtggatgacactccaagaaccatagaagaggcatattcatctcctgacgctgactactggaaggaagcagtacgcagtgagatggactcgattatgtccaatggtacttgggaagtctttgagcgtccatatgggtgcaagcctgtaggatgcaaatgggttttcaagaaaaagcttaggcctgatggtacaattgaaaagtacaaggcaaggcttgtggccaagggttatacccaaaaagaaggcgaggattttttcgacacctactcactagttgcccgtttgaccacgattcgagtactacttgctctggcagcctctcatggtcttctcgtccatcagatggacgttaagatagctttcctaaacggagagctagaggaggagatctatatggatcaaccagatgggtatgtactagaaggtcaggagggaatggtgtgtaaactgttgaaatccttgtatggccttaagcaagcacctaagcaaaggcatgagaagtttgacaccacacttacatttgcaggctttgttgtgaacgaagctgacaaatgtgtgtactatcgctatggtgggggagaaggagtgatcttgtgcttatatgtcgatgacatattgatctttgggaccagcctcaatgtgattgaggaggtcaaggactttctgtccaagagttttgaaatgaaggatttgggagaggctgatgttattcttaacattaagctactgagaggagatgagggtgggattacacttgtgcaatcccactatgtggacaaggttttgagtcgctttggatatagtgactgcaagctagcttctactccttatgatcctagcgtgctattaaggaaaaactgaagaatagcaatcgatcaactgagatactcccaaatcattggttcattgatgtacttggctagtgcaacgaggcctgacatctcatttgctttaagcaagctgagccagtttgtctcaaatccgggagatgatcattggcaggctctaaaaagagtaatgcgctatctaaagggcactgagctatgggcactgagctatggaattcactataccgggtacccaaaagtactagaagggtatagtgactcaaactggatatctgatgctaatgagataaaagccacaagtggatatgtgttcacacttggaggtggcgctgtttcctggaagtcttgcaagaagaccatcttaacgaggtcaacaatggaagcagaacttacagcactagatactgcgacagttgaggccgaatggcttcgtgaactcctgatggatttgccggtggttgaaaaaccagtgccagctatcctaataaactgtgacaatcaaacagtgattattaaagtgaacagttcaaaggataacatgaagtcatctaggcatatcaaaagaagactgaaatctgtcagaaagcagaaaaactccggagtgatagcattggactatgtccaaacggctaaaaatctggcagatcagtttactaaggggctaccacgtaatgtgatagacagtgcatcgagggaaatgggcttgatacccacctaaggttgcacaatagtggaaacctgtccattgtgatcggagatccgtgaatttggatggcgaaacaaactattgtgtggttgagagaagagacccttgaaaagggctcattttcatgatgtacttctcttctactctgcatggtaggatggcttattccttaatgtgatccgagtggcttttctaagcaaagatgttgacctgcagaacatctcagaaggaacacacctatatgagttcgactgctagtcacagtctatgagatttgggtgatctctagatactcatgaaagggcctggagtttgacttatatgctccaaacagaggggatgcaaactgcagcccaataccaatcaagctgatattgataattcaagttgccccctacgtaattatgaaggttcggctggatgttacatactaagtgctcaggaatgacttgaggcattactgtgccatccggccgtacgtggtgaaccaagtgttctagaacaacttgatataaaaattgttgtataggctgaccgccaggcgttgcaaacccggccgatgcacttattgaaccttggtgctgaatcagctgaacgacttgctgtcttaacggcgtctgccgaatcggctgcagaggctgctgccttggtggtgtttgctgagctggttgcatgacctgttgctgaatcggttgtacaacctgttgaattgggggtgtctgctgacttggctgctgctgtattggatcaacaataggttgaggtggtagaaacatggcagcaaccggatcttgggtcagccgattcgcaacctgcctactatgctgtggctgctctctcgtcaagaaccgaggattcaccggctagcctggcgtcatcgctgacaacgcaggtaggggagttgatgctggcgccgtcggctgagctgttggtgtaactgagggaaccgcctgaatggatggctgaacatcggtgatcaaggaccgataatttggaaagacacctcctttcaaataaactgggcctgcagcctgatgctcagctactgaaccatcggctattgacttcatcatgtttgataaggtattgactaacaccccagactgattgatcagagcatgatgtacggcgtagtcaacccggtcttggaaattgttgaaacaatcttgtgccacatcactattccgattaagatctcctccctataatccttgagcaccatcaccttgatttccgagagatccgtcggtagcaccattgtcactcggttgagctgagccatctggagcttgcttcccatctccatccttagaagaatcagttccagaatcatcagcaaccacttttaatttgtacttctgaacaaatgttcccttgcgagtctgtgatgtgaccatggctaccacggatgcaaccattgctcacatcatggatgaacaagaagatatcaagatcaagtcctccaagtgctggaatccgattcggccacctactacactgctgacttcaaacggctgccgaatctgcatacgacctccgttttcggcccgtgagtacttgatggaaagctcttggagtcctttttccaatggatccagcctcattgcgaaattccatcttattgagccgcaattgaagcaacaaggtgctgcgtcacctataatgggcctatgggcttgtaacttcgtctgggaccccggcccaggtggggcccatgtggggtgcgccccagccaggtggagcacgaccctaggcacccctaggtcgtcctcccacccctatttatatagctaggtaccccttcagggtttctgggggttttgtttagatgaaagtttagccattgctacttccttgcagcgcgcgtgtcggctagaccgtccgtctgcttgtatttgaaaccccaacttatcttgtgtattcattcctatttgcaattcagattgcttttatcttgttcttgcttgtttcttcgatttgcttgcaggaataaggttgatctgcatcggcaagatcaacaacccatggagaggtgtatcgatcgctaaggcgcaacacaacgtctcgtacggctgtagtcggatcatcaacgtttcttccaaatcgtagttatcgcaactcaccgaaagatcgggccaataacagccttgagtgtcgagaggaactcagggttcatcaggtggtatcagagctttcgttgctcggtgagtttttatcttcctataaccagaaaatagccatacaaaaaaaattcgtatcatttacctagccatattgtgccattgcattgttcttttcagtttttgctttgttgaattttgtgttgcatcgtcacgtcgtgttgctggtcttagcgtctagttcgtttagagtttcgagttctggtcacgttttgtaccacagtcgtcgctgccaccgtgtctctgttgttgtcgggacctacgaaaacggaatcggctcgctgccacggttctatttttgtagttttcagaagtttctgtcggttagttttggagttcttgagttgcatctagagtttgccgatccttgtgtgtgtttgttttggccgtgcctgtgtcgtgcacgagaggaggaaggtgaattaccatatctgattttggaagtagtcaagtttgttttggaaagatatagtagattggattggttaaaaatcagtttcctttttatcccatacaccaaattcggctgccatccactccacctcctggccgagtcccactcgcccctttggccgagtccgactccctccctctcttccacggttccgagttgtgtcaaacaccttggcgaatttttgtttggtgtcggtttcgagatctttttggaaaaacggaaccggcataaattcagcattccatttttgtataattttaattttggtgtggacttttacatttgagtccctgtatttttcatatttacatttgagtccctgtgatcttacattgaggtccttgagtctgtttttggtaaaaaataatcaaaaagtgagaaaaaaaggcagaaaggtgcaaaaaaaaagaaaagaaaaaaaaccgcaccaaaaaaaatagaaaagaaaaggaaagaaaaaaaaagaaaagaagaaagaagaaagaaagaaaagagaaaatactgttatgtttgagctgaacttcatatatcagagttgtgcatgagttgttcctagtgctatcttgtggtatcgtttgtgtctaggctcgcgtctctagtacgttctagcctaggaccagcacggtacttgactttgaacaattattcaactttgcattatctgatttgagcatttgctattcctttgctacatatttaagcctacccagagctccacatatttgattacagccgtaccgcaagtgtttgccaaggcatcgatacatccaaccttcattggggtgcttggttgagtcggtgtatgtcaccattccacttgcattggtaagatcttgtaagagcttggttaaaagcttgagtgtgtgcgatttttgagctgccactacctagtagttaataggaacgcgcatatttttgtgtatgtttcttgttttctactaacaatggcagggatacgcaagataattggggatagctgtgctcaacatcgacatcttcgtcgagacatgaggagggatcaacatgaccattatgaggtaagtgatgatgttctaggtaagatcaaatctgcactgccttatttcgagggaaactatgatcctcgtgcttacattaattgggagctagcggttgatagtgaatttcaaaagcatgtcttgtcggagaaacaaaaggttatgtgtgcctctagtgttttaattaaacatgcttctaatgattggaaacatctttgtaggcataacaaaataccacaatcttggaaagacctgaaacgatatttcagagatgtttatgttcccatgtattatgctgacattttgttcaacaaactgcaatgtttaaaacaagataccagaactgttacttcatactatcatgatatgcaagcttgtttattacgttgtggtttagatgaatgcgaagaagctaaagaattgaggtttttatttgggcttaacaaaaaaattcaggacatgcttgattgtcaaagatatacatctctttctcatttgttacagcttgcttgcaatgctgaaagtaaaatagaggaggacatgaagaagcaacatgctatgtttttgtcttctattactaaccatttgcaggaagtgcataatcatgaaaaggaggagagagacatgaaagagccgccagtcccattgatcacactcaaagtcgaggtacatccattatctgaagagggcatcaaaggtaaacttaatggtgctgaaattaataaaggtgagtgtgttgttaatgaattgaattcgtccactttttatgctatagcagagcaaccattagtggaaccaactgctggaattcctttgtcacaagttgatttactcgctgttccttgtgataaagaagagttgtgtgataatgcttcacttatatccatgccacaactagtgaatgaacatgctatttctagtgtttctttatgtgctgattttaagcatgttgttcatattgctaatgaagtacaggaacgtgaattgctatcttctttaaatactttgggctatgttcagtttgatgatttttgtgagctcgataatttgaagaagaaattatttgctaagtctgatttgccttgtccaactagtgctatttttcatatatttggcgaatctgataatagaggaatatatttggtgcatagagtttacatatgttcagatttagaacctcctatacatgtggataaaacatgcaagctagagcgaaatgttattgctaaccaaattgtctcgagtttgccttattttgactggaagaaacaggttgttgtaaatggactacgcaaagagcaccatatggaaaaaccgaggacggttttctgtgaagaaggggaggatgatgtgacgatggctaccacggatgcaaccattgctcacatcatggatgaacaagaagatatcaagatcaagtcctccaagtgctggaatccgattcggccacctactacactgctgacttcaaacggctgccgaatctgcatacgacctccgttttcggcccgtg

SEQ ID NO: 19919 - DNA, 35384 bp, Oryza sativa
cggatcgtcaacgtttctcccaaatcgtagttatcgcaactcaccgaaagatcgggccaataacagccttgagtgtcgagaggaactcaaggttcatcagtctgcataaacgaattcaggaactgatctcgtgcttgctgcatcattgcctcaaaatctttcttttgctcaggagtgaacttttctagatcaataagcacgacgtttgcctcatggacgtcggtcaatcctaacttctggatcttttctttgacagtgcccgggctagccgaggatggtgactgtggtggtttctcagccatgaggaagaattgcttgctgacttcttacttgtcctaccgggcgtgccaaaagcgtgttgatagaaaacacgaggcctaggagatctgcttaactccagtgcaggtccaaagctcgccttcaaatgtatgagcgtgccagttgatttgatcctgcaataaacaagagatagaaacaaaggaaccgcaattaaatctataaatgatagccgattggctagatgccgatgtcatatcatttatctttgagccgatgtcgtatgtgaatcgatcggcggttgtaaataaacaataaagaactagatctattcgatcagctgtagatattaacgatatatagttcttatatcgatatatttggacagtatggggatcgtcggtgctaggatatacgcgagactgaggtaaaagagatggagatagggatttttatacaggttcgggcccctgagttgtcaggtaataaccctacatcctgttggccgaagccggtattgctcttattcaccataatcacaccagtacaatatgtgggtagcctatctgactattgtcgacatgtcggtctgaaggtctgactcgtagtcgacaacatggtagtcttcctcctcgaatccgtgcctggcgagatcagagatagtgctttcgtatctcctgacggtatccagatacaccgtaggggaataactatgcctatccctgaagtcgatatccggcggcgtgtcttggcttacgtagggttgtatgttgtggcttctagtgggcgtgtgttgattgtcatgggtgtcttccatggtccttctaggggggcttgtatttatacccataggtgtccccttgtccaagtagaactagggaaaccaatatggatacaatccgagtagtccttgtcgtttccatgtagaactctggttgtctttccttatccggaactccctcctatatccgtaggttgtttccgtataggacatggtatgtggtgggtcctgccgagatttagtcaactactattaggtatgtggtatccataaccctgacagtagcccacgacttcgatggaaatgaacgagttcatattctccaccgcagactttggaagaactgttatcgagctcacgtgaccgttctcggtgagtttatgatgaggacatcaacaccatcgatacatccacgtcccccatgtacagcatgatggtcctattacccgcgctcgtgcacgtcaactaaattatcagatgagttctttcttgagttcatattcctcgtctttataccccggagacgcgtgcactcgtgttttactcaggaacgatggagaggatccaaagggaagaggattcgcgcggggtggattcggactgcagggcagcgccaaattttgacggccgccacgacttcatgcgaactccgatttgggcgtgcaagtacttcatggaacgcttataaagtctactttcaaatggatccagccacatgtccatatctgttctggagcggccgcaattgtcattttactcccgactattttctgtccatggtgctgcgtcacctcttttggcccaatgggctgtgtatccaagttgggcccattaggggagcgtcctagggttggagcacgaccctatggtcgttcttcccctcttcttatacctctagtcgccgccaagaacaggcgggttttgatgatagagatagcttcttgctaccggctcgcagcgcgcgtgttggctaaaccgcccgtttgcctgtaatcggaaccccaccatattgtgtttgatagtgaaactttcatctttatctagcaatttcagtgcttgtcctacttgttcttgcttgttcttcgattgcttgcaggacgagtgccctcgtggccgggttgacgcgcaccacaagttcgcggcgaccattggagacggtgtatcggttgctaaggcgcagcgtctttggacagttgtagtcgggctgtgaacgtcgtcttcatctaatcgagttatcccttacctatcatcgaaagatcgggccacaaaccctagtgggttcgcatcagtttagagataacgttagacttcctttatcagcctcgtgcgggcaccgaaagggtttgtctaagtcaatctctgatgtcgaccgagaatgtacggagcgtacgactaagtctcccgtcttgctgtaatcgagaatttggattaaagtcaagaaattttatctcggcgggtacaccatctcttcattccgtattccttgtcgagatccagcaaccgttctcgagcgatcgagaaggcgtagagtctgcgacggagtcttgtcgacatttgtcgtactcgccttagtcgatcttggtgtagaaccatagagacatggagccttcatcaatgtcgaatagaattttcctgaaatcaatactcaaaaaagaatatcaaatagaaagagcccccgagcgaatgctcaaagggtgacatgttataatatgtatagtaaattgaaaatgaattaaatttaccgaccaatgttttgtgtatgagcgtcttctctcttaccgacttcgatcagtcagtttgtagagtcatacattctccctagcccccagccttatcgtcggagaatcgttctcagaggataaggctcttggatccttgaccttccttggttgaataagcactgatcctagcccccagccgtgaagttggaaaagtcaatttccgattacacggcttggttaatacgcacggtgagaaattttacccgaccagatcttacatggtcttttgtctctacaggatccgacaaggccttatcggctctgggcgtccccagccgaagatcccttaggttcctcggaggccttgtcaagacggcgtaaagggatagtaggataggtttcaacgctaggtgtcgtcgtggtaagggatctctgggtaaaacacttggcgatattgtgtacctgctatcaactttgttgaagtagaggcagtagtcgtaactcaaccactagaagcaaatgtacgagagatcactacgatcaactggttgagaaccggtgagtaggtatctctcgatcatttggagtcgtggtacgaggaccgctacgctgccggtcgaagaccagtcgtagctgttcctcaaccatctaaagtcgtggtgcgaggaccgctatgctgccgtagtcgtacctcgaccatctgaagttaaggtgcgagagattgctgcgtactggtgcgagaaccaatgagcgagcggatttatctctcgaacaccaatggaagttgcggtgcaagagattgctacgtactggtgcgagaaccagtgtgcaagcagaattatctctcgaacaccaatggaagttgcggtgcaagagattgctacgtactggtgcgagaaccagtgtgcgagcggaattatctctcgaacaccaatggaagttgcgatgcgagagattgctaggtactagtgcgagaaccagtgagcgagcagaattatctctcgaacaccaatggaagttgtggtgcgagagattgctacgtactattgcgagaaccaatgagcgagcagaattatctctcgaacaccaatggaagtgctagagttggtttattgcaagtgtatctcatgtagccagcatgactcacgtacccaacttatagcatatccggatgtccgttcgcaatcatgtcgggtgatcaagccgacgacgttcgcgaggaattatccgttaacaaccttttctcgagtagtccagctatggccggtgctatgaggtaggtcgtcggtcttcgttggtaggttgggtgcgataactccgcatttgtcgagaatgttctcgataatgttgtgtactcgaccacaacctactcaagtgctcaattgttcctaaaaaatattttctagaaggcaagacatatagcagagaatatcgagtatgtactcaaaaaactacatggatcttctagtattatcaggatacaacaagcagatgtaaatatcaagtattatgtaaactgtaaacaagcatgatttatacagaagaaaacagagcgagcccccagcgttagaccgtagttggcctaacatcggaagcactcgcgcaatatatattgtataaaaaacatgctttaggtaaacgtaataaattatagatctgacaatgctgtatggtctgaataggtacgataaattgcatataaaatattgcgtacctgtatagatacatgccggatgtatctacgaatttagtagatcaattaagaaattaatcttactacaataccttagaatttgtaatgtggcctgatgggcaggtgcactgttgggttattgttggggccacatgtacatattcccgtatatatactgatttgcttttgtcttttgtcatcgggatgagcagccaggttgtcgacttggaattgaattccagtgtccgactacggtacaggccaatgaacagatcaatgcggcgctcaactccaggtcctcagagatttgtcggcagatgatgaacacacgagcaggcctgccctcttgggaatcacgcgctgcaagtagtcgtgcgtagtggatgccgatcctgatttgatccggttagaattctggcaacagatgtcaatttcggagatggtcgattggggatgaaatctcgcgatcgacgatcttgtattgatgtcttccgtcgcggcgatgtcttgatagatcgagttactggtgacgaattccgatcttgtcggaagacatgctccgatcgggttagatcttcacagttgaagtcgttgagtagcttgttgttggagaatccatctattgaacccatctcgtcgaaatcctagagcaccaaaatccccctacctggtgcgccactgtcgacgtttgacgtctcgactacggtatttggacagtatggggatcatcggtgctaggatatacgcgagactgaggtaaaagagatggagacagggatttttatacgggttcgggcccctgagttgtcaggtaataatcctacatcttgttggccgaagccagtattgctcttattcaccataatcacaccagtacaatatgtgggtagcctatctgactgttgtcgacatgtcggtctgaaggtctgactcgtagtcgacaacatggtagtcttcctcctcgaatccgtgcccggcgagatcagagatagtgctttcgtatctcctgacggtatccggagacaccgtaggggaatagccatgcctatccctgaagtcgatatccggcggtgtgtcttggcttacgtaggcttgtatgttgtggcttctggtgggcgtgtgttgattgtcatgggtgtcgtccatggtccttctaggggggcttgtatttatacccataggtgtccccttgtccaagtagaactagggaaaccaatacaatccgagtagtccttgtcgtttccatgtagaactctggttgtctttccttatccggaactccctcctatatccgtaggttgtttccgtataggacatggtatgtggtgggtcctgccgagatttagtcaactactattaggtatgtggtatccataaccctgacacaagtaattgggatagatcggtcgtcatgccgagacagtataaatcgctcagattgaaacatatactaataacaagactatatgtgtttatagcatagccgatcagatagatctagtgtgtatcggctaatactccgatacaactctatgttaagatgttaaagcaagtaggatataccaaacagaagcttaatatacttaaatacaataatatcttaacataaagggcagatttaacatgtcaactaagcatgtgaagtaaatatagctaaatcagataagatcggctgaaaccccgatactaccctaatcggcaaccaggaggcaggctagagattgtttttctaagcacgacttaatagaacaaacttaactgatgcaacattaagtatgaaaagaataacaatatctagacaatcaagccgctggaagtttcatagagtggtagatatcttatataatctagatcaatgtcgctatttaacctaatcggctgccttctgttagccggttgtaaattaaatgacgatactgtcaaagattagagtatcataaagatggaagcactaatcccaagagcataatccatcataacaagttttacctcttgtagaagatcgaaaacgatgcaggtcaacctgaaagcaagaactcgttgaaataaaactaaagcaaaaaggtggcgatgtgccgaaattatattgaatgtgtgttcttattttacatagggctcggggtctatttatacccgagaattacaagatatgcccataccggacacaactattatctctaacaaacactaagataacataagtctttacggcggacttttgcccaagcatatctataatgaaattacataaaacatcctaatttaatagatacaattgccttctcaggactctatccatgtgcggcaatcatcttgaagtacgtcaattcaacccgatatcatacatcaagttgcattgtcggaatcggctgcatcggcttacctagtccgactcagacccagccgaccctaatcgcagccgatctggactccagccgattcctgctctgtttccgaactcgatctccgcctccgacctttcctcaatctaatcttctttcccaatgccgatattaacaaatttggttgttaacacatgccccccaagtccgggatatttggtaatgttccggatttgccgtgtgccgactccgagcaagtttcgcactccgccgttttctgaccgttattctagcgctttaaatactaatcgttgcccccgaggaacctcacaccgtgacttccgttttcaccgcttaagcgaaactctaccttttctctctccggcgattcctccgacgcaaagcgatctccaggtgatttcacctccggcgagatctccgcccgcagcgatgtcatcctccgccagcccatctgccgcaccatcagccgagtatgctgaggtaagttcccatcggctagatcccctttcttagcagcatatcaattttcttctgtcttaaattgcttttctcttctcagtcgctttggatttgtagcatctctccaacctagtcgcgattcccagtctatcgtacgaaaactactactttctcggcccagttggcaatcccgatcccaccgagttcatcattggtgaaaccaataggatccctttcagattaaccaacctagatctaggtcattggaagaataccttcaaatcctagccatccctcgagaaaacttctcccgagaaaagttggatcacatggtttaagcgcatatcggctagcaagagagttcattgggatgagatcagaatcggccaggcacttgatctcaccatagccaattcagctaaggatgagcccctaatggcagctgcttcctatttttggtccaacaccatcaatgccttcttgttcaaccaagggccgatgaccccaactctcatagaaattgtcatgatcacgggcctggacgtcacctcatcggctaaccctatgagcttgaacataaagaaccaatatgacttcaagaccaagagcataggcggttggtcaggctatgtagcagcatacatgggccagggttcagtcaccccccgagaacatgtggctttcttgttaatgtggttagaaaaatttctcttctgtggatcaagctgtggccctacaaccaactggcaatttgtagccgaagccctagaaacaaaaagacaatttcccttgggcaaaatcctccttggctatctataccaaatgttgatcaatgcatcggccaagatagctgtcggctcaatggttggagcaggcggaccatggtggttgctgcagacttggctaaacctgatagtcatgaaagttgtcaatcggccatctgtgttagaagccgaattcccaagactagagccgattgtagaagatgatgaagaagagcgcactcatcatagatgtatgtcatatggagaatatgcatccgcatcagccgatgctggagcaaaactatcggctgagctactcaaggattggttctgcagctcctatgagggctttcagaaagatgctcgagtctagtttccttatgaagattcggcaagccttgagctcccatcagactttagattcgaagacatcaatcatgaaagataccaatcgtccagggaaattttctcagctgcaatcagcccatgcatccttcctgtcggcattcatcagggaagaaacatccaagcttcttatgaattctatcatccaatgagctcggctagacaacttggaatgggccaactcccaattggcttattctttgctgacaagatcctataccgaggagaaatttcatcaaccttgatgatggatcggctgctcaaccttcaagggcctcctctgggcagtattgaaaatatagaactggcaatgttcagaagcaaaaactttgacagatggtggggtgaatggaagctgtatctattccaccaaccagcctcaatgtatatgacagacctctttccagatgtagtccctcaagtaagtcttaactcacttgatttcatttgaataactgcttagccgattaatcttaactaatcttccttttgatttgtagacaacagaatcctctcctcctcgtcaaagcaacagtggcaaagatatcatatatgccccaggtttaattcctaatggaggtggactatctccccccgttatcggctaccatgcccccaagacttcaactctccttcacggtctaaccagggaaccagccgacacaggccaaaagaggaaaaccagatcatcggccgtgagtaccctggctttagctcccaagaaaaaggccaaattcaagaaaactaagccaactgataagccgattgatgatctgcccgccttggatccaactattgaacaagctttagatgaagaagacattggtgaagatgttgaccaggctgtagccgaaatgagtgacacagaaagaacaccatcggcttcacccaagcaaacgcctccaactccttctgccccgttcattttacaagagtaagtacttctctttgacttctcctgaaattacttccctctttggctaattactcataggctttatggttgcagaaaaagaaaactactgtgaagaaaaatccagcagcaacgattatcaagtcggctccacaagtaagatgtccttaattcttttactaaatcaatctcaaccgactctatataacacttgtctatttcgcagcctcctcctccttcccctcctgtataacaatcgtcaagtgataagactccatcggctgtggggaatcatcacatcgaggaggaagaacaaccagctgctcctgctatcccaataagtttccctttgtctcaacaattagatcggctataatttacccagctcttattctttccaaaattgtctctgcaggttctagccgatctcttctcttttgacatcagagattatcttgatgaagcagaagaagacacctcaagcaaagccttagccccgttatccgatgatgtgaagaaaattctggaagatatttctcattggctagaggcatcactagacaacttggtgaccaactgtggctcaatccgggcaaggttcacagacatccaagctctactcccagatgaactagccgatgcccttactccagccgtttaccttgagcaacaccgattcaagctggagaaggctaggcaaaggttaactgatcaccgggagtgccaaaatattgaagctacaatccagcacaatcagcagcttgtgcacgtagagaaatctaaacttgatcaactatctgaggacctgatcaactcaaatattgatcggcttgaagctcgtaagattgatctcatggcacaactccaagaatggagcacaaaaagctagccgatctcctgcaagctgttgaagaacagaaggcaaggctgaaatcggctatcaagaatgtcgctgatatgaccaagtccttgaaagttatccctggaactgacgctcaagatgcccaagccatagaagaaatagaacagattaggtagaaggctatatcggctatccagcaatacttgtctcgatgactttccatgtaataagccttagaaaatttttgtaatcggctaaaatactttcgatgtttatcctgacaatccgtatgccgattaatcgaacttccaaatttgctcaaaacttcgctaaactgtatctcgtgcatatatatgtgcgcccctaattttacaatgtcaaaagcattgataaaattataaaaacaactaagggcgatataactatatcggccattgtacatcggcaaaccatgaccgattacaccaggaaaaacaactaagggcaatataaccatatcggccatctcaaggcgatgtaaacacatcggctgacatacatcgaaaatactagccgatcatgcgttaacccaaacacttgggtaatatttcttcaaatactttccattgagcgctcgcccatagacttcaccatcaagcccttgcaacatatatgctcccttagacacaaccttataaatttggaacggtccttcccaattcggtgaccacttgccgaatttgttatcccgagttccaatcggcagaatcaatttccatacaagttcaccttccgaaaaagtcttaggcaccactttcttattatagtgccgagcaacccgttccttatctctagtcaccttagcaagagctcgcaaacgtgattgaaccaagtcctccctttcatcggccataaggttataatactcatcggctgtcagaccatcttgtaactctattcggcgtgagccaactctaacttcccatggcaaaacagcttcatgcccataaacaagcttataaggaggaaattggattgatccatgacaagccatccgataagaccacaatgcttcggctaaacgagtatgccattgccgaggataatcagaaattttcctcttaatcaacttgatcaagcttttgttagatgcctcgacctgcccattagcttgtgcataatacggtgaagaattcaacaatttgatacccatgctatcggcaaattgaacaaactcatcggacacaaatattgaaccttgatcagttgcaatagtttgaggaataccaagtcggtagattatatgctcttgaacaaactgtattgcatccccagaatcaactttcctcaaaggaatcgcctccacccatttggtgaaataatcagtcgccaccaatataaacctatgtcctttacttgatggtgggtttatcataccgatcatatcaatcccccaacctctgaatggccatggcttaataataggattcatagccgatgccggcgctctctggatcgctccaaatttctgacagtcttgacagcctttataatatctgaaacaatcctctaacattgtcggccaaaaatatccagcacgtcgaagtagccatttcattttatgagccgattgatgagtaccacatatcccttcatggacttcgccgattgcaaccttggcctcatcggcactcaagcacttaagtaacactccatgatgaaccctgagttcctctcgacactcaaggctgttgttggcccgatctttcggtgagttgtgataactacgatttgggagaaacgttgacgatccgactacaaccgtacgagacgttgtgttgcgccttagcgatcgatacacctctccgttggttgttgatcttgccggtgcagatcaaccctattcctgcaagcaaatcgaagaaacaagcaagaacaagataaaggcaatctgatattgcaaataggaatttaatacaaatgataagttggggttccgaagaacaagcagacggacggtctagccgacacgcgcgctgcaagcaagtagcaatggctaaacttcaatctatcaaaacccgagaaaccctaaaggggtaactatctatatataggggtgggaggacgacctaggggtgcctagggtcgtgctccaccagcttggggcgcaccccacatgggccccacctgggccggggtcccaaatgaagttacaagcccataggcccattacaggtgtcacagcaccttgtttcttcaattggtgctgactgagatggaatttgcaatgaggcttgatgcattggaaagagggctccgagagctttccatcaagtactcacgggccgaaaacggaggtcgtatgcagattcggtggccgtttgaagtcagcagtgtagtaggtggccgaatcggattccagcacttggagtacttgatctcgataccttcttgttcatccatgatgtgagcaatggttgcatccgtggtagccatggtcacatcactccatcgatcgttcgataataaagctcatcatccaacagtgtatacttcaatgctttataccttaacttcctaaaagccgattgagatggatcctgtaaataccgataaacatcatatctccaatcatcggctgttatggtagcaacctcaatctgaacatctttgatcatcggcttatatcccgatgctccttgggctaaatcattagcttcaatgttctgttctcgagatacatgctttaaagttactaaccgaaattccttcatcagttcttggcatttctcattatagactatcaatgtatcattcttgcactcatactctcctgccaattgactgattactagcaaagaatcccccatgatctcaatggtatcggcttaaacttccttaagtaattgcaaccctttgagcactgcctcatactcaacttgattattagtcgcataaggtttaaaattataagcaaactcgaaacatgcccccctaggggaaattataactagaccgataccacaaccatgagtacacaccgatccatcaaagaataaagtccatggcacaatcgcaactgagccgattgaatcatcacgatgatcaacaataaaatcggctacagcctgccctttaatcgccttcggtgactcataccgcagatcaaactcagttaaggaaaatatctattttccaacccttcctttcaaaattggagccgataacatgtacttgacaacatcggctttgcatatgatagtacattcattggacaataaataatgccttaaccttgtgcatgaaaagtataaacacaggcataacttctccacaggggaatatctagtctccacatccatgagccaacggcttaaataaaacacaactctttcttttccttcgaactcctgaatcaaaaccgagccgattgacgtctcactggccgacagatataaccaaaaaggtatccccttctgtggaggaatcaaaatgggaggagagctaagatactccttaatattatccaaaaccttctgttgctctgccccccaaataaactgctgatcggcttttaatctcaacaatggtgtaaaaggttctaaccttccagacagattggaaataaatcttctaacaaaatttatcttgccgattatctcttgcagttttgtcttgttttccggaggctgaatcttcttgatcgcattaacactcctttgagtcacctcgatccccctctcatgaacaagaaatcctaaaaactggccagccgatacgccaaaagcacattttgtcagattcatcttcaatccatattttcttgttctctcaaaaaccttcctcaaatcggctatgtgatcttctatttgtttagacataacaaccacatcatcaatgtacacctcgaccaaccagccgattagatcatgataaatataattcatagctctttgatatgtagcgccagcactcttcaagccgaaagtcatcacaacccactcaaacaagccgatcgcaccaggacacctaaaagctgtcttatggatgtcttcttcggccataaagatttgattatatcctgcatttccatccataaaactcaaaattttgtttcctgacgcagcatcaaccagctgatcagccactggcattggatattcgtccttcaatgtagctttattcagatctctaaaatcaatgcataccctcacctttccgttcttcttgatgacaggaactatgctagaaacccattcaacatatcggcaaggacgaataaaaccagcatcatacaatcgcttaatttcagctttgacaggttcgagcatgtcggctttacatctcctcggaggttgctggtgtggtctaacccctggtttgataggtagccgatgttcaacaatcgatcggttgagtccaggcatctcataatactcccaagcgaagcaatctctagactctttcaagagctctatcagcttagttctaaactctggagacaaattcttactaataaatgtcggccttggccgatcgcctggacctatatctatttcttccaaatcatcagccgacatgaaaccttgaccttgcttgtcatcgagatcatctaccgcgtccttggtgtagacatttgaaccctccacaacgccctcaaagtaatagcttgggttctccatcttcaagtggctgtatatcagaagcagatacttttagaaaatctccatcccagactttaccagacaaacaatcaaggccatcgatctcccaaagagctaaatcggcactggcgacattaactgacctgtcggctagcacaatctctatcttgtcgccttgccactgaatcaagcattgatgcatagtctaaggaatacaacaattggcgtgaattcaatcccttccaagcaacaagctgtaagaacccttcccatcgatgacaaaaaacgtagtaggaatagtcttactgccgactgtcagctccacatttagaacacctttagtttccgatggattgccacccaagtctttgagcaccatatttgtcttgatgagatcctcggcatttctacccaacttcctgaacgtagcataaggcatcaaatttaccacagctccaccatcaaccatcatcttagacatcggcttcccattgacgtagccgttcacatacaatggtttaagatgccgattctctatcccctcaggcttttcaaaggctgcctgttctggtgatagaaccaacttagccgactcctcttccacctcatcaacatcagcttggtcgatccgaaattcggctggcaaagtgaaaaccatgttaactgacgccgttacaatacttttcccttttgccaacctttttgcctcatcggttgcaacatcatcggctacaggaatctgactcttaactcgccactcctgccttggttttgctttcttcaaccgatgattaatttcttgctcgacctcctggaaatgttccctactcctcaacctttgaacccttcttttctgattctttgtaaaaatacccgaagggcaccactgattcttcctgattacattgtcctcttggccatgatcgtgattcaccggacccaatctttgatggacagaaactcttgtttgccttagcggattacccctattatatgattggcttgagctctcgacgatgtcactgcacccagggcagttttcaatagatggcagcctcataccttcattccagcagaatttaaagaactcacaaccccaatgaggatcaaaaccatcatcgtattgctcatgatgcttctcctgctgcttgtcatacctcctctgatatttattaataatcttagccgaactcacctgaaaaccccttgcacgggccctgttggctgtttggccagctgtatgcaccatattaacaggaaaaggattaccatccaccttcatcggcctcttagaatcatcgaacttaattttgcctccctcaatggccacccgaatctgttgtctgaaaaccttgcaatcattagtagaatgagatccagaattgtgccatttgcaatatcttttcttgcctaattcctcagcagatggaatcgtatgaccaggagggagttgaatttgcttctctcggagcaataagtcaaagattttatcagccttggttatatatcaaaatcatacctctcctcttttccagaactttttacccattggcatggtatgacctttttacttctcacccattcggctgcagctatttcagaatcgtcctcatcatcatccaacccatacatgtacggacaaacatgattaaccttcttggagcttttcctgacttccgcagacctatgctcgtgcaaagttaccttctgtatcagatgtgacaagctaccaaagtcttcagatgagaatttctccctgatcggagcaatcataccctgaaaggctagatcggctaacagggcatcagtcaaactcaagctgaagcatttattcctcatctccctgaatctctgaatatactcgtgcacaggttcatcataccgctgcttaatcgctgttaagtcagataatttcatcccgtggacccactgtagaaatagctgtggaactgcttctccaaatcggcccaactattgatcgacccatacggcaaagatgaaaaccaagtaaaagccgatccagacaaagataaccgaaacaacctaaccttcatagcgtccacagccgacgcttcaccacattgagctaagaatcggctaatgtgctcataagttgacacaccatcttgtcctgaaaatttagagaagtccggaactttaaactgattgggaagaggaactctctcaaaccactcaggataaggctgctgatacaagcttccagtctctttaggtttaagcccgaactgttccctcattacgtcagcaatcacatcggcccacggtcgttgctgagctgctccctgtgcctgttgttggatgggctcgaactgaccatactgagaagcaaactgaggttgagttggccccctgaggctgatattgataattcaagttgcccccttggtaattatgacggttcggctggatgttacgtactaagtgctcaggaacgacttgaggcattactgtgccatccggccgtacgtggtgaaccaagtgttctgggacaacttgatttaaaaattgttgtacaggctgaccgctaggcgttgcaaacccggccaatgcgcttattgaaccttggtgctgaatcggctgaatgacttgctgtcttaacggcgtctgccgaatcggctgcagaggctgctgccttggtgctgtttgctgagctggttgcatgacctgttgctgaatcggttgtacaacctgttgaattgggggtgtctgctgacttggctgctgctgtattggatcaacaataggttgaggtggtagaaacatggcagcaaccagatcttgggtcagccgattcacaacctgcctaatatgctgtggctgctctctcgtcaacaaccgaggattcaccggctagcctggcgtcatcgctgacaacgcaggtaggggagttgatgctggcgccgtcggctgagctattggtgtaactaaggaaccgcctgaatggatggctaaacatcagtgatcaaggaccgataatttggaaagacacctccttgcaaataaactgggcttgcagcctgatgctcagctactgaaccattggctattgacttcatcatgtctgataaggtattgactaacaccctagactgattgatcagagcatgatgtacggcgtagtcaacccggtcttggaaattgttgaaaaaatcttgtgccacatcactattctgattaagatctcctccctgtaatccttgagcaccatcaccttgatttcctagagatccgtcggtagcgcctttgtcactcggttgagctgagccgtctggagtttgcttcccatctccatccttagaagaatcggttccaggatcatcagcaaccacttttaatttttacttctgaacaaatgttctcttgcgagtctgcataaacgaattcaggaactgatctcgtgcttgctgcatcattgcctcaaaatctttcttttgctcaggagtgaacttttctggatcaataggcacgacgtttgcctcatggacgttgatcaatcctaacttctggatcttttctttgatagtgcccgggctagccgaggatggtgacagtggtggtttctcaaccatgaggaagaattgcttgctgacttcttacttgtcccactgggcatgccaatagcgtgttgacagaaaacacgaggcctgggagatctgcttaactccagtgcaggtccaaagctcgccttcagatgtatgggcgtgccagttgatttgatcttgcaatcaacaagagatagaaacaaaggaaccgcaattaaatctgtaaatgatagccgatcggctagatgccgatgacatatcatttatctttgagccgatgtcgtatgtgaatcgatcggcggttgtaaataaacaataaagaactagatctattcgatcggctgtagatattaacgatatatagttcttatatcgatatatgcttaaatcaagtaattgggatagatcagtcgtcatgccgagacagtataaatcgctcagattgaaacatatactaataacaagactatatgtgtttatagcatagccgatcagatagatctagtgtgtatcggctaatactccgatacaactctatgttaagatgttaaagcaagtaggatataccaaacagaagcttaatatatttaaatgcaataatatcttaacataaagggcagatttaacatgtcaactaagcatgtgtagtaaatatagctaaatcagataagatcggctgaaaccccgatactaccctaatcggcaaccaggaggcaggctagagattgattttctaagcgcgacttaatagatcaaacttaactgatgcagcattaagtatgaaaagaataacaatatctagacaatcaagccgctggaagtttcatagagtggtagatatcttatataatctagatcaacatcgctatttaacctaatcggctaccttttgttagccagttgtaaattaaatgacgatactgtcgaagattagagtatcataaagatggaagcactaatcccgagaacataatccatcataacaagttttacctcttgctgaagatcgaaaacgatgcaggtcaacccgaaagcaagaactcgttgaaataaaactaaagcaaaaaggtggcgatgcgccgaaattatattgaatgtgtgttcttattttacatagggctcggggtctatttttacccgagaattacaagatatgcccataccggacatgactattatctctaacaaactctaagataccataagtctttacggcagacttttgtccaagcatatctctaatgaaattacataaaacatcctaatttaatagatacaattgccttctccggactctatccatgtgtggcaatcatcttgaagcacctcaattcaacccgatgccatacctcaagttgcattgtcagaatcggctgcatcggcttacctagtccgactcagacccagccgaccctaatcgcagccgatctggactccagccgattcctgctttgtttccgaactcgatctccacctccgacctttcctcaatctagtcttctttcccaatgccgatattaccaaatttagttgttaacagccgagccaagccgagccggccggccgtggcgagggccaggcgtgcgtgcgtgcgttgcgttgcgcatgtctctatccttttgcaacggatcagaatccaaccctgagattgcctccgtaatgggcaggcgattcaatacccattgatcgcgttgttactgcggcaacgggcggatctctctcctgcgccataaggaaagggggaatccgatcagatccgctcggttactttccaaacactggtgttcttccgagggcctccagaaccataccttcgcctgagatctgcactgggtaggcgggtgatcaggtttttggggagtgcttccgcacgactgctcctcgtcttctgttcgtcgtcgaccgtacatttgcatcaccatgtctgccgcacctgcacctggaggtggcgcaccgggagccggagctggcgcaccgggagctggtgcacagaacgacaacaccaacggaggcagttctgcctcacaatccagcggaggaactttcacagggtataatcctctactgttatttcagtttttgatatttctgttagtcgcactataattgcgttctatgtatgatgatgatgatgcttattctaccttaagcatgctcctgtttatgtttaattttatcactggatcacctcacattgttcatgtcatgattatgtcttaatattttggattaaaatatgccgatatttgactatatttccaacaacttgttcgtccttgtagatgcgattgtctatttcctgatttgaatagaaagttccaacttattgtatgaatttcccatagagttagcattggtttgaagttgttgtatagcacctgggttatgcatgattaaaaatattattaagtgaatgatcacgcaactaactgaaacattgtccatgtagtatcaatagttaatatagagcaggtagaagcaggagatgccaagtcaaatatatagaagctagtcttatccatatcttatttctcttcaccaaccacactcagtagctaccatgggtgatttttttgcgaggacacgatgagtgaaatttttagctagaagaattctttgataaaatgactattgactagttataccgagaccttgagccaatcatagaaactgagacgtaatatattttatccctacacaaaaagatgtactagaacacaatctatatactaacatttatgcatcacactgctaataatttcactgtcttctgtaataataataataatctatactaatagcagtggtgattgttctatcacaccacctccaccaacttgataaatgggcccctttaatcagccccacgctcccacaagttcttttccatttcactgttgactttccccaaaattcgaccaataatttattttttttgaaaaccagtacggtggacaagatctgaataatgcacaattcgagtcaggttattaagtaccatgaggaaaacatcgtaaagtactacttggactaactatgtttttaatcaagttaaataagctagaaactcatttttgttttgttgcaatgcacgggcttttggctaagaacaacaatgatgatgacgatgacgacaacgtagattttaagccatggagagtatatgtcgtggtttattcttgcatatggttcaaataggagtataaaaaaatagtaagaaaaaaatgataatggaactgaaatatagagataataattccaatagtttaccaatttgcaagaccaaattaaatgcaaaaaacacatcagattaatatcgttgaattaaaagagatagcaagtgtcacaaacctagctcagattttgcaaggcggacgtagagctcctggccaccgtcgacgaaccccgtgtccatcaagtcgccgaaccactgtatgcacccgctcccgccgccgcggatgtcggcgccggcgtacgccgtgcaggagcagttggacaggcacctccagcggcacccctcatgagtcaccgtggcatccacggcgcagccgtgcgtctccggcagcttcacgccgcgtaggaggtagaacccgtcctcgcctccacctccgctgctgccagtgcactgcagcggcgtcctctggccgcacccgccggacgtgttccgcatgtaccactccgccggcgagcgcggtgtgaagcccctgatgcagccgcagacggtggcgtcgacgacgttgcagacgccgaacgcgccgcacctgccgtagttgtcgcactggtccctcggccccgaccagaagttactccacgacatcgccgaccggtcccagaccatgcgttgcatgacgccggattcgttgaggagcacccatgacatcggcgagccgtcaaggttgcggaactggtaggagacctcgccgccggtggcgaccctgaactcgaactcgaacatgtcctcgaaggtcgtcatccacgggcccgtccggtacgtcttccggcctcggctccacacgtgcagctcaggtgagccgctcgtgtccgtactggaagtcactgggcgacgggtctttggcgccgcgccacgacgagagcgaccactcggcgccggtccggaggtccttcccgacgcgtatcccggggaggaacgtgtttgtctggtgctcgaagctctgccacagcacgttgccgtccttgtccgtgagcaccaggttgccggtgtcgaaaagtgtggagattatggataccccatatctacatggcggtcatattccagctgggtacgggataccgaataaagatagaataccttcatgaggactcggattagattctaaacttgtatgtcatgggaatacccgagatcctagtcggttacgattgtattttatctgtaattacatattccgttagggatatggactgtacttggtaaagcggactccgtcccctatataaggagggtccgtgtgcctctcggggcacggtttttgtttccagtttatacaatcaataacacactcggcggaatcatccccggacaggagtagggtattacttcttgaataagaaggcctgaacctgtataaaaattccttgtctcgaaacccatccgctttcctagcttgatagccacccccttttattattgccgaaatcttgtttcgacagttggcgcgccaggtaggggtagcgtcaagtttttgccgactaagtgcgatgggttctgtctccggcatcgacgacttcgccttccctcccgggcaggcgttccggttcggcagcctcaacttcatctccaacgacttcggcaaaatatctctccttgactcggattcgaaccagtcggggagagatcaggtcccagcgccgttcggtatcccgaactcggtcgaggcctactccaagatcatctctcccgagtcggcttcaaaccactcggacgagatccaatctactcctcctgcgcgaccagatcaagacgacggatcctatccctcaatcctgatgaaacttcctgatgatttggccgctgtcttcacagccgagacatctcaaactcgaagatctaggcgagctccggcttcggccccgatccaatctagatccagggaggttggcattatactccaacctcttgggacagtctcgacggaagagttggatagctacctccgctcccccggcgtcagttctcgaccaaccgagatcctcgactacgacgatttcggctaccactacgaccacggcgacctcgacaacttcgacgacagctatgaggataactatacgcccctcttcttcggtgtattcatggctgacaacgaaacggaggaacagcgccgagcccgagaagcggacctagatcgcgcacggcaagaagctgaacgtcgccgactggaggaagagcgacaggacaggagcgagaacgactacagcatgagcaacaagattgcgaacggattgcaaaggaggctgaagatcgacggcaacacgccttggaatctgggcggcgagcaagagagctcattgggcaacaagacatcaatggaacagcggtctttcgcaccccccagcagaacgcagttgcagcaatcactctccttgacaccctcctcaaggaagacgcactcaaccaaactgatcatgttgtcaacatcttgaaccagacgaagaccatgatcgctgcctcggttccagccaactccgcaagcacccgcaccccgactggtagccgagtccctcaccttcgatctcaggactatcaccagccaagcctaagcattgccggcgccggttctagtcgcaggagcaggggacatgatgaacggtctgttcgttcgcctcccgaacgatatagggagcgtcgagttgaacgaccgcactccccacatctaaggcgccccatcgatcttcgcgacaccatcaaccagcgccgcgtagcaagaggccatcattcaccggatcgctacgacgacgatatggacggagttgctaccttcacaagcgatctgcgtcgagtggattggccagccggctttaagccgactggaatcgagaaatatgacgggaccaccaacccttagtcttggctcaccgtctatggtctcacaatccgcgcagcaggaggagacagcaaagccatggcgaactatctgcccgtggccttggcagattctgcccggtcctggcttcacgggctaccccgcggcacaatcggatcatgggcagaactacgcgaccacttcatcgccaacttccaaggcacttttgaacggcctggtacatacttcgatctctataacatcgttcagaagtctggagaatcccttcgagattacatccgacgcttctccgagcaacgcaacaagatctccgacatcaccgacgatgtcatcatcgccgcctttactaaaggcattcgccacgaggacctagttggcaagttcgggcgcaaacctcccaagacggttaagcagatgtttgaaaaagccaacgagtatggcaaagccgaagatgctattactgcgtccaagcagtcggggaccacttggaagccaaagaaggatatgccggccgcaggagggagtggaagtaacaaccacaaggatcacaagcgtaagcccgaagagcttgtggcaacaacctctccatcttcccgacaacgttcccacgtcaacaccttcgacaagataatgaactcccaatgtccgcatcatcccaactccaaccacgtggccaaagattgcttcgtctacaaatagtttgcggagcaatacgtcaagaacgcgcgtaagccttcagacggagatcaaggcacatcaaagaagaaagatgatgaagacgatgccccgactggttttcaagatcatcgcaaagaactcaaccacatcttcggcggacccctggcttatgaatctaagagaaagcagaagctaactgaacgggagatcaatgcggttcagcccaacacaccccaataccttcggtggtcagagatagcaattaagttcgaccgctcggatcatcccgaccgagtggtccacccggggcggtaccccctgatactagacccagtggttcgcaatgtcaagctccgacggactctcatcgatggtggcagtgcactcaacatccttttcgctaagaccctggacgatatgcagattcctcgcacggaattaaagccgagtaatgcacccttccacggtgttatcccaggtttatcagctacaccagtcggccagatcactcttccggttacttttggcactcgggagaattttcgcacagaaaacgtttgtttcgaagttgctgatttcgaaacagcatatcatgctatactcggacgaccaaccctagccaaattcatggctgtcccccactacacctacatgatgatgaagatgcctggtcctcgaggagtcatatccctacggagcgacatcaagcaagccgtcacatgtgataaagaaagttgcgagatggcccagacccgcgagatcacactcgaccaagaagagatccgactagcggtgaccatggcaagcgaaggagaactgcccgcaaccaagatgcccaaaagcggagaaagcgatgccaagaccaaaaagattcctttagatccctctgatcctaacaagactgctgtaataggtgctgagttagattgtaaataggaaagcgcgctcatcacctttcttcagaataataaagatatttttgcgtggaaaccatccgacatgcctggtattcctagagaggtgattgagcactctttacacgttaaggaagacgccaaacccatcaagcaacgactccgccgttttgcacaggacaggaaggatgcgatcaaggaagaactaaccaagctgttagcagcaggcttcatcaaagaggtcctccatcccgactggctggctaacccagtcttggttcggaagaagaccggacagtggcgcatgtgtgttgattacaccgacctcaacaagtcttgtcccaaagatccttttgggttacctcgcattgaccaggtggttgactcaacagccggctgcgagttactcaatttcttggactgctacttgggatatcatcagatccgactaaaagaatccgactgcttgaagacctcgtttattatgccctttggggcctactgctacatcaccatgccctttggattgaaaagcgcaggagcaacctatcaacgcatgattcaaagatgtttttcaactcagatcggccgcaatgttgaagcttatgttgatgatgtagtcgtcaagatcaagcagaaggatgacctgatcacggacttagaagaaacttttgcaagcattcatgctttcaggatgaaactaaaccctgaaaagtgcatcttcggagtaccgtcagggaagttgctcggatttatggtatctcaaagaggcatacaggccaacccggagaaaatcaatgccatcctcaacatgaaaccgccaagctcccaaaaagacgtccaaaagctgactggttgcatggcagcacccagccggttcgtctcacgaaccggcgagtgggggatgccctttttcaagctgctgaagaagactgacaatttccagtggggacccgaagcacaaaaagcctttgaagacttgaagaaacttctcactactccaccagttttggcctcgccacatccacaagagccgctactgttatatgtgtcggcaacctcccaggttgtgagcacggtcctggttgtcgagcgtgaagaggaaggccatattcaaaaagttcaacctcccaggttgtgagcacggtcctggttgtgagcacggtcctggttgtcgagcgtgacggaccaatttatttcgttagcgaggttttggccgattccaagacaagatatcctcaggttcaaaagttattatatggtgtcttaattaccgtcaggaaattatctcactactttcaaagtcactcggtcacggtggtcacatcgtttccactcggggatatacttcataaccgcgaagcaaacggacggattgcgatgtgggccttagaattgatgtctttggacatatcgttcaagccacgaacttcgatcaagtcacaagctttagctgatttccttgccgagtggaccgagtgccaagaagacatgccagaggaaaagatggaatattggactatgcattttgatgggtcgaagaggcttacaggcactggagctggggtcgtattaatttccccgaccggagaaagattgagctacgtattgtggatacatttttctgcgtcccacaacgtggcggaatacgaggcgctactccatggattaaggattgcaatctctctaggcattcgccgactctcagttggttgttatcaagtcatgaaagagttgtcttgtctagatgataatatggctgcttatcgacaagaggtacgcaagttggaagataaattcgatggactcgagctcacccacgtcatccgacataataatgaggcagcggacagactggccaattttggttctaaacgggaagtagctccttcagatgtgttcgtcgaacatctttacgaaccaaccgtgcccagaaaagaaacaattgaagccatggatactcaaggcgtaagcatgatcgaagccgactagagagaacctttcataagatttttgaccaaacaagaactccctcaagacaaaaatgaagccgagcggatttccaggcgtagcagactttacattattcatgagactgagctgtacaagaaaagtccatcaggaatactgcagcgctgtgtgtctttggaagaagggagacaattgttgaaggatatacattctggtatttgtggtaatcatgctgctgtacagaccattgtcggcaaagcttaccggcaaggttttttctggcctacagctgtgtctgatgctgacaagattgtgcggacatgcgaaggttgtcaattttttgccagacaaattcaactgccagcccaagagttgcaaaccatcccgttgtcctggtcgtttgcggtctgggggcttgacatggtcggcccgtttaaaagggcagtcggtggttacacgcatctctttgtggctatcaacaaattctccaagtggattgaggctaaaccggtcatcacgatcacagcagataaagctagaaattttttcatcagcattgtgcatcggtttagggtacctaatcggatcatcactgataatggcactcaattcactagcggagcatttaaagacttttgtgaagactttggcattaaagtttgttatgcctccgtggcacaccccatgagtacgtggcacaccccatgagtaacggacaagttgagcgcgccaatggcatggtacttcaagggataaaagcacgagttttcgaccgactacgtccctatgctggcaagtgggtagatcagctgccgtctgtactttggtctttacacactactcccagtcgggctaccggccagtcgccgttctttttggtttatggtgcagaagcaatgttgccaagtgaagtggaatttgaatcactacgatttcggaacttcaacgaggagcgctacgaagagggccgagtagacgacatcaatcgactagaggaagcccgtgaagcagctttaattcagtcgactcggtatttgcaagggttgcgccgttatcataatcggaatgttcgatcgcgagcctttttagtcggcgacctggttctgaggaaaattcaaaccacacaggatcggcataaattatctcccttatgggaaggaccgttcataattgctgaagtcactcggccagggttcttatcgactcaagcgcgaagatggtactcttatcaacaattcttagaatattgaacaccttcgtcgattttatgcttaggcatttcgtttgtatctttcctctttgactgctaacttcaagtttttccttgaagttttcagtcggggggctactatgataataatggagtgtgatttttatcaattcaatttgcctacttgatttatcattgccctgtttggtctttcgacttagtcaatgaggactgaaggtttttaatagcttttgcgggttttaggctcaataaggcttgacaaaggcttttaagaaatcagaagctaagtatggaacaccaagcatagcataaattcatcagtattgtacaaattgagcctccatcatcattaatcatcaaaatcattgttatatcaatcagtatcagttttttcatcatcagaattatcagacccagtcagccgaaggtcgacatcttggaatctctcaaccacgtcagcagcaatcttgtcagcggctttttgcgcatcattgatgagatcaagagcagcttcttcgctcgtcccgtctgcaaagccatcaatggcatcaatgtcaactcttggataaagggatttggttatcgccaacgccagacttgctcccatacttccagcctctttgatgttcttgaagtaagtatccggagcgactctcagcttgtcgaagatttcggcagcatcaagtgtactcggatcggcgttattgaagaacatggcttggatgattggagtagcggcattagcgactttgtccctagccccttcaagcctattgatcttgtcaactaagacatcaaactgtgcctgggacttgatcttgcggtctgcattaacagattcacattaatgaatcagcatatagaagataatggcttttgaggtattgattattggtaccttcaacatcctttaaagctgagtccctctgtctttccagttctgccttgtcattttccagagtttgaatctgcttctccagttgagatatcttggcagcttgcactacattgactctggttaatcaagattacaaagataacaacataagttagttgggcagagtttgtgcgtaccttttgatgagccgctcagttcaaaattggattcctggagctcagcaatccgatccctcatatcatgttcattcttcctggcaagttcttttgtctcgtgcagttgattcctagtggcttcgagggtcccaagatgagggactaacctctctaaggttgccattttagcttcgttcctaagatgaatcctctgcaagacagtttaattagcgctcggactaaatggcaaacgagatggttgagatcaggcgccaaagagcttacatttacaatgcgggttgcctgaccaagcgcctttctcagtaggcataactcttcatcctctttttgcttatttattacgatcccttgaggctgcatgttgtcatcccaccacttgaccagaatgggagggcgcgaatcctcagctgctcgtatccggagaatttcttcttcaacaccaatcattggtcctaatgtatccactgacaaaggttagacaattgatcagattcatttggatcaacacgatttcaggcaaggtgtttacctgtgatgatttccggacggggacgagtcgactcttgcgccttaatgggagaccctggcatcgggacgttgctggcgtcttgtctaggagggctgtctgaccaagctccaacttctggaatctcttggcttggcctagagtccgactggttttcggtcgggggctcctgattaactccgtccacagcttcggccgactcattctcagtcaggggttgatcaccagatcctacattatcggttgctggctggctgtcactcggctgatcctcgttagttggctcgattccttttaagttcgtttccctgctagtcgggttagagtcttttccagaaggatctatatcagatggtttcctgcaagtttggtttgtcagtattttttctgcactgggtgcacgtcaatgcaagggagatcgttatatgatttgtacctggaagacttcctgatctttggcacaggacgactggtggttttcttccttggagtagcctgctttggcagtttcttggttgcctctcggtccccaggctttctagcagtatcgctttcgtcgtcactcgacaccaacttccttttgcgtgaatctggctggccggctggattggaagtatttggccgggcttcagaatggatcttgggacccccgctcccttggccggtttggcagtggggtgattggcattgaatgactgggggggtccgatttcatcaaagaaaattcctaggcatgatatccttcattgttaattgattcaacaaaaagacaagactatattttgtgaaaagttgaaatgtttgattacataccggtggaggaggattgaaagcattgaatggcacgactggcagcaagtgcgaatagctgacgacgatagcattcgagaagatcttgtacatcctttccttcataaccttaaagttaagagagtctggatcttcatgatttggatcatgtttgccgtcaaactcaaaagctgtgcgggacctctctttgattggagctaaccggatttttatgaagtgccgagtgatctgttctgcctgcaaaccttgctcttttagctttatcatcctctccatcagttccactgcttgcgcagcttcatctcccattggcagtgagttccaagtatcccgataaacgggaggaagacaggagtattcggggagagcaggctcaggattttggacatagaaccaatttgcgtgccaacctttgtttgaggtcttaaagggcatggagaagtatttttgacttagtgttccccgaagttggaaaccagcgcctccaacaacacatggtttgctcttgtttggctgaggcttaaggaagaagatgcggcggaacaaggcaaaatgaggcctaatgcccagaaaagcttcgcaggcatgaataaaattggcaatatgcactatggagtttgggttcagatgatgcaggctgattccatagaaattcacaattccccgaaaaaatcttgaggttggaagggagaaaccgccatagaagaaatgagcaaataccacgatttcatgagtatcgggggttgggaatgcttcaccgaatgctggtcgccacccgacgatctccttcgctggaagaacgccgtgcgccaccatctccttcagattatcttccgtcacatcggagggcgcccactgactctcgaagctttctctttcttccgccatgaatgtgagttggatggtttgatttggtccgagatacggctggaaagggatggggaatcggagcggtggatgtggggagaaattttgtgaagtttttgaggatggattggagcggattgatgaaccctagtttggccggcgcagttttgtactgtagcagagaatggggataatggcgagagtctcggcggggaagacgaagagacgttttatttcacttcggtgcttttagggtatcgggagtgctaacaggcctgggcctgcacagtacttcagcccaattttatttccagcatggcccgttgtgatccttagggacttaggcactttttgctttggcaatttgtcctatatttctattaaggcttatgtggaactcatggtaggaaataagaatgacatacttgtataaaaaattttgtaaaaccagggagtagatccaagaaggatactaatcaaaccaccatgatcaagtttatgcacatgtgtgtggaaaagaatacataggtggatgatgggaaaatggaagaatatgactcatttttggtatgatcctcctccttatactttatttggagaacatggctattttctatattatcttattcatcatgctcaagaatatttttttttgtttccttcttttttgaacattatgattttctaaaatcatttctttttttaactcatgtctcatttggcatggatagaggatggagaatcatagtcatgtgaagtctttatttggtggatggatgatagtggatgctgacttccggagtagaagtatagcatatgatggtggataaaaatgtttagctaaacattcagtgtacagggagagcaatatatggtggatgtgcacaagatcttgatgatgagaacatgaaagaaaaaaaaatctaataagggtctaaaccatttgacaaaacatagaatgatacaagcagcatatgtataaggtttatcatgaagatcaacatatggttttggtaggaataaaacattaatgatgagtaggcaaagttatactttttttaatataatttccaagaattaaatagaaaaaagcaagggtcatattgtcaggcaatcattcatttaccaattgcttagatgacatgtcttcctaatgatatatttcacaagcacaaggtatcatacgagaaataaggagaatccaagacatttgcatgcaagtcatatattctaaaaacattgaagcttattttaaaagttgaatttatttttcagattttcatgataagaattattaaactcaaactttagggagatgagaggataaacatgcaaaatttatcaacataatacctaaataaggttaaactagctagagcaaccgcgacaagtgggaaaatttaaaacttttccttgccattctaaaataaaataaaactataaggtgagagcttgcatttgcccatttgcatgactgttttgctgcgattgagtcttttatgtgtttttcgatcttaaacacatttcataataggattcatacgcatcgtattaacttgaaccaaaattattagaatagagaaccttatatataaatattgagaatcgcttcttaaaattttatacaactcacaaaatttcacatttcatcctaacctagtgttggtatttcttaacgacattactagaaatatttaatcctagcaatggcgtagaaatagttctggtataattatggttatagaagtaatctgcaagcgcacggatataccattgtagtatttcacccggaagtattccaaggtatcgtatttatttagtcgcaagtgaagattgtgaaagagagaccatgctaatatatacatatatatatatatatatatatatatatatatatatatatatatatatatattacttgcgttcgtggcagaaaatcacttcgtgattcacgcggcgaacttttctcaattagtgccaatattggaatatattggcacacattagtgcgatgtttttgaccggaatgaaaaagttcaaaaagcaccaaaacatgatttttggacatattggagtgtattgggtgtgttcgtggcaaaaaatcacttcgtgattcatgcggcgaacttttgtcaattaatgccaatattggaatatattgccacacatgggtgcaatgtttttgaccggaatgaaaaagttcaaaaagcaccaaagcatgatttttggatatattggagtgtattgggtgcgttcgtggcaaaaaatcactccgtgattcacgcggcgaactttcgtcatttaatgccaatattggcatatagtggaatagatgggtgcgatgtttttgaccggaatgaaaaagttcaaaaagcaccaaaacatgatttttagacatattggagtgtattgggtgcgttcgtggcaaaaaatcacttcgtgatttgcgcggcgaacttttgtcaattaatgccaatattggcacacatgggtacaatgtttttgaccggaatgaaaaagatcaaaaagcaccaaagcatgatttttagacatattggagtgtattggatgcgttcttggcaaaaaatcacttcgtgattcgcgcggctaacttttgtcaattaatgccaatattggcatatagtggcatacatgggtgcgatgtttttgaccagaatgaaaaagttcaaaaaacaccaaaacgtgatttttggacatattggagtgtattgggtgcgttcatggcaaaaaatgacttcgtgattagcgcgacgaacttttctcaagtaatgccaatattagaac

SEQ ID NO: 19920 - DNA, 22151 bp, Oryza sativa
gaatgaaaaagtttgaaaaacaccaaaacataatttttggacatattgggagcgttcttggcaaaaaatcacttcatgatttgcgtggcgaacttttgttaattaatgtcaatagtggcacacgtagatgcgatgtttttgaccggaatgaaaatgttcaaaaagcaccaaaacaagatttttggacatattggagtgtattgggtgcgttcgtggcaaaaaatcacttcgtgattcgcgcggcgaacttttgtcaattaatgccaatattggaatatattgccacacatgggtgcaatatttttgaccggaatgaaaaagtttaaaaagcaccaaagcatgatttttggacatattggagtgtattgggtgcgttcgtggcaaaaaatcactccgtgattcgtgcagcgaactttcgtcatttaatgccaatattggcatatagtggcatagaagggtgcgatgtttttgaccggaatgaaaaagttcaaaaagcagcaaagcatgatttttggatatattggagtgtattggttgcgttcatggaaaaaaatcacttcgtgattcgtgcggcgaacttttgtcaattaatgccaatattggaacacacggtggcatcatgcatggcacggtgacatgccggtggattttgtcttgtgggtacagttgtgcacctctttctagagtaaaactatttgaatagtcgtgcctacgaatatgtgtgttcaaccagattcaccgtgattagtctcaccccttgtttcgcttaatggaactggttagttcaggtggtggattgtgtctgtttcaacgtggtgtagcgttaagcagtgattggttaatattgattaattactacaactgttttactgctttcaactacctttttaaatgcctgctatatgcaaatgaacccttagcctcctttttaaattcccgaatggaattccaagcagaatgtgcattaaaatccctgtcccggaccggccagggtacacaaacgataaagttgacatacagatccacgtcttacaaacattataaaagtcttacataaatgcagcagaaaataaaaggataactggagctaagccttgacttggattgcagcggggaacatcactccacaggcatccttgatggcacggacgaagcctactcctctggaaaaccaccatcggaagcatactcgaactctggggttgggagatagagcaagactgagtactacccactgtactcagcaagtcacaccggagcagagggtatgatgcagtatataaccaaagatggctaaaggagttcatttgcataaagctagcatctataaacagtagttgaaagcggtaaaacagttgtagtaattaaccaatattaaaccaatcactgctcaacgctacaccatgttgagacaggaccaaaccaccacttgcgctaatcagttccattaagctaagctagggtgagactaatcacggtgaatctggttgaccgccaataaccacgggcacagtctgattagaggtgtacaactgtacccacaagacacagtcccacgacacgttcctgtgcgccggcatgccaccacgatatactggaaagatgccgtgacaggacccttcgcataacccctctaaccaagcacaccacacctcaggttttacccccagtcctcaaaaggcagcgggcagtcccctctcgtgcctaggtgaatccggaagcgacaaaggccgtcgcagggcccatcccactccatcacgcccacccttgcctagatgcgttggctagaggaaagctacactacaagcctagctgttgcccacgctggcttgtggtaagtacgaggaattcttccagggtttcgcacgaaccggtccttaattgccatgggcacgaccatcaaaaccatgcacccacagcccaccatttaatgtattttaatcaaccaacaccatagcggtgggactaatctaatatcatactagagtccagagtctatgcattaatgtgactcccccattgtgtactagttgatctaagcatggctaagcaattcctaatcccacatctagtcatgttacaacccaagctagcaaaggaataagataaacaaatagtatggctgagacagtaggtaaacatcccatagtaacattataaaacaatgcaatatttaaagaaaacaatagagcatttgcaatatgggatcaatatattcaagtgacaagcatgacttgccttgctctgtggctggagggacctcggcgactatctcaaagtacaccggagcgtcgggagagccgaaatctaagcaaccaaagcaaacaggctataagactactgaaacagagaacaaaaccatttttaatggattctttgcatttttcttgatttactgagacttgaatgggcttaaatggagcacggatgaattttccatgaattttagaagattcactgtgtttttactataacagaaaaaatccttaattgatttatcgcgcaattaattaacctcgggttacgttagcaggggtggcggcgccgacaagcaggccacacatgccaatgaatcaaggcgtgccggtccacggtggaccaagtccacgggaccgggaggggaagcgccgcgcaggcggccacgtgggcagcgacagatggccctgatctaccgcacggtagatcggtctactgcgggcgcttgtggccgatggcgcacgggcacgtcctaggctagcccggccatggcgcacggcagctcggcagccaccggcgacgaccggcggcgagcagcggcgcgcagcgagggagggagaggggaaaaaggaggggagggcgtcttcacagcgaggtccggccggcgcgagaggaggcgacggcgatcgaccggaggtgatgacaagtggcggacgtgcttcgggagaacctaaacaaacactcgagaagagttagagagagagggaaaggtcacgacgcgtggaatcgccggccaaaggcggcagcaatggagaagctcaccagtgcacgacgaaagatggcttccggtggcggatttcgacgggggaggggtggacggcgtggccctcgggctcgcgaacccgacggtggcgacggcgaggcttggcggcggctctaacggcggtgagcggtgaccggaggtggctaaagcggcggcggcggttggtgcacggtgctagggcggaggagagctcgggagcgatcaacgagaatgtgaaaaaggaggaggaggatgcgggggtggtttatatagcccgcaagaaaaattccacatgccattttcgattattaattgcatttattaaattggggtttctgtcttgcctttacacaaataatttcttgagaccatttattaactcaatttaggcttgggagaagaacttcagggtgtgacaatacctcctcttccggtttgacttgctgaatacagtgggtagtactcagtcttgctctctcttccccacaccagagctgaagatcttcccagttggagctgtcccgttgaagttggtttcgtcgctgccatcaaggatgcctatggagtggagtcgcctcgctgcaggagtcaagctttcaagtctagctcatttatcctttccgctgcatttgtaatcttttatatttttgtaagacgtagatttgtatgtcaacaattgtcgtttgtgtaccctggctagtcctggacaggggttttaatgcacattgtgcttagaaattctagttcatgaatttctaggcgtgacaattctcctccattttgtgttcattctctgcaagaggttagtaatcctagtgatagtggaatatttttatttgaacacaaatatgcattgcaagcataactagtctcctttattttggtaatatcgatgggtgaaactgatcgctaacgaccgtcaacaaaaacccccaagcttgaacctttggtcatccctagtgaaggacgaaaggaaacaaagacttggttgttgatcaggagtcgctattatgctgtatatctcaaatgtacaggtgcagggtttgtgtactgtctcttaaatcaaataatctttggcacgatggcttaccgttacccctgattaccacgagacactgcctttccttatcttgagcggttgagaggcagaacagcaatttgagcaccaatcacccaatatttattcaacattcattccggaagtttttcaaatgattttgcgaaagaaatccaagttcctcaaatgattcactcgatctctcagggtgtatcaatttgaactcctcaccaatttgcctttttgattccaactctaaggttgatatgtggagctcagtagggatcaaacatggcatacttgcattaacatttattactaagtaaaaaactatgactaaaatagatgactaaacatactcaagatcaagatcgtgcaaagtgtgtgtgtgtgatatatatggtacaaatgaaatgtggaaactaaagaaaaagcttctcctatgtgcttacttccttctccaaaatccttctttcataaataagaagagggcatggctacacattattttcttttatattttctttctcaacatcatgctcatgattgagagagcataacattattattttcacaaccatgcctttccctccctctcttttttttcataaaggattttctttttaggagaagaaagcacacaaaagcatggagaatttattttgatggtggtatggaaatggaatggataattgctagctcccggtgtaggagtttagcgtgtgtgttgacggtcgttatcgaccagtttcgaccgtcagtattacccaatgtatgaagactagctatgcttgcaatgcataaattccaaataaaatatccacttccactatatactatgctactaacatgtatataggagaatcccctgctgtgttctcttcaaaaaaaaacatgtatacacgagaagcacacataaatggaggagaatcgacataaaattgataaaaaatcaatcagatgctgtcgaggatcagacttatggatagatgggctgagaacacagaaaagacatgatcaattaagcccaaaattccatgttttggattgaggagcaaatgaggagtcggcccgccaaaaattgggccgtttgggccagatcatggttcggtcgaaccccttgtttcggccgaacccctatcacagccgttcaggctggggtttggcgtggacgctccagatgaactcctgatggcggttgcggggcatttcggacaactcctatgctctacaaccgtcatacctacctatttaaggagccctcatcctcacttcacaacacacactcaagcaaggattgaagctccattttattaatataatatttcttctttatacaaggtcggtactttattccattcatagaatataggtaccattcttagtttattgataatcagtataatcttagtagttaaaccttctgggattttcattgatgctggtagaatgtctgataactgggtcataagtctgctctggctaggccgagagctatggcccggggactcagatgctctgcaccgattgcaaggctgtagagtaataagtagttacttaagcatagggttcaggttatcacttatcattatttgggggtatattcgccgggagagtagcaggctgctgatggtgacagctcagtatgggcgtcttcctcgcagtttatattcctacatacaatttcctggggttggatacacctctatatcctacttcggttggagggttatgacatgttgtcgtaagaaactcgacaacccttgctaactttgcgttgcatcgggagggcatagctgagttccggtttagctatgctgcattattaaaggggttatactacatagagtatactagttagaatagactaggatgttgtatactagaagtacaggagtgagatatttctattctatttccacttaatcatatttaggttaaggaggagttagcggaatccttagctgtgtgtcactttacccttaagcttaacttacccctgcatagaccttgatgtatacaagtaatatatatatactattagcatagtactctcttatcatatcttcccttgggataaaataattacgataccttggaatactcccgggtgaaatgctacaatggtatatccgtgcgcttgcggatcacgtctgtaaccgtaatatatcaaggttatttctagtgctattgctgggaactatatttccagttgtgtcgctaagaaataccaacagtgtgcataaatgtgggtgcatgatcttgatcatacagcatgagaagaatctacacgtgtctcaaggatttgacaaagttcaatggaattgcaaataaccaaactatatatggcttgatcaatatgaatatttttggctttggtaggaatttataatatcaaatgaggaacttcatgattttgtcattttgaaaaataaaacatccggaatttcaagtcaaactcagactaggattatagcaacttttattttctatctcatatctcacaacaacttagatcagattagcaaatgcaactcatttatctcaggttcccggatggctactcatattcaatttattagagagtacttgaccatgaacctataaatgagagatataaaacggagcagctattcatcatttcatcaaagagaactaagttgtcttacctagcataataaaatctatcctatctttttggtattttttattttgcaaatttttatgttgtttttagtttgtaagatgcaattggaaaaacaaacatgcatttgaaaaggaaaatatgcaatgatacaagttaccttagtagggggagagatttctccccccaagcttggctttcgctcagggtccttgataaggattgaatccctggaagcggaagtacgtttgaaggtcatcgtgctgttgctgcatcaggttgttgatgttggtgaactgagcatcagcattttgttgccattcttgcgtctgtgctatgtgttcctcgaggttgtattggatctcttccgtttgcatatcaagggtatccattctcctagtgatttcacctaagtcccaacgagaggaacttgagcgccattcaccgagagatggaggcataccgcttgatctgggggactgatagttcaagcctccccattgtatgtcatgaggcactgtcaacgaccaaatttggtaattcaagtatcggagatgaagataaaatcgaagcggaatccaagagatagatcgaccggaaacagaataagaatcggatgaagtccgaatcggctgcgatcagaatcagcagagttcgagtcggacaaggtagccgattgggccgattccgacaatgtgacccggtacacatcgttgggttgagttaatgtgcttcatatggattgccacgcacggattgggtcctgtaaaggcaattgtatctattaattaggatattttatataatttccttagagataagtttgggcaaaagtttgccgcaaagacttatggtatcttaaagtttgttagagataggagttgtgtccgacaaggacatattttgtatctcgggtataaatatgacccgaaccgatataatcaaacaacaatcgttcaatacaatctcggcgcatcgccacccttttggctttcgtttatttcgacgagttcttgctttcgggttgagctgcatcgatttcgatcttcaactagaggtaaagcttgttatggcggcttgcgttatcggggttaatgcttccatctttatgatactttaaccctgtctatgtaatccgtcgagttatcatatacatgttgcaatctatgctagtttcgctatatagcttgttatcggctggttcttattattagggaacaatcggtagagttatattttgttattaatctagattgtatcgtgtatttaccatctcttgtagattttcgtcatcttgtttagatatcatacttgtctttatgcttaatgctgcatcggttgagttcaatctattaagtgttatttataattataatatctggctcgttttatgattatgaatagagatagtatcggggtttcagccgatcttacctgatttagccttatgtcttacatgcttaattgatatgctaagtctgttctttatattaagatcttattgcaataaagtatattaggcttttgtttgatatattctatctgttttaacatcttagcatacagtagtatcggagtactagccgatacatgctagatctatctgatcggctatgctacaagcgtttataacctttaggggaaggggtccgtattacaaaatacagtccatatccctaacagaatatgcgattatagataaaatacaatcgtaaccgactaggatctcgggtatttccttgacatacaagttagaaactaacctgagtcctcataaagatattctgtcaatatttggtagcacatacccaactaaactataactgccgtgtagatatggggtatccataatctccacaggagccccaaagacctttgcagtcgacgaaattgctttctcagaacacaaagcaataatccgagtgtttcaattccttctgctccagcctgccgagtgcctaaatcaaagactgtgaagggcgaaaataaaatatggtgcatcgagtagatgcacctaattaggtgtagcctcccgactatatggttagttgaaaaactagacatgtagtcaagaaccgagtggttttacagccaaatagcaaattgtaaagttcgtatggtattcaataaaatacccagccgactgcctttcaacttgaatatatcaagaaaaaatatgaaaagggcccgagcgataaacactcaaaaggtccacaaaaagacacatttgataaaaatccgagtaagaaactcttaaaatgatccaccaaatatgataaagatcatggtaattaagaagtttaatatcctaggctataacccttaccataatcaaaataagcatataacatgccaaaagaatgactcttaataaaccagtcatctcaaatcaacccaaacagcttttgtagcctaataaagctgacaaaaatagtataacacctttctgtcgggcacctttttcatctgcatcgtggtaattccaaagaattatcaaactgcattaaaaaggattttaacagcgtcgggtcacatcattgtgagctcaaattgccaaagcaaaaagcgcctaagtccctagggatcacaacgggccacactgataacgatattgggctgaagtactgtacaggcccaggcccattagtactaccgataccctaacaaaacaccgaagtccaagcgtcacttcatcttccccgccgaaactctcgccatttccctacttcttgctacagtacaaaaccgcaccgacgaagctagggtttatcaatccaccccaatccactctcaaaaatccacaaaacttctccacgcgcccaccgcaccgatttcccattcctctccagctatttctcagaccgaatcagcctattcgactcacgtccatggcggaagagagagaaagtttcgagagtcagtgggcgccctccgatgtgacggaggagaatctgaaggaaatggtggcgcacggcattcttccggcgaaggaaatcatcgggtggcgaccagcgttcggggaagcattcccgacccccgacacacgcgaggtcgtggtattttctcacttcttttatggcagattttccctcccaacttcaagattcttccgagggattctgaacttttatggaattagcctgcatcatctgaatccaaactccatagtgcatattgcgaacttcattcatgcctgcgaagcctttctgggaattaggcctcattttgctttattccgccgcatctttttcctcaagccccagccgaacaagagcaaaccatgcgttgttgggggcgccggcttccaactcagaggaacactgagccagaaatatttctctatgcctttcaagacctcaaacaaagggtggcacgcaaattggttttacgttcaaaaccctgagccagctcttcccgagtactcttgtctccctccggtctaccaggacacatggaactcattgcctatgggagatgaggctgctgaaggagtggagctaatggagcgcatgataaagctgaaggaacaaggcttgcaaggagagcaaatcactcggcacttcataaaaagtcggttactccaatcaaagagagatcccgcacagcttttgagtttgacggcaaacatgatccgaatcgtgaagacccagattcccttgatttcaagctcatgaaggagagaatgtataaaattttctcgaatgcaattgtggtcagctattcgcacttgctgccagtggtgccgtacaacgccttcaaccctcctccaccggtaagtatcgatcatctcaacctttctataaagcgtgcttttaccttctgccaaattgacggaaaacttgaaatataggaattcgctttgatgaaatctgacccccccgattgctcagcaccgcagccagtcagacttccgcaagaggaaactagccttgagtgatgatgaaggcgacaacgctaagaaagctaatggctaggaaacagctggaaaacaaccaaggcaggctaatccaaagaagaaaacatctagtcgtcccatgccgaaaatccgaaagtcttccaggtacaaatcatttgacggtcttccttgtactggcgctcattcattaaaatcatactgataacatgattcaaacctgtaggaagccatctgacatagatccttctggaaaagactcaggccgactggcatggaaacaggttcttcaaaagagactgggccaactgcagggaatcacccgagtgatgaacagccggcgaccgacaatatagatcccagcagtgagcccccggctgggagccaatcagccgaagctggggttggtgcaagtcaggagctcccgactagaaaccagtcggatacggagcaaaacaaggacatccctgaagtagaagctcaagctgacagccctcctaaaaaagatgtcaacgtcgatccagggtccagctctcctgctaaagtacaagggcctacccatccccgaccggaaataatcacaggtaaatacgtcctccgaactcaatttggtccgacagatttttcttcaattgcttcatctttatttataaactcctaaggcccgatgatcggcgatgaagaagaaatcctgaggatccagtcagctgaggattcacacccacccactttaatcaagtggtgggacgatgataagcaacctcagggaatcataataaacaggcaaaaagaagatgaggaagtgtgcttgctgaaaaaggcactcaaccaagccactcgcattgtaaacgtaagcttccctatgctcagctccaactatcctgttttccattttacttaaacgccaataaattcgcattgcatagaatccatctcaggaacgaggcgaagaccgcaactcttgcaaagttagttcctcatcttggaagctcgaggccaccagaaaccagttgcacgaaattaaggaactcgccaggaaaactgagcatggtctgagagatcgagttgctgagctccaagagtccaacttcgaactaatcggttcatcaaaaggtaaacatgatccccgtctgacttgcttatgctaccatccttgtcatatcgattaatcaaaaaacaatacagtgcaagctgccaggatttctgaattagagaagcaggtccagaatctggagaagggcaaagccgaattggcaaagcagagagactcggctctaaaagacgttgaaggtactgatgactgatacctcctatcttcgtgaccacttgttgatgtgaatttatctgtgcagacggcaaagtcaagtcccaagcccaaattgacgtcctggttaacaaaatcaagaggcttgagggagcttgagatgaggttgccaacgctgttgcaccactcgtccaagccatgttttataataacaatggtccgagttcgttcgatgctgctgaaatctttgacaagctgagaattgctccagatatttattttaagaacatcaaagaggctggaagtatgggagcaagcctggcgttggcgatgaccaagtccttgtactcgaagattgatattgacgccgttgacggctttgcagacgggacaagtgaagaagctgctctcgacctcatcaatgacgcgcagaaagccgccgacaagatagctggtgacatagttgaaagattccaggacaacgacctccggccggctggatctaataattctgatgatgaaaaaactgacactgattgatgttatattgtaatagtgattctgattatgacgatgatgatggaggtacaatttgtacaatactgatgaatttatgctgtgcatgatatttcaaacttagctcctgatttcttaaaagttttcgtcaaaccttgttgagcctaaaacccgcaaaagttgttaaaaaactttcagtcctcattggctaagccagaaaatcaaacagagcaatgataaatcaagtaagcaaattgaattaataaaaatcatactccattattatagtagcccccaactgataactcaaagaaaggcttgatgttagcagttaaagaggaaaatacaaaagtaatgcctaagcataaaaacgacgaagatgttcaatattccaagagttgtcgatacgagtaccatcctcacgtttgagtcgataagaacctggtcgagtgacttcagatatgataaatggtcattcccacaagggagataacttgtgccgatcccgtgtagtctgaatatttctcagaaccaggtcgccgactaaaaaagctcgtgagcggacattgcgattgtgataacggtgcaatccttgcaaataccgagccgactgaattaaaactgcttcacgggcttcttccagtcggttgatatcatctactcggtcctcttcatagcgctcctcatggaagttccgaaatcgtagcgattcaaattccaattcactcggcaacattgcttctgctccataaactaggaaaaaaggcgactgtcccgtagcttgactaggggtggtgcgcaaggaccaaagtactgacggcagctgttctacccacttgccggtgtaaggacgcagccggtcgaagactcgcgcttttattccttgaagtaccatgccattggcgcgctcgacttgtccattactcatggggtgtgccacggaggcataacaaattttaatgccgaagtcttcacaaaagtctttaaatactccacatgtgaattgagtgccgttgtcagtaatgatacaatttggtaccccaaaccgatgtacaatattgatgaagaaatctctagctttgtctgcggtgattgtaatgacctgtttagcttcaatccacttggaaaatttatccacagctacaaagagatgagtataaccaccgaccgcctttttgaatgggctgaccatatcaagcccccaaaccgcgaacggccaagacagcgggatggtttgcaagtcctgagctggtaaatgagtttgtcgggcaaagaattgacaaccctcacatgttcgcacaattttgtcggcgtcggagacagctgtgggccaaaaaaaaccttgccgataagccttgccaacaatggttcgtgcagcagcgtgattaccacagatgcctgaatgaatatcttttagcagttgcctttcctcttccaaagatacacagcgttgcaagattcctgatgggcttttcttgtacaactcggtctcatgaatgacatagagtctgctgcgcctggagatctgctcggcttcatttttatcttgagggagttcttgtttggtcaaaaatcttatgaaaggttctctccagtcggcttcgatcatgcttacgccttgagtatccatggcttcaattgtttcttttctgggcacgattggttcgtgaagatgttcgacgaacacatcagaaggagctgcctcccgttttgagccaaaattggccagtctgtcggctgcctcattattgtgccgaagaacgtgggtgagctcaagtccatcgaatttgtcttctaacttgcgtacttcctgtcgataagcagtcatgttatcatcaaggcaggaccactctttcatgacttcgttaacaaccaactgagaatctccacggacgatcagacgccgaatgcccaaagagatcgcgatcctcaatccatggagcagcgcctcatattctgctacgttatgggacgcagaaaaatgtatccacaatacgtagctcaatctttctccagtcggggagattaaaacaaccccagctccagtgcctgaaagcctcttcgacccatcaaaatgcatggtccaatattccatcttttcctctggcatgtcttcttggcactcggtccactcggcgacaaagtcggctaaagcttggaacttgatcgaaattcgcggcttgaaggatatatccaaggacatcaattctaaggcccactttgcgatccgtccatttgcttcgcggttatgaagtatatccccgagtggaaacgatgtgaccaccgtgaccgagtgaccttaaaagtagtgagataatttcctgacggtaattaagactccatataataacttttgaacctgaggatatcttgtcttggagtcggccaaaacctcgctaacgaagtagattggtcgttggactttttgaacatggccgtcttcttcacgctcaacaaccaggaccgtgctcacaacttgagaagtcgccgacacgtataacaacagtggctcttgcggatgtggtgaagccagaactggaggagtagtgagaagtttcttaaagtcttcaaaggctttttgtgcttcgggtccccactggaaattgtcagttttcttcagcagcttgaaaaagggcatcccccgctcgccgagtcgtgaaacgaaccggctgagcgccgccatgcaaccagtcagcttttggacatctttctgggagctcggcggtttcatattgaggatggcgttgattttctccgggttggcctgtatgcctctatgagacaccataaatccaagtagcttccctgacggtactccgaagatgcacttttcagggtttagtttcatcctgaaagcgcggatgcttgcaaaggtttcttctaaatccgcaattagaacatccttctgcttggtcttgacgactacatcatcaacataagcttcaacatcgcggccgatctgagctgaaaaacatctctgaatcatgcgttgataggttgctcctgcgttcttcaatccaaagggcatggtgatgtagcagtaggccccaaaaaactgaggtcttcaagcagttggattcgtttagtcggatctgatgatatcccgagtagcaatccaaaaaactaagtagctcacagctggccgttaaatcaactacctggtcaatgcgaggtaaaccaaaaggatcttgagggcaagacttgttgaggtcggtgtaatcgacacacatgcgccattgcccggtcttcttccaaactagaattgggttagccagccagtcgggatggaggacttctttgatgaagcccgctgctaacagcttggttaattcctctttgatcgcgtccttcctatcctgtgcaaaacggcagagtcgttgtttgatgggtttggcatcttccttgacatgtaaagagtgctcaatcacctctctggcaataccaggcatatcagatggtttccacgcaaagatatctttattattctggagaaaggtgatgagcgcgctttcctatttacaatctaactgagcgcctattacagcagttttggtaggatcggagggatctagtggaatcttcttagtcttggcgtcactttcttgagtcttcgacatcttggtcgcaggcacttctccttcgtttgccacggtcgcagccagtcggatctcttctcgggcgaatgtgatctcgcgggtctgagccatctcgcaactttctttatcacatgtgacggcttgcttgatgttgctccgtagggatatgactcctcgaggaccaggcatcttcatcatcatgtaggtgtagtgtgggacagccatgaatttggctagggctggtcgtccgagtatagcatgatacgctgtctcgaagtcagcaactttgaaacaaacgttttctgtgcggaaattgtcccaagtaccgaaagtaaccggaagagtgatctggccgagtggtgtagcagataatcctgggatgacgccgtgaaagggtgcattacttggctttaattccgtacgagggatctgcatatcgtccagggtcttggcgaaaaggatgttgagtgcgctgccaccatcgatgagagttcttcagagcttgacgttgcgaaccactaggtctagtaccaaggggtactgccccgggtggaccactcggtcgggatgatccgagcgatcgaacttaattgctatctctgaccaccgaaggtattggggcgtgttgggctgaactgcgttgatctcccgttcggttagcttctgctttctcttagattcataggccaggggtccgctgaagatgtgattaagttccttgcgatggtcctgaaaaccagtcgggggatcgtcttcattatctttcttctttgatgtgccttgatctccgtccgaaggcttacgtgcgttcttggcgtattgctctgcaaattgtttgtagacgaagcagtctttggccgcatggttggagttgggatgatgcggacattgggagttcattatcttgtcgaaggtgttgacgcgggaacgttgtcgggaagatggagtagttgtcgccacaagttcttcgggcttacgcttgcgatccttgtgattgttacttccactccctcccgcagccggcgtgtctttcttcggcttccaagtggtgcccgactgtttggacgcagtaatagtatcttcggctttggcatactcattggctttttcaaacatctgcttaaccgtcttgggaggtttgcgtccgaacttgccgactaggtcctcgtggcgaatgcctttagtaaaggcggcgatgatgacgtcatcggtgatgtcggagatcttgttgcgttgcttggagaagcgtcggatgtaatctcgaagggactctcaggacttctaaatgatgttgtagagatcaaagtgtgtaccagggcgttcaaaagtgccttcgaagttggcgatgaagtggtcgcgtagttctgcccatgatccaattgtgccgcggggtagcccgtaaagccaggaccgggcagaatctgctaaggccacaggcagataatttgccatagctttgctgtctcctcctgctgcgcggattgcgagaccatagacagtgagccaagactcagggttggtggtgccgtcatacttctcgattccagtcggcttaaagctggctggccagtccactcgacgcagatcatttgtgaaggcagcaactccgtccatatcgtcgtcgtagcggtctagtgaataatggggagcatggcctcttgctgcgcggcgctggttgatggtgtcgcgaagatcgacggggcgccttcgatgtggggagtgtagtcgttcaactcgacgctccctatgtcgttcgggaggcgagcgaacagatcgctcgtcatgtcccctactcctgtgactggatccggcgccggcgatgctgaggcttggctggtgatagtcttgagatcgaagaggagggactcggcttccagtcggggtgcgggtacttgcagagttggctggaaccgaggcagcgatcatggtcttcgtctggttcaagatgttgacgacatgatcggcctaattgagcacgtcttccttgaggagggtgtcaaggagggtgattgctgcaaccgcgttctgttggggggtgcggaaaaccgctgttccatcaacgtcttgttgcccgatgagttctctcgctcgtcgcccagattccaaggcgcgctgccgtcgatcttcagcctcctttgcaatccgttcactatcttgttgctcacgttgtagtcgttctcactcttgtcgttgtcgttcttcttccagtcagcgacgttcaatttcttgtcgtgtgcgctcttcctccacttctcgggctcggcgctgttcctccgtttagttgtcagccatgaatacgccgaaaaagaggggcgtgtagttatcctcatagctatcgtcgaagtcgtcgatgttgccgtggtcgtagtggtagccgaagtcgtggtagtcgaggatctaggttggtcgtgaactgacgctaggggagctgaggtaaccatccaattcttccgtcgagactgtcccaagaggttggagtataacgccaacctccctggagctagattggatcggggccgaagccggatctcgcctagatcttcgggtgggagatgccttggtggtgaagacagcggccagatcatcaggaagtctcatcagaattgagggataggactcatcatcttgatctggtcgcgttggagtagattggatctcgtccgagtggtttgagaccaactcgggagagatgatcttggagtagacctcggcagagttcgggatactgaacggcgcggggacctggtctcttcccgactggttcgaatccgagtcaaggagagagatcttgccgaagtcgttggtgatgaagtcgaggctgccgaaccggaacgcctgcccggggggaaggcgaagtcgtcgatgccggagacggaacccatcgcactagtcggcaaaaacttgacgcttcccctacctggcgcgccaactgtcgaaacaagatttcggcaatactaaaagggggtggctatcaagctaggaaagtggatgggtttgaagacaaggaattttatacaggtttaggccttcttattcaagaagtaataccctactcctgtccggggatgattccgccgagtgtattattgattgtatattctgggaaaaagaagtcgtcccgaaaggaacctggacccctccttatataggggaaggggtccgtattacaaaatacagtccatatccctaacagaatatgcgattatagataaaatacaatcgtaaccgactaggatctcgggtatttccttgacatacaagttagaaactaacccgagtcctcataaagatattctatcaatatttggtaccacatacccaactaaactaaaactgccgtgtagatatgggttatccataatctccacaatatttctttcaataaatttatctttctgggtgacttagaagagctttttcacaccccacttcctgagcaaggtatagaccaatggcaaattctgtcaaatcacattcagtcaacatttcccaatgggaatcctgatcaatggaattatgtgtggaacccaaatgtctacaaatccaaaaagatgtatgatctcttcttttcgcatatccatccagacatacctctcacccttatttggaaaagcaaaggcacaatgaagataaaggtatttttatggcttctcctgatggacagattaaacaccaaagacatacttcagagaaagcatttcaacactcagggagggaccacttgtaacatctgcaacctgaccatcacaaaagactacatccatttattcttctcatgttcttttgcccaacaatgttggaactatattgggataaattgggatctgtcactagactttatgaatatgatcatgacggcaagaaggcttttccctcaacctttctttatggaagtattaagaattggatgctggcatatttggaacagaatgtgcctatcagattttcaacaatgtgcctatcaatttcagtaaatggaaagtggactttaaagaagattttactcggcatatgcacagagtaaaagtatcagataaacccagttggcaatcatggattaacatcatcagctaattgtcttgttttctcatttctcttctctttattttctttctcttttctttctcccttgtgtatattcttcctttgtacattatgttcctttttttatattaatatagcatagtaggagcctctcctgctgtttaaaccgtcaaaaaagataaaaccaatctgaattgtagatatgtcacgtcctaaaaatcgcttaaattaataatgcatattttaaatcaattttagaaattatttcaaaagcctacaagttaaactataataatctagggaaaatttcaacataaaattgagctagataaaatttcattaaatactttgcttgtttatctattttctagatttttctgggaattatttgagcaagggaagtatttttaataaatgaaatatcatttcacaaattattttaattaaaaaagttttaaaaaccctcccctaagccgttgggccgaattaggccgaacatcctctctccccgcgcgcggccgagcggcccacgccggcccatcctgagccgctgccccgccccccctctcacaagtcaccgacatgtggggcccacatgtcggattcacccccaacctccagccggccggccgagcaagccgagcccgagccgctgcctctctccgccaaattcgcccaaaccattcgcgttcgagtccgattggttgaggggtttttatccccttgttgtcctctatcttatcccccaaaaatcggagctaattgcttcgtgatttatccgaatcaaactcgttttcgagtttatctctccaaaactaaacctagattttcccagctcgatttctctcggttggagtccgatctctccaatccaaggctataaatagcaacccctagtcgtcctcttccgtttgcctcttgtcccacgcgaaacagtcgatcgtagcgccgccaccgcgccgccctagccgccgccgccgccggccgtcgttcagccgcctcgcaccgtcgccggtcgccggaacgccgtcgccgtcgccgacccgagccgcgccgccgttagagctcaccgccggccgctgttcattgtcgtccgtcgtgtttgctagtaccggtgtgttcgcgtcgtcgttctctacgcgtaagtgatgtagcaacgggggttcccgatctttcgatgagaggaggataaacttcgatttggggaaggatacgacgttggcggtccgactacaactaccacaggggtgctgcgccttagcaaccggtacaccgactccacgttgttgctgttcttgccgtgccaagaacaaccttgaacctgcaagcaatcgaagaacaagcaagaacaagttgacaaggaaacagctcacggcacttgtcaaatgatgaaatttaaacaaaccaaaatggggttctgaatacaagtatccgggtggtctagccgacacacgcgagtacaaggaagtagctgcagctaaacttacatcaaaacaaaacccaaagtgcaaaatggtggctgctaggagtttatataggtggaggaatgaccaggagaggaggtgggagcaaaccctaggttttgtggacccctaatgggctgtaatgatacaaggcccaagcccaagtttctgatgtaaagaactattttcgtcattctgagcagcctgggtcaaacttgatggtgaggccacacatagctgaaggtagacgacgagatctttccaacaagtactcatttgccccgtttgccctccggagtgaagagcattgacttcatcaaatcagcgctgctagtgctgcttgcgatttggttcctctcccatattcctaacaacaagtagatcacaacaaccatttagtagcacccaattctgagaagaacttgtatgattagctaggaatgactttacctgataattaagttcacgagctagagctctagtcattggtccttgctgtgcaataggcgtggttgtatcgttggaagggatgtcctcatcatcctccccttcttgcatttgagtcgtcctcgactctaactcatcttcttctcccaaatatggctttaaatctgcaatgttaaacgtggggctaaccccaaaatcggcaggtagct

SEQ ID NO: 19921 - DNA, 667 bp, Oryza sativa
attcctgcagccctgacccggaccgacggatgccgcgacgcccacgccgcggccacgactccggtgccgcaggcgaagtcgatcgcgccgtcgacggggtcggggaggtgcgcgaggaggagacgcgtgccgatgtcgatcgacgcaccggcgaagacgccgcccaacgcgcgcacctcgaggccgtcaacggtcgcggcctccggctgcgggtcggcgccgtcgtgcggaccgcgggcgaccagcacgcgcgacttctgccgcgcgtgcgtgacgtcgacgcgcgtgaagtgctcgcgcagcacgtcgttcatcgtgggcgtcatgtacttcagccgcccgccggcgaacaccacgacgtcggggtgcgcgtgcgcggcgatgagcccggcgatgtcgtggagcgcgcgcagggcgcgggggagacggagcaggacgacgcgcgcgtcgcggacgagctcggcatccaggtcgtggtgcgtgaaggttccgtcgagcccggcgcggtcggcgttggcggagagggcctgctcaccggtcagggcgtcctgatggacccggatgccacgcgccccggccgcggctgcgccgagggtgagggcgccgtacgcgtcgtcgatgacgacgagtccgccgtcggggacgtccgcccgcgcggcggctgatt

SEQ ID NO: 19922 - DNA, 1928 bp, Oryza sativa
attcctgcagcccgaaaagaaaagaaaagaagagaaaatagttaagtagggtatctccggtttgaacgcggcgcgcggccaaatgcggaatcatacaattctttactccttccttaaatccgttggtttcgtttccgttgtttatgcctcggaagccgcatgcatctccttaaatcttcttcttggccggcatccgccatccctagaaaacaactcacgaagaacgtggccatgcccatgccagctttgattgatgagtagtggagtacactggactggactggactgaaggagtagttgttgattgataccgatttgtctactccaccacatgatcagcacgagctagacaggcaggcacaattagctgggaatgcgactcgatcctcgtttcacgcagtccatcaaggagaaaaataaaagcactatcttgcttttggctattttccttccttccagcaatatataccttgaagcatatgtagagaacatgtcccatgtgaacaggtatgttacactcttctctgtaagggcattaccttatgttatagttaaaggttgactctatttttcctttgctcttgctttctatctctgtaaatttaatgtaaatatcttgagcacgtgtaaagcaagctcttgtattagagctaacactttttctcttttttctatataagtttatatttgacttatagcctaccacttcactatctttgctctaaaagaaaataaactaatgtctactccatctgtcccaaaaaaaaatcaacctacgtggacatattcttttttgggacggagggattactacttccaccccccactaaaccaaaaaaaaaagataaattaggaggagatatgatactccatccattccaaattgatatacatatagtttttttaggttattcctaaatgatctacatatttgtgttcatttattgagtctattcgttatttgtgtattggagtaaatggacattgatgcatgcatccatgcacacaagcatttataacccacatgtaatatcttgatttgttattggctagaaaatattgggaatggtgcatgcattgagtttgttgctagaataaatatagtatgaaagagttattagcttttttggttttggtgtacctataaaatatgtagatcaatttggaatggagggagtacctcttaatgagaatgtgactcatcctaatacaaccaaccaacaaatttggacggtattttttgaacggatggagtagttagaaaaaaaataaagtaaagatttttgctcttctttttcccctcatgtcaggtgaggtgtacagtagtcggcgtctcataagcagaggcgggcaggagcagtgtgtgtgagtgcgaccatcacttatctcttctctaatggtgtagcggcacggcccggcacggcacggctactgtagcggcacggcccggcacggcccgcggcacggcacggcccgtttcgccggcggcccgtcaggccgaaagcgccacgtgggcgggcggcggtcgaatgggaaggcgccacgtggcacactaacggctatttgaccgttcaaatttgaaaataaccgttgggaggctaaaaaattcataaaaatttcgaaaaaattccaaaaaatctcaaatttcgccccgaacggcccgtgggccgcaggcgtgccgtgccggcacggcacggcccggccatccacgggccgtgcttgggccggcggctcggcacgtgggccggcacggcacggcccgtttcatcagccgtgcctaacgggccgtgccgaaacgggccgtgccggacccgtgcccgtgccgggccgggccgtgccgcctgtttggacacctatataccagagtcgtggggcttgccttcactcacaaaacccccccccccccttggaccttggtttgttacctt

SEQ ID NO: 19923 - DNA, 1738 bp, Oryza sativa
cgattcgtgcccctcattcctgggacgaatcagatttgctcattgcttacactctgcactaatatattaggggaaacatttgcgtgcgccggaacactagctagtttatttcaagattcattctttcattcgcattcgcatctggattctagacggactggatgtgttcctgttacttcaaaagatatattttacatttttcagactacaactgctccaaccctttgccaaacttctcctatcgctctagcagtagcagatctccgctactccgatccgtccttcccctcgaattgaagcactaatccctcttgcacacgccctagtactagtattactgcctgcctagctctgctcacctctgcttctctttccaactcgcgaatgctagcctccatcttcatgcctgtctctttactaacattatgcctccttttacttgtttcaggttatcgcaatcaacaagcagttccctggccccgtcatgaacctcaccaccaactacaatgtggtcgtcaatgtgctcaacagcttggatgagccattactcatcacttggtcagactcaatttcctcccccattccattatattgttcaacgctcccatgctgacattcactcgcaatataatgtgctgtcaatgtgttgactgacccatgtcttatttcaatcagggatgggatccagcaaagaaagaattgctggcaggatggtgttcttggcacaacctgccccatacctccaggttggaactggacctacaatttccaagtcaaggaccagattgggagcttcttttacttcccaccccttagcctgcagcgtgctgctggtggtttcggaggtattactgtcaacaaccgcgccgtcatttctgtcccattcgacacaccagatggagatatcaccttgttcattggggactggtacaagaagagccacacggtagagagagaaaaaaaaaacctaagcctattttccaggactcatcacatcaatggtcatggtgctgattgtgtttgtcttgtataggacctgaggaagatgctcgatgatggaaaagagctcgggatgcctgatggagttctgatgaatggcaaggggccgtataggtacaatgattccctcgtccctgctggcattgaacatgagactatcaaagttgaaccaggtgattagtcctcccacactttcagcatgataagctaaactagtccttgtacatgttgccaaaaaaactgctcctataagtctatctctctgctgctgctaccagtatttttgaatgtaacattgaattgtacaatgtgttctcactgctatgttggatgaatgaaagtgatagttcatcatcacttccatgacagggccaactaaaatttctttgaacaatgattgcctttgtttattctcatgatttggtaactgactgctcaaactccgcaacaggaaaaacataccgtttccgtgtccacaatgtgggtatatcgacgagcttgaacttcaggattcagaaccacaatttggcccttgttgaaactgagggatcatacacaatgaagcagaatttcacaaatcttgacatccatgtgggacagtcctactcatttttgatcaccatggatcagaatgcaagcagtgactactacattgtggccagtgctaggtttgttaatgaatcactgtggaccaaagttaccggtgttgcaatcttgcagtattcaaattcaaagggaa

SEQ ID NO: 19924 - DNA, 4944 bp, Oryza sativa
atgaattgttttaattcaactttaccttttatacgtgtcctcaagccagatatacatgatggtaatgctagactgctagctgtaacttattgataagaaaatattcaacaatcatcaaaagatttcggagtgttccagttgagtttgatgtcgtgatacaaaatttaccttgttatgatgtggctaccatttatcaaattgccgagatagcaaaggtctggcaaaatgtcaaagaaatcaaccagacctagtcctcgaagacagaaaaattttaagggaaacattataaagtaattggcgtcaaaccgaacagtatacagtttaaaatcaatggaactatggaagcattcaactcgacaactatacggtttgattctgacgacaaaaacgagcatctccattcttgcttaattctgacgtaaaaccagatccaagactagaagcaccaaaacatatcttcgtaaattacttatgtactgagcaaacaaggcaaaatactccagtctatggatttaagcacaacggatgaatcattctacactataacaaagcaaaagaaatgggaaaaacaatcgtagctccaaaacgcaaatctgtacacactgcctacactgagctcattaatctcacagcaaattacccaccaaagaatgaaaagaacccagctttcttcttgggcctctcctgctcctctaccataactgctgtcattgcatctctttccaccaaccgccaagtcgcctgctccagagcaagaccagctggtgtgggtgggtcgttcagaaccaacggcacacctctatttgtactccggatcacctccgcgtcctctggcacaacacctagcaaaggcaagccaagcatttcttgaacatcaagtgctgacatcatatcctctcccttcaccaggtctgggcgtactcggttgacaataatcttaatgtctttgatgccgtcacactccaatagccctgcaacacggtcagcatcacggagagccgtaatgtcaggggtagtaacaagcacggcctcttctgcaggggcaatagcagtgacaaaccctgcatcaacacctacaaagaaaaatctgatttaagcaatctggcataacatatgtggatgcatatataactggttataatctaacattattatcaggcaactgcagataatatttgtggcactggaattgatcaaatcagtggtgacaattgcagtgctctaacttattatctgtgaacatgggatagtgaatacagcactatagagatagaaaaggagaaggttccttcttttttaagaaagagaggatgacattcccatttcattaaggaaatgtaatagacgtttaaccagtgattacaaagccaaaaggaacctattaccatttcaccggtgccatgtcctaagcaaaggataaagctaagtcttgcaacattttcacttaacagaccagcactaaaaggtgaaggttcataattatatattgacatgacagaattatgctgcagttagttatggatggtcaatcactcaatcagtggggttgaaatttacagctcacaaccaaattaaacaaactgatgcctggcctaaacaacacctatatgtggcaggtaagaaaacaaaatcttaagttacaatgatcaaaggataacttgatatggctctaaaatctaaaatagaaaataggtaatatgcataaatggattgactttgagaatataagttgcatcacggttatgcactggcatcataaaaagtttgacttgcatcatggctcttaaagttacaattctgggcaatagatagggatgggcaagcgagaacaagataaacatcacaattattaattgcgttaaagcaaatcgagtggcatataacatccatcatcataagttgatggaaatggtggtggggcggactgacctgcagggcagtcgatgaggatgaaagcgggtgggttggcggcgcggcgaagcgcgtcagcgacccaggtgagggtcttggagccgaaggcgaggggcagcttggagcggggcttggagaggcagagcagctgcaggtcatggagcgcgcggtggcggacgagggcctggtcgaggcggcagtccccagcgagcacgtcggcggcggtgaggtggacgcggttctcgaggccgaggaggaggtccagattgcgcaggcccgcgtcggcgtcgacggcgacggcggagagggagaggcgtgcgagggaggcggcgagattggccgtggtggtggtcttacccacgccgcccttgccggaggtgaccaccaccacgcgcggggtgggaccggacagctcaggcgcggtgcggccgccgtggcgcgcgggggaggaggccggcggggggcaccgggaaggtaggaggaggcgcggggcgaacgccattggagttagggttagggttggggttctcttctcttcaagcggagatcctcaggaaggaaggaaggtgggtagtggaggtggtagcggtgtccgctttggctgctactctacttgcctagtactagcatcgtttaggcctagaaatgagaaacttcccaacattttaagcccatgaattgtttgctccctaccaaaataaacccacttataatatattctaaaataaaccaacttagaataacatgatatcctattctagatttatttaatttgaaaaatgttaccattgaattttgcatatatacgagtagaagaaaataaatcatcatacattgtactccctctgtcctattttaaatgttttttttttaccattcgaaggagggaatcaggaaaatgggtgaaagccccctacaatggcatcgcatgtcagtggtagtgactactccaccacaactgtttagtatagatatataattttgttaaaaattttgtaaaagaacaaatcctagcaaaataaatggtaattacatacatacgtgcaaaaatcatatatttgcaaaagtcatatattaaaagaaggattgatataaattgtttggttaaaaaaacagatagcttagtataggaaaataccaatgttatacactatttttctaacatgtcatgttctgagtggttgatctttctgcggcgactccttatcctgaactactactccgttaaaaaaaaacaaattcctagctacgaatcaaggttcattggtaggattggtctcttttttttttttgaaaacggagggggtaaatgcttaaataccagagaatcgttacatggatagcattttatcctagaaactaaattaaacataaaatgctactgtagctaaaagaaaaggtgaggccagggaaacacttccaaatgtgtctgtcaatctggtactttcttttgcagaatagtatttatacagaaactgaaaacaacagataggcaggcagacagacacaatgcagaggtggctgctacggtgatggacctcacccaatattcgttgggttccccactttcacaacagatcactccagatcaccaacccattcataacttctccatatttatatgcaaatgcaaccaacccccaccaccagtgaatcatcaggtaccttatcgcagccaaacgattgtattgatggtaaacgctaacccaagctcattgacacaggtacatagcggtatggcatgggtaaagagtactatttgacgcaagtacagcaaaccgtttctgggtccttcatactgcataagcaatcacacgcatccatctatctgtatctcaagttcatgtcaagctcgggcccgtacatgccgccaggtacatgaccagccattgctgggtgcatctgcttggatctggctgtaagctccatctggagaaacctttcaaaggcatctgggtgattgcctctcagttctggacctgatggacctaaaatcgaaaaacgaaagaacagaaatcaaacatgtggtccaaattggtatacaggtaaattcagggtaaaaaccaaacctatttggttgacaaacaatggtaatgtagtcctaacaatgaacgaatcgagaaaatgttccccttaaaaagtgatttcaaggaaataatagaaagcccgttccatatagagaataaaacaattggtatagacaagaataacgaaaaaaaagtacttggcatgttaagctcaaggaaagcagaagcacacaattataccacaattcatattcccaaaccttagtgccatataattcagattagagattttgtctatgtgaattagtgaattctgtagttttcagtcatggatgtcacatttgggacacatatattatcttgtcacctgtagcaggcctgcttctgcaatctcacctttgtaaactgtgacaacataaatttgcaaatacacacaacatataatatcagcttgcagaggctttctaacctgccatcatcaatccaaattctccatagttgggctggcgagggtgcatatggaagttatttacattgctcatctcaggcctataaccaggcatgtgatgcacaggctgagatggcggaacacctctttgcaggccttctggtggaaaatttccaggtgtggagatgtgctgcatcataagatgatgagcagctgggtctacatgaggagcccgaggagcatgaagagattgttgcataggattcatgttcgatgaaaaggaacggtgaggatcatgctgtatcgcttgtgtcatgtcaaacggggtttgctgattcctattaccaatgtgatccatcataggacgaggagccagtgcaggtggtctaccttgtagaagatgataaagattttgagattcagcctgataacgccgttcatgagaatgggatcccagcgcatcaggaccaagtacttgaacatgttctgaatcaccaggcactagactttgaagcctataattaagatcatcaactgccttttctggtagtagcccct

SEQ ID NO: 19925 - DNA, 2798 bp, Oryza sativa
gcaggtatgaagagtgaacagatcagacatacagaaaatctacggttattaccatttgctaacaatgcaagaccacaaaagtcattccttcttaaagacagaaatcagtgtttctaacaagtaaaaaaaaagaagctcaagaaccatctgcattttacacaacaaagttgacagaattgcaaactgcaaactgcaaagcttagttaacgtcagaatttgtttgcattgacaagattatgttggatcatgtaagtcataaggatagaccattttttattggtttaataattcttaaattaaataaatatctaatgcttgtatgtacagaaatcagagtgccatacaaaagggacatctgcacagataggaaattaagagtgagcatacgcaaacaaatttgttgtcatacctcaacatatggtggcaaatcagttccaccttttgacaatgcactgccaaagaattgttccaagattgagattgaatggtccttcctaacagaaccaatatttttagactttccttcgttttcaatagaatacttatccattgcatcaccttcccagtctccacttcctttcagaatgctcgatgcaaattcagctgaatatgtaacacctccagatggaagtgtgtgttgtttacctacactagcaatgttatcaggaatgcccttctctttatttttgcttgctgtgatctctgatgctgactggttaccctctacaaggccaccaaattgtgctgtagccaatatgttaccctcactagttgcatcaataacctacaaagtacaaagtcaattaaggagcaatctagcattgctgcataatagatttgttatatccctttgctaagcaaatgacacactagcatcagtagaacattgtgccttccatcctgatagcaaatcaatctagtaatgtcaaaatcagaatttatcaatctagtaaagcttccgttagatagagcataatgatctgaagatacaacatataacatcatcttaaaaaggtggtagcaactgtatgttatgaaattgttcgtttagctactcaaataatgtcatgatctgcacctttggttcaagagagatgttggacgattgtggctgaagctttttctccacaaaggcatttgaaaaaccaggcggcacaagtggtctggcagtggaagctgatagaactgaagaggttttagtggtatcttcttgataagctgaggaaattgcagatccatctggcttctcacttttagctgtggttgctgtcctttcggagggagtctgtaacagtgaaatgatatcatgaccggagttttctttctcaatctcaggaccattcttcttttcttgaagggctttatgttgctctttcctcatcatttcaaacgatgctgcacagaagggtaatatgagacactgaaaatgaatccagctaaaaaattagatgccatatgttgcatgaagagggactaaccccttcgtttcctttcttcctctgctctatcctcatttgaaaattcagaagacccaaatgtttcatcgttcattgcgtcaatatctttccgtggaaaaggcgcagcctggtaacagcgttaaatttcatcatcagaaactaatgtgcaaaaggttgatgatcctgatccacacaggagaggaaggaaagaaacatgtgtagaaccttgggacgaggtggttggtagcgttcagatgtcctgtttggctgatacgtattcccacgatccttggatgccacttgccctccatatccaggtggtctagggagaacgccacttcccagcaggccatcatgctcttgattctgccaattgcgcctgtattggttcccattacgcctatctgcattgagagcgttattaaaaccacagatgtagaaagtgaagaagtcagcatgcctactgctatgcccgtggatacacggggaaatgtactatgcatctaactaataaacaatatggcggtgcagttaacatacatttaacagtgtactaatattctgaatggcaagtttagaagtaaaaaaacaaattaccattttggggagaacatagttaccatggtcatgctgaataacgtttcactaaccttgtttgcacaggctactgaagctaacccacaaaagaggaagtaagagaacatatagaacagtgccgaaaatggtaaaaattcacgtaccctgcattgatgagtcacggtcaggcaaatctccgtcgcggtcacttgaaccagaggagcgtgtttcccaccttccccctgagctcccgccatgagaagaataagaatagggacctgagccgtcggacctccccaggggtgtagtgtagtagcctttgttcctgtcaagcacgccagcggacatctcctgcagatcactgctcgacgacaaaaaatagagatatgaggagaggaaggcgacgtatagaaaggtggcgcgcaagcgatacacgacaaggctacaacctgagaagtgaggcatcaaagccctggggcagcttcttgcagcggtcggtctctccaacggagatcataaagtccctggagtaactgatcctcatgttgcgcctgtgagagatggacacatgagcatggcgacgaacaggatctatagatgctagtagcttattaaagtagcaataagagaaaggcatatagagagagatatactgacttgggcggctctggctctgggggctcggagctcatcttcaacagcaacagcaggtgcaggtgcaggagcaggaagagtggagaggtgtagaggtaaatgtaacaagta

SEQ ID NO: 19926 - DNA, 3482 bp, Oryza sativa
taaccctacatacacatacaagccccgaatcgcgcggcggtggctcctctccttccccctgccagaaatcgcagcagcaacgaaatcagaacgaggcgcaggaagaagaaaaactcaccgaagcagaggggatgggggggcaaatctgaggtgaaccaggagcggatggatgagcagtcgaaaccctaggcgcgcggtgtggaggatcggcgggggcgggggcctgaatcagaggcgaggcgaggcgagggagcggtgggttcgcggcggcgggattccgggcgatctgctgctcctccgactccgatgagcgaaaaaattgagaagagcggaggaaggaaggaagggtgggaggaagctaagcacgccccacgccgatgcaacgaaggatggaagaagcagacagctgagagaaaaaaaaaagtcggtaataagaagaagaagaaaaagaaaattgtactgtactagtgggctcggcggatttctctctcttctgggctattgggcctgggcttgtatgtagagacggacggcccatggaagttaggcggaaaggggtgtggggcccagtgtcagcgtcagcgggggaactcgtggacaggagaagaacccgcgatgtgatgtctttcttctcactccacgcaccattttcttcttcttcttcttcgtcttcgtcaccgccagccaaccacctgacaaagcaagcaatcgagctgagcaccccaacccaaccctaggcagaggctgaggctgagcgagatcgcgggcatgagctccgcgccgcagcagttgctcgattcgtcgtctccggggccggggccggggccggaggtggaggacgacgggggaaggagggtgaggaagccctacaccatcaccaagtcgcgggagagctggaccgaccccgagcacgacaagttcctcgaggcgctgcagctgtaagcatccatgcgccttcttctaactcttaactgctgccctgcctccatcttctgctacttctccatccaatttcatatgccgttttgcctgctgtatcctactactgttctagttcgattgttattactggacatctaaatctaattctaattcctcaatttcacttcgggacaacaaaatactagtattagtatatacttcttctttgaatcctaacgctcacctggatttaattgctcactcatgtgaatgctaaaaatgcctctacttcatctttactgcccatctaacttgctttatcttcactggaccacttcgaattcagtatgatctctttactccgaactacagtaccaagtagcaactctctttcaaattagttagatgcagctctccatcatcaactatcaactgctaacaacaaagggatcatttccccccctatgatctttgaattcttatcttgtggcaaacattacgagtggggttttaccacaactgaaaaatggttccttcctacttattctttgcattctttacttgcttttactataacaggtttgatcgtgattggaaaaagattgaagcatatgttggctctaagactgtaatacaggtatagtttatagctatctcaacttccttctttttttttgttttcttctttagttggttgcctttgttactgaatatttcagagttttacaatttttaaatctaccgggtaccaacttcaacttaaatccaatttcaagctagcagttttcttttttcagtaccatcccgccatgcttcttctgtgatgctacaaatatgtgattgtcatctattggaagcttcttcgattatccacaaagcaaaatgtggcacttttctgttttcattagttgcgtgctgttgcttcagatgcttaaaaattaaacacatattaatgtaatgacatggctttgtttgatttagcaatcggtttgttggtagttaaatttcctagtcatacaatctttcattttgctgcaagatgtttgtttggcaatcttgttttggtgtaggatctgcattcgattgtccgtttaacaagatataactcactcactctcaacttattactccaataagtaaatgaacatgtttgtttttgcttaatagtaaatcggtaatgcatctgacataccgtgcatgatctaaaatacagttatcttaacagatcagaagccatgcacagaagtactttttgaaggttcaaaagaatggaacaggcgagcatttgccccctcctaggccaaaacggaaggcagcacatccatacccacataaagcctcaaaaagaggcaagtttttcatcctcacctgactagcattttcttctttacctcttatttttgggtcaaaggcggagatcttattataaaccttggagttcttgcagcccctcaagttgtcctaccacaacaagcttctcatctaatggagcaaggctgtcttatacctatggacatatctcctgttgctagaaactttaatgcaaatgatgtattttcttcctgggatagtgctcttgcccaaagtttcagtccaaggcatacacatggtatataattctgccatcattgtatttcccattttcaaatgttaattttctacagaatactaggttataacaaatccaacatattcaggtgcagcaaataattgttctagtagcgtagagagccaatctggaacttgtccaacttctgaggcaattgagcaagagatcatgcttccaacgctgcgtggtaagctgcctgtttcactgcatgcatttcccctccagagtttctacacagaattctaaatggtccaacataaggggtttatatattgtgtaagtgtgttggggtagacttggccttccttgaggatgcaaattctgagtattttagaaaatatttatagatgggggtggaaacctgtttgagattcaactttgagcttctctggtcatctgtttccgctccgaaatggaaggtttggatctatcttttgtcgtgagggataacataagattttaggccacctttgcaagatgcataagactacctttgtataaagggagattactgcctccagcctctgctcctaccaagagcattggaatacctatatatctgcaactaacgagcttgagactttgagtcaccttgtgctgatttcccctgaaaatgagcctttttttagaatttcaattactctgagtctcattagatccttaagttcttgatgtcaattgttctgtttggagattctcccttttctgcccttctacatctgtttaccttcattttgtccttcaaattctcaagtcttgacataatactcctggcatttgactggtgaatgctgttatgaccttactaccaaagtgaaaaaatggatccttgccgttttagcttcctatacttcctttgttggtggtgttaatattaaatcaatttatttgtactctacatgccccttttcttcattcatattctgacttctttctttaccttgcgtcaaaa

SEQ ID NO: 19927 - DNA, 1451 bp, Oryza sativa
attcttcaagacaaaacaaggatgcaacttgcaatatatcctgatgagtgaaagatggtgaaatggatgtcacctgtcaataaaggcacatcacattcaaatggactgttcattgttgatggccttttccaaaaactagaaaagaaaaatctgccagtgaagaagaaaagtcacagcgttgcggtacaccttaattgcaaactggttgatgcaaaccataacagtgaacaaagcctatcatgtgcaatagcaatacaattatccagtgacattttccttgtgttttccccagaaatgtgtttccacaggaagaaccttgatggagtgactagagaggaaagaaagagccaaaaataaaagagaactactctgtatattagatcagagatgtgcacaaaagaaagacgtgcggttatgaacagttgaatcacaaggttgggggcttgcactcttgagcactcccaattttgtcattgccatacaaattgtacaagcatgccatggagcatgaattctcccaggcaagaaataattacccaattactactactagtgctaacatatcacaagcagctttggtttgatcaatttacccaaagctgaaaatattcaagatcaatgaacaccaaacatttgtagtacaagtgtaccaggcagaggcagctagcatcgccacgctgacaccgagacgagctccgaccgctgccaccacagcgccagcgccgcctgccgcttctccacatggaacccatggctggccgtgcgcctcagcaggcattccgcctgcgcctccgccgcattgctcacctgcagcgccgcaaaccccgcggacgccaacatggactgcaacggcggaggcagcttgtcgccgccgccgaccgcgaggcgctccacccgtggccgcaggacgaactgctccaccttggacaccacgtccggcgacgcgcccgccgcgtccagagactccagcagcgccgcgcaagactgcaggaggttgagggcgccgcgctcgcacccgtggtcgacgcacaccacaacggcggggcggagctccttcacgacacggaggtgcgcgggcgccggcgagaaggccccggagccggccgtgagatggacggccaccgcttcgtcgggcgcggccgagagtcccaagggcggggacgcgctgctgagggggtcgaacacgagggcggtgaactcgaacgggatgccgagctcggcggcgaagcgcgtgaggctctcgttggtgaggtggagctcgagtgggtggctggaccccggcgacaccaatgcggtcaccttgaggttcggcggcggcccagcagcgcggcgccagtggtgcgcgagctcctgcatgagaggcggccaatgggcaccgaagccgacgtcgaagtcgaggaggtggaggcggcgcgcggagccgagcgcgtcgaggaaggcctgcgtggatg

SEQ ID NO: 19928 - DNA, 5098 bp, Oryza sativa
tgagaaatgccaaagtcttgagttaacgatcgacgctagctatcgcatcgatcgatctatcctgagatatgatcatatacctccattcatatgtagggacccgttaattatttggagtatattagtattaactaggagtaggactaggacattcgtggtggttgggaagggagttaagttagtttggcatctgttattaaaaaaaaagttagtttgtcatccaataattattaacaactgttaagcaagcatgccttgtacagagttgtatgcatttaagctatatatatctttcttgactattgatcttttgatcgttatgtgaatttcaaagttaggccttgcttagttagggaaagtttttgggtttggttctcacatcagatatacggactcacatttacagtattaaacgaagtctaattacaaaacaaattacagattccgctagaaaactgtgagacgaatttattaagcctaataaatccattattagcaaatgtttactgtagcactacattgtcaaatcatggcacaattagacttaaaagattcgtctcgcaatttacacgtaatctgtgtaattggtctttttttctacatttaacactccatacatgtgtcaaacattcaatgtgacagcgtgaaaattgtgttttgggaactaagcagggccttagctactactactacaattgttacagtacatgtagagcagtatacgggaaaaggagagaaaatgaaatattgtaaaacggtgctgcagatggatgcatggtctctcgagctacgtacagcccataaatcaagatcaaacgggccactttgtgtagttgtgaacaaagctcattttcttggcccattactacatattgggctctttaggtgatttgagaattgaggcccatgaatatattgtttagcattgggattaggttgcagtaagttcactttgacttcttaactagggaccaaatctgattcgtatccctgaaccacaataccgaatatctcgaccccccaactattaaaaccacaatttaactccctcggtggttttggaggacagtttcactaatgtgggccctacgcggcaatattgacttggtcttcgttacatgtggcgttgacgtggcattataattaaaaatatgtgggagacccatatgtcattgaacaaaagtatgtgtgggactcactgacatgtggagcccacataatcatgctctttctttttccttcttcctcttcccccctctccctctctctcttcttccctgcggcaagccgcaagtgtgggacgggggcccggagctcgtggcggagtggccccgccgccttgccgtcgcccgcgacgtggccgccgcgctccattacctccactccgtcgtcaagccgccggtcgtgcacggcgacgtcaagcccaacaacgtcttgctcgacacgtcgagctcatctagggcggaagcggcagcagctagggaatcgggctgctgccactcccacatctccaccgctcgagggccgccgcgccacgccctcgtctccgccgctcgccgccgtctccgctgcccgccgccgtctcgaagtcgcgagctcgcaaaggggatccgatcctcgcccgcccgctgtcccaccgccgctggctcccggctcctgcccgccgctggcagcgccgccccagcagcgcgtcctgcatgcagcgacccgttgggcatgaggtcatacaccagcatcatcacatgcgaattgggtttgtagtaggaatggttatcctctcgtgtgtgatgctctaaccaatttgtgaaaatgcggtttgaatctactatctatcaatataaaactctagctttacgcaaagaaacatatatatagctatccttattatatcctgcatataactgcatgcatattctgtggtgactcgctaagtatgtaagtactcatccttacttataattaagtagtacaggagaagggatcgaattgtcgaacgtgagctaggtcctcacggccctagtcaactgcctgtgggcatgttgtttggacccactatatatatgttcttctacagttggttatctgatagatagattatgacctatttagcactattaattgaaggtaattaatcattttagtcttatttccgcgcaccctatgttatgatattgctttatatgtgcgtaccaactactgatataggaaaacacatgaggtttctggtttctaaaattgggggctgacaacataaaacgatactcactccgctttatactctaagattttctagcatgatctacattcatatagatatattaatgaaacatataaatgaatatgtacaatgctagaaagtcgtataatataaaacggaggaagtatatatgctagaaaaattaaaaaacattgaaaataacacaacaaacatgcacatgatgcatgtctttattttaattatcaggccgggattaccagcttgagtatgtttacatatgcaccgatcgagtattatatgtagttacttacgtacatacatgaaaacaatatatattttatttagccgttgttgttcgatcgatgagaatgatgattaataagtaatgacaggggggtgcatgcaggccttggaggcggcctttgccatgtggttgtggtcgagggcggcgttgcacatgttggcgaaggcgcgtgtgtgcttcatcccatactgccccagcgggccacagtgagcctcgaacgtgcgcaccatggacttgaggcaatcccagtcgtcaaccagcggctgccccgccggacgccggatgtgcaggagcttcttcttggaggagtcgcccaagaggatgtctccgatgaggtcgacgctgctgtcgacgcgtgatcgcctctccatttctcggagaaggcgctcccatgcctccaccgatttctcctcgtagtacttacgccacaggtagacgagtcccgcatcccgttggttcacgccgccgacgcggccttcgtcatcgatgacggcactagctgttgaggtgccggggccggggggcaagtagtagaggctgacgggttgggaggagaggcttaggtcgccgtaccgactgacgtgtgacaggttggtgcgcttcgcgacgatgtcgtacagctggccgagcgtctcgggatcgccggggcggcgcgcgtcggcgtcctccatccaggccacgctgaagaggtcgccgaggcaggtgttgtactccggcgtgtcgcagtaggtggcccagctgttctccgtcgcgttcgacgccgtcatcgcgtacacgccgatgttggacggaagaagctggccctcgaacatgctacccgactcgcacgcctccacgtacaccaccaggttcttgtacgcgccggccgcgttcttattcttcagtgcttgagaaagatcgttcgcgtgcaggttcccccccgatggcatgcctgtacgtagtgtcgtatccaattcaatttaattaatcgtatgcattatattattctttgtttatatatatacaaggattccattggttactaaaaattacgtacagacgtatccggggctgccatgatctgagtaatagacgaagatatggtcgttggggccgctgctgatgaccttgccgctgccggcgccggtgagagccgacttcttgcccagcaacacggccaggaagttgttcttattcacgtcattcccattgtaatcctgcaagtgatcacgcatgcatccatgggcataattaaccattatacatatatagtggacgagcggcagcgctcgcggaggtgacggagggcgtggacgagcgcggacaagctgacgttgtttctatcaggaaccaactcattacgctcacctctaaatcaaacacctctgggttcatctcatttcatcccatcccatccttgtaatgaaatactccctctgtttcaaaatatttgataccattgactttatagcacatgtttgaccattcgtcttattaaaaaaatttgtgaaatatgtaaaattatatgtgtacatgaaagtatatttaacaatgaatcaaataatatgaaaagaataaataattacttaaattttttgaataagacgaatggtcaaccacattcaaacattttaaaacggagaaagtactatctaatggacacgtacctttgggactccagcgtagacgttcggaccgttgggtttgttgatgatgacacccttgtgaggattctcggggttataggcgatgtcgtcgtacatcataaccacgatgttctggtccttgagtcctcccttcttcattatctggtacgcgtggcacacgtctgcctggtgacggtagttttcgtaccccttcgaccccgcgatgagcaacgcccacttcgtccccccattctccgtcggcagccggaggaactcctgccacagcccgccgttgccgaggcccagcccaacttgcagatgcatcagcatcagcatcagcaggaggacacccatggccatggatcttcttcctagctaattcgttcgtgctagcgtagtgtattgatcgatggaatgtactgggctagctattgagttccgatttccccagcaaagtacgtacccctatatatagcactagcaagtagcttagttaccatgcgtgcgtacgtacccctattattactgatacaaaatacgtacatacgcctccaattggaagagggtaagtgaggcaagcaaggttagcccaattctactacctaattaagcttagtttacgcgttactactgctactatactattaaacaactcttttttggacccttaataatgatcatgcgttgtttcttttacttagatttcaaaataaaaggtcaattgttcgttaagtagttttcataaccgatggatcgtacaaggttaggataatacatgttcgctttcatagcctaaaaattctcatattaatctgagaaaaagaaaaaacagagtctatataggaatgaaatttaaaaataactgaaattcgaaataaaaaataaggaatatataaagagaaaactagagtctataccgatatacaatagaactaaggaagggctgcagga

SEQ ID NO: 19929 - DNA, 5344 bp, Oryza sativa
cttacatcgaattggatactggtgacttaccaaacgaatgacgaaaacatctttaatttttacaatagtagagaagagatagagatagagataaagaaaaaaataactaaaaaccgatttaagcacagatgatataccataatcccagtagaaacataagtagagaagagatagagatagacatatactactatataattcacgttgcaaataaaaaaaagtacgtccatggctgctggacagctcgatcggtcggcacgtaccaaaaattgtaaaactcaaactcgtccagtcctacataagtacatgatgtgacttcaccggcataaacaaattcgctacgggcatgtttagttgatgaaataaaattttttgagtgtcacatcggacgtttgaccagatgtcggtagggttttcggacacgaataaaaaaactaatttcataacttacctggaaaccgtgagacgaatcttttgagcctaattaagctgttattagcacatgcatgtgggttattgtagcacttatggctaatcatggactaattaggctcaaaagattagtctcgcgatttacatgcaaattgtgcgattagtttatctttttttatctatatttaatgctccatacatgtgtccaaagatttaatgtgatgtttttgcgaaaatgttttgggaactaaaccgagccacatggtatttgtccattaccacaccatacttgtatgatacaaatgaaccaaacggtacgttatgcgatataaatattagaaaaccaactaaaaacttaatcaaacacgaatgacgtactaaaattccggcaaaaacatctttaattttcataatatagttaaagaaataaggaatattgtaagaaaaatatagagtccatatagaaatacaatttaaaaataactaaaattaggaattaaaaaaataaatattgaaagataagtttagagtccatatggaaatataatttagaaataatagaaatcagaaattaaaataagggatattggaagaagagtatagagtttatataggaatttagaattaattaaaatatggcaaaaaataaaattaaaagtagagtttagagtccatatataaatataatttataaataactgaaattcggaattaaaaataagaaatattgtaagaagaatatagggtccatatataaatacaatttgaaaataactgaaattaggaattaaaaaaataaatattaaaagataagcttagagtccatatagaaatgcaatttaaaaataatagaaatcagaaattaaaataagggatattagaagaagagtatagagtctttataggaatttagaattaattaaaattaggaataaaaataataaaattaaaagtagagtttagagtccatatagaaatacaattggaaataataaaaattcagttttctttaaaaataatattagaagaagagtctagagttcatatagaaatataatttattaatagtaaaaattcggaattaaaaaataagtctagagttcatatagaagaataatttaaaaataactaaaattttggatttaaaataagaaatataggaataaaatttataaataatagaaattcatagttaaaaaataaagtatgttggaagatgagtctggaatccatataaaaatataatttagaaataactaaaaattgatattaaaaatagttaataactattatgtgcatacaacacgatatgaatattgcacattgatagtttgatcaagctagtacaaaatttaaattatgttattatttttaagatatcttaataataaaatgagaatatgtatatatatgctactatatgagagaaaatataaaggatatgctagccgcacaatttacgtgggtaagcatgaaccatgattgttactgatataaaatatgactcctccaagagggtaagtcaggcaagcaaggttagtccaattctactacctaattaagcttagcttacgcattactactactactactattaaacaactattttttggacccttaatgatcctgcgttgtttcttctatttagatttaaaaataaaaggtcaattgttcgttaagtagttttcattaccgatggatcgtagaaggttaggataatatatagtaataaaatccacatgtgtcctaatcagctgtagaggacttatgtaccgagtatttagttacttgttatacatacatgaaagacatcgagcgaaagcaacggtccgatctgtattttacttagccgttgttttactatatatatgtacgtacatattatcatatttgatgagaatgaaaccttcagtgacactaattattgccatcgtagtagtagcagctagccatcggattagacgagaaagaatcgaaccattatattatattcttaaaaaccgaacaaaggaacagtaaaacggagcacgtgtagaggcatgcaccatgcatgaaagcaagacatgcatgatgacagcaaatcgaacaacaatataataatcaatgcgccagcaccgcgagactaaacagcctaaaaacgcatgcccaacacgcaaagagatgaatcagcactaacaacacaccgcgtaactaacaactaacatccatatcgatccctacataatcactcattccaaacaaggaacagagaacggaattttctcttctctagcttcatgttacataagtaagaaagacaggcacataaaaggaaaagcaacaagacacatagagaaagaaggaagggcacgtactgaaatagaaaaggaatcggatgattaaaaaggaagaggacagttagaattaaccggcaacgacccgtacgtccacagctaccggcacgtacgcaagcgcaagaagaagcaaggctaatctacgagattaaccggacgatcaatacctgccagtgacgaacgcatgcacgaggagatcaagtttagcgtaaacatgcaacgtgtcagggaacgaaatagcctgaaaaaattctccaaactgagattaacgcaacggttaggagaattatcaatatagatgattgtctcatcccagctatcttcaacttgacagacaatagcaagtcgtctctttttgagaaatataaattttattaagcatgaacagattttaggggataaaccccgttacatatctaaagatgaaaattgtaaacaactagccatccttgtgaaaagaagggttaactgaactacagaagcaaccatcttgatgtaaccaaacagtagaaaaagaagcagatcgatagggagctgcgggctgcggcactgccgcgacaaccgctaccttgggcctcaaataacgtgcactccacttgacaagccgttaatcccaatcggctgcctccatagaaacgacacaaaacagaggtttgttgctgagccgtggattttggttgtgagcatcactggactcagcaaaggattcccacggagttcgtcattgaatctaaggagctctaacatcaaacctgccaaccgaggttgcataggtagttcgagctcaacccgaatgacaaaccctgcatggtttcttctgttagggaacaaaggagagggcaaattcaaagaccaatcaaccttcaacattgaagtatttgaatggctgcacaataacttatgtcttgctgagaggacaaagacggtcgaggaagaggtggcctgcaacttgaaattacaagatcatggtgttaacaatagaatttggcatcagactcgaataaggaggaaggagatcgagatggatttggtgttgaaacaagttaaactcgggatcggactgtgcatcggctaaagatcgagactggagattgatctgattgatggccaatacagccaatacggcataacttggacttggcatgggcccagattggaataaccgtcattgccaattagagataaagctcaataaaggcaattgtatctattaattaggttagttatgttggttttgttagttttggtaagagaacgccatcgatggtcttgttcatatctaagtttttagaaagtttaagtcgtgtccataatggacttagtttgtatccggggtataaatataaaccccacagcactgtaatacgggagacaatccaatacaatttcacacttttttacttttcctcttttttacgttccgacagaacttgagtaacatccttaaattttaatctaaaatttgactgcatcattcttgctcttaaattttaatctcaatttagcaaataaaaaatctcttaaaaatttcttgtttaattcttaattttggttcaagtattgtacccttagaattccttcggactatactatgccatcctattcaaatattcctttatcctaaactttagaaattttatgaaatccttccaaagaccaaaacctagaaccctcttttatattatctcaatattagtgaaacccttttatactaccaaaaccttccaaaaattaagaggaaattctattctctttaggcatttttgtcaaaatttgaaaatgtactattcattgcacacaacgtgctcgacaaatcgcctagcccactctgacccaaattgttcttcaagtcttcattttgaactaaccaacatcaaataaaaaaaaagggaggtagtatgatttatgtccccattggttgcctgcaaagccaaagctaaaaccaaaatttaaaatttaaaacttaatttgaggttacttttaagatgttttaaacatagtttctttctagcatgacttttaagcttctaaaacacacatatataaaaattttacatataaattatttgttaatcgctaataaaacacaccaagcacggtatcacactgcatttctcgtcctcgctttcgatgaaaaaaaaaccatattcgttgtttacagtgaacgggcgagaaacaggtgaagctgcggctaggaaagcgaggtgggactgaactgctacagcgccgtgatgtactgtagcgctgctgctctgctatgcctgttgcgctgctgctttgcatgcttgggccaaaggcccaagtcctgctgctgggctgctttgctctttttcctctaattattgcggagcgtcacatgaggcccttaattagacatcactatcattctcagttcaattaacaccagttcttctacatatactctttttagtcatcaataaatcgatatgcaagcttcagtttttctgcatataatctttttgaagttagtacaatcgcaactattgaaatacaacaaataagattgtactaacctcgatatttaaaattaaagcaacttacttgcccacagttatcaa

SEQ ID NO: 19930 - DNA, 4684 bp, Oryza sativa
attcctgcagccccttgttcatactcctcattccttgactgatgtatccattcctcctgtcagaaaggaaaaaaaaaacaatcataacatcatacttagaccatgtgttaattttcctttttccatgggcttgtcaactcgaagcttaattcctactgttaaatcctagtcaaatcaacaaaaaaaaaacataagcccagcgagagaacaatagaaaccttgaaagggtgtctagtctcaccgctcaccaatttggtaggaaatattgctaaagttctgagaataagttgtcctaaatcctaacaacaacatcttatcgcatcaaaattgctggcataaagactctatttagcaagtttgggctttctttcaaaaatctgggtattaaatctacctggattctggaacaaaaacttactggcataatacagaaaatgcttacactgatcgcataggaatgggtttaagaaggcaaaatttgctacaggacacccaaaaaacgtataattagctatgggacaccgcaaaaacgcgtatttgctatagaacatcgcaaaaaactggacattagctcctggacacccgtgtcattattttattatttttagaggaataggagagagaaacagctgtgtaagtacggttctacccttcgaattatttttctttattcttccttattcttctctttctcattctttctctctctgctatttcttcaagtgagcccgaggcagagggagagcgctggcgacagcgtgggctggtgcagtgcctcggttggggcggcgctgcacggtcatgcgggaggtggtggcagagctagaggccagggcggcgctggggcggcgctgcgcaggcaagggcagccgggctcggcagcgcaacaacgccaagagcgcggctgctccaggccgacttcaggaggctggatcggatggcaccggcgccggcgcggcgaggctcaagccgtcgctgcgggcgctcttctcatgcgggatcttcagcgcctgcacgcatctagcactcagcccgacggtgacgcccaacaacaatgtcgcatgccatcaagctggttgtggaggcggcgtcgtcgctggttgtggaggcggcggcggaggtgacggcggatgcagcagcgggcggcggcggctgcttcgatgatggttgacgagcccgacgactgcagtgacggaggcagcggcgagcagcgctgggaagcgggcggtggtgatagtttcaatgatgatcagcgagctggcgacagcggcttcgatggtgacggttggcgagcggcgctgggaagcggctgccagcaatggggattagatagagctaagggaaattttgtctttttgaaatttctctctcctctttttgataagaaatgataaaatattgtctcgggtgtcctatagcaaattacacaaattttgtggtgtctatcagcagcgacgcaaatttgcagtgtctcccagccaattacacaatttttggatgtcctagggcaaattttgccttttcatttatattaggtcaatgctcctctgatccctctccttcaggttgtgccttgtacatagttgtatgcctttaagcaatatctttcttgacgattgatcttttgattgtttctgcaaactatttggttgtgaatttcaatgttagctactactactacagttggtaaagtacatgtagaacagtatccagaaaaaagagagaaaatgaatatgtaaacgatgctgcaaatggatgcatggtctctcgagctacgtacagcctagaaatcaagatcaaatgggcccctttgtagctgtgaacaaagctcatttttatggcccattactacatattcggctctgtggtctgagaattgaggcccatgaatgtattgtttagcattgggattagatttgatcgctcatatgaaatctggcccgttataaatgtcgatatgctaaactatgtacttttgactctcaaaaccttgcaaacttctaatatgcattattgggatctgtgctctggtcagtttcccaacttcaataacgttgatgaactccgatgtgggtaagggaagaggaagttcccctgactggcctgggagatcggggaggtggcggcctgacggtgggtagcgttgacatcgctagagctatgggattagctagacggtgggtaaggttggcggcaagggcaaaaaataaaaaaaatgatggtcgagttaggaagcgacaggaagtgacagtgtattcgacgacaataaccaccggagataggtaactaagatgtactccctccgtcaaaaaaaaaatcaattcctagatttctgtgtctaacgtttctccgtccgtcttattttaaaaaaatataaaaaaattaaaaagataagtcatgtataaagtattattcatgttttatcatctatcaataatgaaaatgctagtcataaaaaaattcatataagacggacggtcaaacgttggacacggaaaccaaagaattaagtctttttgggacagaggggtaggtgcaacaaaatttaaagtccgtgttggcaatattggtggatgaagaaaccaccggagaagggggtgggtgggggagaggatgattgtgaaggaggttgtcatgcctccacaatgtcgggatgacaccattagatcagatttttggaaaggctcgcctgaattttcacctgtgtgtgtttcaattcctcacctgaattttcattacggaatctgtgctctaatttaatttgttacacatgaattcttatgaacgaacaagctaggataactgctccaaaatcgatacgaaaactaagaaacaattaaagggaagacgtactcacgtgcatatatagctgatagcttgatcactatgcaggatatatgtagactatatatattcgctctagccgttgatctgatcagcatctgatcgctgtgctggaaactgcatcgatcggtaggacgtctggatatacatatatctgcatgcagttaatacggggggaatccatcgatggatgcttccaagaaactaacttttgccggccggaatggtcgaccaaagtccaattatatgtcatcatggcatatatatgcacgccagcagatatagaataatggtcaatatataacccggtcactgcaaaatggattaatcaaagtagcacaattaacttcatttgtggtcactatcaagctagaaagaacaatgagtatatacacattcgatcggccattatatattattatattcgacggtgaccagctagccgtctgatttcagctgattgatatgatcagctgagagaccatcttgcttatcatattcttaccgaccttttcaactactaacatcgatcttccttttcttctttttagggagaaagtaacaaagcggaattaagaaaccgtgcgcgctctcaaattaaaccagcggcagctcgtagtacctaggatcatgcttggccacgaacttataattactgtgttaagtagtggcccctacagctacttgtagcttgtttcgcaaggcccttcatgcatttacttagtagtactactgattatcatatcaagggtgtctctgtcaaggatgatctgagcttgaatcgatctatgtaatcagcagtcatgcatgatgtttctgtgttggtggacgccacggttttctccctcagctcatcgtttcaaaccgaaaaaaaagaatggaatcttgatcaagattcttaagacctaattaccactacagccgcgacctcgattttgttttcttccggcctgatccaacaggcatcgcaagttaagtacgtggttttcatccccatcaattcaattctacccaaatcaagtcttatgttaacggcatgcgttggtcgtctaattcatgctgaccactaattaagttactggctagtagcttagctactgacaacattctttcttaaaaagggagatctatatacattcatatatatgtacatgtgtgtgtcgctttattaaagtggatcgatgaaccgacgaagaaattaggtaccacaaattaaaggtagcagtactgccgccattgtgccaaaaaccagctaattaaccatcggttttcactaatcaagcacaatcatgctactaattacccttttcaacctataaatttatcacggtcagatcaatttttctaattactttaaagataatataatagtagtaatcaaccctataaatacacaaggggtgcaacgaccatgcatgtatagcaaaaacacatttccaacattcggtcttcactactagctagtagtgtttttttcctacatatataaacaataattattcattgacaggcatcaagctagctagctagccaactgtctgcaagaagaagaagaagaagaaggtgcaggataaatcgatgaagaaggcgtcgtcgctgtctgagctggggttcgacgccgatggcccgtcattcttccggcacctgacgctgaccgatggcgacgacggcacgctgccccggcggcggctgatcaagatctcggtgatcggcgcgggcaacgtgggcatggccatcgcgcagacgatcctgacgcaggacctcgccgacgagatcgtgctgatcgacgcggtggcggacaaggtgcggggcgagatgctggacctgcagcacgcggcgg

SEQ ID NO: 19931 - DNA, 2437 bp, Oryza sativa
gggagccggggacagctcggtggcgctgtggtcgagcatcagcgtgggggggatgccggtgctggcgcacctgcagaagaaccaccggtcggcggcgacggcgaagaagttcgacgaggcggcgctggaggggatccggcgggcggtggtggggagcgcgtacgaggtgatcaagctcaaggggtacacgtcgtgggccatcggctactccgtcgccagcatcgcctggtcgctgctccgtgaccagcgccgcatccacccggtctccgtcctcgccaagggccttgtccgtggcgtccccgccgaccgcgagctcttcctcagcctgcccgctcgcctcggccgcgccggcgtgcttggcgtcgccgccgagctggtgctcaccgacgaggaggagaggaggcttcgcatctccgccgaaaccctctggggatactgccacgccctcggcctctaaattcattaattactacgccaacccgtttatatatgcccatatatatatgattaataatcgtcgtgctaatgcctatcgatcgatattatgcatcatcgtatatgtcggtcgatcgaagcttaatttcatggccgcccgggttgtaataagctactattctcattgtgtgattaattagctctatttctctgattgagctaattatgtgtaactgtatacacattgtgttcaaacaataatggaatgaataaaattgattgagacaaatatatgtacaatatatatatagtactgctcaacgtaacgtgtcttgtttactattgtcatcagtattcaatttgtcagacaattaactataagttttatcatcaatcatcatagaaatatgtgcttgtggcttctgacctagcttgtcgaatgaagtttaaaacaaagtgcatgcaagctagctgcgcagcggatatggagggcactactactacgtactcaatcgtatcgatcactactacctccgttctaaaatatagtaacattttttttttattttacgtaaaagttaaagactgtaccttgtaatcatcattatattaatgatggtcaagtgtgagaggtaaatagccgaaacacagtggagaacagaaaagagtggtacagattgcacgtcaatatattaaaagaaaagaatatttgatcatccgtcttatttgaaatttctttaaaaaatataaaaacataagtcatacataaggtattattcatgttttatcatctcataacaataaagatactaattataaaaaaattaaataagatagacaattaaagttaaacacgaaaactcatggttgtgcttaaaatgatacggaggtaatgcatgcatatagtacataccatgatgagtacagtatatatatatatggtattatctccgtcctaaaatataataattttttgtttatccagattaatagctaaaaatacttatattttaaaacggatggagtacttaattagtacacgaagaattacatgatgaagctgtaggcaggtcacatcactcgtgtatatacgtatctatgtgcaaccatgagcactcacagtactgactcacgctcgcacgttttgtacgtatacctacctactacagtagctctctgcaaacttaattttattacaccaattaacaccactagtaacagaatatgccataggtgccggtttgcaagtgtctataggttccggatttccatccggcaccaattagtcagcaccaatagcaaaacccggcacctatgcaaaaatagaaccggcacctataagttcacacgagccaaaaaaaaaaaaagaggaaagagccggctcgaatcgcgccgagctcaccaactgcgtcaccacgccccgccccacatcgattgctcccggcaaattcatccacaaattcacaaaaaatcatccacaaccacacaaccatactccatgttcatcaccgccctactcgatccccttcatcaccgcctctcggatccgagatcaactccaacagcaaactactatatttatcaagaactagtaaaatactacaaagattaatgaactcatgcgggaactcaagaacactcaagaaccttcgtccttctcccttgggttgcctccggccttcttccccttgagatctgccgctatggcacggccgccgccgctgtggtgcgccgcagctgcctcctccaggcagccgccggccgcgggagctcgccgcctccccaccgcctccccttccgcaggatctagtggaggggagggcgcagccgccgccgccgctgtcccaggcagctgcccgccgcgggagctcgccgtctcccctcccgccagatctggcggaggggagggcacagccgccgccgccgctgccttaggcagcgcgccggccgagggagctcgccgcctcccctcccaccggatctggctgaggggagggcgcgg

SEQ ID NO: 19932 - DNA, 14900 bp, Oryza sativa
aattaccatttcaacgtcccgtgtatagtgagaaatcaatttaattaaggcgatcgtgtataccatgacatgattaattaaccgtgcctagcttacagcagttagtacttttactgtaagatatcgagagtgcccaattgatccattcattcgtgacggtgttgctgggaatgacgagagaggaggcgttagggttagaggtaggcgtacaacacacgaatcttaaaacgatgtaatggtctgaaatttgtaagattttatgaaatgttttacagtcaaatgccattaaggcagtctcgaaagaaaaagaacgaagacagaaagaaagccaaatggtcttgtctccgctttaaaaaaaaatggtcttgtctctgccataacatgaaagtgagtcaaacaattaatatactgtatatatatagtctctgtcaatcgctaatataacttcacaggaaatgtttacaattaaattacgcccatatcttcactactagatatggggattatattgttgaaactaaactacggcccgtgacctttcttcagctgccggcctaatatctccaaacctgaaccggatacggacaccaaacaagatcaagttctcatattacatcacaagtcccgccacataatgacagaccactaaacccgtgattaattgatatcgaaggcgaaacataacttaaattacacaattcacctcaaactcggcattcgcattaacaattgcaatacacgtcaataatttgtatatacttataaaagatatggatacaaatctgaatttcgtgggcaaattctaaaacattaatttacaagaaaatactagctgacatcaattgatagaaattagggagcaaaatcatgcaaatttatatcattccatttatgttataaaactaacactgagatcgactttggtagcaaaacatggaagaacaccataagagatccaaacatcgagacacgatattaaatttgttaacatggctagccaaaacgtacattcccagagcacttgttacagacgcttctccttgatcatatcacagtgtatcagatgtctatgaccctcaactggcgggtgtgacgggacgacggtgatgccaccttggctgcgaggagtagagtagtgttgatggcgaggtaagttttacattggagtagttaagaggcggaggcatgtgcatgcgtggtggatatgacggtgtaagagaatcatagtgagagaagataaagaagtgtactgaagtacggttgcgagaaggatgtaggttgatgtcacgccccgaactagtcccgaccggaactagcccgtgacgctccaaattaacctgttaatcgataccagtctgacggagcatgaggctcctcaccgggagaccgcgcaggcccccctttgccggttcggccgggggccctgggtgagattctaagctcttggtctgagtgtggaaggttcgcgagagtggaaacacacaagacacgggcgatgtatacaggttcgggccgctgagaagcgtaataccctactcctgtgttttggtggatctgtgtatgaagaagctacaaagtgcgagccagcccccgatcgttcccggatcgtttttttcctcccttctctaagtgggcaaggtcctccttttatatctcaaggggataccacatgcaccatctctccctctcacttctcttctcttcgttaatggacggagatttgtatggctgccgtccgaatgaccttctgatgggacggcccatacctacctccacttccgccggaagcaggcgcaacgtgggaacatggctgtctgctgacgacatgaccattgtcagaccggtcacaaatcggtcactcttgtccaccacgtgtcatttaacaatctgcatgttcgcccttctccatacaatatcttgcctgtaatggttaggatgaagcctggcgtatatctgaccggaaccaacgtgccatctccaggaggtaacacgccggctccggctagggacgagtgcttggaggctctcgtcctgacgggatggggcgaggcgtacgtcagaccgcctgtcgccacctaatccacgatttgaccggtctgtgactgatcacagaccggatgaacgagcgcgctgcactgcgttacatgcggcgtgacgcgctcgtccaaaccgcaataaatgcggttaggtgagcgccgctgcgctcacctaacccatacacgcggcgcaaaatccacaaggggtcagggcaccccagccctcgaggccgaaaccggagcggatcgacccctcggggagacaaagagaagggcgggcgtatcaccctcgggcccgaccccctcctcccgagggggttaggccacgtgggtgatcgtgtctgcctcaagtctctaagtcatgatactcccggtcccatgtcaccgacagtagcccccggcgttatgccagggcgatcgccctcctcgagggaagcggtcgggcgtgacgccacttcctaaggcctggtgacaggtggggccggtctaaaaatcgggacaagccggttcgtttttcctggagatatggtgatggcgctttgatcggcgagcgtaattaacgcgcgcacgagatgttccatctcgactgccacagccgcatatccacctcatgcaccgaaaacgggcgaatgggattagtggaagcgtgggcgcgagaaacgagggggcaagatagtgggtgcgagaaacgaggagccgggcacagcgttggcaagggtataaagtcgccgaggaagagatttgcttccttcctctcgccattattccccttgtcttcgccgcttgcgccctaactccttgtttcctgtaccctaccttcgccacacgcgctcgctcttaaacatctcttcctccggcgtcatggcacggggctccgctttgcttgatggtagcgtgctgccgccttcccgcatcgtgagcgagaggcaggccgggctgccgcgccgcttcatgccggaatctgccaccggccgggagatagttacgctgggcgagggacgcccggcgccatgctacccggggcggtccgtcttcttcctcacttttgcaatggcagggctggttccgccattttcttctttcttcatggatgttctggagttttacgatctccagatggcgcacctcacccccaacgcggtaatgacattggccatcttcgcgcacctgtgcgagatgttcatcggggtgcgcccatcccttcggctgttccggtggttcttcaccgtacagtcggtgtcgccgccgtcggtggttggtggctgctacttccagccgcgggggccggtgttgaaccgctacattccctgcgtcctccgcaagaagtgggatgactggaagagcgactggttctacacacccctcgccgacgaagcgcgcctccgacttccgagccagcccccggcgcaggcctccagctggcgggcgccggtagatctgggagatggctatgacgccgtcctcgaccgcctggcgggcctgcgatcccaggggctcacaggggccatggtgttcggcgactaccttcgtcgccggattgcgccgctccagcggcgcgctcggggcgcctgggagtacaccgggtccgaagactacatgaggacccaccagggggtcagatgggactgggctcctgaggacttcaagatagtggtccaacgggtgctgaatctcagctctgtggaggcatccctcattcctcaaggagtcctccccctctgcagcgatccagaccgcgcctccatcctgaccatcatgcaggcggtcggggcgtcggaggagcgggctcctcgaggccacgatggcgcgggcgggagccgcaggggggaacaatctaccccgggagggggtcgtgcttctgggccccgcaacgggggcccggggagcggccgccctgccgacgcccgggggaagaggaagcaggaaggaacccctcccccatctcctccccgagggggcggggtggcacgtgccagcagcaggcgcccggagggggccacgccgacgtcgcagcccgagggggagcggaagaagaaacggccccacaagatggggggcacagaaccatcccggggaaaccttatttcccctccaaggtggtcgtttaaccgaccccctcgcaggttcgtcccacgcccatcgtggccgtattcattccctcaacgcgagttttcactcatccatcttgtttgtcttctggtctttcttctgtttcagcgagatcccgtcgcgtccctcccgccattccaagtccggccagtctgaggccgaggacccggcgaccacagaggctcggaggcgggaatctgaccggcgagaagccgcggatcgcctacgggaagccgaggaggccgcccaggtggccgtccgagctcgccaagctgaagaagccgctcgggaggaggccagacttcgccaggccgaggcgacggcatcctccgaggcgacccgtgaaactgaccagcaagaggccgcggatcgccttcgagaagccgaggaagctgctcaggtggccgtccgagctcgccaaactgaagaagccgctcgggaggaggccagacttcgccaagccgaggcgacgacgacttccgaaacagctcgcgacgaggctgcgggcgcatcgcttgggcccactccctcgtgcgacgctcgggacaaaccaggtccgggggacatccccgagtccggcacgtccatcggcgggccaagccgcgcggcatcctcttcgaggcggctcttccccacgccttccgttgctccactgagcgcagaaccccttctgcaggccttggcagtcgcaaacaccatggtgttggacgggttaagtgcccaaatggaggccttgcaagcagagcgggtggagctcgacgccgcatgggcacgtgtcgaagaggggcgtcgctcggtggaggccatggtggaggtgggccgcaaggcacaccgccggcacgtctcagagctcgaagcccgtcggaaggtgctgggggagatcgccaaggaggtggaggaggagcggggggctgccctcatcgccaccaccgtgatgaacgaggcgcaggacaccctccgccttcaatacgggagctgggagacggagctagggaagaagctcgacgccgcccggggggtccttgacgctgccgctgcccgagaacggcgggcggcggagaccgaggtggcatcccggcggcgcgaagaagcccttgaggcccgtgccatggcgctggaagagcgtgcctgcgccgtggagagggacctggcggatcgcgaggccgccgttgccatccgggaggcaacgctgactgcgcacgaggccgcctgcgccgaagaggagtccgcgctccgcctccgcgaggacgcgctcaccgagcgggagcgagctctcgaggaggccgaggccgcggcgcaacggctggcggacagcctgtccctccgcgaggcagtgcgggaggagcaggcgcgccgtaatctggaagatgcccgcgccgagagggccgcgctgaaccagcgggccgctgagctcgaggcgcgggagaaggagctggacgcgagggcgcgcagtggcggggcggccgcgggtgaaagcgacttaaccgcccgcctcgcagctgccgaacacaccatcgccgatctgcagggcgcgctagactcgtctgccggggaggtcgaggccctccgcttggcaggcgaggtagggcccggcatgcttcgggacgccgtctcccgtctagaccgcgccggccggcaggcgggcctctggggcgggcggactgcgaagtacgccgccaaccagaggggcctcgcccagcgcctctcggagatagccgggactctccaacggctccccgaggagctcgagaggacgattaagtcatcctcgagggacctcgcccgaggagcggtggagctcgtactggcgagttaccaagccagggatcccgacttctccccatggacggcgctggacgagttccctcccgggaccgaggatggcgcgcgcgcgcaggtccgggacgccgccgaccatatcgtccacagcttcgagggttcggcccctcggctcgcgttcgccctcaactccgacgaggaggacgatgacggcggagtggacgacagtggcgacgaggctggcgacccgggcgcatcggagtgagcccccaggcccccgccaatctttaaatagtttcttcttttcttcttccgaggccttcgggcccccttcttgtatagactaatttaatctgcaatcaaataaagaggaaattttttgtgtcaattctatttgttgtgtatatgagacgaggatggtctgtgccgcggtccttttgtgtcttggcttgaacaagggctcgtgcccaggtcctagtcctcaaatggctcgggtcggggctagtgcctggggagatccacatgtcgagactggccaggccgggagcgtgatgaccgagggttatgggtgacccgattgtgggtttttgccgattcccccccggagttcaccacgccccggggcacggctcggttctgggccccgtttggcgattttagccgacccgagcccccgagggcaggattgaacacgagtaacctatttcaagtcaagatccttcaaaaggaaacaacagcacagatacagccttttaggaaatcgaaaatacttttattgaaatacagatataagagaaataagaatatgcatatgtggtagcccccggccaaccctgcacgcccgaggggggtgcggggttggcccgagcccgaaacctgacacccgatccccctttaggggtagaagcgacgaaggtgttcgatgttccacgggttaggcagctctgtgccgtcgcccgtggccagccgaacggagcccggctgggggacaccgatcactcgatacggaccctcccacattggtgagagcttgctcaatccagcacgcgtttggacgcggcgtaggacgaggtcgtcgacgcagagtgatcgggcccggacgtggcgctgatggtagcgccgcaggctttgctggtagcgcgtggctcggagggacgcgcgccgccttcgctcttccaagtagtcgaggtcatctctgcgaatctgatcttgatcagcctcgcagtacatggtggcccgaggggacctcagggtgagctcggatgggagaaccgcttccacgccgtagacgaggaagaaaggcgtttccccggttgctcggcttggcgtggttcggttcgcccagagcaccgctggcaactcctcgatccacgaatcgccgtgcttcttgaggatgttgaaggtcttggttttaaggcctctgaggatttccgcattggcgcgctccacttggccgttgcttctggggtgggcaggtgaggcgaagcagagcttgatgcccatgtcttcgcagtagtcgccgaaaagttcactagtgaattgggtgccgttatccgtaataatacggttaggcactccaaaccgggctgtaatgcccttaatgaatttaagtgcggagtgcttatcgatcttgacgaccggataagcctcgggccacttagtgaacttgtcgatcgcgacatacagatactcaaacccgcccggggcccgcctaaacggtcccaggatatcgagcccccagacagcaaatggccatgaaagtggtatgatctgcagggcctgggccggctgatggatttgcttggcgtggaattgacacgctctgcatcgccggaccaggtcgaccgcatcattgagagctgtcggccaatagaaaccttgtcgaaaggctttgccaaccaaggtgcgcgaggcggagtgggctccgcattcgccttcatgaatatcggcaaaaagctcgacgccttgttcccgaggaatgcacttcaggaggattccgttagccgcgcgccgatagagggtcccttctaccagcacgtagcgtttggagatgcgctggacgcgttcactcccttcgcggtcctcgggtagagtcttatctgtgaggtatgcttggatctcagcgatccaagcaatcaatctaagggagctaggagcgctcccctcgggtcccgaggcctggactccgacgggcatcgggggcctgtcaggcacgtccgtctcccctaaggggtcgggtcgcgccgacggctgggcaagcctttcttcaaaggtgcccggtggggtctgggctcgcgaggaagcgagccgtgagagttcgtcggcaaccgtgttatcccgtctgggcacgtgccgaagctctatcccgtcaaaatggcgctccatacgccgtacttggcgcacgtaagcgtccatctgcgggtcatagcaccggtactccttgcagacctggttaacgaccagctgggagtcgcctaacaccaggaggcggcggatccccagtccagctgccaccctgagtcccgcaaggagtccctcgtactctgccatattattggtcgcccgaaagtcaaggcgaaccaaatatctgaggacgtctccgctcggcgaggtcaacgtgacccccgcaccggcgccctgaagagacagggagccgtcgaactgcatcacccagtgggcggtgtgaggcggctgcgaggggcccgagctggcctcggggactgagacgggctcgggagctggggtccactctgccacaaaatcggcgagggcctggctcttgatagtgtggcgtggttcaaagtgcaaatcaaactcagaaagttcgattgcccatttcaccacccgtccagtaccctctcgattatgcaagatttggccgagggggtaagacgtaaccaccgtgacccgatgcgcctggaaataatggcgcagtttcctcgaagccatcagaatagcgtaaagcatcttctgggcctgagggtatcgggtcttggcgtcccggagggcctcactaacaaagtagacgggccgctgcacctttcggtggggccgatcctcttcgctaggggccatatccctggggcgctctttgtccaagcggcctcgcggggtgcactcgtcttctgtgccgacgacctcggggtcggaggacgacaggggcggccttcccacagtggcctcggggccgtcctgggggtcgggggctcctggcgttgtcggacaagcgggcaaagggccaactccggtcgtcaggggccttaggccaccgttcggctcgggggcctcttctccctgctctctcccgggtcgagtcggcacagggttagcctcggggtcagagggcgataggtgcggccttcccgcagtggccctcgggccatcctgggggtcgggggcacctggcaccgtctgacaagtgggcagagggcctgctccggtcgtcgggggccttgggccaccgttcggctcgggggcctctcctcccggctctctcccgggccaagccagcacagggtgggggtgcgcggaatgaggattgtcctcatcgcgctccaccaccaacgccgcactaaccacttgcggggtcgccgctaagtagagtagcaagggttcatttggctccggggcgaccagaactgggggagagctgagatacgccttcaactgagtgagggcacgttcagcttcctccgtccaagtaaacggcccggagcgtttgaggagcttaaataagggtagcgccttctctcccagcctcgatatgaaccgacttagggcggccatgcaaccggtgacgcattgcacatccctaagcttgctggggggcgcgcatccgctctatagctcgtatcttctcggggttggcctcgatgcctcgggcagagaccaaaaacccgagaagcttgcccgcaggtacaccgaacacgcacttatcggggttcagttttatgcgggcggagcggagactctcaaaagtttccgctagatccaagagtaaggtctcttggttgcgcgtctttacaaccaagtcatcgacataagcctcaacattacgtcctatttggctacccaaagaaattcgagtagtacgttgaaaagtaggacctgtattctttaacccgaagggcattgtcgtataacaataagttcctatgggggtaatgaatgcagttttttcctcatcctccctagccatgcgaatctgatggtaacccaagtatgcatctagaaaacacaaaaggtcgcaccccgctgtggagtcgataatctgatctatacgaggcagggggtaagggtccttaggacatgccttgttaaggtcggtgtagtcgatgcacatccgaagcttgtcgttcgccttgggaacgaccatcgggttcgccagccactccggatggatgacctcgcggatgaatccggcctccagaagtcgcgccacctcctcgcggatgaaggcttgacgttccggggcctggcgccgcactttctgccggaccggccttgcgcccggccgcacggcgagacggtgctcaatcacctccctggggaccccgggcatatccgccggtctccatgcgaagacgtcagcgtttgcccgcaggaaagagacgagcgcgtcttcctatttgccgtccagaagaccaccgatccgtgtggtcttggacgggccgtcgcccagggcaacctccttgaccgggacctcgtcgcatgtgactatccactgcctcggggcggcgggggcaggggtgccaagcctctcgtcgcctccctcgggcttggacgcggcggcgaggtggtccgcgcgctgctccatacaagcaagcgcgactttgaggtcgccatggacagagatggggccaccggggcccggcatcttcatctggaggtaggcgtagtggaccgccgccatgaacttcaccaacgcgggcctccccaagaccgcgttgtagggcagactgaggtccgccacgtcaaagttcacccgctccgtgcggaagttggcggatccaccaaaggtgaccgggaggtcgatatgacctagcggccaagtgtgccccggcgtcacaccgataatcggctgggacggccggagcaccatccccggggccttgatggcgtcaaaggctgcgggggaaaggatgttgagggctgctcccccatcaatgaggacacgccccagcttcacgttgcaaacagtgggggaaaccaccattgcgatctgtcctccccgggcaacgcacggtgggtggtcggtctggtcgaaggtgagggcaacctccgaccaccgcgcccggcgtgtcgcctcatgagtaggggccgcggccagaagctctcgcttcatggccttgaggctccggcgagaaacgtgagcacacgctcccccatcgacagtggcaatggtggccccaggctcttggaaacctaggtcatcatcgccgtcatcgatgtcctcgacgggggccttctgcttggcctcacttcgccgattgccggaaggaaccgccggggacttgccctctcggcgctcctgcctcctctcctcctcccacttcctcgtccgctcagccaaacttttgactgcgcggcagtccgcgaggtcgtgaagggaagtgttgtggacgatgcaccacttgccggttgggcgctccctgctgggagcgccggcctccttctttttgtcgcccgcaggcctcccctttcgggtggcccgcgaagcgccctcgacggcgaggacatgaccctcgtcgtcggaatgggctgacctcttcttcctcctcctgtcatgccgccctgtctgagcagcaaatccgggggcggccgaagctgccacaccggaaccggaggggttccaggtccatgcctcttccttacgagccactcggtccgcgagctaaaaaagctccgtggtagtctggggctctttggaggcgatcttttcgagcatgcggttgtgccgcacaccccccctgaacgcgtagatcaccgcgtgtgcagggatgcatggtatggtgttgcggacttgacagaaccgctgaatgtatgagcgaagtgactcaacatcccttcgctggactgcatgtaagtccacttcttcacctgggcgcggatatgtgccttgaaagttcatggtgaactgttggcacaaatcctcccaagagtggacggacgcgggtggcaagttcattagccaaccccgtgcctgtcccttcagggccatgggaaagaaattcgccatgaccctgtcgtcacccccggcggcctcgatcccggtcgtgtagacctggagaaactcggcggggttgacgctcccgtcatatttttcggcgatggtgggccggaaccttgggggccaacggacgttccgaaggctcgccacaaaggctctacagccgacaccaccaaccgggggcacggagggctgatccccgcgtccgtgttgatgtgacactccggacgaggaggcgccctccgttgcgtgggcagcacgccggccattacgccagcgctcgatactgatgcgggcatccggccccccacgcagatcttcctgggtcggaggcgctgacgaaggagtggcggctgaatggcgagcaacagccgccgctcgccgcgccctccgccttgacgacacggagccggtggtagcagcgccagaggtcttggtggcggaggaccgcccaccagcacctaggcgctgccgtgccgtcatgaccaagttggccacgtcgtccagccaacgttgggctggagactccgggtcagggacaatgggcgggtgacgtaggagcgcgcccgcagcttggagcgcgccctggggcgtgctgccgtcgccgtagacaaggaggcgacgctccccatctcgccgtccttccccatcacccgtggatgtcgaagtcgcggatccttcgaccctctcgagcgcctcctcccgcctaggactttggcgtggagggggcggtggagtacgatctcgacggcgtgggttcggctccccatcgtcaccgctaacactcggagagaggttgtgcgcctttgcttgttcggccattgggctgaacaggaaaagcttggcgcacacgaaagaatgcgagagcttagaaaaacacacgcaaagccccctacctggcgcgccagatgacggagcgtgaggctcctcaccgggagaccgcgcaggcccccctttgccggttcggccgggggccctgggtgagattctaagctcctggtctgagtgtggaaggttcgcgagagtggaaacacacaagacacgggcgatgtatacaggttcgggccgctgagaagcgtaataccctactcctatgttttggtggatctgtgtatgaagaagctacaaagtgcgagccagcccccgatcgttcccggatcgtttttttcctcccttctctaagtgggcaaggtcctccttttatatctcaaggggataccacatgcaccatctctccctctcacttctcttctcttcgttaatggacggagatttgtatggctgccgtccgaatgaccttctgatgggacggcccatacctacctccacttccgccggaagcaggcgcaacgtgggaacatggctgtctgctgacgacatgaccattgtcagaccggtcacaaatcggtcactcttgtccaccacgtgtcagtttaacaatctgcatgttcgcccttctccatacaatatcttgcctgtaatggttaggatgaagcctggcgtatatctgaccggaaccaacgtgccatctccaggaggtaacacgccggctccggctagggacgagtgcttggaggctctcgtcctgacgggatggggcgaggcgtacgtcagaccgcctgtcgccacctaatccacgatttgaccggtctgtgactgatcacagaccggatgaacgagcgcgctgcactgcgttacatgcggcgtgacgcgctcgtccaaaccgcaataaatgcggttaggtgagcgccgctgcgctcacctaacccatacacgcggcgcaaaatccacaaggggtcggggcaccccagccctcggggccgaaacgggagcggtccgacccctcggggagacaaagagaagggcggccgtatcaccctcgggcccgaccccctcctcccgagggggttaggccacgtgggtgatcgtgtctgcctcaagtctctaagtcatgatactcccggtcccatgtcaccgacagtagcccccggcgttatgccagggcgatcgccctcctcgagggaagcggtcgggcgtgacgccacttcctaaggcctggtgacaggtggggccggtctaaaaatcgggacaagccggttcgtttttcctggagatatggtgatggcgctttgatcggcgagcgtaattaacgcgcgcacgagatgttccatctcgactgccacagcgcgcacgagaagtacagtcatgttgggctgcggacagatcccgagctcacaactgcattacaaaaggaaagcggaagccaggacttggaccaatcatcacaggcgcgacttgggaactaggccgaaaccctaaaactcatcgtagccgacttgctcctggaagaactcctcgtcagcaggatccacttcatcttcttcagcaactgggggggattatttatatagagcaagggtgagtacgggagtactcagcaagccaggggaaataagtgtttaatgcaggcttcaaggaaaggctgttgtttttgtaattgattttatttgaactctttttctaaaacaactagatgagtgcttctcaaacgacacggatgagacagtgcgtctcatccggtcggagtatgtgcaatgtatcagtctttaggattgcaacaaggttggcacccggccaacagcttttcaaacggccacccgggccaacaacttttcaaacggccacccgggccaacaacttttcaaacggccacccgggcctagctgatcccatcagctacagatttt

SEQ ID NO: 19933 - DNA, 14635 bp, Oryza sativa
tgacaaggcatttcgaaagccgacacaggtttaccatatgccgacgagaggggtcccagaccaacaacaggttaggtcccagaccatactgtgccaggaagcccaggggtcctccccgacaccaccccggcgaatccacatgtctctcggcatcaaggctcccccgattagcaatttactcagccaggggcgtcccattccacccatgtggtcgtacttgtcttatgttcggatgaaattccaaggaaacggtccttaagtgcaagagcgggaaaccgtacacccggtacgttccccggtccgcggttttggaaattcatttagttcgcaagcaccgacccaggtgtcgggttttccaagtcttttgtaaacctaagttttacccaagttgttactcagattttaaatttgaaggcgaccgtcgatactcgcacagagtgcgcgagtatcgaggcgcagctgggtggttacaaggggacatggtatagcaattaacaaaggaaggatcaaatgcgacaaattaggtaggtccgccaatctgccttgcagacgggacaaacagattaagtgcgatcctatcaatgcataatattttgcaagcaacataattaaatttcaaatataggctcaagatgttcaaaggtggcttgccttgctcgagatctggagcttgatcctcgaaatcctcgcactgcgggtcttcgggctctgaaactacacgggaaacgggacaactcaacaaacggcaaaaataaagccctattaacgacctctaagcgtgccataagatcgatctcgagatttggggaattttggaagttgaacggagtcaaacggatttacggttgggaagatattgaatttctaagattattgaattttttatctaaaggaaaaggatttaattaaatcctttttggaaaagaaaaagaaaagaagggagggagggaatatagacttttctcggacggctagggcgcggcccaagagaaatggagcggtccggccgagctaaatgggccggccggcccaaggcggcccaaactcgcgcgcgcgcgggagggaggagagagagagccggtggaccgggctcaccacgcgcggtcccgggtgggacccgcttgtcagcggctcggctcaccgtgcggagggagcacgcgacgcacgcgcgcgggcggggaagggacgcggtgcatgcgcgcggtccgcggtggacgcaggtgcggcgggcccacgcgcagcctcacggctcgcggtggatcgcgcgcacgcggagggaccgaccggggtcggcccgacccggtctggctgagctggcgccgacgtggcgcctacgtggctgccacgcgggccggcgggaggtagacgacgacccggccgcgaatggacggcgggcggcggcggcgagcggcggagcgaaccacggcgatacgggcaacagcgagcacaccggacggttgcacgtgacaaggggaggcgagccaacggctcggattcgccggaggttgctcgacggcggcggattgcggcggcggcaaccggcggcgggagaagagggaaacggcgacgaggtcacgagaggtcgattcccggcggtgagagcatctacgcggcttcgggaactcgacggtagcgtcggattgggcggaactacgccgagcgaggccggcgacgagcgggtgctacggagctcgggcggcgacggcggcgagcacacggcgagcgacggcaacggtcggggcggcgccggctaactacggggagtctactcaagctactaccgaaagctagggggaggagatggagcgaggaggaagaactgagagggacactaccgtgcgggacggggcgcagtgacgagaggccgacggcgcgggagtgatctctccggcctcgggccgaggaagaggaagaagagggcgcgcccggagtccccttccgcgtccacgaacgcaccggctcacccggcgcttggcaatggacggcggaggcgaggcagagcacgggagcggcggcaacggtgaggaggcgaatgggagaggaaaggaagggagggggaagacgggtttaaatgggcggcaatgtcggtttgagagaggggaaccgacatgggcggtcaagccggcgagctggcgctccggctagcgtcccaagcggcgacaggaggtgacgccggcgagaggggaaaaaggggagaaaaagaggaaaaggagggagagaaagggggctcgcccctttgccgattcgggaaaaggaggagggagcggggtgactcggcagggggagaggggctctctgcctccgccccttggaggctagcgcgcggagtggctggggccgggcgatgacgacggcgatgacggtgggatggtttggagcggcgcgacgacacgggtgacaggcgtgggctggcgcggcaggggggtgacggcggcggcgaccaggcggtcggccactcggcacgcgcgcgcgggaagcaacgggcggcgcgactgggcagcgggaccgggcgacgcggacggcgcagacaacgcggctcgggcgggaaaccacgcgggcgcgcgcgcgagcaacggcgcgcggggccggctttgcgagcggggagcttgcgcgagaggagggggcgctcggcgcggctctcgcacgcgcgagcagcgagcgggggggaggggaaacgcgccggggtggggagggagcgagagagagagagagagaaagagagagagagagagagcgggagagcgcccgggggggagagggagagatgggccggggaagaggggaagatgggccgagcgagattcggcccatcgacctcgggggaggcaaaatagacttttgcggaggaatttgatttggaaggatttggattcggaattgaactcgacgatagatcggggattgagatcttgagatggcacggacactagacaacaatcaaagaaacaaatttcgcaattagggtttttaagagataattttcccgctaggcgccacgacggaacgggcgctacagaccaacccccctaacaagaatctcgaccccgagattcagcacctaagggagcaggtccgggaactcggcgcggagaagatcttctcgttcccaggttgcctcatcttcagaatgattgctccattggactttgtagaacttgatggtcttccttcgagtctgacgttctgcctcttcaagaaccttgatcggtctttccttgtaggtcagattcttttccagctcgatattacccaggggaacttgctcttctggaactcgaagacatttctttagctgggatacgtggaacacgttgtgcacatctgcgagaccttcaggtagctcaagctgataagccacttcgccacgtctggcggttatgaggtaggggccgatgtagcggggtgctaacttgccggacatcccaaaccttctcataccacggaggggtgatacccgcaggtacacatgatctcccttttcgaactcaaggtcacgcctccgattgtcagtgtaattcttatgacggttctgtgctgtcttcaaacgttctcgtatcagcttaacttgttcttctgctgacttgagtatgtcaggaccgaataccagtgcttcgcccacctcattccagcacaagggggtgcggcactttcttccgaacattgcctcattcggcgacatctgaatgctggcctgataactgttgttgtatgagaactcagcatacggcaaacaacgatcccaagtgccttcgaaatccaaggcacacgcacgcagcatgtcttctaggatttggtttaccctttccgtctgaccatcggtctgtggatggtaggccgtactaaaatttagatcagttccgagggcttcatgcaactgcttccagaaccttgaggtgaactgagtgcctcggtctgacacaattttcttgggacagccaaatctacatacgacatgggtcatgtagagttctgctagtttctttccatcataggtggttttcactggcacgaaatgagctgatttcgtgagtcggtccacgattacccaaatggagtcgtacccgttgggggttcttggcaaaccggtgatgaaatccattccgatctcttcccatttccactcgggaatcggtaggtgacggagcgtggggctcctcaccgggagaccgcgcaggcccccctttgccggttcggccggggaccctaggtgagactccaagctcccaatctgtatgtggaaggttcgcgagacaggaagcacagaagacgccggcgatgtatacaggttcgggccgcttagaagcgtaataccctactcctgtgttttggttgattcgtgtgtgaaggagctacaaagtatgagcctgcctctcccttgttctgggttcctaatctggaaaagtccagtcccaaaaaaaaaacctccctctctctcagtgggcaaggtcctccttttatatcttaaggggataccacatgcaccatccccccctctctgtggggacttaccctaccttttcataaatggacggagatttgcatggttgccgttcgagtcaccttctgatgggacggcccgcacctacctccactttcgccgggagcaggcgcgacgcggaatcatggctgtctgctgacgacatgaccagtgtcagactggtcacaaatcggtcattcttgtccaccacgcgtcagcttagcaatctgcacgttggcccttcttcacacaacattttgcctgtaatggttaggatgaagcctggcatatatctgaccaggactaacgtgccatctctgggaggtaacacgctagctccagctggggacgagtgcctagaagccctcgtcctgacgggatggggcgaggcgtgcgtcagatcacctgtcgccacctaactcgcgatctgaccggtctgtgactggtcacagaccggataaatgagtgcactgcaccgcgttacatgcggcgtgacacgctcagccaaaccgcaataaatgtggttaggtgagccccactgtgcccacctaacccatacacgcggagcgaaaacccacgaggggtcggggcgcctcggccctcggggccgaggcgggtgcggctcgaccccctcggggggactaagaggagggcgaacacatcaccctcgggcccaacgtcccctgagggtgccaggccacgtgggcgattgtgtctgcctcaaacctctagtcatgatactcccgatcccatgtcaccgacagtaggggttgcagcagaccggctggcctctgatgctctgccttgactctttggcaaatgtcacacaaggctacgtattctgtgacatctcgcttcattccaacccaccaaaagtatgccttgatatcttggtacatcttcgtacttcctggatgaatggagtaagcggactcatgagcttcctttaggatgagatctcttaactccttcttggccggtacacagatgcgtggaccgcaccaaactgtgccttgatcgtctatggagaagttggtgtctttcttctcctgtattctttttattaattcttttatcccttcgtcgtctttctgagcctcccggatttgcgactctagggtaggctgtactgtcaagctagcagggacacctgactgtaccacggtcagtcttaacttctccaattctctgcacaggtgatcttggtcaggccgtatttgagctatattgcaataggccttgcgacttagcgcgtcagcgaccacgttggcttaaccaggatgatagtggattccaagatcgtaatccttgattagttccaaccatcttctctgcctcatatttaactcggtctgtgtgaagatatatttaagacttttgtgatcggtgtatacttcacatctgttcccgattaaataatgcctccagatcttaagagcatgaaccacggttgccaactcgagatcatgggtgggataattgacttcatgaggcctaagctgcctggatgcatatgccacaacctttcgttcttgcattaggacacatcctaagccttgtcttgatgcgtcacagaagatctcaaaatcttttcggatatctggcaaggtgagaactggtgcagtggtcaaccttttcttcatttcttgaaagctgtcttcacaggctgtagaccagtgaaatttcttttccttctttaacagctcggtcataggtctggctagcttagagaatccttcaatgaatcttcgataatatcccgctaagccaaggaagctgcggatctctgacacattcttgggcgggttccaagcaagtacagcttcaaccttgctgggatctacttcgacaccgttagaggagatcacgtgtccaagaaatgctactcggtccaaccagaattcccatttcgagaatttagcgaatagttgatgatctctgagcttttccattatcagcctcaggtgttcagcatgttcttcctcgttcttggagtatatcaggatgtcatcgatgaacaccacgacaaactggtctaggtattccatgaaaattttgttcattaagttcatgaagaatgctggagcattggtgagtccgaaggacataactgtgaactcatatagaccataacgcgttgagaaagcggtcttcgggatatcttcagatctgattttcagttggtggtaacctgacctcaagtcaatttttgagaaaactcttgctcctttaagttgatcgaataaatcgtcaatccgtggcaacgggtacttgttctttatagttacttcattcagggctctatagtcgattaccattctctccgagccatcctttttcttaaccagaagcactggggctccccaaggggatgagctaggtcgcacataacctttactttccagttcttcgatttgtcttttaacttctgctaactcattagctgccattcggtatggcctttttgcaattggtgcagtccctggtgccagttctatggcgaactcaatctctcggtctggtggcatactcgttaattcttctggaaatacgtcgggatattcacagactatgggtaccgactccaaggaggtgacttgtagactggttaggatagaccgacttgcggtaggggtgttaggggtaaagcggacttgctttcctccaggtccttgcaaggtgatggacttttcggcacaatctatctgtcctttgtgcttagccaaccaatccatccctaggatgatgtccaagctttgcgagtctaggactatcggtttggctaggaagtcaacttcctcaattttaaggttaacttccgggcatatttgagttgcccttatattccttccaggggaatgtactatcattggtacacgtaaattttgggttttccaaccgtttcttttcacaaaagcttgtgatatgaaagaatgggaagctcctgaatcaaatagaactattgcgggtacggagttgacagagaacatacccatcacaacgtctggagcatcctgagcggtttcagcttgaatgtgattcacacgtcctcgaccaaagtggttggaagcacgagaaccttgtccacttgcctgagagctaggacgagactgagctgccgctggagtaggagttttggcgatgctgccattagcatgccctaagttggtgttggtaggattctgagggcactgtctagcatagtgacccatctggttgcaccggaaacactgaactactgacggtccctgtggtgagttgaaagaggtaacactgtttggcgcagtgttgccactaggggcacactgctgtggcggaggtgtcggacggttcatctgagggcgaggggcgtagcctggctggcggttagcctgagtgaccgactggtggtattgcatgggttgaccgtagcgagggcgaggtgtgcctcgggaagaatttccctgatggttagacttgcgtttcttgtattcttcggtagcctcttttctggcatcctcaagcagaagtgccttgttgatcatatgttgaaaagtggggaagtcatgagcaagcaactggagtctcattccaactgcgattcgtttcaagaatttcctgatcttcttcttatctgtgtctacttcctcaggggcgtaccgagccaacttgttgaactgacttaggtactcattgacactgctgttgccttgcttaagtctgttgaattcttctttcttcatgtcaatagtgctttcaggcacatgagctgcacggaaagccgtagcaaactcatcccaagcaatgttagtgggttcaggatgtgcattgcagtaattctcccaccaatctgcagcaggtcctcttagctggtgagaggcgtagagcgtcttctcaacaggagtacactgcactaagttgagttttctatcaacatctttcaaccaatcgtcagcctcgacgggctcgacggtctgagagaactctggcggacgtgacctcagaaaatctgtcagcttggatctattgttgcccacgtgagggtggccatttccatgcgcattatgctgaaaactggctatggctgtggttagtccttgcaagatttgtgtctgaactgccattatgtgttgcatgttgttttccacatgaggtggggaagggaggcgttcttctccagaattgtgactggcagtgcggtgagagcggtgagactgttccatctctgcatcacgggaaactgcgcgatgcgagcggctgccgcggcggggttgctcaacttctgcgttacgggaagcagtacgatgcgaacggttgctgcggcgagactgctcattagccgactcatgattttcttctggctcaactctaccatcttcaaaaccaaagcgggctggtgcacgggctgcacggcgggggcggctagccatctaaactcccagaagagggcgggataagagtcagataagcacttaggagggcaaggagcaaagcaaatagcaactcagatagcacacactaggcataaactggatttttcaaatcataaaaacacctgatacaacgggtgtggacaagtcacagagctacgccgagcttgactgtgcgcacaccacctaggagaaccagactaccaaacaacacccacaacaaacacacgcacgcactacctcgccacgactccaaaagagttggcggcgtgtcgcgaccgagaaaattgccttttcccgaacgctagtgtattaatccccgtcccaggaaaagctggggtacaccatacaaacatgatataaaagacacatctttattatatcgataatatttacattattacaaaggcacttaaggcctgacaatcaaaaataaacagcagcggactagcgggcctacggctccatcttcacaagcgctcaactggggtataagccaggactccacctaagacttcttctccaaagcttctcttactgaagggggaaaagattgagcaagaatgagtacaaccacagtactcagcaagccacaccggagatgcataattaatgcaagggagtacaaggggataataatataggggttaagttttgcagtaaacagcatttaaaagtcacttagttgcccaaagccattttataaagacgatcctagagctacacagtattattaatcaaggtcgtgaaccctcacgaacctgccttaacccaaggcctacgatgattcagaccgaactggcaacccgaccctgggtcccagctcgtcccaagccaacccaggccaaccattccacattttagttgttgagcaaattttaagaattaaaacactaacttgggtacattgctcggcttgcccataaccgagggcgcggctattcgaatagattatactctgatcagaggtgtacatctttacccacaagacacatcttcctcacgtgtaaccacgtgccacataccaccacggtatacggacggaagacgtgacatagttcccaacccatcctagccataaacaagagtaccgacccaaccccacctacggccggaacccccgggacaggcaggcaggattgagccccctagcagcaggacaccagccctgtgccatgacatctcgactaccgggccgcagctcgtgtagccttcatttgtcctagagatgtccatcgacccccgacttcgtccatctccatccgtgtacttttgtttacaaccagactgagccacaaactaagccttacccactagacatgtggaagtacggtagtgctttgcaacagaggcccgagcttaatccttatagtggccggggtgctacttcccacaactggcatgcacccaaaccccaccgaaaaacaggttttaggggctttgaaagaggaagagaggggtatgtccaattccaccataagccaaccattccatagtgtccaaatgatatgagaattcccaaagtctaaagttataaaaaccacctaatgttgtccaatttaatcagcgaagcatctacctaaattcatactagtggaaccatgaatagagtacccactagttggggttttgttttcctagggtgaacaaggtaataataacaatagcaataataataaggtcataacaaaggtaaataggcatggctaaataaaacagtgataacgcaggaatttaaataaagcgataatgcattaatttaaatcaaaataattttataaactgggattcaatatgctcaaggatgatgtgacttgccttgctcagagagaacggccttccgaaccttcggcgacgaccacgaaccacgcttcgggaacctccggaacgacgaaagctacgcgaagcacacaagcaaagctacaagcctataaagaagcaataacaacacataaaaagaaagcacagggttctttaggttatatcaaacattaagagacttgaacgggtcgattcggagctcgcatgaccaagatatgatcatccgaagtttaatgctgttatatggagatttgcggattattataattaagctttgcaactataaaacaggtgtaagcgctagcctggaaaagacaggaaggctgcgccgttgacatgcggaccccacatgtcaacctaaaggaccgcggtagaccgggtacacagagacggtccacgggtcgacggaagcggaccgcgtgtgtcaaccgaggcgagtggccaacaaacggagtccactagacaccacacgggctgcacacgtggaaaccacgcggctaccgagcgggcacactaacacggtcaccacacgcacaagcgaacgactaccgacaccggtacacgggtaccggggtcgacaaccgcacaacgagcacgggcgacaacgaaaggacgaggacggggcagcaagaggggagaccttaccaccacgcgacgaggcgtgggaacgacaacgacgaacaggcgcggcggagacagacggcgagggaacgacttcggcggcgatccttggacgacggcgagacgcggccggcacgaggcttgacgacgcggaggcgaggacgaagacgatgacgggggctgcagcgaccttgacgaaacaccgaggacggacgagaacagctcgacggagggacgaacgccccgacgaccgggaacgacgagaggacgacgacgacgacgaccggggccggcgaggagacgatgagggcagccgacgacggcgtggaccacgccgctgcgatgccgacgacggaggcggcgccgcgagacgacgagccgggtgaccgatgggacgtcgacgacgagaacgatcggagacgacgatgatggaccgcggaggggtttggatggaggggaagcgaggccaagggcgaccttgccgctgcgatgccggaggtggtggtgccgcggctgaccggtaaacaagcgaggaggaacgggcggccggaggactccggcgaggcgggtagaggggttggtggcgacacggcggcttccgggcgaaaccgaggggtggacgaggtggagggctacgtcaccgtgccgagggaggggacggcagcgccggctgacgcatgggcatggcgaaaggggcagccggaggagatgccgccgaggaggaaggagaagccggcgcgggcgacggtgttccggcgaaattcgggcgaggaggaggagatgccggggatgagggcggcgtcgcggagtcgagggaggtggtggcgacgtcgaccggcgctcaggcagggagatagaggcggctggaggcggccgacgcggatgaaagggaagggcgacggcgggaacgcagctccgggggtctccgcgggaaacggagggcaagccggggaaggggaggcagctgcgatgctggaggaggcgacggcgcgaccggacgacgctccggcgaggagggagagacggctggaggcggccggcggcacgggagagagaggaggacggcggggagagggctagggaccacgggagatcgcaggagggggctaaaacgatagaacggagcgagggggttgcattttatagcggagggaagcgagccgagcacgggagagggcggaacggcgacgggaatggcggccggcggcaaaggaaggcggccggacttggcgcgtccgttcccggcgattgggggcgccattcaagggggaattaagggggaaagagagaggagggaaaggggattaattccccctaatcaatttgggaatcccatgcttgaatcgcgcggatttgagggaggaatggcgctagggttcacgggagagggagagaggacggccgggcgggaggaggacgatgacccgcctgacgcgcgggccccacgcggccggacgcgcggtcagcgcacgcgcggcgcgcgtgtgcacggccggctcggctcggcctggcttgggcgcggcttgggccgggcggccggcccaggaggagaggagggggaggcggcctgggagaaagagggaggaggagggagtgggccgggaggggaagaggggcccaagaggaggagggagagaaggagagggaggagagggagacttcggccacgggccgaggggagagagggaggactttgggccagattatttttaggttttttttctttttaataaactctaataattgtttttgttgcttaataattatttccggtgctctgaaaattccacaaaaatttgagggctctttttagaccaaggagaatttaacaaaaattctccgtgccacatttgaatttttcttgtacgtattttaatgtttgccaatttcttttcgaattttaattaattctattattccttttagggaatgatttttatttcgggatgaatttatcaggacgtgacacggcggaacaaaagggcctatcacacggacggctgctgaagactgcctcctctactcctcgtcggcctggctgcctcctgtagtcggctcctcagtcgaagaaacgtcgatcggctgacgcgaagggaccggcggaacctgtcgagggccggcagcagcacgggccgctggcggtgggggagctgggtagtggaaacggaacacggtggaagaaccaacaacacgcttccgcgcggtgcggataaagcgtgggccacggcgggaggaagcaactggggtgtgtccgggggtgtaggaagggctaactgggtgtgggtagggagagtacactggtgagtacggcgcacgcgagctgggggagcgcgggccactaggagtgcgggcagagccgcgggagctgtgggaggacaggtggctggcgtggcagaggcggcctgagtcccaagagatagtgtcaactgaggtgacaccctccacggccaaacgggcctccaaagcggcgtagcggcgggcaagggagcggtaagcctcaaggagtaggtcgtgctgagtggcctgagcctccgaaagctcgaccatgcgagtcagcactggctgagactcgctgtacggacaagggtacctggcgtctgagtggccagagggaaggcgtggaagctgccggaaggcggaacctccgagacggtggctgtagtcgtgggccaggcgacgaagcgcagtccaggagaggtcctggtacgcgatctggagagtgggcctggccacagtgaagtggtgggggcgaaggccagctccgtgtatacctccacgggggtaaaggtacacagagagcgagcgacggcaacggtcggggcggcgccggctaactacggggagtctactcaagctactaccgaaagctagggggaggagatggagcgaggaggaagaacggagagggacactaccgtgcgggacggggcgcagtgacgagaggccgacggcgctggagtgatctctccggcctcgggccgaggaagaggaagaagagggcgcgcccggagtccccttccgcgtccacgaacgcaccggctctcccgacgcttggcgatggacggtagaggcgaggcagagcacgggagcggcggcaacggtgaggaggcgaatgggagaggaaaggaagggagggggaagacgggtttaaatgggcggcaatgtcggtttgagagaggggaaccgacatgggcggtcaagccggcgagctggcgctccggctagcgtcccaagcggcgacaggaggtgacgccggcgagaggggaaaaaggggagaaaaagaggaaaaggagggagagaaaggggg

SEQ ID NO: 19934 - DNA, 6254 bp, Oryza sativa
actttatcttcccaacccatatcttttgttttttttttgcggggaacccatatcttttgtttttgtagcgcccgttccgtcgtggcgcctagcgggaaaactatctcttaaaaaccctatttgcgaaatctgtttctttgcttgatgtctagtgtccgtgccatctcagatctcaaatccccgatctatcgttgagttcaatcccgaatcacaatccttcccgaaagtccctccgcaaaagtctatttcgcctcccccgggttggatgggccgaatctctctcggcccatcttcccctccctccccggctctctctctctctctccctccctcccgggctcactctccgctctgcccgcgcgccgtgcgcgcgtgcgcggcgccgagccgagccctccgactcggcccccgcgcgccgttgttcgcgtgcgcgcgcccgcgtagtcgccgcccgtgccgcgcctgcgccctctgcgtcacccggccccgctgccctgccgcgcctgccgccgcgcagccgctcggccccgcgagccagcacgcgtgcccgagccgcgccgctcaaatcgcccccgccgtcatcgccgtcgtcatcgcccggcccctgccactccacgcgctagcctccaagggacagaggcagagctcctcctccctctgccgcgtcgcccccgctcccctcctccttttcccaaagaggcaagggacaagccccctttctctccccccttttctccctttttccctctcgccggcgtcacctcctgtcgccgttttggccgctagccggagcgccagctcgttggcttgaccgtccaatgtcggttcctctctcccaaaccgacattgccgcccctataaacccaagctcctcctcctccaaatctccctcgttttcgtctctcgccgccactgtcgccctgttcgccatcgccgttcgtcgttgcgcgtgtcggaggagccggcacgagcaaggacgcggaaggggacttcggccgcgccctcttcctcctcttcctcggcccgaggccaaaacgatcacgtttcgcgctgtcggctctcgtcactgcgcccgcccgcacggtagtgcctccctccgttcttcctcctcgctccttctcctccccttagactcgggtagtagcacgagtagcctccccgtagctagccggcgccgccccgactgctgccatcgctcgtcgtgtgctcgccgctgtcgccgcccgagctcggaagcgccgctcgtcgccggcctcgctcggcacagctccgcccaatccaacgctagcatcggattcccgtagccgcgtagatgctctcgccgccgggaatcggcccctcgtgacctcgtcgccgtttcccccttcttccgccgccggttgccgccgccgcaattcgccgccgtcaagctccctccggcgaatccgagccgttggctcttctcccctcgtctcgtgcaaccacccggtgtgctcgctttcgcctgtatcgccgtggttcgctccgccgctcgccgctgtcgtccgccgtccgttccggccggcgtcgtcgtctacctcccgccggcccgcgtggcagccacgtaggcgccacgtcggcgccagctcggccaagaccgggtcgagccgaccccggtcagccgctccctccggccccgctcgcaggcgcggtccaccgcgagccgtgaggctgcgcgtgggcccgccgcatccgcgtcctccgcgaaccgcgcgcgtgcaccgcgtcccttccccaaaccctagcgcacgccgcatactccctccgcacggtgagccgagccgctgacaagcgggtcccacccgggaccacgcgaggtgagcccggtccaccgtctccctctctcctcccttcctgcgcgcgctctcggccgccttttgggccggccggcccattaagctcggccgagccgccccttttctctcgggccgcgccctagccgcccgagggaagtctaatttccctccctcttttcttttcttttcttttctttttccaaaaggatttaattaaatccttttcctttagaccaaaaattcaataatcttagaaattcaatatcttcccaaccgtaagtccgtttgactccgttcaacttccaaaattcctcaaatctcgagatctatctaatggcacgcttagaggtcattaatagggctttatttttgccatttgttgagttgtcccgttttgcgtatagtttcggagcccgaagacccgcagtgcgaggatttcgtggatcaagctctagatctcgagcaaggcaagccacctttgaacatcttgagcctatatttgaatttaattatgtttcttgaaaaatattatgcattgataggatcgcacttaatctgtttgtcccgtctgcaaggcagattggcggacctacctaatttgttgcatttgatccttcctttgttaatttttatatcatgtccccttgtaaccatctagttacgcctcgatattcgtgcaccctgtgcgagtatcgacggtcgccttcaaacttaaaatctgaaaaacttcttgggtaaaacttgggttttacaaaaggcttggaaaacacgacacctgggtcggtgcttgcgaactaaatgaatttccaaaaccacggaccggggaacataccgggtgtacggtttcccgctctcgcacttaaggaccgtttccttggaatttcatccgaacataagacaagtatgaccacatgggtggaatgggacacccctggctaagtaactaacttatcaggggagccttgatgccgagagacatgtggattcgccggggtggtatcggggaggacccctgggcatcctggcacagtatggtctgggacctaacctgttgttggtctgggacccctctcgtcggcatatggtaaacctgtgtcggctttagaaatgccttgtcatgaaagcttggaggtctaccgacgtggctgatccccacaggctgggtgatccgggttagtaatgtcgtgtgggtaaagtgtaccccctctgcagaggttaacaaactgttcgaacagccgtgcccacggtcatgggcggatgtgaggtgattcctagcgtagttttgtttgactactgccttgtgaaattgctgttgtgaaaaggggatcgttgtttggaaaatctgcagctgatgggatcagctaggcccgggtggccgtttgaaagttgttggccgggtgccaatcttgatcaattttaaagactgatacattgcacatactccgaccggacgagacgcactgtctcatccgtgtcgtttgagaagcactcacttagttgttttcagaaaagagttcaaataaaatcaattgcaaaaacaacagccctttctttgaagcctgcattaaacacttatttcccatggcttgctgagtactcccgtactcacccttgctctatataaataatcccccctcccccagttgctgaagaagatgaagtggatcccgctgacgaggagttcttccaggagcaagccggctacgatgagttttagggtttcggcctagttcccaggtcgcgcctgtattgtttggtccaagtcttggcttccgcttcccttttgtaatgcagttgtgagctcgggatctgtccgcagcccgacttgattgtactcctactctataataaagagacctttgttgctgtgataatctgtcttcctgtgataccagcactgtttcctgggactggtatcgattaacaggttaatttggagcgtcacgggctagttccggtcgggactagttcggggcgtgacagttttcctcgtgcacgcttttcaaactactaaacggtacgttttttgcaaaaaaaaaagttctagatgaaagttgctttaaaaaaaatcatattgatccatttttcaaaagaaaaaaaaagccaatatttaattgatcatgtgttaaaagatcactccgtttgtgtgcaggagggatgggttcccatcctgcaccgtcgaacacagccttagtgctgggtctcggctactcgtatgaaactaagtggaagggaatggagaagaagttggatggtttgattcatatccatgtataagttgatattaagatatttccaacgtaatgttttttcagtattggattttaaataattgaaatcatatatataaaagttgtgcatgtaaaataatttttattccctaataaaccgttttggattaatatgggcaaccaaaccgttgttgtgcatcgtcttgcatagagaaaaaggcgtttcccgggctgaaaagcgtatatcacgaagacgtattcatcttccgtagagaagagaaccccaccacgtttgacattccatcgctttccccaccccatggatggagtaccacaccagatccgatcagatcagatcagcagatcaccaagtctccttcacactcccactccagcggcagctgagcagagagctccaccgccgccggccaccatgagttctcaccaccgctacgcccacctcctcgacgaccccttcttccccttcccaccgccgtcctcctcctcctgccccttcctctccccacccgccgcttcctccacctgcccattcttcgccctcgactcccccttcgctgctgaccctttccatctccaccccttcctccccacgccgcccactagctccctcctcgaccccttcctcctccacaccctcaccgaccgcgtctcccaactcgagctcgccctcgccgcccgcgccccacaccccaggcccaccagcaggaagtgcacctatgtcaccgagtccaccggccgcaaggtcaagtggaccaccgaggacaagcctcgcgccggcgagagggtgctcaagtgggaggctgagctcgactccccctacgacgatggattcgaccgcaagtggaagtgggaggccaaggccaagaccgcctccgctgctgccaccaagctcaagtgggccacccacctcaagggcaagggttgcctcgagccatggtcacactcctacacctgggaggaggacttctctgccaccgacgacgacgacgacgaggagatcgaggaccaactccatcacaaggccctgcaggatcacagcaagctcaaaaccaaggccaaggacgacaagaagaaaaagaagaaggacaacaacaccgtggtggtcaacaaggagcagaagaaatgccccttctccgtcaagatcgaggagatcccacctgaggaggacaacaccgctggatgcgtcgccattagaaaggtgaccactttctcaaaccccatcttttacattacatgtagtcaccatttcgctcgctgaagatcacacttttatgtgattatttccagaaaaaaagattgtatctgtcataatagaggggtttggtttttacagagatactactagtgtctgcaaattagatgtgcatcggtgctcttgctgtgggcataatatggaaatatttgttagttagagaacaaccaaccgattgattcctcttgtttcaaatgtacatttatgctgacaatcctgcattttcctcccctcattcgatcaaaggcttttgcattgggcaatggcaaggcaaagaagaaggaactgtccccacaggatgcggcattgctgatccagttgaactacagggctcacctggcacaccgttcacaggtgcttcgctgcctgcgtgatctggctgtggctaaggccaagctcaaggagatcaggtccctcttctataacatctcttacaggcatcgcatggcacatgaccatgaagagcgccaaaggttcactgagaaaatcatcgtgctgctgctcactgtagatgcgcttgaggtgagcgtcggccttctatttgtttgccgtcactgtttctgttgcattatcaatctgcaacctctatggttggtccaagggcgattaatcctttagggatctctgcataggtttccaatgctgctttatcacctcaagttactgattagtcctaatattaggggaatcaaagcatgacctaaatattgcagctgctgtgcatctctttcttatacatatggttgtgaaacactagttgaatattaaccaaattaatatgcatttccctttaacgcacaaggagatgaagggtgagcatttatacctagtaggtaataaaatgtctgcacatctcatcagattcagatgtatagctaattaaatctacttgtttcttctttatatgttgctcattttcagttcttgcacatagca

SEQ ID NO: 19935 - DNA, 786 bp, Oryza sativa
taataaatgataattatataaattttttaaataagacgaatgatcaaatattaggcaaacagtcaacggtgtcgtacattaaaatatagaagtagtagtagggaaactattttcatccttcgaggggatatcctctcgttgtttgcatgtcacccaaatggttatgaaaaaaatttaaaagatgtattaacatgtgatatatcactccacaaacatgcaagtttaaattcaacttctacacctcgcaacgaaaaaaacaaattggactgtgaatattaactagttatagtttaatttgtttttttcgttgcgaggtgtaaaagttgaatctgaacgtgtatttttgtggagtgatatatcacatgttaatatatgttttttttcataactatttaggtgacatgtaaacaatgagaagatgttcgctcgggacgaaaatccactcccgtagtagtaactgagagagatcaactgctactccagcgaactcttctcctccatttctatctccgcctccgcctcagcctcagcctcataggataggagtactctacatgctgcctatgatcaatattgccctcatgtcctcctcctcttgccatccccacaaccccaccaccctgccgctgccggagccggacagcagcaagtcgccggagcccacctccgtgctctacaaccgcagcagcccgagcacctccctcggctcctgctcctccaaaccaccggaggaccctcctccccccatcgccgccgacgacgactgcgactgggacgccgtcgtcg

SEQ ID NO: 19936 - DNA, 1362 bp, Oryza sativa
gttttgattgaaaccatacttaataagtttgtcaacacgagtatcaactgtcagatagtagtgaggaatggtttgcttggagtgcagcaggcggtttgcagtaacctgacgaaataatatcagaaactgttaatagaagtagagcaccaacagcaacaaaaaccttgaaagaaattaagtggcaatgatattaccttccttatttgcgtattaggaagatccacatagcctagtccaggagctgctgctgtttccttcttggcacccttggccacagaagcttcattaagcataaatatcattagattaccgaacccacttactctactctttataggtaaaactatcaccattcattacttatcatgctttaatctggctcttatatataagcatcttaattctgaaggccaccatcaagatgatgttttttcagcatgaataaaaatacagaacaattgcatacccaagtaatcctcaatatctgccttcaaaattcgcccatcggggccagtaccttttatgcttgacagtggtacctgtttaggaaacaaggtttcaaaattaaaaactgcgttctttggaaaccgtaggatagctaaaatattagaagcttacattgttgtcttctgccaatttccttgcaattggactggagaatgtgcgatcctctgaaagaaaagattcttctgtctttgtagcctttggctcaggagccttgggctgctctttctccttttttggctctgtgggctcagattggggcttcgattcggctggagctgcagattcagcagatgatggagccttataatccttaaatttgccgatgtcttcctcttcttccacggttacggcaataatctggttaacaaataatgtgtaaatattgaaggcaactcaagttcatatcagcacagaacatgggctaaatggagggaaaaagtgtcttttctaaatcaagaatatgtacctcaccaactttaatttctttggcaccatctccatggataattttagcaaggtagccttcctccatgcattccatctccactgtcgctttatcctaatcaccataaatgtgattgatggttaagctgctgttgctccttaattaaataaagtagggaaattaaatcaagtcttggtgtgcacattaagaaagtaacttacagtctctacttcacaaagaacttcacaggtgagactttatctccttctttcttcacccaccttgcaatgtttccctacaggcaatttaataagtttgacatgataaaggcaactcaagagatacatgacactgctcatcctttaattttctctttgccatgatgccatgattttatttatttattcaat

SEQ ID NO: 19937 - DNA, 660 bp, Oryza sativa
tcctgaaagaagatagctatgttttctttttggtattcaaatatctattatttgatcatgtatttttttgttttatccaccttttttgcagaatcagcagatgaaaaatgatgacgatgtgattgtttcctctttaccagaatcatccaaatttgctcactggtttcatgacgaaggtaggtactcatcttccataaattatattgcatgctatgtattagttttatgatcttacattagttggtgaaattctgttcttacctcaacatttggttcaaaaagtgtataagttccttgataattaatcttgacacaaaaacctctaaaagccagattagctgattccttggtattcatgttaggtgaaaatacatgcttaggtacctcttactcggttactccgcagcattcatctgattatctattattttgacaactttgatgttgtatttttttctgtagactcgaaacctgcagaagacttatcatcaaatggtctgctatccatgattgtcaaaaatgaaaaaccaggtcaagaaagtatagctcatggacctcctttatctgatggtgccgttcagaatttattaccaatatcaccgactcataaacttgatgttgcatcaacgcaccccttgttcacaccagctgcacctgccg

SEQ ID NO: 19938 - DNA, 647 bp, Oryza sativa
ttatcttgaaggtctgcagttagtgttatatattctagtgcaacaagtaagtaataaaattagcagtggcattaactcgatcgatgatggctaaactgatccttccaaaggactgccctataaatcaatagtgagagagagaggtcataattaagcagaacagtagcaattagtaagacagtagcttgtggtagagcttgtaaagtgtgtagtgtacgtagatagcaatataatggctgcatcagtgaagatggccggcgtggcgtgcgtgttggtggtgggcgtgctgtggctgagcgccgggcagtcggcggcgtgcgacgggcacccatgcccgacgccggcggggaagtgcccgataaacacggtgaagctgggggtgtgcgccgacgtgctggacgggctcatccacgcgtccacgccgcccaaggagccctgctgcccgctcatcgccggccttgccgacctggacgccgccgtctgcgtctgcctcgccatcaacgccaaccttctcggcctcaacctcgacgtccccgtcgacctctccctcctcctcaactactgcggctgcaagctccctgctggcttcaagtgtgcctaattacaattaattactctctctatacaataagagaagctcttattac

SEQ ID NO: 19939 - DNA, 1121 bp, Oryza sativa
tggtataaccacattgccatacataatacggcagacaaggaccttgctggtctccaggcaggcaaccacaggctcctaaagtctcattgacaactgagtgatcaaaaccctctacatctttaaggctgctacggctcctccataagtcctgcagtactttaattcacgaaaatgaaaactgacagtttttttccgcaaaagaaaacgatgttgaagaaacataacagaaaggtgagcatgtgaaaatctgaccggaagtgacattgcacatagctttagtattcctttacaaggcatgatgaatgcatcctcagataacatcgagtcaagtagggtcctcacactcctagtgttaaaacatcagggatatatatttttaagtcttaccttaaaaatacaattgaaatcaatataaaaatacataaaaggtgatttcaaataaaaaaaatgtttgcattttttacttgtcctccctgggtttgatgaatcttaaaacaatatggatgtgtggtgcttgataaatgcaacagaaacaaggaaaccaggtgtatcactaccagacaagtccagtctgcgcaaacactactagtaactcttattccagcttttgcttgaaagattaacctggttgtgcaaattgttcccaaggtttatacttcatatgcaactataaccaaagagatggtactccaaataatttcacaccaaacatgggttaagtaatactagtgagttgtttggtttgaggaatcaaaccatcaaccatgagttgattcatgatgacatcatcccattcctgatttttctagtaagcatgtgtctttgagggataaggtggcgacgtactgatctaaactctattccattccttaacaaacaagttgtacaggatcaagtggtcaattgcatgttctattgtgaatctgtgatggattgtgaatctgtgatggacatactgcaggctacggagtaccatacaatatcgaaaattattggcttcactgttaggaaatctttgaaaagcagcatgcactagcagagtgtagaaatctctaacatcaatcagcaatggcttcatcttatcaaactgggggtagttttccccttgtacagaaatatgc

SEQ ID NO: 19940 - DNA, 906 bp, Oryza sativa
ttttttaagcccaacgggtaaaattcaattcctgtatttttggccggagactaaatttcagcatttttttgtcaaaaggttaatcacctaattttagcaagaagaataatgtcaatgtgtttttgggcccaagcctaatgctcgtgtaattttgagccgaagaaaaaaagtttcattcggtttttttgaaggatataactcacgaaattatatgctaaagggataaaaataataaaactgtgttgaaggcatgcatacgcatttggcataaggttaatacccataaatttttaggtcaaaagctaaaaaccattgaaatctaaacatcagggaacgaaagaaagaatgatacggtatatacaacatttgcccttatcagccacacggcattgttatttcagaccatccttgttttcaaataaatgaacaaatgctctaaaggggtaaaagaaagtagcaaagtaatcactttacaccaagtcatttctttcctttggcatctcaaatcaactggcagtgatctatctgtacaacggcatccgcatacttctttcatgtaaaaaaagaaaagaaaagaaaagggacgccgctcctttgtttcctctctagacatcatagatattaaatacaaaatgacatgaaaaacaaaacatggccatatgattgatttacacgatggacgcacctcatcttttacccttttgttcaggtatcagagctctacctcgtgaagatcctcgcccaggccattgttgaattgaagtgatgagttactactggaacggctgtgggattgtttctgtccaggaatcaacggagactgcatcatggtccgttgtccatctggtgatctcgaaacagcattgccgctcaactgctctgaatatgctccactccatgatgctg

SEQ ID NO: 19941 - DNA, 1572 bp, Oryza sativa
agaattggttctggctaggtggcattggtggcatccctgaactaggcccagaaggattcaaaggccttgcttctgaaaatccattagcagtataacttacactgcctgggccattcgaactctgatctggaataccgttctggaacaaggcctttgttggaggtgggggaaggggaggctcctcagcaggtatgtcagcaccttcttccacccaccgcttcagcttctcgtcatagtagaacttgttttgttcccccagcttcgcctttagggcacaaaagaattagttgtgttacacaaatcaaaaactactgtgacatgcagttcgaaaccgggatcggatgaatttaatgttttagcaagcacctgatgatgagatcttgaaacaagtcccattgtcttctgcagcaaccatccaaaacgtgaactacctgaacctgatgtgctttgtgcattatctaatcctgcaccctgtgagagttccaatttcagaaaagagaaatgaaacacatcaagaaaacattccagtctaagaagcacctggttgggggttctgccaaagtctggttcagagacacttctgttatgtgtgacttttctgtcagggccagtatttcctgacatttcactcatagattgctctgaaacagaagacatcaaagaagacatagccatcactggctgattattcacaaaatttgtagctgcaggagccgaataggaatctctttcggttaaggagccctgtggcactggtgacaacgctgaaggttgtgtacccatcatgcgggacaaagatttatcaagtgatgtgaaaagttttccaacaagctttgcaggggctagatttgtaccataaccaccctgaataacaatgagttgatcatcagtcaacatggaagaaacagtctgctctagtaaatacgagaatcagcaagcaacagctacaataaattcaaacctgctggtaggtgcgtatccgctcctctagggatgaaaacaactgcttccatgcctctaattcaggtgcacggccagatgctttcagcaccttcaagcatgcttgacaatacctaaagagagtagtttaaagtcaatgtgtgtaactaagaaaccaggggaaaaactggaatagtaactcagcaaattaccttaatgaatcagaaaccttcccaacctccacaagcatgtatgcatatatcagcttatatggttgaaatggcaagaggatgtactgagaattaccaagaacttttgcatattcatacacctctgttcgctgtttgttacattgtgaggacatttgtttagaaacagcaaatgacaaaagcaaaaaaaaaaacagtaataatatgaattaaggccgaggacaatcatcatctaatcatgccattttctgagtaagaagtggtccaaatagagggactgtaaagcttttgactaaagtaagtcatgcaaaaaataacactagaatttgacacatctaaaaacatatgtgatacgcatgctcctctgcaaaaatgcgaaaccatctacattagatacataatgattcatatctgagatattgtt

SEQ ID NO: 19942 - DNA, 2878 bp, Oryza sativa
cagttataatagccaaattctcttgccaatcatccagcatgctcttagaattcacagcctatccaacaaaaatgctaagttaggttcaaccctaatgatccacacacgataaaagatgagaactaaaatgtatgaaaatcatggaatgggaagtcaagaacaatcaaatgatatacatcacatgacatataaacacgaaatgagtatagaactataggtcataaacaacatagaattattatagagtctaaatagaagcatttggatcctataacaaaagaaatagacaacatgtcccctattgcttcgaatcgaataatcattcaggtaggagtaataaatttagggattccgtctaaatgtttgatcaatagatccttctactgtcatgagcaatcaagaatgtggtaatgaagttatgtattacctccaccggccgttggggtatatgcaaattaccataattgccatcaacagggttctcagcattgaaaacatctgcaggctgtcccgcaataagaaggcacaatgtcctcaaaggtgatccagatacaaaatggtggtaagccattttcttcacagtatccacataaaactacatcaccagtcaagaaaacattaaacaaactgtccagggaaaaaagaaaaatatgtgtatcatgcagccgaaaaatgaatgcaaacttatatcaatagtagcagaccttatcaccaagttgtaaagcaaggattaatgcgggtccccaaagctgaccttcctgagcatactgaagagcctctttccttctaccagaaactaggagattttgaacctccttagcagtagcctgcaataaaatggttgccacacccaggattactatttttttcccctgaagctggtgttcttagagaaataagaattacctggatctggttttctgacggaatgtttttcatgcaatggacaatggctccatactctcccttatgagcaccactactcttacaagatgagaaaagttttgtcactgccatctctggaccatctataccctgttaccaagaattcaaaataaattcaatattcctttcaaaagaatagaaataaattcaataaaagatagccagcagttatatgataaagctgattgaaaaataaagtgaactcaaggaagaataggtcttttcatttcataggtccagtttaacatgcatacattacttcagtgttgctggttacatgcttaaaatcctgtatggacaggccatttttccatgtgagaaattaatgacaacttgacaaggagatgtttttaactgtggtcatgaattatagaaatatagtacagcaagacaaaaagcaaatacctcctgcgatggatcagacccaaaaggtgaacggagctttccatagtgttggcacaatattttaagcagtgaaatgagcaacttctgatcatctcctccctggaactccctgatagaggaatcatagcctccggtgatctcatcaagccacttgttcacatcctttgctgcagcacttccaccaacaagggggccaggaataggttgacgacacaatgcatggaagtaactaagtgcgctaccactagggatacttggatgatcaactctatcagaaacaatctctgacacattaagaattgacactgtgccacatggatttcccttaaattgcagcaataaagtttttcagtcacgatgacattgcaaagaagagaagtacaaataaaaattctaatcgtacctgattcccactatcaaagtttgtggacattgaaatggtctctcgcacaactacaagcttccccccaaatccgaatgtaaccaaagcatgtggtgggcgtccagctgatgacctctgctcatgggaggaataaccaaattgttgaggtaaagcattggaactgatgaattgctgctgcgcaaaatttacagagcttccagtgctcaaatagttatttggcaaattcatgcatccatcagaatcagcacgtgtttgcatctggggcatgtttgctgttggaacagagtcttgtggcttagcagcaccattgaagctgctgtaatggcttggtaactgttggtatgccacatggttagcttgactatctgtagaaggtccaaattcctggtggccagtctggcccgtagaataatcatatcccttatatcccaactggtgacctgaataaggctcaaaccccttataattctggttgcctgtagaaggtttaaatccctggtgagcagcctgttggactgtggaagattcagagccattgtacccactatgatggctggtaaaagtactttgatgacctacagatggttcaaaacccttgtaaacactctgatgactagtggaagatccgaatcccttgtaactcgcctggtgatcctcactactagtgtactgacttgtagaatgcgcatatgtgttgatatcagcatgataatacttagaagattccaatgactcgacatttgcctgctgagcagtttgattctcagtgtgctggttggaaccataaaaactatccgacaagctgttatcacccaacgagccatgttgctgttgtccctgatggctatagtcacctgtgtaagaatcactggtttgagctacattatggcctgttcctgcatatccagctgaggctgctgcagtagtttctgcctgcacaccaccttgctgatacgactccagtgagagccactgctgagtattggtgtcaaagtaccatcctgggtattcagcgtagaacaccatgttggacgggtactctacggctcctgtattgctctcattcggggtccagcttgtagccatggtgcttccctcctctgcgatggtctccaaccccgcctg

SEQ ID NO: 19943 - DNA, 3812 bp, Oryza sativa
attacctccaaaaaatgcatcgtcgcccatgaattctccaaaaggatcatccccaccgacaccgctgttggtggcgaaggcgctccactgcacctgcttgacggcggtatggacgtcctttgcggagcccggcgaggcggcctctgggtttggtggcagtgtggcggcgggggccttaacctccagctgaggaggaggaggggcctcgggttccgcattaggaggagggggcgccggggcggtgtgaggctgaggtggaggaggaggcgcggcctggtccggctccggtcgagaaggcggcggcgtgaggtcggaggcgaggcgacggttggtatcggcgtcatcgtcgtcgacgagcttgtcgaagaaatcggcgtcggcgtcgtccgaatcggaagcggaggccatcgttagggtttggggcagatgggagggaggggggcgggcggagaggtggatgaggttagggctagggtttggtatagtttaggagagggatctgatcgatcgattcgatctcgaattcgtcgtctactagagactagacttgaatgaatgcgatgcggagaagagaagagaagagcggaggaggaggaagacgacgacgacgacgcgtgctcctcctctcctagctactcaccccgccccagtattattattccatacgccctactactagtgcttgttgtatttcctcttttctttttcatcaacagccgacatggatatattttccagactccactaaaatatactaccaccttttatttttcttttatcctttaaaaaataccacgagtagtaactttttttttgttttcaaagtagtatgaaaagtgcgtatgatttagattatggaaaattgtctctattgtcaacgatggagatggcaaaggcctgagtgagcgtcgtatcatcaccattaaacttaataattgctgcgattcgattttgtttggacgatcacataccactccagctccagtggtggaaggtggcactttgacacccacctacattgtgatgatgcatcatgcacagtagagacaaattaattcgtcatcaacagtcctaatctcatccagatttggtctaactccttttttttctttcctcatgtaggggtactgtagtgtactctatcttcttccgcactcaaaagtatgtgctgacgtttgctacaaacaaatactaccttttgtactagacacagatacacctagagaaagaaaaaaaaaagagctactgctactattttgcaattacatctaatacgtacatacttacaagaattacaagagaaaaagaaaaggtgggttgttaattaggataaaagagccttctcaacatcgccaccttccaaatgaataatactatgaccttccttgctcttcgcccacaagacgatgtagagcccacagaacatgagcaccatccctgccaagctgtatcacgcatgttatgtaatgtacccacaggattatcattattgatacctttcagatccacgttattatgtatacataaacgaatcagcatatctatatgtatcataatgacagttgtattactattgttgttgttacagtcaaatgtaccatatatgtatttttttttcttttgccaaagcccagaaggtagcatgtgattccagtgaatatgcatatatagttgttcttaatttactatttcttttgggatcatgttaggtttatataatagactaaacacacgaggttaagtatgaaagtgcagtcgaatctctacattttctttttataaagaccataaaaacaaagaagataaaggaatcaattgaagagataattaaaggtaccttccgaggcagagcaactgggagaagagaagagcagagaggagggcagaacagacggtctgcacagggccaaagatagagacgagcagaggtcctcttttcccgatgcaccatgtctgaaacaccacgcatccgcccaccacccctcctccctttgcattttcaatttcatcatcatatgcgtccgtcagtcagtacacatcaccactaattgctcctactaatgtaaatggagcagcagaagatcgaggaaaaggtatgtaccatcaggacgatcgttgagatgatggtttcatcgattctcggcgagcccatgtcgatcttgccgtccacgatgaactgcaggatcgcggtgaagacggcgcccatcatcgatgttacgctgcacatcgtcaatggcgcagggaagctcaccaacgtcgctgcctgaataataccatgagtatatattgttgcaagtttcagtaatccatgagcagctagctaacaatgaaactacatgcatgtatgtagagtgagtgaattagtagtaattgatgattacctggagcaccgtgtagatagagagaacaactactgccaggaaaaggtagaagcaaccaaggatccagtcatagtaactagttgttgtgagttgtggagaagacgaaacgggactctgcaagaagctcatggccatagctcccaccaagcacaccaacgttcccagtatcttggctcttgtgtacttgcatcccttgtcaaacttctccaaccttaagtatatgtaataattcaggtaaatgtatatatcttaggtaggtcatcaattgcagcttcatctataagcagctactactatacctgaaacaagccgcaatgatgaagatgagtccagggctcaagtttggcatggctgatgcgatagctggtgttgtcttctttattcccagaagcatcagttcttgaaacaccgttgttctgaaggttattcattggatacaaaggctaaagcattaaaaaaaattataccatgcatgtgtatggcaaataatctcccaaatagattattcctaagtatatgtgtttttgccattcaaaagatgtgtgtgtatttaatacgtggtccttggggaggtatcacaagcctagtactaactgagacatcatcaggtcgtctatctgaagaactaatgtatgctgctgcgtgcactcaacaacttgcccctgctaaatgactggtagaatcagtatatgcatggttattagaattgcaaatgcacttgccattttgaggcttttagtacgttaaggatcgagaaaggtaacggttttcagtgcagatcaatcactttgtgccacatatttatagctggctaaacttgagccaattagcacgagcttctcggactgttttgctaatactagtatttagaaatatggttgaaataaaaaatcatcagcagttaatgtataaatcttaccctccaagagctatgaacacgaattgcgccatgagagtgcgagaaatcttggaaggccatttcttcctgacacagacaaaccaaacattgcattacttacattcaggcaggcaggcggacagaaatgcatctcatcaacttcaatatatatgtggagaaactactagctaatgagtagttaatcaagagagaattgaattaaaataagtaatggtggccggagtacctctcgaggacgacggcgaagggaaggaagaagagggaggaggcgacggcgccgaggacgatgagggacagcgggttggctccaaggctgaggacatggtccacgaacaccacgtatccggcgaggatgcactgcaccaccagcaacccacccacgatcaccccctcctccactttcgatgaccatcctccgccgctcgcaccttgcaccattgcacccaatctcttcttcttcttcttcttcttcttcttggaagaaatatatacgctcgtactacaggatcaat

SEQ ID NO: 19944 - DNA, 1915 bp, Oryza sativa
aatcatgaatcacctctcaaatttcacagttccattcaacaaatctccctgtgaaagcagacagaacagacccagaaaatgagagatcaaatgtgtcagcaaactggactttatttatgttgcacctgtccaggatattcagtacacaaacagttccagaggagcatctaacatcatctgatggtacacgacacatattatttaccatacaaactactgtttgttagcctgtgcaaacagctatacataatcacacgcatatacatatatgcatacacggccaaaaatacatgcaaccaaagtaccaaactctcaaagggggttaaaaacaaaaggcatgcatatgccgtgatacaacataccccactatgtggcaggttcatagatgagttaaaataaaaggaaaggcaaaaaaaaaaaatcacaggcacataaactacctggccatctagatgatgagcaaaactagcctaatggttagagcattactaactgctatatgtacaacgtgacagtacaacatgtcgctaacacaatgtggtatttcggattcactcaaaatcgccactgggtgctgatagcagggtttgcttgttacccccaatggatgctgattgtggtggtgttctttcatttggtcgttaccctgcaaaggggttcatagcttggtgaaatgatgatgcatgtattcaggtatggaaccatactgtgaaaaataatgactgtttacatgaatgggagatgaagggtgtgagttgatcccagatcccctaaattctcatgcttcacttggtccatgccatatccatgtgatgcgagtaccttcctctgcaacaacaataagggatttccattgctcagattccacgcatgagtatagaatcagaatatcaggcagcgcaaatatttatggaacatagtcagaaactcagaacactagcaaacatggtgttgtttaggtcatgtaacaacatatataactgtaaaaagcgcaatcaataggtcaaggttgcaaaaagaacacaaaaggggatgccagagactgcatcgatatacctattttgaaacaaatgacggtatacaggccgaattggattcgagctatgagaaaaataatcaggtaatgctatgagaactagagtaatgttccattgtgctgccaagtactagcaagttgaaataacaaacagatgcacagaagataaaataaaacgaagaaaaagaagcaaggtacttacatgtgcttcaaagtttgggtttgtcaggtttattgacaaatttttcatcagtaacagcacctggatatcaaatcaaaacaaaacagttttcattatcatttcaagtgatacaatgcaattatgtactggcataacaaacattgaagtgtacgtgttcactgaacaaactgatttaaaccttaaaaatgcatgaaacagggaaaacaacccatgcagacctgacatgcaaatcatgaaagtgtatgaactgcacaaactaagagaaaagggcaatgaacaaaataaatatttcttttatggcctcagaaggtgcatagtagagacattatgccaaacataggagatccattcttactatgtcaagattatctaagccacatgtagtaactggtatccaccactaataattaacaaaatgaaacacattaacagtcgagtttcagttatgctgcatagtaaattcctattttaccttctctaaaaaaagtcttcgatgtacttaattattatagcatcatctttctgtcttatctgacatctcacacaagagtttttcaagttgctgatggaatggcagtaatagtacaagttcgcgtgacaatttctattagaattgaagccaaagcttcatttaagatgcaaatgaaatcaagaatagcttccatgcaagcactaaa

SEQ ID NO: 19945 - DNA, 677 bp, Oryza sativa
tttctgagccaatccactcctgttttgggaaaacaaaggtatattttgatgtttcttcatgaatgcatgtcattgaggtttttgaatttactagccctgcaatttgataagatcccaagtagtattttgagtaaaatgcctgcaggctatcttttgtgggtgattctgttatacttctgcgaaacctttctttttggcctctagacaatggtattgctaagaggtgtataagaaacctagggttggcacttagctagatgatgttagttcgagtaatctataatctgtaccctgtatattggtttagcagtggatggatttccaagtctcgtgatcttaacaaatcatggaagtgctttctcagataaacatgcatttgtggtctgaaatgcgcatataattatcttactgtctacggccttgcagatcgagttttctcatgatggaacatgccatggttttgcggtttggattgattgggttcttgatgagagaaaatccgttgtgttaacaaccggaccaggtaaatatatataaattcctgatatctgtgcttgggagagatgaattgatgagaagattgatggtgttggtgttgattttgagctcagataaccgatactggaaacaaggagtacagctctttagcaagcctgtagaagtaaatccaggcaagt

SEQ ID NO: 19946 - DNA, 747 bp, Oryza sativa
ttagaaccgcataaccttgaaattctgaagctcttttccagactgcctgtcatgggaaaaatctgatcctccaattttttttgcatactctggatgaaggttggaacttgatacagctgcaacaggaagtcgctataataggcaatacatgtagaggaagaaaataccattttcattacaaatgtttcactaagaccaaaatattctgtgttgaagcactagaaaactggcgagtgatgcccaaatatttgtatgacgaaaggaagttcctttttctttctgaacaacaaaagtttattgagacatcagaaaggaataaagagagaacacatactatcttcctttacaagagaggagcaagtgctggatgagaagtgacgaacaacagtcccacgctcgcatccgaggatagcatgcgctcttcgcaactgtgtgagtagattgtgcaggcaactatgagcatatgcaaaccatatatgtataataacagaatgaatgttcatagacgaaatgcaagcatatataatcctgttgtgtttgacataaatgataaaaaccagaggcccatgaagatagagcaagccagacatgcgctttggtgtaattccacaatgacctagatcgatttgtacatgatagcagttgagtaagatgaatagaatgggtttaaaagtagcggcgtgattaccgagagaggatttgtgcaactctgaaaaaaaaaaggggacattttgaacagttgaaaca

SEQ ID NO: 19947 - DNA, 1324 bp, Oryza sativa
gaatggatgcttatgtctttaatgatttcagagctgggactgggttgctatccatgatggccgcccgagctttggcagctgttgggggtgaaactagaggaggaagtgtttcagcatgtgaatcttacctcccaatgggaaaattgatgcgaagggtactgagagccaatgggatggaaaacagggtcaaagtctttcacaagcgttcggatgagctcaaagtcagagatgacctggattcaccagctgatatattggtatgctcttgttttaggccagcactattgaccataagatgctgctcatatatatagcaaatttggcaggggaaaatgatcattttccaatctaaagagtagcacttgatcatttgctaccccttgtctctcagacatgttgcctcaggacccatggtcagagtctacacattgtgtgggaaatgattgattttgccaccccaaatgttcagtcccccattatattctgaattaaaattgctaatctcatctatacttgattatccaaccaaaagtttcccaaaagaaaaccattctactgatctcacttattgtcaatgtgatagactatctgtatcaggcaaactgctgtagatgtattgattgttttgtttttttttcttgaatacgcaagagagttgcgtatcatttcactaagaagaagagaaaaacaggagaattgggaggggagcccctcccctcaccaagaccccacagccaagacctttacaaacaggggattgttttgttattttgactactgccattcagaggcacggccaactcaatattgcttactttcccttctatttgtgttttaggatataagagggtttaacacttttcttgctattgtgtattatgtgtaactaatactcgtgctaacaaagacatgttctgcaggtaagtgaaattcttgattctgagctgttgggcgagggtctgatacctactttacagcaagcatatgacatgttattggcaaaaaatccaaagatagttccttatcgagccactacatatgggcaggtcagttcccagtgccttctaatatgcgtttgtcccaattttaacaatgtgagataaatttatactgaatttgttgatttccttgatgtcctagctagttgaaagtacattcttgtggaagctacatgatttgcacaacaatgaagcaaatgctgcagacggtgtatggcttactcctggtgagatggagaggattgtgtctgtgaagccacaacaacatgcaatgcaatgtgatgcactagaagatgagatacgattggtatggactttagttttgc

SEQ ID NO: 19948 - DNA, 679 bp, Oryza sativa
aaaacaaacagtcaaaattggacacggaaacctatagtttgccttttttttttggacggatggagtaggtaagatatgatgaattgatgatttattcagttgactggagaatcagggaagcaattaattaactaagcaggcccgatgaaggccacaacgacaccatagcccataggcacgcacaggcgcacacacatccagtgcggcagtgctcagcttaaatggaactagggcatcttggcagtttaacagccgacagagatcctaacaagagcaacaacaacatctggataacaacagcatacgagtacaaagcaaataaaatggctggacgtccggaccaaacagctgcttagtgcttgctagctagcacaatcagactaccatgcatagtgcacaatgtgttcctcaacaaactgaaaacaacaacggtggttatcacagtgctacaatgatgatgatgatgatacagtgctacaagctccatcatatgcgtgataaccactagacgagatgagatatggcctcttacttctttcccttttggatgactttgactgcattgttcacaccggccatcttctcatctgtgatcggccctccttctggaagatcgaacttctgcgggtcaacgacctctgcttccctggtggctgagggtccacaatctccagcatac

SEQ ID NO: 19949 - DNA, 752 bp, Oryza sativa
gattattgaattttttatctaaaggaaaaggatttaattaaatcctttttggaaaagaaaaagagaagagaagggagggagggaatatagacttttctcggacggctagggggcgcggcccaagaagaaatggagcggtctccggccgagctaaatgggccggccggcccaaggcggcccaaactcgcgcgcgcgcgggagggaggagagagagagagagccggcggacctgactcaccacgcgcggtcccgggagggacccgcttgtcagcggcttggctcaccgtgcggagggagcacgccacgcacgcgcgcgggcagggaacggactccgtgcatgcgcgcggtccgggacggacgcacgtgcggcgggcccacacgcagactgacggctcgcggtggatcgcgcgcacacggagggaccgaccggggtcggacccaccctgtctggctgagctggcacctacgtggcacctacgtggctgccacgccggccggagggaggtaaacaaccacccggccgcgaatggacggcgggcggcggcagcgagcggccgaaccaaccacagccatacgggcaacagcgagcacaccggacggttgcacctgacaaggggaagccagccaaccgctctgattcgacggaggttgatcgacggcggctgattgcggcggcagcaaccggcggcgggagaagaaggaaacagcaactaagtcacgagaggtttattcccggcagagagagcatctac

SEQ ID NO: 19950 - DNA, 629 bp, Oryza sativa
gttcaactacaccggcacgccgccgaacaacaccaacgtgatgaacgggaccaaggtgctcgtgctgccgtacggcgccaacgtcgagctggtgatgcaggacaccagcattcttggcgccgagagccacccgctgcacctgcacggcttcaacttcttcgtcgtcggccagggcttcggcaactttgaccccatcaacgacccggccaagttcaacctctacgaccccgtcgagcgcaacaccgtcggcgtgcccgccggcggctgggtcgccatccgcttccacgcagacaacccaggcatgtactctgaaccacatcgattcccctgcgattccacatttgcaccaacttaatttagctttagttaatcagtttgcaattataactcatcaaagatacttatgccgatacgattgcacgatctcaggtgtgtggttcatgcattgtcacttggaggtgcacatgagctggggactgaaaatggcgtggctggtgctggatggcagccgtcctgaccagaagctcccgcctccaccgttggatctcccaaaatgctaggaataaaactcaagatcatatcaatagtcaagattggttgcatttgcatcgcttcacacagaccccact

SEQ ID NO: 19951 - DNA, 996 bp, Oryza sativa
attgtcaactgtaagtgggtttatacagtaaagcaaaatcctgatggaaaggtggaaagatacaagtaaggttggtggctaagagatatagtcaaacatatggaattgattatgatgaaacttttgcaccagtagcaaagatgagcatggtaagaactcttatatcttgtgcagctaattttgattggccattgcatcagttagatgtcaagaatgcattcttacatggagatcttcaagaagaggtgtatatggatgtcccacctggatttgccacttcacaaactaaaggaaaggtgttgagattgaagaaatctttgtatggtgttaaacagtcaccaagagcatggtttgatcggtttaggcatgcaatgtgtgctatggactataagcaatgtaatggagatcatatagttttctatcatcatagtggagatcatataaccattcttgctgtctatgttgatgatatggttatcactggaaatgattgcttggagataactaggttgaaacggaatctaagcaaagaatttgaggtcaaggacctaggccagttgagatattttctgggtattgaaattgcaagatctcctagagggatagttatttcacagcgaaaatatgtattggacttgcttagtgaaacaggtatgcttggatgtcgcccagtctctacaccaattgatcaaaatcataagttatgtgcggagtctggagatccagtgaataggaaaagataccaaagattggtgggaagactgatatatctatgtcatacacgacctgacatagcatatgctgtcagtatggtgagtcgatatatgcatgatccaagaagtggtcatatggaggcggtgtatagaatcttgagatatctgaagggaagtccaggcaaaggcttatggtttaagaaaaatggacatcttaagatagaagggtattgtgatgcagattgggctagctgtcttgatgatagaaggtcaacttcaggct

SEQ ID NO: 19952 - DNA, 6450 bp, Oryza sativa
agtgagttgttgtggttaagaaatcttctagttgagctgaaaattttggagaacactcccatgaagctattgtgtgataataagtcagctattaacattgctaataatccagtccaatatgatagaacaaagcatgtggaaatagatcgtttctttatcaaggaaaaactagacgagggagtgttggaattaggatttgtaacgtctggtggacaagttgctgattgtttaacaaagggcttaggtgttaaagagtgtaattgttcatgtgacaagatgggtatgatagatatctatcacccatcttgagggggagtgttgggctgtaaatagactagttatgtgtgtgtgtcttgtgtgctggcccatctattgaagagggcccatcccatgtatatgtaagtgagaatggcaatagagaaagtgaagcttccagagaaaaaatcacaagacttcattcctgccactcagataattcacagcgaaggtgggtaatagcaacataagcacagttttgcatagcagacttactatcccaaccataaccagtgtattggcgatccctttctaaaggtgttctaccccgaatgcttacgcgagccatgactgcagtttgggaggtaccaatggacttgttgagtactatgtggtactcaagtggataggtgaaacgggcatattgcagcataagccagagcatgtgctaagttgagtttccaggtgaacccgctgcagtagtagaatggcgtatacatggtaggcatctacaagaacaaataaagaacgaggattagtgaaagaacctaggtgtttacatactttgccatttctttaaggctagctagtcagaattaaattcccattttaccaatttcaagattttatctcctggcctattattacttttaaatggtttcatgttaatttctaggtttacatgaacaaggtacactatcccccttaaaatagaataaaggtttgttctaggtcttattaacaaaacatatagatgggaggtaaaccaacttttgtgctagatgcagtccttcatagattagtgttgcaagctgaagctaaaggatacgttttagggttgacaagctatgaaaaattttacctttgacatcctaacaaatttgtctatggttcaagaagaaatggtgatttttggtgaggtggtttatcttacgggcagtgttttggatgaatgatgcagtgctgtaatgtgtcggcctactgtttcgtctaatatttgagtaaggttctgaaggctcaaaactttgggtaaaaatcggggtgatgggtatgcaagattgtaagttaccttaaagaaaccaagattttatcacttataatttgggctacacaaatttttcaaccgggttaccgactgttttcatattgggactgcgcattactatatgaatttttatgccatgatatgcaatctactgtgaaaagatgcacattttatcaattaaggtttgggctacacaaaatgttgaatgcaactgttgacaaattccagaattttttttgcaaatccgcgctagtacataggagtagtttgcaaatagatttcaaagcttttcgaaacattttgactgattagttgagattaacaggtgatttcaaactcaattttatagagatgcaaacttttaaaaggtttcgatcctaaagacaagataagaattttcaaaatttcaaagtagaaacataagggaaagtaatctctggagaagggtgagatataaggttgaatatggttttcgcaaataatttgtaactgagagcaaagcccacaaaataattttaagaatccattctaaacgaccaacttaagggtttcctatggtcggtacttgctctgataccaatgctgtcgtaggctgtcctgaccttccattatattcgaaagatgaagtgattatatttcaaatcatcaatgaacataatgaaacgtcttaaaacctcgagagaacattattcgaaacattgctgggcctttagcctgccagtcaacttcagcctgagatattctcgtcaaaccactcgaaggcggcgaccagatgtgttacacattcaggagacttgacaatatgactaaagatctacaacaacttaaataatcttaactcatactcatgtgaatccccaggatgtgcactagattcacactttcatctcaagcatagatatacatagcaaacacaaataagagatgaaagcaattacatctacatctatgattagaaacaatggctgaccggccaaataaatataagaatagcggaagcttgtctatccaatccacaagcacaccgactaggggtataccctattaagttcaactcctagaagaatcaatcggaacccgcatcacttaaaggctaagtctaaacctgcaagcaaagattatatctgcagcaagagtcagtacattaaacaagttaatgtactgacaagcacaaatcaatcctaacatactacatgtaaggcatatattcaaaggagggcaatttgtagttcattttcagcataaagcaagttttgtttcacaaatcttttgtaaaagagttgacagttcaactaacaaaaacaagttttaattttcatcatttagttcatcgaaattccatcataatcgaagtcttcttgtcatccatgacaacaagtcacattatatcaccacactcacactactcaacacatttcatcatttccaaaccatgtcacatgttcacaatttaaaacatagagtctatactcatgacacttcaccaaatcgctcttgaccgtgagcacggctaatcgattaattttagactctgcaaagtttgtacagctttatccacatgatgtgaatcactctagtttgtccggtacccgtcgacaccactatactctacacattgagtacagtctagaggacacaatgaagcctttacactacttaatatctagctttgcaccagcacgatacgtgttcctccatcctaggcatactggaaataatacttagaaccgttaaatggtgggcccacaccttaaacttaacaccgtggtggcggacacgatgggaacccaccacgtggcacaataccgttgtattgaacaggcttagtcacctaaactaccacgtcggggcaaataggaagctcctctgagttattcgaacccatacacactagcctaccagaatgcaaggcttgatgctaagtagattaattagcttaggccatcccatactagcacatgtggacgtacgggttactttaagttggtgatacaagttcggtccttatggacttgggcaaacactccccctatcggtatgcaactaacacaatatgaacaacacttgctacccaagtcaaaatcacatttttacacattttagttcacaaatactcatcacattcattttattccagcaagtatccacatatttaaaatcacatttgaagtgtagatggaataagcatttgcttatttctaagcatggctaagcaagtagttgcatatagagcatatataaactcatttgagcacaagggatgtactctaaccatttctaagggtacaaacagcatggaacacaattattcaaaggagggaatgcatcaacttggccatagctaccatattcaaatttttaaataccgatatagtctaggttcacatgcaacttttgcaaacaaatattttcattcctcaaatcatgggattcaatgtgttcaaaggttgggaggagagaacttgccttgatccaaggaaatgttagcacctaatcctctctgttgatggtcgttaccgacaaagttcgaccatcaatttaactaaaataatggagaattagctatgcttacaatgcattttatttctaaataatatgtatttccacttgtacttggaaaataacattttgcaggaattgccaaatacaataaaagaaatgaggaaaactcactcccaagcaagccatggataagatggtggcccacttgtcaggtgtaaccgtcgggaaacggttttaactgcttaaccgtcataaggtcccacctgtcagtgccctggccaaggttggaggcctgctgggccggccaaggttcggccgaaccgaactctggctgcagcggcgcagctcggccctccacaaggacgtccaggatgcatccccaatgacggttacaggggcaaaaccgacaactcacctttcaataaccgtcataccggccctataaatagaggagctcatttcacttcaacacacactcaagcaagcaatttcctcttcatactttagtattaatagtttagtgctaagtggagtagaaatagaatagtatttggagtccctcggagtcttcggaagagtttcggtatggctctagcagcttttgtaatctcttctgtagtactttctgaattaatgaaatattcttctttatatatccccggtattttaacacgctgaaaattcgactaacaaaatcaaaaccctaaaaatacggaccttcaaaaactttttaaataaattgcatcatgccggttttattcgcctattttatttggatttgatttcggagttcattaatcgtgagtaaggaataattaattaggaataaaccctaaaaataaattgtcaaaataaataattgaaatataattttaaataaagattaggtgaggatagaaataaataaaatattatcgcaaccatattggtaacaattaaatttaagtgcgatggaataagaattggccctaattaaaaattcaaataaattatataaaaataaaatatgggtaaaattaatctagggtgaatcttttggttaaaatagcacaaatattgagtaaactccatttgtgcaaaaattaggatttatagaatgaaatttatataggaaataggctaaattagggataaataggactagcactgttcattgtgcagtaggtgctcgatgaggttccctagccctgccccctcctctgccgtgtgcgcctagccgccccgagcgccacgcccccgtcgccgtcgcgtcccgtcgccgctgctacgccgcgcgccatcgccgtcgtgtcccatcgccgctgccgcgccgcgcgccgtcgccatcgttgctgcgccgccctagccggcctcgcgccccgagccgccttcgctgtccatcgccgtcgacgtcccatcgccgcgcgcccgtcgccgtcacgcctcgcgccgcgcgcccgccacctcgcgtcccgcgcgccgcgcgccgtcgcatcgccgcccgtcgccttcgcgcctgcgccccgccgcgcggccgtctcgtcgctgtcgccctgcgccactgccgcgccgcccgtcccatcgcgccgagccccttgccgccgcgcgcgtcgagtcgccccgcctgtcacgtcacgcgccgctcgcccgtcgccgtcgtctcgagccccacgtgccgcgccgtcgcgtcgccattaagccggccgcccctccccgcgcgctataaccctcccccccggtcgcccttccatcccacaccaccccagccccttttcccctcttttctcctctcttcctctccaccgcgccgccgcccttcgtgccgccgcgccatgtgtcaccccgccttgcgccgccgtcgccgccgccgtcgtcggtaagccgccgccccctccccttgttcggtcgtcgtcgccgcccgggtaggcagagggccgagagggaagaagaagccgggagagagagaaaaagagagaaaaagaaagaaatgaagagagaaaaaagaaaaaggaaaggtaaattgaaattagggagagattaaggaggtttagaaaattaaaataattggggttagttgtagatttcttttagttgtagaattgcaaaattttatataattatagattattttgggtaatctctataagtaattaattcgcggtaaataatcggatttaattactaagaattgtattcttcattgaattttaaagaagatacttctaaatcacaaaatgacttaggttgaatgagcttaaaattggaataacgacatagcagatggtttctccactttggctagtatgaggaggtgaagattccgtggtctgcaaacaattgaagtggccaaatatcaagagatatcggttagcaataaagaatttgacaaaaggaagaatacttacttgcggaaccatctctcagaacatgttagtcaggtatatggaagctgattggtgaaaaagatgttttttccactctgcccaccatcggttaaaagttgaactcctcatcaaggctagcacaatattatccatactgcctagtgggggccctgggatgttcaggagtctatccatcatgagggctgatgtgatttctcccctggtctggatcttgtccacgaaatataagccgattgatagctgacctatttcaagttgtctagc

SEQ ID NO: 19953 - DNA, 10376 bp, Oryza sativa
catcctcgacggcacggacgaagcctactcctcggagaaaccttcatctgacacatactcgtgctctggggttgggaaaaattagagcaagactgagtactacccactgtactcagcaagtcatactggaatagaggcatgatgcagggaatcatcaaagaagagctaaagtggtttatttgcataaagtgagcatttataaacagaagttgaaagattaaacagttgtaataattaattaatattaactatccactgtccaacgctatcccatgttgcaacaggcccaaccatccacctaagctatccaaattcaaaagattacactagggtgagactaatcacggtgaatctggttgaccgcccataaccgcgggcacggctatttgaatagttttactctgatcagaggtgtacaactgtacccacaagacacagccccacgacacgtttccgtgcgctgacatgccaccatgacataccggaaagaggtcgtgacaggaccattagcataaccccctctaaccaagcacaccacacctcaggtttcacccccactcctcgcaaggcagcgggcagtcccctctcgtgcctaggtgaatccggaagccgcataggccgtcgcagggcccatccaaactccatcacgcccacccttgcctggatgcgtcggctagaggaaagctacgctacaagcccagccgttgcccacgctggcttgtagtaagtacgataagttcttccagggcatcccgcgaaccggtccttagctgccatgggtgcgaccagcaaaaccatgcacccacagcccaccatgtgatttattttaattaaccaacaccaaagcggtggcactaatccaacaataccattagaaccgacagtctaaacattaataggatcttccccatttgtgaactagttgaactaagcatggctaagcaatccctagtccaatctctagtcatgttataaccccaagctgacaaagggacatggtacaacaatagcatggctatgacaataggtaaacatcccatagtaacattataaaacaatgcaatatttgaaagaaaacaatagagcatttgcaatataggatcaacatgttcaagtgacaagcatgacttgccttgctctgctgctggaggaacctcggcgactatttcgaagtacaccgaagcgtcgggggaaccggaatctagcgacatacaaggcaaacattgcaaacagactataagactactgaaacagggaacaaaaccatttttaatggattctacacatttttcttgatttactgagacttgaatgggcttaaacggagctcggatgaattagttatgaattttagaagaatcactgtgtttattactataaaagaaaaaccttaaatcatttattgcgcaataattcccagggctgacgtcagcacggaggggggtgtggtgccggcaagcggggcccactggtcagcggctcaggggggcggttcaccgtggaccgggaccacgcaggtggtccaccgccggtccacgggaccgacggcccagatcgccctcaggccgattggacgggcggcgataaaggcggccgccgggctcggctcggcatcaaagccgaccggccggccagggctagcggcgacagcacacgcgcgcgaacgcgttgccggcgacggcatccggcggcggaggcgacggcgcaaaagcgatgcgaaagcggcggcagcggacggcggcaacgaccgaaggcgacggcgagcgcgagcggcggcgacgcacggggaatcggggaaggaaaggaaaggggagggagtcctcaccggaggggacggcggcgaccggcgacgaggagcgatggagggaagtcgacacgcggcggacggcgaccgggacgacctaaagaacgaaaggaaagagataagagaggaagagaggggccataggagacgggaatgtcggccgaaggcggcggacatggcaaccctcaccgtcgcacgatgggaatggcgctccggcggcggacctcgacgaaggaggggtggacggggtggatctcggccacgcgaacccgacggcggcgacggcgcggtgcggcggcgagcctagcggcggctagcggcggccggagtagcggaaacagcggcggcaagaggttgcacggcgcgggagcgatgggaggctcgggagagttcggcgaaatggggaaaaagcgagagggggcgacggcagagcttaaatagggagagagggggccggacgtggccgggagaggcgggatttcgccggccaacgtgggggaagtgggggaggagagagaggcaggattcgaaaatcgaatcccggccatctcgggcgcgggcgcgaacgggagagagaggggagtgggcgcggggaacgcggcgcacgcgcgggcgtggtcgacgtggcccggaggaggcggagacgtgggcgcggtggcgcggcgggagcggcgggaggttggggaaggacccgacaggtgggccccacctgtcgcgaccccgggagaggagggaggggcggcttggctgggcctcggcctgcggccggcccagcagggaggagggggaggaaaggagaggatgggccagcgacccattcgaaaaagggagggaaaaagaaaaagaaaaaaggagaaaaggattttccctggaattaaaatattgcttgctccattttaattggttaaaattatttcaagagctctgaaaattccactaaaaatcctgttagtgaatttcgacatttagaactcaagaaaaattccacatgccaattccgattattatttgcattgatttaaaaggggtttactcttgctttgcaccggtattttcttagggtcatttataaattaaatttaggcttgggaggagaacttcggggtgtgacatttagccaccttgatggtatgaaggttgagccatacttgcaaaagccaccaagggccaccagtgccaatgacagaatctacagcaatcttagccgatgcagaattcagagtttgatacaatgagcctagcagatatttgcccaaggggaattgcttcttgtctacaagggctttggctatgtgctgccagttggtagtagggccacaacttggaccacagaacaagaacttttccaaccacatcattagaaaggctgtgtgttccttaggggttacagaaccagttcccatgttctgggtgatgaagccaatccaacctccgatgctcctagttttgtaagagaatttgcccttggtattcatactaactgggttagccgatgatgtgatgtctaagtccatgatcatgactatatccaggagagttggtgttattggtccttggttgaataaaaaagcattcaaagtattggactagaaataagctgcagccgatagcacaggctcatctctattcatatcggctacagtgaggactaggcactgttgacagtcgttatcgaacaatttcgaccgtccatattacccaattaatgaagactagctatgcttgcaatgcataaattccaattaaaatgtctatttccactatgtactatgctactaacatgtatgcaggagaagcacatataaatggaggagaatcgacggaaagcaaacgaacgatcaatcggaagccatcgagaagcaaacttgtggacagatgggctaataatacagaattcacacgagtaaacaagcctaataattcacatcagtggattgaggaatcaacaagaagtccacctacaaagttgtgggctgattgggcttggccagggttcggcctggttcggccgaaccagtagctagcccaattagcccaattcttcatcagctggtagttatccttgtcccaaggcggttatgaccggttaaactgaagaaaccgtcactggacacatgtcacaaagagatgaagctaaggagaatatgctccttggatgcttggagcatatccactctcccaaggcaactcatgtcacactgttaacgaccaaatttggtaaatcaagtatcggaattggagataaaaccgaagcagaatcaaagggaattaacagtttcggaaatagagtacacatcggctggggtccgaatcggctacaatctacattggtagagtttaagtcggacagggtagccgatgaagtcgattccgacaatatggcgatagaaacattgtcggattgggttgatatgcttcatatcaattgccacgcacggattgagtcctaagaaggtaatttgtatctattaattaggatattttatataattttcttgtactttgagtcggtaagagtccaccttaaggacttgtttgtttcctaagttgtaatagagttaggagtcgtgtccgacaagggcatatcatgtattttgggtataaaagtagcccaaaaccagtgtaacaaagtaacaatcagttcaataacactttcgacgcatcgccaacctttcactttcgtttactttcgatgagttcttgctttcgagttgggctgcatcagtttgatctccgacgacaaggtaaaacttgttatggcggtttgtgttctcgggattagtggttctatcttcatgatactctaatcttgtaatagccctagctcataaccaggtatttagaagtgcatttgttgtcttttagattgcatatttactatattgcaatttgatcatatgcgataacaaaattaactctaatcggtaaaattgaaaccacttctatttgaacaataacttgaacagaagtgtacatgtttaataatttattcaaatactagtttatttatcaccaacaaatataaattttgtggaatttttcctctctttttagacctcctaaaaattcaaactaactttcagattaactgaattcactttttcactagaattatttaactcaacattttttagtgaaaccaattggattagaaagcatgttccaagacccatctctggaccagaggccaaaatttgaatcccctcctaagcaattcgaattagcaggtcatgagtgagaagagggaataaatcttagttttgtcttttcttcttgtctcttcctctccaacccctctctctttgacatgtggatcccaccagcagtccctggcccacatggcagtggcccaaccctctcatactcaggggacaagcagaagaatagccatgccacgttttggccatgcaagggagagagacaagtgtgacacctctctctttactctcccttctcctctaagcttctggccactttctccactcctcccactcccttccagagaaataaacgcaaggtgagagcacctcatttcgcccccatcttccttcttcctccttgctggccgagagaacttcgtcgtcgccgccgtgtttctggtcgtcttcttcgccgtccaaccctcgttccctgctctcctatgcatgccctaactcccctcaaaatttcatcgattttcatgcagtgaatctctgggaacgcacatctctttttggagccccggagcgcggccggtgtcgtcgcgtcacccaagcttccagtgttcccgacgttccaggccgagatacagggtggtgctgctcattctaattcatcttcctcccagatgtaacaccgtcaagaatcagcccaagccgagctccaggcgtggagaacgctcgccttctttcctcagccccgatctagacacgttggctttgttcctccctgtccggtgagctccagatcctttaccttggccaaaaagactctgcatgcaatgttctagctcattcaagcgtttatttggggtttttatggccagatctagtcgttctcgggtcctcatcgtgttcattgtgttgccgggcatctccaacgccgtcgatgcttcctggacctctccgacccctttcagctgcacggtgagacactgcatacccctgaacaccccatgcatgcacccatatagcccattcagagctgtagctcgacacgcatgcacataccaagaaccaccgccgctgtagcttgtttttcgcgagctacagaccaccgctgtagctgtagcttgttcatcagcgcggacacctacgtgttcgcatggtcctcctctacagtttctctgttgaactcgaccccatccgagcctccgttcgccgtcggcaagctctagactgagcccagccatggctgcctccccgtgagctcgagccagggacctcatcggtgaattagataaacttgagggttttttcccaaaaaacagaccaagacacataacactgtagccttgaccactctgtaatattcaggaagttcgaggactcttaatggaaaactgttttcaacatgtgctgaaattgtactaacttcaaaaatgtgtagaaaattcatctgaactccgtttgagctgaaccaaatttctatggattaataaaaacgtgatctacaatgttgtaaaataaaaatggctaacttatgtactggtttttcctctaaaattgtgaatagatctaggtatccttttagtagtctagatcttggacaatgcataagtaaatattggaatatgataaaaatataaaataattttgttgaacttgtaaaatggtactcttcacttctgtggaaaagatcttgacaaaactacctcttaaatcatgcttagaagtttatttagcattcctatgatttaacttgtaaaatccataaataaataatgacaacacttatggttgtgaaataatttttcttaggacctgtgagtgatgtactttactctaaaaataatcattattatgaaatcttggtttgaaatgcatgttaattgtaatgtactccctccgtttcgaaatgtttggcaccgttgactttttaagtatatgtttgaccgtacgtcttattaaaaacttttgtgtaatatgtaaaattatatgcctatataaaaatatatttaacaatgaatcaaatgataggaaaagaataataattacttaaatttttttgaataagacgaacggtcaaacatgtgttaaaaagtcaacggtgtcaacatttcgaaacggagggagtactaaaggaaatattaatatttacagaactgccatgttcagtactgagagcttatcattttcatatctcccaaaccataagtgataatctgttgattctttcacctaaattcaagttaaaatatgatctacccactgtatttatttcatagtttattgatcattttgcatgtgcatgtttacttggctcttattcgtatattgcttcttttcgatagattcggagattctggagagtaacgagccatatccagaggatgatagtgactaccctcagcagcaaggcaagcacctaagcatatagaacctatactttctctaaaaatgatttggttgcaatctatacgtatatatatgcatgcattgcctagatattaatattatcggtttatggtgtatgggtagaacctatttatgcatttagttcttgtgatattgctgtccttataccctactgccactggtcacatcatgcacgcacgtgactaagtcgtcgggaaccccagcatgttataggtggttggggtggggctaagaatgggcatgtaatgagcttgaatcacttgtgtaccacactcgacggggtgtgtagcatttgatctttgttcatttcatgtgggtccagttgtacacctctaatcagagtataatctatttgaatagccgcgtcctcggttatggacaatgcttgatgtgttagtcagttatgttagcaccaaatatggattattatggatgggattctatttgatggtggtgttgccatgttgtgccatgttggtatggactttggtagtccatggttgataatgagagcgccgtttgggctcatttgcttatacatctcagaattatatacttgctgtccataaataaaaatgatgctagatttacttgtccttacttattttactcattaattgctcaataaaattagctttatgcaaatgttgaacctagagacccactgttggctagaaagcttgcatacttctctctcccttatgtatatttaattttgggtaagacttgcgagtacaatcttgtacttaacccggcgccgctgtttcaggtgaggataccggttatgagttatgcttcttgtgtggtcattgctctgccgagggcggcgagggcgatgagtgatctcttgcagtttggctcttgcccggttggtttgccctagtggggttgtggcaccaccggttttatcttttgcttatgaactctatttgagactttcgctgctatatttatgtgttgtatgttgggacctcggaccctattatgtgtcatgtatcttgctgcacttaaaccctattatggtacttgctatgtttactaatggcttgcgatgaaagtgtgaggctagtcgcattcctggggactagctaagcatgagtaacaggttttgatcgcttgagatacttggggatagcgcttttggatcgagttactggggtatgtttttggtcgccgccttcatatggtttgacgagcatatgacggagtggactggcaagctatcttatggttatctctcgcagtcactactcggcattccggttattatagtagaaggtgtcaactgtgataatggacacattgaggatgagtggctatttatgcgtgtatagatcccacttctccaatagtatgtggtggtcgcgttggacactggatggtataatactagggatgtccacaaatcttgtttatgtgaatcgtcaagttatcatatattctatataatctagatcaatattgctatctaacctcaaatcggctaacatctatcactggaaggcggccgattaagctagatctcaatgttgacttagattatatagcatatccaccactctatgaatcatccaatgacttgattgtctagatattgttcttctttttatacttaatgttgtatcagttaagtttgatctattaagtcgtgtttaagtcgtgtttagaattataatttctagcctgttaattggttgccgattagggtagtatcggggtttcagccgatcttaccttattttatgtttacttgatatgctaaatatgccctttatattaagatatcactgtaattaaatatattaagcttgttattgatctgttaagtcatcttaacacttgattgatctctatttaatatattttgtttatattggtatcttagtataaagtggtatcggagtattagccaatacatgttagatctaaaacaccggctatgctatgaacatatataatatctgattcaagttacttttaaacataagtgatttatactatctcggcaagctgtccgatctatcccaatcacttagtttaaatatatcttgaggtatatattatatactgttgatatctatagccgatcgactaggtctaaccttccttttaccttatatttcattgctgatctaattcacgttacatcggctaagttacaattgatatgtcatcggtgactgcccgatcggctatcgtttatggatttaaatgtgtttctttatttcttgttcgttgcaggatcaaaccaactggcataccctcgaactcgaaaccaagatttggacctgcactagagttaagcatatctcaggccggtgtgtgtttttcgcatcaacacacaccctgattttcgtttcaggatttataaattatttaataaattatttctacaatttatattaaatattcattaatttacaagtaaagttaaatgtgggaaataaaatttcctaaatgttaagaatggctagatttaatttttattaaattctctacgattaattatactctctggaattttctcgtatttttcggagctcaaatcctaattttaataatacaaagagcattttagcaattatataaatactaaatcctaattttaatcattaaatggtctgattataattttgttgaatactttgagtgtccaattattttcaggatttttcttggaattatgtgagcgttggaagtatagttaataaatgaaagatcatttcagtatttatttaaattgaaaaaaaaaatcaaaatcctcttctatgccttgggctgaatctggccgatctctctccttcagccctgccgatccagcagccctctccctctctctgtcgtagtctgattcgcgtcccttcttcaatcgggcctagtgaaggaaaccgcagaaaaagtctagtgtgactccctatcgctacagtgccttcttcaacctccagccgcccagccgagctcgagcagccgccgccccctcgccaaagggctgcagg

SEQ ID NO: 19954 - DNA, 9437 bp, Oryza sativa
aattcctgcagccctaatcaaatcaaatcggattcgaatttctctttcctaatcaaacgctaatccttccatgtcgccgccggcttgccatagccctccccggtgcctcttgacccatataaaaggaccccctgggactcctctacccctcatcacctccaccttcgcccgccgccccctctagcgccgttcccgcgtcgtcttttgcgccgccgccgccggagctgcttcagctgagcgccgccgtagcctcggtcgccgcagtcgcacggggttcacgtccacgggttcgcgtgaccgtcgccgacatcgtcccgccctccgtttgtgccgcaacccgccggagcaccatcgccgccgactacccgaaggccgccgccgccaaaacctcgccgccgtcgccgttcgtcgtcaatctcggccgttctagccaccggtgagttcgccgcgttgtacttttcgcattagtgccctccgttcgcgcccttatgccctagatcgctggcgaacttcgtttcccgagccaccgtccttcatcctctttttccttttatttaatacattaataaattagtaaagtcttttctgtattaggcaaaaatcatattaaacttagaaaaatcatatctaattcattataactcggattaatgtgtttcaagttgctaaatttgtataaaatagagatctatattaaaattacttataaattgtgttgttaatctgtttaatccttttaaataggttttaattgtattaaatcttgtaaaattcataattaatccattggaagtcagaatgaggccgttcaagtctcataattcatctaaaatcatggtctacatgtttatttactttttacgtactgtttatttggagttccttagtttttttcctcgttttgcgtattagtttgtcgttttcgtcgtttggaaggatcatgagtgcatcggaagtgatccagaagactaattgaaattattgcaaggcaagtcacacagatactaaacacaatcctttgagcatgttgaacatataattaaattctctttttatttcaaatatgcatttattttcgaatgtcattgggtggtgagccttttccctatattatggccgaagatttattttcctgtgttataatttgactagcttgggccttatatattggttcagctagatattagatataattgcttagccatgcttagaagtattagttaactattggggataactaatgcttcattattacttaatgattgctatttaatgtttgcacacggtggtcaatcgtgtttggttaattaattaattgccaattaaaacttgattaatggtgggttgtgagcacatggttttggtggtcgtgctcatgacaattaaggaccggttcgcgagctactgttgtgaaacattaaccatgccaaccacaagccagcgtgggcaacagctttaccttttgtatagcatagtttattacggggcaagagactgagaagtggtggagataagcccacgggggtcactgaggagtccatgccttgttttataaaggggtgactacgatccaggaacggtgcgctgtggtgagttgtgttgtatggggtgtattgtcacagctcctttcctaggtaccatgatggtattgacgcacatggtgggtacggtggtacatctctgtccagagtaaaattattcgaatagccgtgcccgcggttatgggcgggttgagcaatgtttttcgtgattagtcccacactactcactaatgtgaataatgtgatacttgatgattattaagaatgctaggtcttttgctgtgtgttactctactcttggattattttaacccctatatagaccttgatgtacacaactaatatataaattattagtataattctctcttatcatatcttccattgggattaaatacgataccttagaatacttccgggtgaaatgctacaatggtacattcgtgcgcttgcggatcatatctgtaaccatagtataccgggattatttctagtgctattgctgagaattatatttccagtactgtcgctaagaaataccaacaagcatttctagcgctgttgtcggggaagataaatcattcagagtttactacttgctaataattttatatttacctctgtataatcactatcctatgtaggcaaaccttgtatgttttctcttttatgtgaaaacagggtagtacaagactagttctgatctgccaaccaatttcaatcttgagtcacttgtggagcgagcctcgaccccgtgttgtccctcctcaagttactctatcagcaaccagaccatccattttcgtgccactagagtttaacgatatggctgggaagatcctccgcaagttcgcagctccctccgccgacaatgtgcccgttggaccctaagtcagcatgggagatggtaactttgaagaccagcctaatcacgatggcgcaggtttaccggttctgtggcaatcctaacgaggatgcaagtgctcatatgcaggaattgctgaaaatctgtagcacggagtcactccagacactatcaggctccgactgttcctgttctccctcctcgggaaagcgaaacagtggttctacgccaactgtgcaattgtgaatatccggaataattgctcaacgacattcctctcaaaattcttcccgatgggtaagaccaacgctcttcgtggaagaatatccagctttcagcagccgaaggatgaaacaactcctgaagcttgggaaaggctgcaggaatatgtcaccgcccatcctcatcatgggatggacgagtggctcatcctgtagagttttttcaatggattaaccccctcatcttgggatcacctagacactgctattggaaagacattcttcttaaagacggtcagaggtaccaccgagctgattgagaagatggtctcaaatatgggttggagcgaggaacgactccgaatccgtcaatacggtatgcacaccgtcaagaggacggaaatgctggccactcagttggatcttcttattaagagactggacaacaatgagaaggacgccaagcagggtgctgttaaggccctggactcacatgacatgtgaggtccgtggcaatgccagtcacactgggatggatcatccgaaaacccgtaaggactcatgctcacgagagcaacaacgggtatcgtccataaggagatcaaggatggagcattgctccatggggaagatcaagtacggaccaaacccacaaggaggtcaaggtctaccccgaaagacggacagtttcagcaatttcatgatgaatttcctaaagatcaagaagaaatgaggatccgtcgataccttaggctggcacccaagaagccaggaacacaggtcggtcaacctgcgttcccagtttcgaagaagccattgaccgcaccaaaaacaaaggaggtatggcaggttaaagagaagacacctgttcctgtacctttgaaactgggctgtcacgccctaaaaatcgcctaaattaaaaatgcattgtttaaatgatttttagaaaatattttaaaagcctacaagctaaaacctaattatctaggaaaattttcaacataaaagtgagctagataaaattttattaaatactatgcttgctcttctattttctagaattttctgggaattatttgagcaagggaagtatttttttaataattgaaacaacatttcacaaattattttatttaaaaagttcaaaaacccctcctttaagttgttgggccgttttcggcccaacactccctctttcccgcgcggccgaaccggcccaagccggcccagccgacgccgcccgcccctcctcccctcagccgccgacaggtgggacccacctgtcgggtgtgtccctaacctccggccggcataggccgagcccgagccgcccgagccgccgccttgccgcctcaaatccgcacccaatccggccccgtttcttccggatttttgaggggttttgatcctctcgttctcctctatctttcccctcaagaatcggagcaaatcgttgggtattttatctgaatcaaactcgttttcgagtttatctccaaaaccgagtttttgatttctcggaccgatttcttgcgggaggagtccgatctcttcaatccaaggctataaataggaccacctcgtcgccctctttcgtttgccccctctctcgtggtctctagtgctccgtagcgccgccgccgcgcgtgacaagacgccgccgccgccggccggagctcagccgcgccgcgccgccgcttgcgtcatcgccgccgccttttctcgccgccattaggtgcataggagcaaggagtagctcggccgccctttccccttcgtcgccggccgccgtagctcgccgccgtcggtcaacccgagccgccgctcgttccccgtcgtcgccggaagtcgtccgacgtcgtttgtcgttgtggtgagtaccgttgggttcgtctcgtcgtcctctacgtgttcttgccctccaattccgcagccggccgctctatctccggcgaggtcgccatcgtggttcggccgccttgggtgatgtcagcatgacgtcatcggtttttctttttcccgattttctaatagattaaatcttcggaaaatcataactaaataaccgtagatccgttttaggtggttcaagttgttaaatttttctaaaatcaagatttacatgttaaaaatatccacatgtactgtttatgcttgtttttgtactgttttgttgatttttgtttaattgctttagtttctgacgttccggaggagagcgtttcctttgaggaaggttccgaagcgtttgcggaagcccaaggcaagtcacacagatcccaaacaaccctttgagcatgttgaacccgtttaaagctattattttatttcaactatgcattgttttcgaatgtcatcgggtggtgaacctttcccaattaaataatggccgaagatgactttattttcctatgggttataatttgattagcatgaaccttatatattggattggttcagctaaatgctatatgtaagtttgcttagccatgcctagaaacatagctaattaaagggattaattataaactatgttatattaatgttttaattatggttacattaaatggtagctcacgatggttaatcgtgtgatgttaattaattgataattaaaacctggttaaggtgggttgtgagcatatggttttgatggttgtgctcatgacaattaaggaccggttcgcgagctactgttgtgaaacatttatcgtgccaaccacaagccagcgtgggcaacggctttatcttttgtatagcgtgattcattatagtgcgtcagactgagaagtggcgagaagtccacgggggtcgctggggagtccatgccttgtttataaggggggtgattatgatccaggaaaggtgcgctgtaatgggttatgttgtgcaaggggtattgtcacaactcctttccgaggtaccgtggtggtattgaggcacatggtgacatgatgtggggttgtgtcttgtgggtacagtggtacacctctgatcagagtttaaactattcgaatagccgtacccgcggttatgggtgagttgagcaatgtttttcgtgattagtctcacactactcattaatggtaataatgtggtaattaatttgactcctggtttggaatggataattcctggtttggaggtttaatttgttcaactggggttggttgttcaaatgtggttgggcctatgcaacatgggtgtgttgtatggtgtttatttaatattgattaattattacaactgttttactattctcttaaatattcgttaaatgctgtttctgcaaatgagctatattatgccatcctttgttatcctgtgcacttgcatatttgctgtgtgacttgttgagtatgtcatatgctcattcttgcaatattcattcatcagaagaggagtatctcagtgaaggtgatgatctggaggattaggcttgttctggttaggatgcgtgtggagtggagtcgccatagctgttccgtagtttgttatagttttattttccgctgcgtagaatgttattctttgagaggaactatctacctctgtaataatttattatttgcgaatattaaatagttatttatttgtactctattatcaatttgttattgtgtgcctcagttgattcctggacgagggtttaacacacatgtaagcgttcggaattttggatagattttccgggcgtgacagtttcagcaatttcatgatgaatttcctaaagatcaagaagaaatgaggatccgttgataccttaggctggcacccaagaagccaggaacacaagtcggtcaacctgcgttcccagtttcgaagaagccattgaccgcaccaaaaacaaaggaggtatggcaggttaaagagaagacacctgttcctgtacctttgaaactgggcacctcataaagctaagacaccagaggtacggttttgatgccgatttttctccatttatggcccattctctgcagagggttagtgaaccaagtactagtagtttttattttattattacactatatgcattgcaagcataactagttcttttattctagtaatattgacggacgtaactgatcgataacgaccgtcaacaaaaccccccaagcttgaacctttgctcgtctcgagtaaaggacaaaaggaaacaaaacttgattgttgatcaggagttgctactatgctgtatattctcaaatgtacaagtgcaaggtagatatactctctcaaatcaaataattttgacacgtgtcttacccttacaactgattcccgcgagacattgctttaccttgtcttgtgcggttggaagatagaacagcaatcaagcactagtcacccattatttattcaaccttttattccggaagttttcaaatgatctttcaaaagaaatccaagttcctcaaatgaccctctcgatcactcagagtgtatataaatgaattcctcaccaaagtagcctagttgattcctactctaaggtttagtatgtggagcttggtaggtatcaaacatagcatacttgcatttattactaagtcaaaactttagactagagcagatgactagacatactcaagatcaagatcgtgcataaagtgtgtgtgctatatggtggaaatagaatgtggaaaaaaaaaggaaatacttctcctttgtgctttctttcttctcccaagatcattcatttctttttttggagggggcatggctactcatttttttatcatgctcaatattttgaggagcaagactttattttcctaaccatgcctttccctctttttatctctttttggaaaggatattatattggaaggagaaagcatataattggagagcttgattttgggtgatagcatgatggatatagatggaatgaatgaatgctaacttctagtgcagaagtttgcatgtgcatatatgtgggtgtatgatcttgatcatagagtatcaaaagtatctacacaagtctcaagattttgacaaagttcaatggaagtacaagcgcccaaaatatatatggtttatcaaatatgaaaatttttggctctggtaggaatttttatcaaatgaggaacttttaagtttatcattttggaaaataaaacatccggaatttaagtcaaacttagaacaggatcatagcaactcttatcactatatcatctcgcgacaacctagacttagttcggcaagtgcagcccacttacctcaggttcccggataatatgtggctactatttattcaatctttcagagcgtacttaaccgtgaacccatatataagagatataaaacagagaaactattcatcatctcaacaagagaactagttgtcttacctagcataataaactctaacctatatttttggtattttctattttgcaaatttttttatgtcatttttagtttataggatgcaatgtggaaatccaaatatgcaattggaaaggaattgagcccttcacttaggtccctggtagggattgaacccttggaagcgaaagtatgcttgaagatcagcctgctattgttgcatcaggttattgatgttgacgaactgagcatcagcattttgctgccattctcacccgcctgcatataaagggtgtccagcctcatcgtgagaaacccaagtcccgagaggaactcgagcgccaccagttggaagcaggaggcatcccacttgatccagaggaacgggtgtgcgcgttcccccagtgtacgtcgtgcggtgcttgccagcgattctcattggcactgtgccaggaagaaccaccggtgctgtgccgtggtgcctgggtccaaccgggtgcatctcccgttggctcccagtccgcctcgtacatctgcacaggtatcgatgaggatgactcctcatgctcttgccttggtctgttgcgtgtcttcctgtaagatgtacctgcacaagattcttctatggtctgtaggggaatggttagttcctgacagttgtacaaatgataccccgcattgggtaatgggatttcatttgtacaaccggggaaaaagtatatcaatgagccatcgtctccatgcttaagtatatgcccttgtactaagtatgtttcatcctcatagggacggacagtggatatatactcgatctgatcggtggtaataactccaaggccattcgctatacgggtgatcaaagaagtacactcaacaggggcagtatacttaatactttctaactgtcacgtcctgataaattcatcccgaaataaaaattattttctaaaaggaataatagaattaattaaaattcgaaaagaaattggcaaacactaaaatacgtataagaaaaattcaaatgtggcccggagattttttgttaaattctccttggtctaaaaggagccctcaaattttagtggaattctcagagcacaaataataattattaagaaataaacaaagttaaaatgattttataaaaagaaaaatcctaaaaagtcttctttttcccccttcccctcttgggccggctcggcccatctccctcccctccctctcctctccccgcggcccactcggcctctccccgcgcgcgcgccgctgacgggcgggcccgcccgccaccctcgctgacaggtggggcccgcctgtcatccctatcctcgcgccgctcccgccgcccgcccgtgccctagcgccgccgccgccgccgcggattccgccgcatcccgccgtccccgcgcgcaataaagtggggggaatcattccccgtgattccctctcccttttcccccacttttccctctctct

SEQ ID NO: 19955 - DNA, 6710 bp, Oryza sativa
attcctgcagcccattgtcgtcgatggaagaagttgtgtctctccccgacctactccaggccgagcaaagggcaatcaacctccggagggcgataccaagcagaagaccgtcatccgcttcaacccacaatcagaaggaagcttctcctgtgaatgatagcaatatgcagtcctatcacatcatcacagaactaatcaaggatgcagtcactagaacaatgccagctatatctctccagaatcaaaatgagcagccatatttgtggttttcagttcgctacctatcattgtgtaatcgaaagtttgcagcaatcatgtaatacataaatatattcatgtctataaacagtgagcttgctatgcttatggatgattcatgttgaagatacaatgtaccgatgttaagcaccttccctttttgtttaaggcagtgcctcgtattcttgtaatatgggagaaatgtgtaataaagacaagttctatgaggactctttcagaagatgctgatatgggattatgtgtataattgtttactgtcaaaggagacctagggtctcatttcagaggaactatgttctaacctcgagttaataaccaacctgttgatggaaaagaaaatcaattaaactgtgttgggttaaaaggccaatgagacagtagttggggataggagtttggatacgccttttacagatcaagataaggattgttggatgaaacccataagggtacccgccatgcctctacattgataagttcgcatatacctgcaaacagttaagaagacccaggagacatcaatatttgagagcatagtagtcgatggttggtaattagtctatcaagtatcagaaaagggtcaaaggtgatatggcagaagaacaatttggattctccccatctcgaggaagcactaaagatgatcatcggcaattaaaccctagtggcatagatacagatagcaagcaatgtatttccctgaaggtagtcagtgcagcttttgacgaaccacatcaaggtttcactgaaaggcagcaagccaaaggacctcatcgtccccagaagcgtccgcaatccacattaaagaataccacctgttagagataagccgaaagatgattgataaaagagattggcaaagatgttctccagcatgaaagaagtaggccgaaaggtgattgataaacagaaacatgctctgcatcgctcgaaggaagacccctgatagtaattgccccgcaacagtcaccttgtcattaagtaagcaagatgacctaggtaaaagtgtttctatgaaggcaaggagtgaaatcttcaactcagtatcagatgctacacggagtgaaaagtgcaagcaccggttaccaggtaatgccatgtcttgggagatgatccaatgggaaagaacacatcaaggttaaaggtgtaaaggaatacgttgaatgctaactgaggacaacctgaagataataatgggaagtaaactgaatgtaaagaaagtgaatccgagctgcttgttcgtgggagctattcccagttatgaaccaagtgatatgttcgaagatagtctacagaggtcagattaaaatcacctctaacaacgaagcttcagatttggcaggatcacgatcagacaataacaagtccagcagcaaagtcattcgggaagacgtcaaagcatgtcaagggggataaattggttctcttgggaagcataacttatagttaaagtggttgacccttgcatcgaatagcagaagtacctagcaccggagaccaggaaagctaatatgagatagttaatggcaagttgtcaatcatggtatccttagtaagcgggatatcatagtctaaagcatatggtggtaagctggaaggaaacgccaagcatggtattctcatgatgacaagcatggtatcctagtaatgacaagctagtgttgacgcatgagatgaagtggtaacttgtatgaggttgactccgaagatatgaatcatgagaagttctggaacggaagcatcattaaactaccgcaacctagtctgagtcagctaaaaggtgcaccctggttcaagtcaggagaagagaagattccatccgcaacaggagatcgagccaagcagtccagagtggagaagttttgctaggcaagttcgttatagaagacgcgacggaagaagtcagacaagaagagaagaccgcccaacctatcttcatgctagcctcctcgaatctcggggacgagattcttgtaaggggggtggatttgtcacgtcctgataaattcatcccgaaataaaaatcattttctaaaaggaataatagaattaattaaaattcgaaaagaaattggcaaacactaaaatacgtataagaaaaattcaaatgtggcccggagattttttgttaaattctccttggtctaaaaggagccctcaaattttagtggaattctcagagcacaaataataattattaagaaataaacaaagttaaaatgattttataaaaagaaaaatcctaaaaagtcttctttttcccccttcccctcttgggccggctcggcccatctccctcccctccctctcctctccccgcggcccactcggcctctccccgcgcgcgcgccgctgacgggcgggcccgcccgccaccctcgctgacaggtggggcccgcctgtcatccctatcctcgcgccgctcccgccgcccgcccgtgccctagcgccgccgccgccgccgcggattccgccgcatcccgccgtccccgcgcgcaataaagtggggggaatcattccccgtgattccctctcccttttcccccacttttccctctctctctccctcggattcgctcggaatctttcccctaaacctcgtcggcatcaatggcggccgcatctttcgcggccgtttccccctcgcccggccgctctctccccctcccgacgctatttaatcgttccccgtgcctccctcctccgtttccgccgctcgccgctcactctccccttcggaatcgagcccgcgccgtcgtcctctctctccgccgtcgccgccgagctccggttcgccgctgtcgtcgccccggacctcctctcgtctcggcgtctcctcctttggcttcgccgcgtcctcgtcgacctcgtccgctcctccgtttcgcccgccgaccgccggagcaccgccgtcctcgtcgacccgaaccgcgccgccgccttcctccacttcggtcgccgtttccgtcgccgccgtcgacccggggtgagccgaagaccgccgcttcacttccctcttctctcctctctctcgggcgccgctccgccgcgccggtggtcgccggcagtgaccatcggggcgcgggcgcgccgcctcccgtcggccgtgccggcgaggccgccttcgggcgcgccccgcggctgccaggtggggcccggccgtcagccgcccgcgcccgcgggtgcggctgacgcgtgggacccacggcgccagccgcgtgcacccggtccaccgtggaccgagaggctgccgcgtgggtcccactcccgtggacccggtccgcgcgccctctctcccggctgacgcaataattcgattttaaattaaaatttaaatgaagaaattcgcaaatatccatttaaagaacatataaacttcaaatgggcataacttggccatttgaactcggaattggaccgttcaagtctctaatttttccttaagaagtcaagaacccatttttgtgctttgtttctgctgttatgtggaatttattagcgtaaaagccttttcttttccgttggtcgtgtagacgctgcagctttggaagatccgctcttcgtggaagttgaagccggcgtttgggaaagtgagcaaggcaagtcacatcatccttgaacatattgaatcccagtttataaaattattttgatttaaattattgcattatcgctttatttaaattcccgcgttatcacggttttactaagccatgcctatttacctttgttatgaccgtattattgttgttattgttattattaccttgtccaccctagattaaacaaaaccccaactagtggatactctactcatggtaccactagtatgattttaggtagatgcttcgctgtttaattagacaatattaggtggttttataactttagacttggggaattctcatatcacttggacactttggaattgttggtttattgtggaattggattcacaccgccccctctattcaaaatccccaaaatggttttaggctgggctcggggtgcatggttttgatagtagcacctcggccatataaggaccggtcttcgggcctctgttgcaaagcactaccgtactttcacatgtctagtgggtaaggcttagtttgtggctcagtcaagttataaacaaaagtacacggattggaggtggatgaagtcgggggtcgatggacattctccagggcaaatgaaggctacacgagctgcggcccggtagtcgagatgtcatggtacagggttggtgccctgctgctgggggctcagtcctgcctgcctgtcccggaggttccggccgtaggtgggattgggtcggtactcttctctatggctaggatgggttggaaactatgtcgcgtcttccgcctgtataccgtggtggtatgtggcacgtggttgcacgtgaggaagatgtgtcttgtgggtaaagttgtacacctctgatcagagtataatctattcgaatagccgcgccctcggttatgggcaagccgagcaatgtacccaagttagcgttttaattcctaaaatttgcttaacaactaaaatatggaatggttggcctgggttggcttgggacgagctgggacccagggtcgggttgctagttcggtctgaatcatcgtaggccttgggttaaggcaggttcgtgtgggttcacggccttgattaataacactgtgtaactctaggatcgtctttataaaatggctttgggcaactaagtgacttttaaatgctgtttactgcaaaacttaacccctattattatccccttgtacccccttgcattaatcatgcatctgccggtgtgacttgctgagtactgtggttgtactcattcttgctcaatctttcccctcttcagtaagagaagctttggagaagaagtcttaggtggagtcctggcttataccccagttgagcgcctgtgaagatggagcagtaggcccgctagtccgctgctgtttatttttgattgtcaggccttaagtgcctttgtaataatgtaaatattatcgatataatacagatgtgtcttttatatcatgtttgtatggtgtaccccggcttttcctgggacggggattaatacactagcgttcgggaaaatgcaattttctcggtcgcgacactaaccattgcctaatcatacatttaacaggagcaattttaatttttctaaccatggcaaacatgataatcaattcatctccttgaatgggtcaaagatcacctctaggaaacaaagtgtaacaccctgaaaattcgaccgacaaaatcaaaactctaaaaatacggattttcaaaaactttttaaactaattacatcatgccgatcttattcgtctattttatctgaatttgatatcgaagattattaatcgtgagtaaagaatagttaattaggaataaaccttaaaaacaaattggtaaaataaatacaaaataaagattaggtgggatagaaataaataaaatattatcgcgaccatatttggatcaattaaatttaaatacgatggaataagaattaaccctaattaaaactcaaataaattacataaaaataaaatatgagtaatattaatctagggtgaattcattagttaagataacacaaatattgagtaaaatgcatatatgcaaaattaagaattgtggaatcaaatttatacggaaattacactaaaatcgggttaattagaaaacggcactgttcattgcacctaaagtgttcgacggggtcccctaacccagctcctcctttttccccctgtctctgtcgccaccgtcaccgcgcgttgccgcctcgcgccccgagccgccgcgcaccgtcgccatcgtcgctagccgccgcgcgccgtcgccctcgtcgcctgccgccgcgccaccgtcgccatcgccatctcatcgccgcggccgcgccgtcgccgtcgcgtcccgccccgcgctgcgcgtgcatcccatcgccgcctcgtgccgcgcgccacctttgccgcgccgtcgccgtcgccatcccgtcgccgcgtgcgcgttccatcgccgcctcgagccgtgccattgccgcgctgcgtgccgtctcgtcgcctcgcgccgcgagcccgccgcctcgcgccccgtgccgcgctgcttccccgagccccgtgccgccgctgctaccgcgccgcgccgcccgttccatcgcctcgcgccgtcgccgttcggccgtcgcgtcgccgctgccgctcctcgcgtcccgcgccctgccaccccgccgacaccatgaggccgccgcccctcttccctcttccctattatctctttccccttcccttatataatccccccctactcccactctttccctccatcctcacctcctctcctctacccaccccaccacgccgcctccacgccgccgcgtcgtcgcatagagctgccgc

SEQ ID NO: 19956 - DNA, 2604 bp, Oryza sativa
aatctttcccctcttcagtaagagaagctttggagaagaagtcttaggtggagtcctggcttataccccagttgagcgcctgtgaagatggagcagtaggcccgctagtccgctgctgtttatttttgattgtcaggccttaagtgcctttgtaataatgtaaatattatcgatataatacagatgtgtcttttatatcatgtttgtatggtgtaccccggcttttcctgggacggggattaatacactagcgttcgggaaaatgcaattttctcggtcgcgacaagctggtatcagagccatctcgactgtaggataagccaagaggataaaacctaaggacatattttataaataaaattatttgcgaaagttccttttttctccttcccctgtgctatttgcaaaacgtttactctttcttccttcttcaaatttcaactagtactagatggtcggctttgtggagaagaagatgttgtcaattgtctgccgaagctccggaagactgcaggatccgctagtaaagtgaaggaagcagtgaagccagctgtgaagcaggagcgaagatcttggagaacccgtcgcagaacctaagccaccctctagtgtttcgtttgtcgtgtgtttccttgcttgtgtgtgtagcgcgtggtttgcatcagtgggttgtgatgtaaccatgctaggttgtttgcttaatcaacttgcagaataagcctaacatacatcataacagcaaaagacttagatctgttaaggtcctatccttagtttctaatctgtctctcccctttgttttccctctctccctctccaaacctttgcaacagatggctgacaatgagaaaggcaataaggtcagaagtcaggacgttggtacctcaagctcccgagtgaacgaagcaccagacaccagttgtgtgacactggtccaacacctgattaaccagaaccgattgcttatagagatactgcagcagcatcagacgccaattctgaacctgagtcagatacaacctcaagtgcagttggaggcagtccaagcacccacaccacaagtcagcatgccgccagcatcccgaaggacccatggtgacgtgccacatgttgactcaaaagaagcaagtatcatttgttttatgtgtgatgagcaagggcactatgcaagggagtgtcctcagcagaaaagagaaacaccaatgcgaaccgaagatgaagtccgtaagatgatcattaccagcacagaatggcctccaccaggaatgacaaaacgtcagagaagaaataccttccgaggtgcaccacagttgacagagcatcttttagctaatggaggtagagtgtctgatagtgaagattcagatcaagtctcctcagatgatgaagacgagaagtctccccaaggtttcaaccaggataaaatggaacgtaaggcatgctctcgttgtggagaaatcggtcatgttgccagctcgtgtgccactacatgcattcattgtgaggaagaccatccacccgacaggtgtccaacgagcaggatcacttgtttcttttgtgaaggaactgatcatgtaccaaaagattgtcaattcagttttctgttgacgaagaagatggccaaccaacctgccagttccaacggagagaagcatcaaggccacacaaatcctcaccaagattacagtttcagcctaactccagtgccaggacagaggaatcaaaatgagaaaagaaaatgccgagtccgggaagatatctgttgcttcaattgtcaaggaatgggtcatttcgccgacaagtgcccaaaaccgagaaacatagctgccagcacgtcagtccacgcaactccctgcaatcagaagcttgctcctcagcgaattgtcatccatgcatcccgaagcagtcctatagcccgcggtgcaacagctccaactccagctagtgcattaccacaaggtgtcaatgctcaatttcagccgcagccaccagttgacaagacagaggccagtatcggcattgtacctttggatgttccagcacagcagccaagaaatcaagtacaagatgaagaacccgagcgtaagaaagttattgtcggttacaactgtagtacctgttaaggaaacagacatgccaatcgccaagtggtcactggagcaaatgcagtacctgttaagcctagcgctagtcagaagcaaccataatactcttatatcagtgttcaaatacttttgttttatagttgttccccgtcaatcatgtaataacagagaaacatgagataatgaatgagtttgataagtttatgaaggatccatgttaagattgcaagagctgtgagttgtgtacattttgttgttgattagggggacctagggtctcatttccgtaagctcataatctattatgaatcaaataacctagcgattgatggcgaagaaaatcaagtgatcaaccaaagagacatttgtttggactaagagtttcagatatgtcttcttcggatcaaaggcatgcacccgttgtggagaaattggacacgttgctagcatgtgtctcacactctgcactcactaggaagaagaccatccaccaggggag

SEQ ID NO: 19957 - DNA, 3602 bp, Oryza sativa
aattaccttcgggaaggtaattgagatgcggcatgtggagacatgagcgccacattgccatgatgttgatgacatgatttgtgaaaggagaaataaaattaaaacaactgttttcgactggggcggacggaggatttgggtggtatctggaaaaggctagtaccgtccctagtcaattaaggaccgagccatgaagttaagcatgaaacgaccccccgtacaaccgtacttctcgaatgggtatagacctagcagattagatagccaagtggaggcagtatccctgcatagatggttcacccctgattgaggcaggtgcgctacgatgggacagccgttgaggtagggccgagaggcgtgccctatatcggtgttgccattggtaggactgccatgagtgtgtgagagagagaacttaacttgaaccataatttaatatgcgtgtgagacttctctttccccgggagcgccagaactcctctcactgctagaaacatggacgcctagagtgcatgaggatttaagttcatggagcgggtactgccaatgcgaggttatcgaaaagctttgccgtgacgtgtctcatgtgttgggacgaggctcatgtgttgggtagtcgcggagtgcgggtaaagtgtacatccactgcagtgtgagtaaaccaaatctattcgaatagccgtgctcgcggttattgagcaccgggacatgtattacacttggctagactctaaattcttaacttgtgtgggatgggatattgcatgatgaatttttatgctgatggagccacttcctaagaggcgggaatgtggacgtcctcagaaaaccataacgactcaatggcgggaagctatccttgggatcacaatggatggtggacagaaccgtcattatttaatatgaacactggtattaaaacttgaacagtctatgctaggtcttaggcttgtgaaaagaattacaaaacttgctttgtgcaaaaagaaccatagccatcctttgaattcctctgtcatgtgcatcattgctatgatggcttgctgagtacggttggtactcacccttgcaaatataaaattaatcagaagcgggagatgaagcctcggaggatccctatgcctactaccaggagggagatgaagacgatggcgctcagtaggtcttagtacggttgttgcctgtggcaatggcatgccgctgcctgaattccgctgccttatctatttctgcttttggatgtattccggaccgctcggtccgatgatttaagactatgcctgcgggcttatgatgtaataattcgtattagacactcgtgtatgtgcacttggtattttagctatgaattcgtgtgtaccagactacttgatccagggaaatggtactatttacacgattgattcctgttataaaaatgggggtctacacaaagtcatagcaatccatttgtgcataagtctaagtgtaggattatggatgtcatttgtcctaggacgtctgcaagttggagcaccagaaatgtcttcccaaaatctgtttttcttgaacccgggaattcctttctgaagatcggttttacagttatcgtgaaaaccaagaagtgtacttaatcctttccatgaaagcgtatactctttacggaaaaaagaaaggatatgccatcttctgattctttcaaagtgcacagaaattgtatattaagcaaatgagaacctggttcatctactactgcaaatctctgccaaattacagcattccaaatggcatgaaaatcactatccatacctgttttcctcagaagttccggatcgtacgcccgagtgtggctgaacttccggtccttcagcatatggtaggcttgtaattcctgatcaccgataaggttgaggttggtgtcggtcaagaggcttgtcggtatgtcggtgtcttccatcgatatgtcggtggtcgttcccgatgaagagccagatcccttcttgaacagacgggacaaccatcgcctcgttctgcacaaataagaatggactaactcggcgggggttaggatagcaagaagttctacccaccggttagcttcaacgaaacaacttgtgtatgcaactaaagtgtttgattttgagacaagcttgcaaaacttgaaatggattttgagagcaaagttggagaggaaatgaaaatgagttgaaatggggtggattcctctctctcgaccggttggcttatatagggcaccaacaacggtcgaaactgtcatgtgggtcccactagccgttggtctgccaaaagtggcggccgaccgttgcctggccggttcggccgaacccctagtgggcccaaccggccccacttttaaccgttgggttccaacggccagtgtggtcgtggcaaactaaattttgattgaaaattttgctctgaaaaattcattttgaatatttgcctcaaaattcaaacctaaatgcaaattttgagaaattcaaacatgctttgatgatgcagaaatcaaattggtgaaaataaatatgaggatacataccaatttacctattggcgagggcggcgtcatttcaagtccgacgtgcaagaccgtacctccggcgttcatttcatggatttttcacccgtctccggaggtgatggagcgggcgtcttctgtttcagccaccataccttatttgtccttggtatgggcggcggcttcttttgagccggtttctcttccttctaggccggtgtcttccaataacgggacctcatcctggaaggttgtatctccagagatttcttcatgaaagcgatgaggctgtccattttgggtggctccacttcgaccgtctgaatattctacggggctggcccgtactttaaccggaccatggagcattgtttcgtcctcggctggaactcgaacttctcctcctttccattgatgtggaaacggatgcttcttgttccgacatcaatgtttgcctctgcggtactcaggaatggacgcccaggatgagcggagtctccttaccggtgtccatgtccagcaccacgaatcgaccgggataaagcaatcccgtatctttaccggcacgtcttctgctatcccggctaggtagcggaccgacgagtcagccagctgaaggcgcatcggtgttggtgccaacaccgtaaagttgagtttgtcgaagacgtccttgggcatgacgcttacacttgccccaaggtcgcagagtgcctggtcgaatttttgtgtctagattgagcaagtgattgtgggacaccccgaatctttcttcttctccgggagtttgtggaggatcgcgttgctgcattcctctgtcagcttgaccacctcggtcgtcggtagtggtcacttgttgttgaggatgtctttgagataacgtgcatatgttggcacttgcatagcgtccaacaacggacgttgatgtgaatcttctagatcacctcaatgaaacgagcgaactgctcgtccactgacggcttcctcatcctctgggggaatggcagcaacctcgtgtcgcagtaatgctgcggcacggtcttttctggctgaatttcttcttcagccgctgcgtcagacggtgttt

SEQ ID NO: 19958 - DNA, 2299 bp, Oryza sativa
ggtctctgggcagtcattcccagaatgtcccgtgttgccacagacttagcacgtgatgtgcgagtccaaggccttgacggtgcattggggcttcttgtcgtgttcgtcaagtcgtttcattaggaggtcgagttttgcagcgagtatttccgtctccttggcagtgtgcattcctcgctgacgggattggagccgttcctcgctccaacccatgttagagactatcttctctatgaggtcgatggctcctctgaccatcttagagaagaaagctcctccagctgccgcatccaggtggttgcgggacgtgggagtgagtccattgtaaaacttttgcaggatcagccagtcgtacattccatgatgaggacagacggccacgtattcctgcaaacgttcccatgcttccggaatggactcatcccgcatctgctagaagcccgaaattcacccacgaagggcattaatcttgcccatcgggaagaactttgacaagaatgctgtcgaacatttttcccaagagtttatcacagcacgattggcatagaatcacttcttcgctttcccgaggagggaaaatgggaacagcctcagcctgacgatatcaggactgacgcccttcacagtgtacgtgctgcaaatctccagaaattgttgcaggtgtgcattagcatcctcgttcggcttgcgacagaatgggctagcctgcgccatcgtaatgaggctggacttcagatcaaagtccatgtctcccaaattgagctgcggcccagtggccacattcttagaggagggagcagcgaactcgcgaagagtcttgtcagccatggtcttgaaagttggtggcgctagtacgtttggcttctttgtcggaagagtcttctgcgggggaacaacccgcagttttatgcttcagaagaagacttatggattttcctggaagttttccggcaggtcaaaaacaattatacactaccctattttcacaacaaagggtgaaaacaacaaggttaacctgcaaaggatattgactatacagaggtaaatataagatattagttttaggaatctcttcttataaatcttccccagcaacggcgccagaaatgcttgttggtatttcctaacgacattactagaaatataattcccagcagtggcgccagaaatagtcaaggtatattatggttacagagattatccgcaagcgcacggatataccattgtagcatttcacctgagagttttccaagggtatcgtatttgtttatcccgtgggaagattataatagagagaactaaactaatatttatatgttacttgtactagtcgtgcctaagaaggggtaaagataattccagggtagaatgacacacaagctcaagctactcattcctatattaaatctctaagctaagtggaaagaatatagaaaagaatctattcctatacttctagtatacatagtgtacatacatcctaaatatatgattaactagctattaccccctttctgatgccctcctggtacttcgagaagccacccctgaccgccgagttccttacgacagcccgtcatgaccatacaaccagggctaaatacggaggagtaccctccccagggaattaacttaggattatatacacgcaaggaggaatacccgtagcgagctgtcaccatcagcggcccacctctcatccgcagcatataaccccaaataatgatacctagtaatctagacaccacgtctaaactaccagatactactctaatatcatcgtcatgacatagagtaattgcatatgcaaacattatacccgtaccaatgcatctcctagaaaagctagcagtataatcataatatctcggacatattgtaaagctggtattcatatattcggaaaatattacaatactagagtcgtatatagaggaatattctaaattaaatactagtcttgcaaaagaagaaaggaaagctactagaggccatacccgaactcttccaaagacttccagactccgactactattctattcctactccactagcttaagaacactaaactaaacttgagagagagtgagagcttcgatgcttggagtgtgtgaagaaatggagggagtgaatgccttaaataggctgccaatgacggttatggcagttggaattgtcaggattgccctctaaccgtcattggggagtgatccaagccgtccacttggatcgaacggccgtgagggaggttcggccgaaccctgggctaggccaaaccagcccattttcggctggcggg

SEQ ID NO: 19959 - DNA, 1578 bp, Oryza sativa
cagcatataaccccaaataatgatacccagtaatctaagcaccacgcctaaactaccaaatattactctaatatcaccatcgtgacatagagtatttgcatatgcaaacattatacccgtaccaatgcatctcctagataagctagcagtataatcataatatctcggacatagtgtaaagctggtatttatataatcggaaagtattacaattccatagtcgtatacagaagaatattctaaattaaatactagtcttacaaaagaacaaaggaaagtaactagagccatacccgaactcttccgaagacttccggactccgactactattctgttcttactccactagcttgagagcactaaactaaacttgagagagtatgagaagcttgcttgcttgaggtgtgttggaaatggagggagtgaaggccttttatagctgaacaatgatggttggaaatgtcggtaatatcctccaaccgccatagggaagccatccacaccgtctatccaaaacctggatccaatggtgcttcggttggttctgccgaacccagcccaaactcggtcagtggcctcctcttgctctccttcacccagacttatgaattttggtccaatttgatcgtgtcaattatggtttcatggcccatctttctataagtctatttctcggcatcgtccgattgattgatcgatggttttgatgccgattcttctccatttattgctcattctctgcaagaggttagtaaaccaagcaatagtggactttattttattataacttagacgtggtgtctagtttagatattacctttgtttgttgtgtatcccatggatttgtcagaggtaggcgacaggtggtgacagccctgaatcgcgtcctagtaatcttccacattcagatacatcatagagctatagccagaaccacgctggcagaccagcaggggtcggtgcctgaagcaatagattggaaattacttcaactcagtctagataactaaaacacttagaaagtcctctctagcctagcctagcttgcttaccattagttgttgtccttagatagtcttagatttatgtagattacacacgttccctgtgttcgatatcctttaggggtcacccgaagatgaagtactacagcggtattccgtgtgcttgcagatttatctatggtcttaaggaataccaacaagcatttctagcgtcgttgccggggaacggttgctaatttttccgagtctaggtcatcctcgtatctttttttatttcttcttcttttatccctttccttgatggagcaacccacaattcaaaacctttctgctcctcaggctgatctttgtgagccatctcgttcttcaaaaccaatcctttcataaggctacgaaatcagtcctggctttatagccatgattcaagagcaaaccttctctggtggtattagtgaaagcccatacctccatcttcgggactttgagctagtgtgttcatgcctatcgatcgtaggaatggcacatgaaactttgaagtgaaaattgtttcctttttctcttagagatgaagtg

SEQ ID NO: 19960 - DNA, 2285 bp, Oryza sativa
cgtaagccttgtccttctagcctacagaacattgttcttgtttatcatcaagaaacaactatgttcttgcatgatgcatctcttgaggaggaggatcttcaggccacagacaagcttgagacattgactctagaggatgagagaaaacattccacaaatgaacatgaaagtttttctttcaaaattccccaggattcattctcacataaggaattcctagagtcctgtctgattagtgacgtttctctgtgcgaggaccacaaccaccttacggtcctcatttctaacatgtttagaagtgtggttctggatgcttatatttatcataaatactacaaatcttgtatttgtttgtggcactaatcttgcagcatgatgtccctatggtcgagcttgagaccataatcaaagcactgccaggagatagtccagattactacggtaagtttcttttctaataaaagcaagaacctatgtttaggattgtatacatcttcgggtattcttggtcgctaagcatttcaggttgagattaagaatgagggtcagacgatgcctaagtacacggttagctacatcaactttacactttggcgatcctcggtatgggaacactctataggagactccgacatcacacacttggtttttgatgtcttgcgacacaaaagtccaagtgtggggggaaaggccgacgagcttgtgatgacgagttccatcaatcaaggccatcttggtttaaagttggtgttagtcccaccttactaaaaaaagagataaaaaaagataaaaagaggagaaaagagagacgaaaaaaaaagaaaaaaaagatgggagaagaggaagagagcaagagagctgacatgctgtgtaatgccctagaaaaaaaaagaatagcgtatagtatatattggaattccctacatttttttttggtgtttgcaattagaagaaaaacaatagttatacgctagttgggctagctttcggccagcccaaggcccagctgccccctccacacccccaagaccctaggaggtcccccccacctccccctagccgtcatttggtaccctggggcgcccacctccccctctggtcgacctcccccatgcctgccctactgcagacctgggaagaagaagaagggaaggagaagaaagggagagaaggaagcggagggaatcgaggtgaagaaggaaatgaggggtttgattgccgcttcccaaggaggcctaggtatcaaatacatgatctttcccactgtattggttttcttttagggtttagatcaagtgttggaagtgagtaagtttgggatccaccgatttattcctcagccaggtttttcttgctgatatgccccctgcgcagttctgttttggctgcttttccggccaacataatgggttttcctgtgaaagtctctatacaaaagttgtagataacgtgtagatctatcttctgaccagatggcatgattttatatcaagtggtttaggaggtatcaatttctgaagttggctgtctgaatgtcgatgcatttatctgtagtcgaggttcagagggattttaaaggatcttaatgatggaatcagagaatcttgtacttacagaagttgtagaatatgctgtatctacctcataaaaaaattgttagcttttatcttgtattttgttgtcagtgctcttttgaatgtttgttgcatagttttctgggcagatgcacttatctgttttgtgccatgttttaggccagctaaatggaagaattcaattttgttatctaaatgaaagttgtaactcttgttctgtagatgtcagaaatggtatatttttctatgttatgtgatgtagaattggaggtatcgaatcgttaatctatgctgcttttataggaagattatcggtgatttgctttatgttgtttggggtgggttcccagcatagaaagtgaatgtgtgattcttgaatgattatatgtgtgttgtttgaggctgagtcggtgtttattcaggtgataccacttcggaatgcaactagagttcatctcgtcatcggtaaaggcaagtaaatgtagcggtggtttgctacagctttaacctgttattttcctaccttcactttaaaattatatatcaataaccaataatcaagatagtattacaggtcgtagcaaggttttacctatctgaatcattgcttatcgttattgcactgtttatggttatactttatgctcttggttataataaccttatactggtctccatctgggctgcagg

SEQ ID NO: 19961 - DNA, 4854 bp, Oryza sativa
cggacctcctccgacctcggcatcactcccatcgccaccgacgccgtccaccgcctcgtcgagctcgccgaccgccggaacgccgccgtccccgtcgacccgagccacgccaccacctttctccgctccggctgcctcctccgttactgccgtctcctggggtgagccgaggaccgcttcctcttttcccccttcccttcccctctctcggccgccactccgtcgcgcctatggtcgccgtcggcaactatagtggcgccctcccaccggacgcgccgacgtggccgccttcgggcgcgctgtatggccgccgtgtggggcccggccgtcagctgcccgcgccctcaggtgcggctgacgcgttgggcccacggcactggccggtgtgagcccgggtgcacctggtccaccgtggaccgtgaggctgctgcgtgggccccacttccgtggacccgatccgcgcacacctcccctcggctgacgcaataaacccctttttaaattaaaatttaaatgaagaaattcgcaaatattcacttaaagagcatataaacttcaaatggccataacttggtcgtttgaactcggaattggaccgttcaagtctctaatcgttcaagtctcttggcgaaacgacctcttaaagtttcaccaaaaattggtgctatcttcgcggcacgacacacgataacggtcatagtcctctaaagttcgacctgggtgtgcgcgcatccatctggcaacacttataaccttgtagctgttgccgtttattaacatctcgtggtaaacgggccgaaaaggaaacttggtcgtcggaaaacccttcaccaccatgaatttctcatttttatctcgccaatccccagagggaggccgatcgcatatttttcggccgcaaacctgccaacaaggcataatggaacagtgcaaaaggagaaataccagcaaaatcaatcccacattccagtgaaaacatacgattggcgaaatactaacttttgattaataaaattaaggtcataatggccacaatacggcaacggctcccagccgaacatgtaaggcacctatatacatgagcaaactaccaaaaagcctaaaaaggcgaaggaggaaaaaaaacactagggtgaagggcctcacacctcagggtggtctcggtcttcatcgcttggctccgacggcctagggtccaccctggggttggtggcagcggcttccttatccttcgtcaatttttcaagttgttcgcgaagccgggtcttcgtgcaatccttgccgccatcctcccagaagtccttttggaaggccctcaaggccgccccggagcactgggaattctcgagccaagcccccttcaatagctcaggaaaatctttaatatggtcgcagccatgctcctgaagcaggctaagcacaaagcccgctgaaacgcgtgcgctgtagtctccgtaggcgccagccacttcaacaaccgagtcggtgttgacggtcgttatcgatcagtttcgaccgtcaatactaccaaaataggagagagctagtgatgcttacaatgcataaatgtgttagagtaataatattccactagtattaggtatactaacctttttgtagagaatgaaaataaagtggaggagaatcgacatcaacgcaaatgataaatcaatcggacgatgtcaggaaccagacttatgaataaatgggtcaagaactcagaactgacatgacaaactgggccaaaattcacaagtctacggagaagaacaacggaggaggccgccagctgaaattgggctagattggggtggccccaggttcggccaaaccaccctcgcctccgttggatctaggttttggctggacggttgagatgaagccccaatgacggttggaggctattaccgaccattccaaccatcacaaccgtcattacctgcctatataaggacttcacctcctcacttcacacacacacctcaagcaattagctctcttatttctctcaagtttagttttgtagtatctagctggtggaatagaaatagagtagaaatcggagtccgaaagccttcggaagagttcgggtatggctctagtagcttttctcttctcttttgtaagctttgtactattattagaatactcttctaaatacatttaaggtattgaaatactttccgagtatatgagtacctactttacatgaatatacggctagcttatctgggagatgctttcgtgcgggtataatgtttgcttatgcaattactctatgtcatgacgatgatattagagtagtatctggtagtttagacgtggtgtctagactacgggatatcattatttggggttatatattgcggatgagaggtgggccgctgatggtgacagctcagtacaggtattcgtccacgcctatatataatcctaagttaattccctggggagggtattcctccgtatttagccctggttgtatggtcatgacgggctgtcgtgaggaactcggcagccaggggtggcttctcaaagtaccaggatgttaacgaccaaatttggtaatctgagtatcgaagaagaagattagatcgatgcggaatcgaagacaaagatcgtttcggaaacagagcaagattcagctgaagtccaaatcggctacgatcaaagacagccgagttcgagtcggacaaggtagccgattaagccgaatttgacaatataacatgatacacgtcatcgggatgagttaatatgcttcatatggactgccagacatggattgagtcctgagaaggcaattgtatctattaattaggatattttacgtaatttccttggagataagtctgggcaaaagtctgccgcaaagacttatggtatcttagagtttgttagagataagagtcgtgtccgagaaggacatgttttgtaatctcgggtataaatagatctcgagccccatgtgtcacgcccggaatttctatccaaaattccaaacgcttacatgtgtgtgaaccctcgtctaggaatcagccgaggcacacaataacaaattgataatagagtacaattattactctaattaataagcgtataaaatgtcattacagaggtagatagttcctctcaatcaataaagatcttaagcagcggaaaataagataaacggcgcagacgactccactccacaggcagcttgaccagggctacacctaatcctccacaccatcagcatcattgtagaactcttcctctgatgaatgattgcaaggtgagtatatgacatactcagcaagccacgcagcaaatatgcaagtgcacaaggataccaaaggatggcatagtagggtttcatttgcaaaagcagcatttagcaaacatttgagaattttaataaaacagttaagtaataattaaacaatattaaaccaacgctatacaacataccctgttgcataggcccaaccattctgaacaaccatacccggctgtacagatcaatctccaaaccaggaatataccattccaaaccaggagctaatcaaattattaccaattatagcatcttttattacgatgagaggtgtgagactaatcacgaaagacattgttagacccgcccataaccgcgggcacggctattcgaatagttttattctgatcagaggtgtaccactgtacccacaagacacagccccacatcatgtcaccatgtgcctcaataccaccacggtacctcggaaaggagctgtgacaataccccttgcataacacactccaccgcagcgcaccattcctggatcataatcacccccttataaacaacgcatggactccccagcgacccctgtgggcttatctccgccacttctcagtctggtgccccgcaataaaccatgctatacaaaaggtaaagccgttgcccacgctggcttgtggttggcacggttaatgtttcacatccgaaactcgtgaaccggtccttaattgtcatgagcacgactgtcaaaaccatgtgctcacaacccaccattatcaagttttagttggcaagtaattaattaaccaatcacgattgaccatcgtgaactaacataaaatcatcattaaataataatgaattataagttatcccaataatgtgctaatgtttctaagcatggctaagcaatcacatctaatatctagctgaaccaatatatataaagctcaactagtcaagttatattaacccaaggtatcaaggaataaagtaatcaagaacaaaagggctataacaaacaataggttaattccacccaatgacattcgaaaataaatgcaatagttgaatagaaacaatagctttaaacgggatcaacatgctcaaaagggttgtttgggatctgtgtgacttgccttgctagccttggaactcttcaaattcttctcctgcgaaaacggactctccggaaacgtcggaatctaagcagaaaagagcaaaatcaccaaaacagcacataaacaagcatgaacagtacatgtggatatttttaacatgtagatctcaattttagaaaaatttagagacttgaaccaactaaatccaagctaagatgaattagttatgaatttttaaagattaaatcggattaaaacacttatatggattttaattgaattatgacgcaataatgaattatttttgaaaaggaaaaaggggtttattgcgtcagcggctagggtttgcggtggaccgggtgcacggcagcggttcacgggaacgaacggccgagatcgatccatccaaaacggacggccgagatcgctcgggtctacggcggctcacggcagacggccacgatgacg

SEQ ID NO: 19962 - DNA, 2854 bp, Oryza sativa
ccaaaagagaaaaggtagaggagatcccgaagattgtttcccctcaatcaatttcaccggatcgggaaagacgcggccgaatttagaaggagacaacggcggcgcggcgctagggtttcgggcggcggcggccggaggtagatgacgggtccgacaggtgggccccacctgtcagcgggcggacgcgcgcgcgcgagcggctgcggctgcgggctgggccgacttgggctggggggagagagagagggttttgggccgatggcccaaagccaaaagaagacttttaaaaacctttttcaatttaaattattcatgaaatgcaattccatttattaaaaatacttccttagctcaaataaatcccagaaaaatctaggaattatagaattaagcaaagtatttaataaaattttatctggccccattttatattggaatttattaattaaaattagctcttctcttctaggcttttaaaataaattctaataattccaattaaacaacaatttatacatttaggatttttagggtgtgacaccatgtaatacaacaacacacgttcaacaacaatctcggcgcatcgccactcttttactttcgttttgtttcgacgagttcttgctttcgggttgagctgcatcggtttcgatcttcaactaagaggtaaaacttgttatggcggcttgcgttctcgggattagtgcttacatctttatgatactctaatcttgttcatgtaagttgtcgagttatcatatatcttatataatctctgacaatatcgctatctaacctctagtcggctaatatctatcgctagggagcagccgattatgttacatatcgacgttggcttagattatataggatatctaccactctatgaagcttccaatagcttgattgtctagatattgtctttcttttcatacttatggctgcatcagttgtgtttgacctcataagtcgtgtttagaactatggtttctagcctgcttcttggttgttgattagagtagcatcggggtttcagctgatcttacctggtttagccttatatttcatgtgcttaattgatatgctagatctgccctttatgttgagatcttattgctttttagatatgttaagcttcttgtttgatatattttactcgctttaatgtcttaatatagagtggtatcggagtattagccgatacacgctatatctatctgatcggctatgctatgaacatatataatttcgttgttaatatatatttcgatctaagtgatttatactatctcggcatggcgaccgatctatcccaatcacttgatttatgtatatatcgacataaagattatatattgttaataattacagccgatcgaatagatttagtccttccttatttattcatgactgcggatcgatgcaaagatgcaaagatgacatcggctcaaagataaatgatacgtcatcggcggctggcagatcggctatcatttacggtttaactgcgttttctttgtctttatttcttgttgattgcagtatcaaatcaactggcacgcctgcgaacctaaaggcaagctttttggacctgcactggagttaagcagatctcccaggcctcgtgtttctacatcaacacgggagggcattggaaagagggtattagctagtatatcggttaactaggatgtatgtatactatgtatattagaagtataggaatagattatctttctcttttcttcccacctagcttagataatatattatgagattgagtattaatgcttgtgtgtcactctacccttgaattatcttaacccctacttagaatatgattatcacaagcaatgtataaattattagtctagttctctctacatgatcttcccacggaataaaataaatacgatacccttggaatactctcgggtgaaatgctacaatggtatatctgtgcacttatggatgaactctgtaaccataatataccagaactatttatgtgccattgctgggaattatatttgtagtaatatcgttaagaaataccaacaagcatttctggcgccgttgccggggaagattcataatagagattacttgaactaatattttatatttgcctctatataatcattttcctttgcaggctaaccttggttgttttcacttttgttgtggaaacagggtagtgcatgactggtttcaacctgccggaaaacttcaaagaaaatccagaagctttcttccggagcgtccgaccgcgagtcgttgctccgcagaaaactctaccgacagataaaccagccgtatcagtgccaccaatcttcaagactatggctagcaagactcaccgcgagttcactgctccctctgctgacaatgtggccattgggccgcggatcaacatgggagacgtggacttgaagtctagcctcatcacgatggcgcaggctagcccgttctgtggcaagcctaatgaggatgccaatgctcatctgcaacagttcctggagatttgtagcacgtacaccatcaagggcgtcagtcccgacgccgtcaggctaaggctgtttccgttctcccttctcgggagagcgaagcagtgattctatgccaaccgtgctgctgtcaacacctgggacaaatgctctacggcattcctttcgaaattcttccaatgagcaaaaccaacgcccttcgtggacgaatttcaagtttccagcaaacgagggacgagtctattccggaagcgtaggaacgtctgcaggagtatgcggccgcctgtcctcatcatgggatggacgaccgactgatcgtgcagaatttttataatggactcaccccg

SEQ ID NO: 19963 - DNA, 6428 bp, Oryza sativa
aacataaatgtcaaattagatggctttgcttccgcttttcaaaattagctgagctttaataaaatgatagaaatccagttagctcagttggcatctttagtccccgcaaatgaaactaggaggattccggggcaacccgactcctccattgaaaatgtcaaggcgatcacgacgaagggaggtaagtccactcgtgatccgccatatcctaaccctgcaggaacaactgggatatcaaaagaagcgccatctaatgattcggctgacaaggaagttcagccagaaaagatagtgtcgcaggagtactgtgacacacgattgctgcattccgtcaacagagtagaagaccgtcagtggacgagcaatttgctcattttgttgaagtaatccagaaaatccacatcaatgtgccattgttggacgctatgcaggtgccaacatacgcccgttatctaaaggatatactcaacaacaagagactgctcccaataacggaggtggtcaagctgacgaaacaatacagcaacatcatactccacaagctcccggagaagaaatattcggggtgtcccatgatcacctgctcgatcggggcacagcaattcgaccaggtcttgtgcgaccttggagccagcgttagcgtcatgccaaaggacgttttcgacaagctcaacttcatggtgttggcaccaacaccgatgcgcctacaactggctgactcgttagtccgttacccggcagggatagcggaggatgtgccagtcaagatacgggatttcttcatcccggttgatttcgtggtgctgaacatggagtcgggaaaggtgacgccgctcatcctggggcgtccgttccttagcatcgcgggagccaatattgacgtgggaacggggagtatccgattccatatcaatgggaaggagaagaagtttaagttccaaccgaggacggaacaatgctccatggtcagaataaagtacgggccgaacccgcagaatattgaagaggtcgaagtggagccacccaagacggacagcctagtgaaattcatgcagaatttcctggagaaggaaacaacgatgcctaggaaccgttactggaggctaccggtaaaaccaccaataccggctaagaagttagagcagctggctcagaagaagccgccatccccacctaagccaaagaaggtgtggagggagaagccaaagacgcccgctccatcacctccggagacgagtggaaaatccatgaactgaattggaaggaggtacagtcttgcacgtcggactttaaatgacgcgaccttcgccaacaggtaaattggtatgtatccgcatgtttgctttcaacaaatttgaatttttcatcatcacatatttgattttcaaaattgcatttaggacttttgaattttgaggaaattcttcaaatgaatttttcagagcaaaccaaaataaaattttccacgaaatgcactgtgccatgaccacactaaccgttggaatccaacagccgaaagtggggccggttgggcccaccaagggttcggttgaaccggccaggtaacggttccctgccacttttggcagggtaacggctagtgggtcccacatgtcatttttgaccgttgtgggtaccctataagagccagtcggccgagagagggaattccaccccatttcaatacattttcattccctctaaaagtttgctctcaaattcattcaagctttgatagtttccctcaaattcgaatacttagttacatatatacaagttgctttggtgaaactaaccggtaggtgaaatctttgtcattcctaacccccgccgagttagtccgtttttgctccattgtgcagaatgaggaggcgattgtctcgtctgttcaagggatccggctcttcatcaagtcatcatgacgagtctagtactcgttcatcagccgatatcatgatggaagaagccgaagcttcacgacaactcctgaacccgctgaccttgaccttgtcggtgatcgggagagacaagcctactacatgctggccgaccgggagtatgctcacacgcgagagtactcactggagttgctgaaaaagataggtatggatactgaatttcgttctatttggaaagctgttggttggcagaaatttgctgtggtatatgagcctggttctcatttgcttactttgcaatttctgtgcactttgaaagaaatggaagatggaatttccttttgctttttccatgaggagtttacacttacatggaaaggcctaagcacacttcttggttttcacgatacctgtaaaatcgatctccagaaaggaatttctgggttcgagaaaaataggttttgggaagatatttctggtgctccaatttgcaagaaacctaggacgaatgatatctataatcctacacttaggctcatgcacaaatggattgctatgactctatttcctagaggtgatctgagacccataaggggagatgaactaattatcatgtttgccatagttagaaaaatcaaaattgctcctgtaaaatgtatgatacggcaatggttagaaagtatcaagttcttttctcctgttgagtgcacttctctgattactcggatagcaaaagtgctaggggtcgttagcgaccaaattgcttttgtctcagccgctcgtccgcgtattgatgaagtttatctagtgcaagggcatatcttgaaacatggagtagatggatctttaatttactttttcccctgttgtacaaatgaaatcccattgccaaatgcggggtatcatttgtacaactgtcgtgaactaaccatacctctgcagaccatagaagaatctcgtgcaggtggaatatacagggagacgcgcaacatgacaagaaatgaacgagaaagttcatcatcctcaacactcgtgcagatgcatgaggcaggttgggcaccaactggggatgcacctggatagacctaagctccacgccacagcatcggagtctcaggctgggcaagtgctagtgaggaccgatggcgtgcgcctcatgacatacattggggggacaaccaaccctccagatcaagtggtgtgtctccatctccaagtgaatggcgctcaagttcctctcgttgggacttgggtgaaatcactaggagattggacacccttgatgtgcagacgacggagatccagtacaacctctcggaacacatagcacaaacacaagaatggcaacaatctgttgatgctcagttcgccaacatcaacaacatgatgcagcaatagcacgatgaccttcaagcatactttcgctttcaagagttcaatccttatcaaggaccctgagcgaaagcctagcttggggggagagacatctctccccgcactgaggtaacttgtatcacattgcatatttccctttccaattgtatatttccctttccaattgcatattttctttccaactacatcttataaaatttgaaaacaacataaaaatttgccaaatagaaaataccaaaaagaatggataggtttgcgtcatgttaggtaagacaagctagttatctttgttgaaatgatgaatagttgctctgctttatatctcttacatatgggttcttcgtaaatactctctcaaagattaaatataagtagccaacaattatccgggaacctaaggtaaatgagctgcacttgctgatctaagtctaagatgttgcgagatatgagatagtaaatatgagttgctacgatcctgatactagtttgacttgaattccggatgttttgtttttcaaaatgataaaactgaaagttcctcatttgataaaaattcctaccagagccaaaaatgtgctatcttgatgaaaccatttacattttggttatttgccattccactgaactttgtcaaactcttgtgacttgtgtagatacttctcatgctctatgatcaagatcatacacccacatatgtgcacgtgctaaactccaacactgggagctaagcaatgttccattccatttccatattaccaccaaaataaattctccatgctttcatgtgctttcttctcctaaaaagaaaaatccttttgaaaaaaagggaaaagaagaggatggaaaggcatggttaaaaaaaaggggttatgctccatcaaacatgagcatgatgttgaaaaaaaaatgtaatcatgccctctcctaatcaataaaagaaggatttttgggagaagaaagtaagcacaaaggagaagcattttctttatttttcttcatacaccatttccactatatatcacacactttgcacgatcttgatcttgagtatgttcagttatctgctttagtctaagtttttgacttagtaataaatgtgaatgcaagtatatcatgtttgatccctaccgaactccacatatcaaagccttagagaaggaatcaaaaaggcaataattggtgaggaattcatttttgatacacttggagagactgagtgaatcatttaacaaacttggttatctttttcaaaatcatttgaaaactttcggaataagagttggatgaatattgggtgaatggtgctctaattgttgttctgtctttcaactacccaaggcaaggagaagtagtgtcttgtgggaatcaggggtaaggataagccaccgtgccaaagattatttaatctgagagagagtacatgtaccttgcacctatatctttgagatatgcagcatagtagcaactcctgatcaacaaccaagtctttgtttcctttcgtcctttactcgggacgagcaatggttcaagcttggggggttttgttgacggtcgttatcgatcagtttcgaccgtcaatactaccaaaataggagagaactagtgatgcttacaatgcataaattttttagagtaataatattccactagtattaggtatactaacctttttgtagagaatgacaataacgtggaggagaatcgacatcaatgcaaacgataaatcaataggacgatatcgagaaccagacttatgaataaatgggccaagaactcagaactaacacgacaaactgggccaaaattcacaagtctgcaaagaagaacaacggaggagaccgcgagctgaaattgggctggattgggccggcccaggttcggccgaacctggtggttcggccgaaccaccctcgcctccgttggatctaagttttggctggacggttgagatgaagctccaatgacggttggagggtattgccaaccattccaaccgtcacaaccgtcattacctgcctatataaggacttcacctcctcacttcacatacacacctcaagcaattaactctcttatttctctcaagtttagtttagtagcatctagctggtagaatagaaatagagtagaaatcggagtctggaagccttcggagcagtttgggtatggctctagcagcttttctcttatcttttgtaagctttgtcctattattagaatactcttctaaatacatttatggtattgaaatactttccgagtatatgagtacctactttacattatgtttttgttatactgaatatatggctagcttatctgggagatgctttggtgcaggtataatgtttgcttgtgcaattactctatgtcatgacgatgatattagagtagtatttggtagtttagacgtggtgtctagactacgggatatcattatttggggttatatattgcggatgagaggtgggccgctgatggtgatagctcagtacgggtattcctccttgcctatatataatcctaggttaattccttggggagggtattcctccgtatttagccccagttgtatggtcatgacgggctgtcctaaggaactcggcaatcaggggtggcttctcgaagtaccaggagggcatcagaaagagggtattacctagtatatcggttaactaggatgtatgtatactatatatattagaagtgtaggaatagattatctttctcttttcttcccacctagcttagataatatattatgagattgaatagttaatgcttgtgtgtcactctaccctagaattatcttaacccctgcttagaatatgattatcacaagcaatgtataaattattagtccagttctctctacatgatcttcccacgggataaaataaatacgatacccttgtgtggatgcgaaaaagacaaactggcctgagagatctgttcatctccagtgcaggtccaaagtttgatgagatgcgggcgtgccagttagtttgatcctgcaactaacaagatatgtaaaccgtagattaaatagccgatcggctgacaaggcgatggagtagttccagccgatgccaataatagccgatgccgatactagccgatagcgataggatttaa

SEQ ID NO: 19964 - DNA, 9448 bp, Oryza sativa
acgccgacgtagatgacagattcaccagggcccgacggaacataggacttaccccttcgcaggagatcaaaagccgatgcagccccgcgtcaggtgccaagttccaccggaagacaagtaaaaacctcggtaaagagggtggcgatgcgccgagagtagttgtattgatcaatagattgatagattacatagaccccgggtgtacatatttatacccatgagttgatacaagtccttatcggacactaaacatactttcctaaagataaaaggaaactaacaaactattcctaattaatagataaactgtcataccgcatcctccttgaacttggactcttctaaataagcttccttcgattgatccgactccaccaagaacacgatagcatggcgacttgacgactcccatcggctgtttctagaactctaaaaccgatattgactttcagccgatgatgactttgggcttaccaaatttcgtcgttaacacatgccccccagtttagagtatgagtactcatgcttcaaaattatcttctgtctggtcttgataactccaaaactgatcttcatttgcgtcttgcaatcggctttcgtgagctgatactgtttgcattagatgagctagactgtcaaacccgtggcaaaagaatctatctctgattggtgctgacaatccttggaatgcaagatctgctagttgctcatcacttaggttcaaactataacattggctgcggacattatgaaatctcttaatatattccatagccgattctccctcttgctgctcaacggatattaaatctgcaagcttcaactcactgattccagcaaagaagtaatcatgaaattgcttctcaagatcggcccatccttggatagaatctgatggtagcgatgaaaaccatgtgaaagccgatccagtcaaagacaatggaaaaaatctaactttcaaagcttctttagctgatgcctccccacattgtgctaagaatcggctgatgtgttccattgtagatgtatcatcctgccctgaaaacttggagaaatctggaactttgtatcggtgcggcaatggcaccctatcaaaccactcaagatatggcagccgatacacagaagtatgttccttaggtttgattccaaactgctcctctattatctttgcaattctatcggccgaatcattgttatattgatattcttcatcatgcccatattgacaaagttcttctggccgatattgatatgcttgccccccgagctgattcttttgagtaactattttaggaactatcttcttgatcacatcttgtagtgtactcatcaaaactccagactgatcaaacaatgtgcgatgaactgcttcatcaactgtatcttgaagtatttcaactatcggcttggggaatcgagtcttctgaattggcccttctggtgtcatgatgaaacattgaagacaacgcatttgaaaatcagttaaaaactgctccatctgttgcctctgttcgtccgctaaattctccaccgtgaccatgatcttggcattgacttcttcttcagacatgtggatataaaatccgtggtcccaccaggcgtgccaaaaatgtgttgatgcgaaaaacacacactggcctgggacatctgcttagctccagtgcaggtccaaaggttgatgaggtgcgggcatgccagtcagtttgatcctgcaactgacaagatatgtaaaccgtagatcaaatagccgatcggttgacaagccgatggagtagttccagccgatgcaaataatagccgatgccgataccagccaatagcgatagggtttaagcaatcggctatatgtccaatatagataatgatagaaatgcaatcggctaatgatgatgtaataaaataacaatataatctagtataaaccaatcggctagcaatacaatatgatagaataagcattgatccgaaggttaaagcatacatcgactgaaggtccgatgtcataaaatccaaaagattagtttaaacagtgaaacctttgttgcaatcggctaaacccaacttgtatgtaatccttataagccgatgcaacgtccagataacttatcggctagcaccccgataaaacattagcatgaacctatcggcttagcaagacttatattatcaacaacaatctagtaggtcgaacctaaccgatacagcacgagattgtatatgataatctaatacttgatgagccgatagatctgtctaatgtgatggatataacaaatctatttagaacaacattgtaattatagagatatatcggctaaggtagaagatccgacctaaccgagacaattccaactaaaccgatgtgtctctaaacacaatgcaattagagatagaattgagatatcaggtaggcaaatcaatcaaccaaaccagagagatccaagaagtcgtagcgatgcagccgtgaacgacgccgacgtagatgacagattcaccagggcccaatggaatgtaggacttaccccttcgccggagatcgaaagccgatgcagccccgtgtcaggtgccaatttccgccggaagataagtaaaaacctcggtaaagagggtggcgatgcaccgagagtagttgtattgatcgatagattgatatattacatagaccccgggtgtacatatttatacccatgagttgatacaagtccttatcggacactaaacacactttcctaaagataaaaggaaactaacaaactattcctaattaatagataaactgccatgccgcatcctccttgaactcggactcttctagataagtttccttcgattgatccgactccaccaagaacacgatagcatggcgacttgacgactcccatcggctgtttctagaactctgaaaccgatattgactttcagccgatgatgactttgggcttaccaaatttcgtcgttaacaccttggaatactctcgggtgaaatgctacaatagtatatcagtgcgctcgtggatgaactctgcaaccataatataccagaaatatttctgcgcctttgctgggaattatatttctagtaatgtcgttatgaaataccaacagccggccgcttcctgcgtccactcggagaacgcgaacgctgttccgccatcacccagggcgccctccgcacgcgcgccaaggtcactaagcaccaaccaaagggtatagcaggcttgtttggtggattccgtcaccggcgcaaggacctcagcagcagcttcggatgaggcaagtcgagcctcaagagaccggatcttctcctcggccgcagcaagccgaagttcttgatcaacggacttcttgttcacccccttcaggttagcgtgaagagatttattctcccctatgagggatttgctctgcgctttcgccttcttcagggcgtccgccacgaccctacgttcgtcatctttatggcgaaggtcttcttcggccttccgaaggcagaatctataccagtcaagccgctccatagcagaccgcttcccgctcaagtgcgctgcgagaccctagatttagaaaattgaaaaccctgttagtacggctcgacggaagtgcaggacaggcgaaagtgagaaaagcccttacccgaaggaacaaactttccgcggcttaacaactctcgccaaactcgttgagttcgataaagagattgaggccgtcggacggcgcaatgatctggcaaaccccatcgacgaagggggcgatctccgatcgggtggtgaggtccgcagaaacaaagtgcggggcagtgagtgtcacatcagacacaatcatttcaaccgcttgggcttccccctgtcgcccccggagatgttcgccccaactgccggtgccgaagcacttccccctgtcggtgcttcggcgtcgctagcaggcgggggcgacagacgtttcccccatgggggaacgcgccactgggccggcgaagtgggcgtcccatcagtctcctcactatccaaaaaaccgcgagcaacctgcaccacccccttcttctccttcttcctagcgatcgctcctggtttcgctgcagagctagagatcgccagaagattgtttgcgccaacaacgtcttgcggacgcacaggcgaaacgtgggagcctgccccacacttcggccgagtcggactgggggtatagccgtgtgacccgtcatcctcgtcagacctggtgtaacatacccgaattctaggtcttaaaaatttcttgtcaaaatagttagaaactaacttttccaatgttgagagacaaaaattttcactttaacctaggtgaggtcaacttaacttgtacttagataaaatttgaggacaaactaaaaacttttcattttcagcctaggacaaaaatgcaaacaaaaatgtgtgcatgcatatgcatttagcattagtttgatttgagtcttttatgcgcgtttggattttggtttgcatatcatgttaggttcatgaacataaataaaaggataacttcactagacaaacccatggtcattattgtgaaataattataagtacatgaaagtgaagtcaaataataacaactcagttcaagtcaagtcctaatataagtctttacaaacatttagatgcatttatataatgagaacacttatataaataaacgtcttgcgaattattgaaaataattcgtgcaaggtaaaatcatggaaaaattcatgtagtctgtaatcaacacgtacaattcactgtaattttggtcaaattttaatacttaggatgatacctcaaataaatcagtcaaaccaattaaatgatagactaattataatccttaatcggctaaaacctactctcaccataatgtgcatgaaactgcatagaagtgtataggggaaacaatttattcaaatactaggttatttataatgaataaatatattttttcagaatttatatactctatttaaatctcctaaaaattcaaacaaagttctaacgagcccattttctccaattttctgagggcaaaccacataaaatttttgagagcaactacagaaaatggaaactaggtatcttcatctacgtccagaaaattccacatgaatttatcgtgcccacaaattaaactatagattaacaagagaggagagagatttaaatcctgaaaatcgtccaaaatcgataacacccaatctcctaccctcctctctcactccagacttgttcccttcgcccttgacccactttcagcctcacaagctcgctccacctgagtacatgatgccctatgttaggtactctaacgatttctccctcaaatttactggacaattgttcacgcatacaagtatcgatccacaggatcgttctgccgccgcctacgccaccacgtatccagttaatcaccttctaacatccacctatgttttttatatacagttaggacaacaccacacggctctccctctctcacatgacagcttggctacttggcccactgattgccgaagtagcgtgggttgggcctccgacgtcttgggccgatgcttggcgccgtttcctgtatcggcacgatcccctcctcgcctccagcatcttgttctgcttctccagcgccttgtccctcctcctggattccttccaccgtgccatcgtcttgttcatcagcggtttgatcggcagtcttcccgtccagttcatgatcgtcaggcttcctgtggttgtggcagtcttgagtcttcagaggaggcctgacaagcccccatgcttggaaatcggcttgcccccaagccggtgcatgagggaaccttgagtgaagatcttgcatatcctcccatgtggcgtcagtagctgctcccatgtggcgtcagtagctgcacttcctgtccaatgagttagtaactgaataatgggacagtttttggtgtgagatacgcgatagtgaagaaactgctggggaacttgaaatttggaaagagcagtaggaagttcagcttgcataggacaagaaaatccccgagcccccttcaattgagaaacatgaagcaccggatggatctgactagctgctggcagaagcaacttgtaagcaacagcgccaacccggtgcagtatctggtaagggccatagtagcgaaacgccaacttgtgattagccctgacagccactgaagactgaacatatggttgtagtttaagataaacccagtctccaacttggaattccctgaagcttctctttttgtcagccatgtgtttcatttgctgttgagctcggttcaaatgatgctgcaagagttgctgcataagcttcctctgttggaaccactgattcagatcaggaatggagcagtcattcagactaatgccaaaatgcccaggacagtacccatatagaacttcaaaaggagttttgttcaacgcagagtggtaggttgtattgtaccagaactctgctaagtaaagccaggatgaccacttggtgggagtagcatgaacaaagcaccccaaataaatttccagacattgtttaaccctctcggtctgacaatcagtttgtgggtgataggccgagctcatatgcaattttgtaccagatctcacaaagagttgctcctagaattggctagtaaaaatcttgtctcgatcagaaatgatgatttggggcagaccatgaagtttgtacacatgtttcataaattcaagtgctacactgctagcagtgaaagggtgagacaatgggaagaaatgagcatattttgaaaacttatcctctatcaccaatatgcagttctaatgatttgatttaggtagcccctcaataaaatccaaagaaatagtttgccacgctccagcagttacaggtaagggttcaagcaaacctggatacttggctcgatctggtttggcttgcaaacaaatttgacagttttgcaccctggactgtaccttctttttcattcctgtccaagcaaataaactcttaacccgctggtaagttgctggaaatcctgaatggcctcccattggtgagtcatgaagagcatcaatcaacttatcctgcaattctgttagatcccccacccaaatacgtcccttatatttaatgactccttgttggagagtaaagtgaggtcgagctgtagggcagatagcaagctcaatgagtagctggatggcatgagcatccttgttataactctggatgatttcctgcatccaagttggtacacattcagatacagaatttagctcagctgagtcttctttcctagaaagtgcatctgctgctgagttagtgactcccttcctatagcagatttgatactgtaagcccagcaatttagaatatgctttctgctgccaaggcgtgtgcagcctctgttcattcaagtgtttgagactatagtggtcagttaatataatgaattccacctctgaaaaagcggattccaatccccgatccggaatttcacggccaaatcaagagaatggaaggaaatctgagtggaattgtggttctgataccaggtgttaggtactctaacgatttctccctcaaattaactggacaattgttcacgcatacaagtatcaatccacaggatcgttccgccgccgcctacgccaccgcgtatccagttaatcgccttctaacatccacctatgtttctttatatacagttaggacaacactacacggctctccctctctcacatgacagcttggctacctggcccactgattgctgaagtagcgtgggttgggcctccgacgtcttgggccgatgcttggcgccgtctcctatagctttgttcggcatgatcccctccttgcctccagcatcttgttttgcttctccagcgccttgtccctcctcctggattccttccgccgtgccatcgtcttgttcatcagcggtttgatcggcagtcttcccttccagttcatgatcgtcaggcttcctgtcgttgtggcagtcttgagtcttcagaggaggcctcacaccctactgctccagccatccgagagggagaccgagagcgagagaaaacggagccgaccgtggtctggacagcaccgacgcgtgtcccagctcgcctactcctttcccagcatcgccgtctcccatcactctccactccactgccaaggaaccaaagctgagagctccatctcgccctcctcgccttcctctccatcgtcggccaccgggaaggacgcgttgccgttcgtcgtcgagctgcgcttgccgtcatatcctccatgttccttatttatctcatcataccgaaggttttaccttttgaccttaccctctctcgtgcagcggatcattgggaacgccatcgtgcccacgggagctgcagagcgcgcccggagcgccgccgccacgacctcgtcgctgtcccggcttctgtggagcgaatccggccgagctgtcgcgccaacatcttcccctcgaggtcctctccaaatgccctcaggaatccccaagatccgagcttcgaggagagagatcgagctattcttctccaactccggccgccgagctccatctttaattcctctttcaccggtgagccccaagtcgattccgtgaacacatagatttcctaggacctctttaacatgggagacatgcatgcatggcagttcttgtagtaagtcaagccgacgccgttcatccgagaaggagcgccgtcgccgagccgttccgaacgccgtcgtcggcgacaaagcttcgccaacctcgtacaatactactgtgagcaccctggagcttctagagttgcatgcatgcattttatccacctagatccggcctctaacgtgacatgcatcactaccccgagacccaccgccgctcgtgccgccgtcgccattgattccggtaaccacagatcaccataagacaatcattggattcgaaaagaacccctcttccttttctcttttggtttcatgccgagatcttccaccgttcgctgccggcaagctcgagaacgagctcagccatggctagctctgtttcagctcaaaccagggacctctgtggagaagaaacaaaactctaggtactacgttctaaaaactacctcacacatagaacagtcataggactgcggattgattgcctgaaaatccagggacctttttgcatattgatatctcactgacaggtggaccccatgagcttaaaatctgaaaatctaaggaaaatcctctagagctttatattttcaacagaaaaacatgcaaacttgtaaaattcatacaaagtgaaatatagctcattttgagatgattcaagtttctgtgaactcatagtaggatgaactttaatatggaaacataaaacttggcacttgcagtataaatttcacctctaaaatttatctaagaaaaaactatacataaagcatgcagggct

SEQ ID NO: 19965 - DNA, 15798 bp, Oryza sativa
aaaattcatattacttcctttttgagtaaactcaagttctgtagaatcatcaagtctaggacttcaaagatataaaataaaaatatacacttacagtgcaataaaatcccctaaatatttataaaaggaataaacaacttagagcacccttcaacttgtaaaatttctagagaattcatctttagtctaaatgtaatgaaccaagtttctatagaaccagcaagtaatgaacattaattaggtaaaataaaatgtggaaccttctatactaaatatgtcactaaactttaaatagataacttaagtgctagtcacatggtatatattggctaagcaatacatatgtataaataggcaatccatatgtataaatgtatatataaatgcactctagctctaactaaccaaaataaaacttgatggaccagagaggtcatagttccatccctaaccaccaaaaacttagcacacttagctcatatatcaatttctaggttggtatgttaagtaactaacatagaacgctcccctagcttataaaatgtgtagtagcgtaatataatctctaaaattgtgaactaagattatattggttaataaaattagtcattttatacatctcaaacaatatgaaacatgtcctggacataaaactccgaaaccatgtacacatagaagctatatacctacaacacattataacttgtaaaacacataagaaattcataataactccaaaagttgtgaaaccaaatgttttagtcttagaaaacacatctctacatccctgatatgttaaacctaataagaatcagttcgcaaaaatatttcataacactactaagtgaataccaccctataccgagtaaacttctgaaattcataactcacaaataaaaagagataaaatagaaattctttcacctaaactcatcttataccagtacctacccactgtgcacaaatcatgcattttagagcattttggatttttacctatttccgtgcataaacggtgaagaagtgaattaggtgctaacatttcccaggaacaaggcaagttttctcctcccaatctttgatcacattgaatcccatgttttgaggaatgaaaatatttgtttgcaaagttgcatatgaatttagactataacggtatttgaaacttggttatggtagctatgacctaattgctgcatttacttccttgaataattgtgatcctcactgattgtaaccttagaaatggttagagtactttcaaagtgcttaaatgggtttatacatgcttacttaatagccatacgcttagccatgcctagtagttgctaaataacttcatgatcactttttaaatgagaatttggggaatattttcactgctggatagaggtgaatatctctgatatttgtgagctaaaatgtgtaaaaatgtgatgttagacctgggcggcaagtggtatgcatatggtgttagttgcataccgatagggggagtgctcgccctagtcaattaaggaccgaactttgtgtcaccatctaaagtataccgtgcaaccacatgtgctaggaatgggacggcattagcttattaaattgtttaatgtctaaccttgcattgggaggccgtagtagtatgaactagtcggaatgatggtttataggagctacctagtgcggttgtgcctaggcgtctaagcgtgtccaatataacggttaagtgcctcgtggaggaacggatgtgttcgctgccatggcgctagggatggcgagggccccccgacctagcggcacttgggttgctcctcgtgtggataaacacttgccgtgctcgtgcaaggttaggcattaggcaatgtaaaggcttcgttatgacctctagaccacattcaacgtgaagaatgtggtagagtcttgcaaactcaaaacaaactagagtgtttatatcatgtgggtaaagctgtacaaactctgcagagttctttaaaactaatcgattagccgtgctcacggtcatgagcgctttggtgatgtgtcatgagtatagtcttgtgttttaaaattgtgtttatgaaacttgggattgaaatggaagaattgtgttgagttgtgcgagtgatgatgattataagacttgttgctatggaagacaacaagagtatgcttatgatgatatgatgttaattatgatgaacttacaaatttgttttgttaattgaatcattaactcctttgcaaaagatttgtgaaccaagtcggtgtgcttgtggttgggtagtcaagcttctgctgttctctgttatctatctatatttggccggtcggcatatgtaactataaagtagttgtaaatttgaatcgctttcatcttatttgtatttgctatgcataacaatgcttaagatgaaaatgtgaatctagtgcacatcttgggaactagattcacatgaatatgagttaaggatatttgatatatcatagatctttagccattttgtcaagtcacctgaatatgtaacacatctggtcgctgccttcgtgtggtttgacgggcacatctcaggctgaagttgactggcaggctaaaggcccggcaatgtctctagtatccttctctcgaggcgtcggatgtttcattatgtttgtttgatgacttgaattattcacttcatacctcaaatataatgagaggtccggagagcctacgacacctggcctccctatcgtcatcatcatcatcctcatcagcatcggtttcggccgcgtcctacgcagcacgacgagttcgcacctggccgctcttcgcgacggctcgcttgtgcttcctcgacatcccaacgtcgtcgtcgccagccttggaagggatcgatcggttggccaattcgccgccatgaacccggttcacctgaccgtcagcctggcgctgaagcaggcgggcgaattcggcagtagtacgaactaaaaaaaacaacgaattaggccgaagcgcatctccgtaaaggaaatagatgtcaaaaagcgaaagcaaaactcacgttcggtcccggcggggagaacaaggcgaggaagcccaagcaccacctcgcccttgttgatggaaaccccccagtcgcaagcaaggggggaaatccgaagaaggcaaaactcctcgcaaaggtcgtgggtacttaatcgccgcagaaccttgcgaaggaggatgagccgggactcgagggtgccatcgatctccacgttcggcttcacgacaatggagacggcaagacgccaaaaacggagccagttcgccttgtcatcctcggcggggtaaggattgttgatgtagaaccacttctgcatccagttccactcccacttcaccatagacgcaggcaccggccaggcgtccgaacgctccggccgaagcatgaagttgacgcagccgaaaactgtcttcctcggcccggctggcatgttcacgtctttggttgtggcgcacgccgtaaacaagatggcgaacaattcggtggtaggatcgaaaccacacgttcggcacatccatgcgaagacggccaacttcgggaatgctgacgggctaagctcaggaagcctgacctcatatatcgccagcacagacatctagaaattgtcgcatgggaggcgaagtccagcaacaaggaaggcagcaaaaatgactgttcgcctgtcgcctggcgaagggacggtggcttcgcccgcacagttcacttggccctctgcaagagcaccggagaggacgaactcagccaagtcaggctccttgacaagggacttgccaaggtagcacgaccacccttcgccagggttttcgccggttgacccggctgtcacgccctgataaattcatcccgaaataaaaatcattctctaaaaggaataatagaattaattaaaattcgaaaagaaattggcaaaccttaaaatgcgtacaagaaaaattcgaatgtggcctagagaatttttgttaaattccccttgctctaaaaggagccctcaaattttactataaattttagaacaccagaaataattattaagcaacaacaacctttagcaaagtttattaaaaaaaaacttaaaaataatcctccttcttcctttgggccaagtcttgcccaaagcctccctctctctccctcggcccgcggccgaagtccttctatgctccctctctttttccttccctctctccctcgggccgcccctcctatccctccttccctctcggcccagccgctcggcccaagccgagctgcagccctcccacgcgctcacatgtgctgactgcgccagaccacgtgggtcccaccctcggtcatcgtcctcctcccgcacggcctcctctctctctcccgtgaaccctagctcctttcctcccttaaatccatacgaatcaattcccttcatttcaaattgaggctttgttcgctagctgtgggaattaatccccgggtaaagcctcccacgtggggtttgggttgtccccacaccccacacccaatccctccctggctccctgcgaatcccccacctctcatccctctcacgttagactgttcggacagaggtgggattagaagggatcactaccattcactacacttcaaattcagaaaatgagtaaaacatgttggaaaattcggataaaataaaaaaaatggaagaaaggtcacgaacgtcaaaatattttagaaatgataaggaaaaaattgatcatgaaaacaaaacaaaaattaaacgtggaaaataattctaaaaatcccaaaaaaataaaattgtagaattaccacagatgcactctaaaaatagtccagaatttttaaacaaccgtaattttggatagattaaattctacaagcagtaaaacatccaaataatcacaagttttccatagatatgctaggaaccaacttaacattgatactacaaaaatctctctttgttttcaaagaatctaactttcaaaatcagtctagaactgaccactcttaacattgtactcgcatacaatttctattgaaggggcactgcactattgcaacaatcaaaattcagtgaaaacagctttgtacaaatcagatctctctcactgagctaactgaaagaataaaagttccaattgccattgtgcaaagcaagacaaaaattggttcttggaacttaataaatctctgtccaatcaaaatcaataatatatctctgtctgatcaaacaagtgataattctgtagaaaaaattggttcctgcaaccataatagctacatgaattaagaagcagttaaggaaaaattgtccttcacccatcgcatttcacgattaaggagtctctaagaactatcttgcaaaacaatccttccaatgggcacagctagcaaatgggccatggaaccctgtaattacacatccaaaaagaaacaagtgttagacactagacaatggtgattgctaatatgtaaactaattaagcaacaggtaaaatgaacttgaaaacaatccttccaatgggcacagctagcaaatgggccatggaaccctgtaattacacatccaaaaagaaacaagtgttagacactagacaatggtgattgctaatatgtaaactaattaagcaacaggtaaaatgaacttgaatcaaatcagataaatatgcagaagatggttacttatactcaagtcagcaaatccataacattgtacctacaatctctctctccaacttcaaattacttctgttactctagtaaatatgcaggggcaagattaaatgcttcatatcaggcaaatgtaagtacaactgtatttagttttttctcaaataccttggataatatcaactccttcagctttacttttgccaaccccacacgcctgtgcctcgcctgaaatttaattcagcacaacagattatatttttgtcattcaatagccatttatatagctttgtatgatatgacctctagtaaaatatctgaacacccagtttcctgaaactagttgtgaacatagtagcagttcagaatagataaatatgctaaattgattgctaagagtaaaataggtattcgaacaaaagatggacagctacatttctcaagttttaacaagggcattttgctaaacaaaaagccatggaaaaaaataccaaaactagaatgtatactacagtgtccacctgaccacctgatagcatgactttaaaattttttgcatcttcttgctcattcaattggcatatagtattggtcgttcaatctgaagctcaaatgaccttggccaaaagcaaagtgatgcattctagacagcaacaacagagtgcactagtttttatttttcaggtgtgctcccactgcatctacaataattcctggagaatcaacaaaccaggtttctccctcacaaaaaaagaaaagaaagaagagagcccatgttcagaaatataggatctgccaattgaaatatatatttccttgattacagagcaactgataggcaagatttgcacacacacatagagagatgtgcatggaattttctgtggtttcaggttctactactacaaaccacatcacccctccttctaagcagaacatgactgatacttcaatccatacagccactcaattcatcaactagcaacaaattcatccactagataagtcacaaaatcttttctgagtgggaaaagaggagatcaagaatcagacctgcttcttagtgtccgggctgttgccctcgacctcgccctctcccgcaactggtgaatccgaagcgaggaaggagagatggcgagcgccggcaactgggcgggatggagagcgggaaggagagcggcggcggctgaaacgggatggagaccgtcggcggctgaggacgggatggacaccggcggcggctgaagcgggatggagaccagcggcaaccgacggcgggatggagagcggcggcggctggagatatgctgctctcggatctccaccctagagccgcctcttggacctcgcgccgcctccaaaccctagcgcagcgaggagtcgaggaggccgagcgctgcggctggcttggaaaagaaaaatcgtctccgaggcgatttttctctccccgtggaattggtgtggattgggtggagaattgctccgaccccagcccaggcgaacgcatacatgggccacggaagaaaattcgacccggccgggatggcacacggggattttggcccattccccccccccctcaaacccagccgaaaagaacaaggcctgaggggggaattaatcccctttccctcctctctctttcccccttaattctaccttgattcgtgcttttaatcgctcggaacggctgcgcctttcccggccaccttccatggccgccggccgccattcccgcctccgttccgccctctcctgtggccggctccctccctgcgcctataaaatggaaccccctttgtgcgttctctcgtttttgcctcttcccgagctccccgtggccacaccgcctctccccgccaccgtcctctctctcccgtgccacgggccacctccagccgcctctcccttctcgcccatgcaccggcaggccaagccgtctcctccctcggcgtcgcagctgcctcccctccaccggcgtcgcctccgtttcgcgcggagaccatcggaggcgcgtttccgccactgtaccgcctccagtctccctgatcgctgcgccagagcgccggccgacgtcgccgtctcctccttcggtaccgcggcatcgacctccaccccggccgctcctcggtttcgttcggaagtcgccggatcaccgccgtcgcgccaacctttgcatccaccttgccggcgcaactccggctacctctgtttgtctcctttgcaaagcatcggctagctacaccaccaccacctttggcatcgcagtggcatggtcgccctcggtctcacctcccctcctcccgaaccctgccggtcttcatcgtcgtcatcgttcgtccttgttgacgtctcctctggtcggccgttcctcctcaccggcttgtcatctcgcggcgctgcctctatcgtcggcatcgcaacggcatgttccacgccgtccttgcctccgtgcagctgctgccggctgccctcgtcgcctcctcgccggccccggtcgtcgtggcgttcgtccctctgtcaagccaatcacgttcgccgcccgtatttcgtcaagtgtgctgctgccccgtcgtcatcttcgtcctcggctccatgtcgtcaagccctgagtcggccgcatctcgccttcgtccaaggatcgcaaccgaagtgtcatctgttcgtctccgttgcgcccgttcgtcaccgtcgttcccacgcctcatcgcgtggtggtaaggatccccctctcgctgccccgtcctcatccttttggtgtcgccctgtgcctgttgtgcggttgtcgaccccggtacccgtgtaccggtgtcggtagtcgttcgtgtgtgcgtgtggtgaccatgttagtgtgcccgctcggtagccgcgtggtttccacgtgtgctgcctgcatggtgtctagtggagtccgtttgtcagccactcacctcggttgacacatggggtccgcttccgtcgacccgtggaccgtctctgtgtacccagtccaccgtggtcctttaggttgacatatggggtcctcatgtcaacagcgcagccttcctatcttttccaggctagcgcttccacatgttttatagttacaaaaccttattataataatcagtaaatctccatataacagcattaaacttcggatgaccatatcttggtcatacgaattccgaatcgacccattcaagtctcctaatgtttgttataacctaaagaaccctatgcaatctttttatgtactgttattgcttctttataggcttgtagctttgattgtgtgctttgcgtagctttcgtcattctggaggttcccgaagcgtggtccgctatcgtcgccgaaggttcggaaggtcgttctctcttagcaaggcaagtcacatcacccttgagcatattgaatcccagtttataaaattattttattttaaattattgcattaccgctttatttaaattcccgcgttatcactgtttttatttagcacttcctattaatccttgttatagccttatcattgctattgtttattatcaccttgttcaccctaggaaaataaaaccccaactagtgggtaatccattcatggttccactagtatgaatttaggtagatgcttcgctgattaattaggcaacactaggtggttttataactttagactttgggagttctcatatcatttggacattatggaatggttggcttgtgatggaattgaacacacacctcccccttctctacaaaactcccaaaatggttttaggctgggcttaaggtgcatggttttgttagagaaccttggccaccataagtgtcacatcctgattttcgtttcaggatttataaattatttaataaattattaatagaatttatattaagtgttctttaatttacaagtgaagttaaatgtgggaaataaaatttcttaaatttaaagcatggatggatttaatttttgttaaattctccatggttaattatactctctgaaattttctcggatttttcagagctcaattcttaaataatacaaagaacagttcagtaattatttgatcattaatgatctaattataattgttaagagcttttcttgtttaaaaatccttaaattataaattgttgtttaaaaaggaattattcgaaatgatcttaaaagcttagaagagaagatctaattttaatttgttaaatctcaacataaaattgggctagataaaattttgttaaatactttgcttaattctttaattcctagatttttctgggatttatttgagctaaggaagtatttttaataaatggaattgcatttcatgaataatttaaattgaaaaaggttttaaaaagtcttcttttggctttgggccgaaagccggcccaaaaccctctctctctctttccctcggcccagccggcccagtccgccaagccgccgctctcctctctctctcagccgctgacaggtggaccccacctgtcaggttcgtcttcctcgagccgccgccgcccgcaaaccctagccgagagccgccgccgtctccttccaaattcgaccgcgtctttccttctccagtgaaatcttttgaggggaaataatcttctcgatctcctcttccttttctcttatagaaactccggtcaatttcctttggaaataggcggattcgagattgcttcggattcgttttcccccgatctttccttctcgtcgccggcagccgtgggccttcgccgccgcctccttgcccctttaaaaggatccccgagctctcctctacccgccgccaccctcgccttcgtctctagtcgtctgtagcgccctagcgccgtgccgcctcgcgccgccgtcgtcgccaccgctccagccgtgcgccgccgtcgctccagtcgtcgccgtcgttcgggaagaccgccgtcgtggtcgccaagtcgccgccgtcctcgtccgccccttcgccgccgccgaagaccgccggagctccgtcgccgccgccaacccgatctccgccgccgcttcttcctcgccgccggcgccgtccgttgcccttccgccgttgttttggtcaccggtgagttcgctgcgtcgccctctacccgttggtgccctccgttcgcatcgtcgagccgtcgttcgccggcgagcatgcgcgcccgagccgccgagtcgccgccggtgctgacgtcatcgctgacgtcatcgggatcgtccgccgtgagccggtcgtggaccgtttgatctcggccgtccgttttggatagggttgatctcggccgttcgtttccgtgaaccgctgccgtgcacccggtccaccgcaaaccctagccgctgacgcaataatccttcttttccttttcaaaaataattcattattgcgtcataattcaattaaaatcaatataagtgttttaatccgatttaatctttaaaaattcataactaattcatttgaactcagtttaatgtggttcaagttgcaaaagttgtgtaaaataaagatctacatattaaaattgtccataaattgaattaaatttattgaattctttttaaatgggctttaaatagatttaatcttgtaaaattcataataaattcatttgaagtcagaatgaggccgttcaagtctcacaattcatctaaaattatgatctacatgtttgtttactttttatgtactgtttatttggtttttattagtctttttcttcgttttgcgtgttagcttgtcgtttccgtcgttgcgaaggttcgcgagtgcgccggaagtattcaagaagattaattgaagaccgattattgcaaggcaagtcacacagatcctaaacacaatcctttgagcatgttgatcctatatttaaattctctatttatttcaactgtgcatttattttcaaatgtcactgggtggtgtgaacctattcctttgttatggcctgtttgcattgattactttattccttgataccttgggtgattataacttgactagttgagctatatatatattggttcagctagatattagatatgattgcttagccatgcttagaaacattagcacacaattgggataactaatgtttcactatcacttatggttatatttaatggtagctcacgatggtcaatcgtgattggttaattaattacttgccaactaaaacttgataatggtgggttgtgagcacatggttttgagagtcgtgctcatgacaattaaggaccggttcacgagctactattgtgaaacattaaccgtgccaaccacaagccagcgtgggcaacggctttaccttttgtatagcatgattcattgcggagcactagactgagaagtggcggagataagcccacgggggtcgctggggagtccatgccttgttttataagggggtgattatgatccaggaatggtgcactgtggtgagttgtgttatgcagagggtattgtcacagcctctattcgggtactttccagtatcgcgacgcatggtagacatgatgttgaggctgtgtcttgtgggtacagtggtacacctctggccagagtaaaactattcgaatagccgtgcccgcggttatgggcgagttgagcaatgtttttcgtgattagtcccacacctctcacaataattatggatgttataactggtaataatttgtttagctcctggtttggaatggtatattcctggtttggagattagatctgtacaaccgggtatggttgttcagaatggttgggcctgtgcagcatgggtgtgctgttcagtgttgattaaaatttctgattaattactccactattttacttctcttaaatgttttgctaaatgctgcttttgcaaatgagcctatattatgccatcctttggtatccttgtgcacttgcatatttgctgtgtggcttgctgagtatgtcatatgctcaccttgcaataatcaattaacctcagttgaagaaaaaggattcagaagaagaagacgtttggcttataccccagttgagctgcctgtgggagtggagccggagcttcgctagattttattttccgctgcagttttcttcatgatgaggactaagtgcctcataagtaagtatttatcgttttagttaatttgatgaatctgtatattaaattgtcagtttgtgtacctcggctgattccgggacgaggattttatgcacaaataagttcggaaattactagtgaatttccgggcgtgacaataaggaccggttttcgggcctctgttgcaaagcactaccgtacttccacatgtctagtgggtaaggcgtacttcgtggctcagtctggtcatgggcaaaagtacacggatagagatggacgaagttggggctcgatggacatctctagggaaaatgaaggctacacgagctgcggcccggtagtcaagatgtcatggcacagggctggtgtcctgctgctaggggctcaaccttggttacctgtcccgggattccagccatagtcagggttgggtcggtactcttgtttatggctaggatgggttgggaactatgtcacgtcttccatccatatgccgtggtggtatgtggcacgtgattacacgtgaggaagacgtgtcttgtgggtaaagatgtacacctctgatcagagtataatctattcgaatagccgcgccctcggttatgggcaagcctagcaatgtacccaagttagtggtttaattcttaaaacttgcttaacaaccaaaatgtggaatggttgcttgggttggcttgggacgagctgggacctaggtcgggttgctagttcggtctgaatcatcgtaggccttgggttaaggcaggttcgtgtgggttcgcggccttgattaataatattatgtagccctaggatcgtgcttgtaaaataactttgagcgactaagtgtcttttaaatgctgtttactgcaaaatctaacccctattattatccccttgtacccccttgcattaatcatgcatctcccggtgtggcttgctgagtactgtcgttgtactcattcttgctctatcttccccccctcagtaagagaagctttggagaagaagtcctaggtggagtcctggcttataccccagttgagctcctgtgaagatggagccgtaggcccgctagtccgctgttgtttattttttattgtcagacctgaagtgcctttgtaataatgcaaatattatcgatataataaagatgtgcctttgtatcatgtttatgtggtgtaccccggcttatcgtgggacggggattaatacactagtgttcgagaaaaggtaatttttccgggcgtgacaccggcctaggcgagcttgcaaggagccaccgaacccgcggcaaaagcagaagtctaaagacgagaggggggggggaaagagtcaagagagcaagcgcaggagcgcagagatggtgaaaagctaagagcacaggtagagaaggaaagcgcggcggtagtaaaaagtgaagagcgggggggaaggtggtaacccgcggcagggttatatagactcgccaagcgacagttcgactatagaccaatcaaaacccgccacgtgtccaagggtagacgaaacagtaaattcccatcgggcagaggccgaacagtaaaaggccgaatgcaagattgaaaaggcccacggggcccattactattcataatagtataaaaaataatccaaccttttcgccactcgttggagaacataggtaggaaattttcctcaagatttttttgtcaacgcgaaagcaagttatttattttgcaggtacgcagcatgggtttcgacaggaacatcggctgaaagggggcacgtcgtggtacaccatttgacttgcgcggtctcggtcgaggctccctactcacccttgcccgtgaggggcttgttggaggtataccacgaagggccttcggtcggacctgccgaaatcaagaacttaggcaacaagctcagatcagaggaaagcggcgaaggtctagaaggaaaccatatgggcgaaggtcacaagatgaaagccgtggctcgggatatgccaacttcgccaagcaaagaccttgtcagagggccgcacgggtgaagatgatgaggtgaaagccttggcacaagggcatgggttttgccaaagtaccgaacctcgctgtcaggaggcccagcgggccgctacgccttctagggatttcggcaaatagatgggccaagccatttaagcccaataggggccatacatgtaaaagacattgagtgcccccaataacgtccctatcataagggtaaccatgtaaattcccccgtaaaatctaaaccctaaaggggggagcctgtaataggattataaatagccccctaaggccatgtaatagggggatccaaaaaattttcaaaaagcaatacaattgttcttgacttccaaccactgtcgagagaattacatgttatccgaatagcttgttaaagccatttgcttgttatccaaataaccactcaagcatatagaagaatatgtagaataccatattccaaattcaagagtctattgcaaatacctcatgatgcgtttgacagcttgacgatgtgaagcacgtggagaagcttgaaaacaagcacacaaacatacaacaaattgtatgtccggtcttgaagcagtgagatagagtaatgatccaatcatactcctatactccttttgatccacaacttcaccatcttcatccggatccaacacaggagtagatccaatgggtgtagacataggcttgcaatcctccatcttgaaacgccgtagaagatccttggtgtacttcgtttgatgcacaaatgtgccttgctttgtttgcttgatttgaagccccaaaaagtaagtcaattcgcccatcatgctcttctcaaattccatgcgcatagtctcagcaaactccacaaccaaagggtgagatgaacaaccaaagatgatatcatccacataaatctgaacaaaaagttgatcatcaccatgcttaagaacaaagagtgttttatccacttttcccattataaaacctttggcaagcaaaaagttttccaatctatcatgccatgcccttggagattgttttaaaccataca

SEQ ID NO: 19966 - DNA, 7296 bp, Oryza sativa
aaaacatgggccacaagcagctcgacggctactctttgccatctgcactttgcgtagccttaaaaataaggtacattagggagaaacccaatgtaaattttatcaaggagggtgaatgcattgtggagagtcaacagataacttacataaaagaaaaaaaagagaaatatcgtgagagagtatggccatctccaatgtggatgcttaagtatgtgcttataaagaaataactgttttgtcttgccacttagtataagagaggtgttaatcctgaagcatcgatgcttagcagagcagatgctcaactgtgtgagggcatctacaaataaatatagagtcaggtatgagctttattccatatagagactaacttcttacaacaaccgagattatatggtctttaaccattaatgcacctaaatatttttttcttactagtactcttttttcctttcttttatccttatgcaacaaaattttcttataaatgctaaaagttgtatctaagccgatgtcatacatagtaatcatgtttctccttcctcccctctttttcttctatgccattaaatttacttacatggcaataaaaaaaatccgctaataaagttgaccgttgtacatgccctatataaagcttacctcaagtcctcaactacttgatttataagcacatagaaggagatgtttgcattcaagagagttcttagacagatagtactacttaattacgtaactaaattaattaagcactcaatattgacgctttacattgaagacgctctaatacacaaatttaatttaatagtctatgggagtaatgagccgaaaaaatgtctcggatattagaccagtcccaacccaagatactagacatagtttctataaacttcacatcatcaagaaactagtaccaaacactactcttacaatgcaaatatcaattttacatacttaaattaaatgctacttatctcacatgatgtcttgaatgttatgtagaaaccatgtctcatgcaatacctggtttccttctctttcatcatttattcacttgccacatcatctttaattctaggtgacagtttatttaatgctatggcaatactggattggaaatggccttagtgtgcatgggtgcaacaaaactgaaagagccggttgcacttctatcaccatcttgcactaaatggccgtttcgttggatgccagaacttgtagaatttaattcgatatagttacactacgagtagtatttaggctgtgttctttcctgggtgattgtaagtcagtttgtttcgtttttcatgcatacgcttcccaaactactaaacggtgtgttttttgcaaaaaaaaatctatataaaagttgctttaaaaaatcatattaatctatttttgaagtttgaaatagttaatagtcaattaatcatgtactaatggctcatctcgttttacgtatctttccaatctcctctacgtcctcttctcaaacacagccttagttttctgttactcgttgcctgatgtgccacatttttcttcttacaagtttacatgccatgaaaaaaaaaattcaacgcaaaaatggtggcttgaaatttgcaatagtatcgacaaagaactgccaaagggtactccagtactcagggctcctttagaactgatgaattttgcataaatcttactactagtaaaagaaaataaattactcccgccatcttagtcgcttcgttcgttcccgggtgagaaaatatctcattttctgcacgcacgcttcccaaactactaaacggtgcgtttattgtaaaaaaattctatagaaaagttgctttaaaaatcatattaatccatttttaaaatttaaaatagttaatactcaactaatcatacgctaatggctcacctcgttttgcgtatcttcccaatcttctcaatcccctcctcctcaaacacaccctaaaactctatttctagccattgattaacaaattagtggcagggataaaagatcaaagtacctcttattataagaaataggaaaagatatgaattacacccctaaactatcatggtcgatcgaattatccccctaaactcgaataccggatattttacactctcaactatacaaaccagataaataacccccctagctcaatccaaagtggttttaatcctacgtggcagtctagtcagcaattttttttataaaaaatagtgtgggccccacctataagactctccctatctatctttctcctctcacatctcaatttctctctagtctctactctctcttcctcgatcccgatccacacacacacactctctctctctctctcctccctccttgcagcgagcggcagcggctggcagagtcggagctcgcacttgcgtgaaggtggcgacggcggtggtggagccgaagctcgcatgagtggctggggcggcggggcgtggctgggtgggtgctactgtcggcggtgtgcgcagtggggaaaggggaactagtcagcggtggacgcggctgggtggtgtcacaccccgaagttctttcccaagcctaaattgaagttataaatggtctcaagaaaataccagtgtaaagcaagagtagaccttaataaattaatgcaaataataatcggaattggcatgtggaattttttttgagttctacatgtcgaaattcgctaacaagatttttagtggaattttcagagctctcgaaataattttaaccaattaaaattgagcacatgcaattttaaatcccagggaaaatcttttcctccttttctttttcttttccctccttttcctcttcttgggccgtcggcccaatccaccccgccgccgcgcgcgccctcctccttgtgggccggcccaagccgcccctccctctctccccgggacgccgacaggtgggccccacctgtcggggtcgtccccttcctccggccgcccgccccacgttgccaccaccgccgaaaccgccgccgcgcccacatccccgcctcctccgagccacgtcggccacgcccgcgcatgcgccgcgcctcccgcacccactcctcctctctcccgctcgcgcccgcgcccgagatggccgggattcgaattccgaatcccgcctctctctccacctccacctccccacgtcggctggcgaatcccgcccttaccggccacgtccgagttcctcctcccctatttaagctccaccgccaccccctctctctttttacccatctcgccgaactctcccgagctctccatcgctcccgcgccgtgcacccatccgccaccgccgctcccgctactccggccgctgctagccgacgctaggctcgccgccacaccacgtcgtcgccaccgtcgggttcgcgtggccaaggtccaccccgtccaccccttctccgtcgaggttcgccgccggagcgccattcccgccatgcgacggtgagagccgccatgtccgccgccttcggccggcgttcccgccttctatggcccctctctccctctctaatctttttcttttcgttctttaggtcgtcccggaccccgtccgccgcttgtcgacctccctccgtcgctcctcgtcaccggtcgtcgccgcccctccggtgaggactccctcccctttcctttccttccccgtttccccgtgcgccgccgtcacccgcgctcgccgtcgccttcggtcgtcaccgccgccggggcgccgtccgctgccgccgccctcgccgccgcttgccatcgccggtggtcgcgtgcgcgcgccgccgcccttgccatggccggccggccggctttgtgccgagccgagccgagccaggccgccgccgcaccgtccgatcggccccgggccgatctgggccgtcgatcccgtggactggcggtggaccatccgcgtggtcctggtccacggtagaccgaccacccgtgctccactgacatgcgggccccgcctgtcgacgccgacccccccccccgggatgacgttagccctggggcttattgcgcaataaatgatttaaggacttttgttatagtaataaacacattgaatcttctaaaattcataactaattcatctgtgctccgtttaagcccattcaagtctcagtaaatcaagaaaaatgtgtagaatccattaaaaatggttttgttctctgtttcaatagtcttatagcctgtttgtattgtttgctttgtatgtcgcttagattccggttcttccgacgctccggtgtacttccaaatagtcgccgaggttcctccagcagcagagcaaggcaagtcatgcttgtcacttgaacatgttgatcctatattgcaaatgctctattgtttttcttcaaatactgtattgttttataatgttactatgggatgtttacctactgtcatagccgtactattttgtaccatgttcctttgttagcttgggatataacatgactagagattagactagggattgcttagccatgcttagttcaactagcacacaatgagggagatcctattaatgtttagacggtaggttctaatggtaatgttggattagtgacaccgcttcggtgttggttaattaaaataaatcacatggtgggctgtgggtgcatggttttgttggtcgcacccatggcagttaaggaccggttcgcgggatgccctggaagaacttatcgtacttaccacaagccagcgtgggcaacggctgggcttgtagtgtagcttttctctagccgacgcatccaggcaagggtgggcgtgatggagtttggatgggccctgcgacggcctatgcggcttccggattcacctaggcaagagaggggactgcccgctgccttgcgaggagtgggggtgaaacctgaggtgtggtgtgcttggttagagggggttatgcgaagggtcctgtcacggcctctttccggtatgtcgtggtggcatgtcggtgcacggaaacgtgtcgtggggctgtgtcttgtgggtacagttgtacacctctgatcagagtaaaactattcgaatagtcgtgcccgcggttatgggcagtcaaccagattcaccgtgattagtctcaccctagtttagtctaatgaaattggatagtataggtggatggttgggcctgtcgcaacgtggtatagcgttggacagtggatggataatattgattaattattacaactgtttaattctttcaacttctgtttataaatgctcgccttatgcaaatgaaccactctagctctcctttgataattccctgcatcatacccctattccggtatgacttgctgagtacagtgggtagtactcagtcttgctctattttccccaaccccagagtacaagtatgtgtcagatggtggtttctccgaggagtaggcttcgtccgtgccgtcgaggatgcctgtggagtggtgttcccgctgcagttcaagtcaaggcttagctccagttatctttcgtttttccgctgcatttatgtaagacttttatgatgtttgtaagacgtggatctgaatgtaaacattgtcgtttgtgtacctcggccggtcctggacggggattttaatgcacattctgcttggaattctattcaggaatttctgggcgtgacaggtgggtgctccggttggcggcaggcgccgcggcaaaaggggaaccagttggtggcgagcggcggtgggcgcggatgggagggtgctccagtcggcagcgcgtcgggtccaggcgtcctctccctcccctctaggaggcaccactatgaggcgagctactcggccaaggagccgaggtccgagtcgaggaaggcgttggtggcgtaaatgacacagtggtgcagcccgaaccgtgccaccccacccgacagcgcgtacagcaggtgggagggtgctccaggcggcggcgggagcgacgaggagggggcttcggtcggcagcgagcaacgataggccgaccggccgtcgccgcgctcttcagttctaggagggaagctagagagagatttggggaagagagagattgagagaggtgagaggagagagatagggagagtcttataggtggggcccacactattttttttttaaaaaaaattgctaactggactgccacgtaggattaaaaccactttgattgagctagggggttatttatccggtttgtatagttgaggggtgtaaaatatccggtattcgagtttaggggggtaatttgatcgaccgtgatagtttaagggtataattcgtactttttcataagaaataataatactgtgaagtgataggtcagagagaaaacatactgatttatggaccagaagtaaataaggtagaaatgatttttttaaaaaataaaatttaagtgcttaagagctccattgtttcatttatacttatgcttacaaacaaaattttgaattttaaacttaatgttatagttgattttgtgattttttttatcgtatgttatttacatcatttacttttgaatctccaagaacacatataaaagtgttactcataaattatttttaaattgctaataaacggttcgcataagcacaagcataagtgaaacaataaagccttaagtctttttgaacggagggaatacatttcatgtgaaaatcatacagtattttttttctgaaagaagaaaatcgtacagtagaaaactacagcgttcaaaggaaccatgagcatctttcagattttaactgtcagatttaggtttttttggttagtaggaggagtaactgcttacccagagcggcagcttacctcccgccgttaagcgcgccgcgtgctgccatagagagtgccatgccattgccactggaagcgtaggcgcatagcttcgcatgtggccgcagcgccggcagccacaggcacctcaacgcaccagcgcacggaaggccacatgctgcacgcatgcacgcatgacactgcacgcacaaacaccattatcttaaaaaaaatattacacaaacaaacatctcactcctgcagttctgttccccacatttctctctctacccccttctatttcttcagagtaaaaacgaagaatgcccacttcttatttcttcagaaaaagaattgaagaattaacgcaaatttcatccattgattattgaccattaagctgaagcaagaaagcgctccttcctatcaaaaatatttgatgtttaagataaaaatcagttaaacttttaaaattccgataatcaatagcttcttaaatgcttagtgtaaaaacaatagaatg

SEQ ID NO: 19967 - DNA, 2692 bp, Oryza sativa
atcgattgttagaattttaaaaaattagttaaatcttgttacaagcgttaaatatttgtatttatgaataaagttagccttactatctccatcctagaataagttcacttttcacccatcctacacatagcaataaaaaaaaaataaataaaaagaatatcctcaccttatcaaatcccaatacgattgtttttttatccactcacaacatacagtatttatttcatatttttacaaacttcgatacaatgattcctaaaactaaactattttaagacaaacaaaaaaactaaagacaaatttaaaattgggcatgaaaccggaggcaatattattgtactcctacaaatgcaaaatgcaaggtactccttccgtcccatgatattaaggaattttagagggatgtgacacattctaacatcatgaatttgaattgtttggattcatagtactaagatgtgtcatatatctttagaatctcttatacggagtattttggaagtgagtttactgtactcgtacaaatgcagatgcaaatgatgatgagaagaagaggaagaaacaaaaagcgataaatgcgtctgaatggaccggtgaatgaatcagagacgggcagcaagattgtgtagggctggtctgcccctcctctctctctctctctctctctatctatctctatctctgcaaagagaggcctcatcaaatccagttgggcgcgggggacaagggggcatgttccactcacctacccgacgacgacgaaccggcgcctcccattggcccagaatttactccccctccgcccgctccgccacctcccctcccccctccgccgccgccgcaccaccgcctcgccatgtgcggccctgcacgcgctctcagatgcgccaaactgcaaaccctgcaagaaaaaccaaaagcgagaacttatcaactgctgcagactactctgcatgggaaggacggaaggacgagcatcagtggcatcattgggaggcggtcgccgtcgtcgccggccgggtgtacgtacgtcgtcgccgtcaacaccaacggtgggggcggcgatggatggatggatggctcaccggccgggccggcagcggcgatagggttgcacgtggtgacggacgatggaaacaggtgtggatgcgacgcctatgatggtttgtggatgccgtcatcggcatgcagcaacaggagagaggggggggtgcattgctggctgctgctacggcgacgttcgtgccgacggctcgacgcagaatccggctggctgtttgctccctcttctgacattgctagcttcacgatcatttgacatggactcgggttcaccctagagtacctacagtaatactccctccgtcccaaaatataacaacttatgactagatgagacacatcctagtccaatgaatctagacaaagcgctgtccagaatcgttgaacaaggttatatcccatctaggactatgttgctatattttaggacggagggagtagaagatggatcatttaccgctgacaagatgtcaatcaccttgagtagtacccctccatcctatagaaaatcaatccatgttagtttgtttttttataggatggagaaagtacactatatgagatggtatcacaaagttataaaaaacaatactactacctccgtctttaaatatttgaagccgttaattttttaaaaacatgtttgaccgttcgtcttattaaaaaaaagtaattattaattcttttcctatcatttgattcattgttaaatatacttttatatatacatatagttttacatatttttaaaaagttattgaataagacaaacggttaaatatgtttaaaaaatcaacggcgttaaatatttagggacggagagagtataatgctattgatttttaaaatactacatccgtctagaaaaactcaacctaagtgggggatgtgactcatccaaatacaacgaatctaggatgggtcacattcccccctagattgagtttttttttttgacggagggagtatgtttaaaaaaattatgtaattgatttatcattaaaggatcttttaagcaagccattttttttatgtttacataaaaattttaaataagaagaatgatcaaatgtatgtccttgaacaatacgatgatgttttacagtttacgtatgtccttaaataacataatgtatgaaaaaacgtagggaggtattttgcggtttacgtaaacatattgtgttgttttattaatttccttaagcaaaaaaggctagtggaataggaggtaaggggctaagggcactgctgaattgcaaaagtaaggggggggggggggaggaaacagggaatgaggtgccatgtctaaccgaaattcataggaattacaaaacatagagaaattactcaaacgtgttggatgttttgcaagcaaaagacatgatattgggatttgggagagacataagcgttcctttgtaacaacacatgactgttagtaaaacacatgaatggaacatcatgatcactatttaaatttcgccatgatttaaaaatatacaaaactctaaaaattattgtttgaatgacacataaaacccgtagaagttcaagaggacaaggaggagaaaacataaatgtgatactctgtacttattttcctccaaaactctcatagggctgcaggaat

SEQ ID NO: 19968 - DNA, 5876 bp, Oryza sativa
aagaatttcaaagaacttgattatcctttgtttcaatcctttttgtgagggtcaatcctttgttccaaacaactttgtatgaactttttccatagaattcaaatgtttaatagcaatccctaccttttcttctttgtttcagagcagacctacctaaacagcaatttctaggttcaaccccatgttagatttcttacagattttttttttgaaaggatcctaattaatcctacaacatccctcaaattttttttttacagcgcgctccgagtactttgtttccatgtactagcactgaagtttttcaaaatgtgagctgcagcaaaggtgtacaatatcttcctactacggtgtctgtatctactgtctgtgcgacactgtttgtgatgcactgaacagcagctcgctgcgtcggcctctctataatctgtactgtacaggttttcagtgtcacgtcgctgcctgggctggccatggcctcgtgggtgtgtcatgtgtgcatgcatgacatgcaaagtaagcttgtgtatagaacattcaggaccggatgaacagaataatgtgctttcagaggatttaccgctgccaatcaaacctgttcgtagattggacattggagtacttcagttcaatttcactcatttcagtcaaccgatccctcgccacagttaaaatttggagatgatatggcatgtgaagatccatcctgcatccgagaaaagaatacattaagcttacaaaaagaagagaagatagaatacaggggcacattcaacataaactacagttagcattgacacaatgcggaggaacaatgtggcacatgaaacaattcagttaagaactaaccctacaacagcaccaccattgcatgattgcatctgcatcactgcatgccaacgacttccacaagcttggctaggttggttcaaactaactgaacacatgttctctctctctctctctctctctctctctctctctctctctctctgtgaagtctgaagatcatgcatactccagcatgagtaggggatggcattaaaacaggttggtcaggtggtgaccggagacgctattcgagttattactactacccggtgcctgcctcattctaacaaacaaaccccatagatagccatcttcttgcgccccaacatggcagattttggcagaccaggcccccccaaccacgaggccacatgggcaacacaaggtgaccactgtggctacgcattggaaacaggtattccttcacatatcttcacatcaacctcctctcctcctggcttggtgacaagacagagaacaaaatggttggcaaagttattagagacagttggaaggataacctgtccttcccatttaaggacactgccacccttttgcaagccacaggggaaaagaaaacacacacacacaacaaagatcctggcatctctccagtaatcctcctcctgctgcctcagctcctcttctgtaatcccctcctttcctatgcttatctatgagaaggaagatggctgggtgtcagaggcttcttcaatgttctcctcctcaggttgagggtattcaaggagggagcacaaacaagaagagagcaagagcaatgtcttctttaatgttgcattgatgaggggtccagaagagaagcataaataaagaaggaagctagccatatattcttcccagccagtgttcctagtatccattctctctcaaactcaaagctccctcctccaactatctcaccttccttctattctattctattccctctggcttagcttgtttttatcagttcttacctttcttgattctcctctcctctcctctgccatggagtcatcccatatcactggggatgatggcgagggctgcaacagcagcgagtccgggtggacaatgtaccttgcctctcccatgcacggcgacgatgacggcggcggcaaaaggagcggcagcgaaggaagcaatgttgatgatggctatggctacatcagcggtcggggaagccgcaaggagtatgaagacgacggcgatggcgacgacgacgattccctcgcctccgatgcttcaaccggtccggccaaagtgaaggtgccttccgcaccggacggcgatgacgccggcggccgtcggaagcacgacggcgacgaagacggcggcggcaagggggaggaggaggaggaagaagatcatggcttgcacaccaaattctcgatgagctccggcaagaaagccggcaagacggagaaaggaggagaagggaagtcctccaagaaaggccagaacaagagaggaagctcatcaagaacaagattcttttggtaatggctttctaaaatgcattagaatcgctgtactaggaatctctcttttcagtttcttggtaagattgaatccttgctaggagtatgcatgcatggagaaaggaaggctttttttggatccttgtttttgccttccatagagcttctcccatggttgaccacccagtagtaggttaactgttgccgccatgtaaatctactgtaaccttcggttattcttcaatgccctgcctttaatgtcgcttgcagagcttgcaatcttctcctatgtttctactaagatattaatgaacactgctcctactctgaaagtttctgtccaggtagatttcctctcacacggtttgaagcattgaagcatttgcaataacagtaaagagagaagaagatgctaggtcaattaatttaattctcctctgcttcccagtgtctagaaagtcagaagcgttcatgcatattttattacaactttattagaaatatatggtacatacggcacacatgtttatctttctgctaagaaaatcgcacgcatcatatttcgacaaagaaaaatcaccccacttttatctttctgcccaatgccacaatgattcatgactagtacctaaacccaatccaatgataaaagaaatggtaacatgtaccagaggcagacattgaggatactactagttttctgaaacttttgcttgccaactcacattctttagcattgcgctaagcagatgctgagagcaggtgacttggcttgaactaatttgttcgatgcccatcatgtggtaagtatataacaatgcaccagaagaattatgtgacctaaacactccagaagaggggaatatttgtctaaccacaccactcatgcagcattaaggcagcaattgctgcacatgttctagacagggtggaaacaatgatttgtccatctcacagagcggtctaattaatagccataaacagaacaacaatgatgtaagctggcttatgtactaaaaccagctctccctcattttctctcctccccctagctataaaccaaaccagaaaattaggatcacgttctggaagaatatatgaaaatgggcaacatgagtacagctaatgcaccacttttgcaccaaaccatagcaatgagctgctatactttagcacaagaattaaacaatggcaggacgctgcatcttctatatgtggtggcaataacatgctgcatttaagccccaggccaatgatttgccaccggaaatcttcatcatcgaaacgtataagtataatcatgtaggtgtgcgtgaaacaataaacaaagcacagcagaagatgtaaacaagtgagtccagctatcacctgctaatagcatgtatcattccttcgaatccagcagccgtctaaaagcagctttggcactgtttggatcattcctgttgggaaacgatacagagaaagtaccaatctccctttcctgggaaagaaagaacaattatacatgaagggcctgttcacttcgatgccaaaaaaaaccttaccaaaattttggcaggatttcttatataattatcaaattttggtagcaaactaaatgtagccacttttttttgcaactttaccaaaatttgataaggttaaaaatagcatcaaagtgaacagacccgaactttttgacaagacgctgtaaagaatattaactgaaatgttcagtcttcagatagaaatggaacagtattaaaaaaaacagaaccggtcgaagttgatcaagacactgtaaagaatattaactgaaatgttcagttttcagatagaaatggaacagtataaaaaataaacagatccggttgaagttcatcagtagtttaggacttcttccgtttaacaatgcaagactttctgcaattgccctgtactaattttgatctaagaaaattacgcgatatgggtgatggcgccctgttccttatcctaacctagcacatttgagtaaactaatctcggaggcttagcgtctaacaccaaaacacacggattctgtcgcgagatactcaactcgcgcacatggctctacccccttgtcggcgcgcacgacgaaccagacgggctgcgggattgctgttgccgtcgttgttagcttacccgagagcggggatggaggcggcggagcagggtgagatcgcggcggagagagcggcgcgagcccacgggaggcgcaccggagggagcagcggcggcgggagcggcggtggcgatcgatcacatgggggggaagagacgggcgacgctaacctaccaagcgacggccacgtcgcggatggtggaaagggaggcaggggttgggccttgggcgcgtcgtgtgggctgcgggcagtaaaggcccatggggctgaactaccggatgggctgctagtcgtgggctcgaagcaatttttgtaggaataagttcatctgaggtcccttaacttgtcaacgagtccgattttcgtacttcaaccataaaaccagatacaacagatccctcaactgtcaaaaccggtgcaatataggtctcatggcggtttggacggcggttttagctgacgtggcgcctacgtggcaaagttgacccggtcttcatctgacgtggcattgatgtggcattgacatggcaatttaatttgtaaaataataaaaactgtgaccccacatgtcatgttcactaaaagaatgaattaaaaatggtggggcccacgtgggccccacatgtcattctcaccccctcctctctctctcccctctcctctctccagcctccaggcgccacgggaggtcaaggggaggtccggcgggggcggccggtaacgcgacggcgggaacgctgggggaggggctccgcgcgcggggcgcctcccgccccgagaagctgctcctcatcttcgcccgcagcgtcggtgcagaccccacgcgttgactcgaggaagagttcgaggccatggcgccgcccgtctccgacgagatggagctcgcgccctgtacttgtcaaagtcgacggcggcgatgaagaggaggaggtggagtagtggtggtgatggcggcggggagtagcagctgcagcagcggcgccgattcttctccacgtcgttgtgctccatcttgctactgctgctgctggtgtggcagctgcctgctgcttttgtgcttgtgcttttcttcctgctcttcatctcaccaattgcttcttcctttgagtcatttaaattctcaactttcaaggacgcaggcaaaagtacgtttcttgatctcagcttctcttaatcgtgaataagtgagcgaattaaagagaagggatggatggacctagaataaaatggagcgagtagcagttgggttacggctacacgagaaaggggagggatgaagagctggggatggatggagacgaggagcagcttctcgaggcgggcgcgccccgcgcgcggagcccctccccccagcgctcccgtcgccgcgtgatggcggggttgtcgcaggcgttcccggctatcgggctgaacgagctgtgctacaaggagtcgc

SEQ ID NO: 19969 - DNA, 9894 bp, Oryza sativa
ccgcctttttgcctctccgtgcgcgctcgccggcgaggaaggatggccgggagggagaaagaaggaggcgccggtcgttcctctctcgtcgtccgtcgatagagatgatgggtcccactatttgtttttctttcgtccgactgacatgtgggccccacattttgtttttatttcaattttttttattttgctcctagtgccacgtcaccgccacataggatgaggaccaagtcaaaccagccacgtagacgccacatctgccaaaaccaccatcaaaaccgctgagagacctactttgcaccggttttgatagttgagggagccgttgtatctggttttctggttgaaggatgaaaatcggattcgttgacaagttaagggatctcaagtgaacttattccatttttgtacaacactatactactacttcctccgtcccataaaaagacaattctgacacatcctatttctatgaatatggacatatctctgtttagattctttgtaataggatgtgtcgcattcagctttagattcattttttggggacaaaaggagtagatgataactttttaacacaatatatacacatgctcgtataaaacgcgtgcacactcacccacacagataccatatctttataagcacctttaatgactaataaagcggcatattttgagattcacgaactttgcccccgtgagcacctatcgtagattaagccgacatattttgaaattcactcagtcatcacacactcagtcatcacaagtatatctcactactcatgagtaggtcacttatcactaaaagaataattagttgtaaatgtgagcttatatgctaaatttaaaacttaaatctgggtgaacatattccaccacaagaacacatgctgaaaacttaatgaatagaaattaagtctcattttatttatagttcaaaagtaattcaaatgtttcctcataggatccctatttattttttctttacatcattatattgtctatatagttattttgaagtaatttcgtctatatctaatccaaaaggaaatttgcacagtataacatcagggcatgtttgcgcgcctaaatttagttatgaagcatcttaaacccaactcaatggctctagcttattttgtaatatcacttcagtctgcttcattcccttttaaacgaagttaaaactatttggttaaacttaagctatactaaataggccctgagcgtaaaaaaaaaaacttagctgtgctcatctagagctctatttgttttttgagaaaaacaataatgttttaagaaaggctgtgtttagttcaagccaaaaatgtaagtttggttgaaattagaacgatgtgatataaaagttgaaaatttgtgtgtgtagaaaagttttgatgtgatggaaaagttggaagtttgaaaaaaaaagtttgaaacttttgcttttagtggttaaaaaaagcaattatttaaccaaccgccggatctgagatgaacaactcagatcgaactcccaaaacctcttctgcggcggccgctttcgttagtcatcgccggccttccaaatgccgtcctccccgtggatccccaccgccggcgctccgccgccgcgggcagcgccggccgtggtctactcctggctgtcggagcgccaccctgtcaaggtatcgtgccttcccctctcggaccagcggtaatctcccttcgtctcgccgccccagctcgctgaacctaacacctagggtttctcgtctcacccgcgcaggaggcaggagcaggagcaggcgcttccaacgcgcaggagtccaggccccgcgtttctccggcggagaactcgtaaaatgcctcttgcatgcccctctccccacctttttcttggccgtttctgattttctgcaatgcgtgctttgtgtttgttatatttttttgaggtaattgtgtttgttatattgtcgccacgaatgattatctctgcaatttagatatttcagtaagcgaatgtgagcgcaagaaccagccattgtattagcttcgagccttcgagtcgatagtgctggtcttttgcttaattgctcgtctgtgacacggatgaagtgggcagtagttggttcatggttgatgtggtcgacttattgcttggaacatattggcaataagcaagatgaagtacaacagttttacctgcataattcgttatcttgtgcaagcacctgggtgtggtacttgaaatcttgaacaatgctgtgaacaagaaggaatggttaataatgatgcttttcatctggttagagaaaatagaaatgtgttgagttcaaaataaaataggggttacataaaaaaaatgggggcgacctactttttttctgaacagaaatcacctcccttccaaatcagtttggtctatctggtcctctactgataactgccttctaaattcccatttccacctctcctctgaccacatcccattgacagtcctccccttcttcctgcttatgctatataacttgggaaacaacactttcagaggcactgctccacaccacacatcatcccagaattgggcatgattcccattcccaacctctctcacaactaacttacttacccactgattgcaaaccccacaagcagagcccctggccttgattttttgtattttgttttcaatagtaaccaactttatttgatctgctaaaatgaaaatgcatgtttccaattccaacaattgtgttgaattgttttgtatatcttcttcttggtcaaatgatttggagttgtgaacctgtatattcttaatttgtagttaagttcctgattagtgacctgggcaaataatggattcatatagtaaacattattgtattactttgcatagtgaagtggaaacccgagagcatgaagagaaggtcaacaaatatcaggctgtccttgcagctcgtttgaaggccaaatacttttctggcaaggcttttggtaaaggtaccagtgcactccaatcttatgacaatagtatggcatggcatattatggtttacagaagatttgcttgtttgttcaggcagtcagatatctgcctggttagattatcttttttttttttaaaaaaaactttgatatctaatagatcatttcctgcatgttagcttagaagaaagctcaactgtatggttcaacaattgacatggaatcttcaaatggtctgagtcatgatccactaaatcaacaaacacaattagtctgtgtcatgttttggccttgagatgcaacctgtcattactaaaagatatttatattattgaatccaagatatgctaagttgactatcctaacaatcatctcgaagaaatgcattaatatgccttccttactttgtaaggatagccagtgaccagatgtggtagtagagtttgcctttttgttttcttactaatgaattaacttcaagtgatagtttttttccccgtattgacaatgattttttttttaacgtttcaccatttggtggacagaaaatgtgtttgaagaaatgactatccagtctgagaccattctgttaagcaggtgagttgtcttcgctatttgtgtgtttttccaatattgttctaaaatttcatcataagaaccattttccttttgtttcctaggtgcccgttttcaagtttatttgcagatccagcaaaattttgccgggagaagagctgtactaaagaggacatttatccatctttgacaaatgcctcctttgccaagcataaccatttatctctagttcgtgaagactcgtcgaagtaattagcggacagtttgtctgcagaaaactcttaacacctgccaagtggcacctgtctatcaataccacctaatggatgagggttgggtagttacattattaactacatatgttatccttaaactaaatgaactgaaacatgtaaaatatcaacaggcctaatttaacttgagagtttagtttcttcttgtaggcctgttgagcatatagatagctatgaacttaactctatgcaaaacaatgctcatattgagattattcctctagggggatgtctccaacattttacctgtcaccatagtactcacatgcatgatctttgcatatttttttattgttccttttctacagagtgctgttattttgtagggtactagtatcttgaactttctatattccgtttgtagtaccaacattccagggcctccattgccgattattccggtgcatctgtcaacatacatggcaagcttcatctgcaagtgcccctggaatcatggtggacagatgtatgaccaaacacacctgaactgcatctgcagccattcttatcttcgtgcaactgtacctgctaacctgcaccaggtaaaatagctcctatgagcgacggtttgttgaggtgctcttgtactttccagttgtttcctcatatttgcaaaagagatctccattgccaccaccgtgagacattgcatggtgcactggtgcttcttccaccgtgcgccgcacaagggcaggggccatgcccttttaaccactgtttgcttgggtcctgcgatgtgagcgtccaactatggtggggcctttctccctcaggttcacacgtagtaccctggactggacatcctttggctgataccgcacttgcaatggcaaatgcatcaccggtctctagatttgttttttttagttctgatctggtgcacagctgccgttcctatcttcagcaacacaatttgcaatagaaatgtacctccttttcttttcctttactgtggaaaatgagttaatatatgtacgacatcctatgttaatatttgatattgggattctgtgagatcctgcacatctttgagaccgaaatgtttgtgtgaaattcatgtctgcataaacctcaaaaaatgtaagtcgacatcatgttcaattatatatatatatatatatatatatatatatatatatgctatgtttttgaatttgctcgtttgttttgatgaacactcacgtttatgtattgacaaaagcctagatttgtttcgtggcacatgttgccgggcttgtccttaagattctttggaatcctattcgataagcatctcaatgaataggaatatgtggttcagatcttgatgggaacattcatataggagtaccaaaattgtttgatacacatccagaaccttgtttgatacaactaggtaaaatagctaatgaactacagaacagagcagcagcagttgggttattatgggtaacttaacatcaagaaagtatgccatccattagcaatcccaaagcataatccattacaagttagttgaaccccgtgacatcattacatgaaaggcactattttttttaacttcatagttgcacaacgttttgacaagtagtctactacttttagagttgtacatgcctcttctaccccatcattttgtcttactagtgttctattaactgcagttttgcaacttgtaaatagaaataatatatatgatccattgatccatgttaatttaaccgcaggtataagtatataattagttgtaaaaatacacagcaaaaacctcctcgaaacagaaaaatcgatctcatggcgcatgcatgcatgcatgcctccatccccagtaattatccttgtttagttatacacgttttcttattgataaacatattattgttaatattattatcctctcaagtgaaaatttggtggataataataataataatgaataatataattcattcagcagcggtagtcgtagtgctgttcttgcatggctccgaggagcagctactctggtcgtcggcggcgttcttctccggcgccggctgccgcgggagcagcagctggagcttgccggcgagctcggccttctcgtcccggaggcgggagttctcgcggcggacgtcggcgcagcccctcaatgcgcggttgagctcgtcgaggaggcggcggttggcgccgcggaggtgctcgacctgcgcccacagctcgctgagctgccgctgcttgcgcatccgcgaccgccgcgccgactcccggttcgacaccatccgccgccgccgccgctcctcctccgccgccggagccacgccctgcaggccgtagcagcacccgtcggagcccgagctcggtgagccattgccgccgccgccgcccgcggcggccgcttcttccaggatgcgctccagctcaaacaccgccaacgcggcggtggcgtcgtcgccggcggcgagcgcagcagtggcttcttggaacggcggcggcggcgcggcggggacgaagtaggcctgaggcggcagcgccatgttgatgaggccgtggtggtggtggtggtggtgcgcggcggcgccgaagaagggagggtttggaggcgagaggaggtggaggctcgccacctcgccatggccgccatggtggtggtggtacatgatcgatcttgctctttgtctcttcttggctaattaaagctaattaaggttagcttatgatcactagctttgtagtagctaggtgtggtttggtcgagtgattgtgttttttttggctatggtgtgtgtgtgatcggatgaggagaaactgggttggtgatggcccttttatagtgtgccacagtgtagcttagctttggatgattcctttccatccctctccttgagtgagagagagagagaagactttagttcggtccaccgtattgaatttttattgatttgggccgagtttagttccaaactttttcttcaagattttaactttttcatcacattaaaactttcctacacacgtaaactttcaatttttccatcgcatcgtttcaatttcaacaaaacttctaattttgacgtgaactaaacacacccttggatcttgttgagctacattttcttctgaaaagactgttttgttagagttttgctttaccgtttctcgatctctctactagacgacaggggtggaacctggaaattctcaagtaaagggttgagttataacatgaccttaaatatttttcacgaattacatggtgttttcataagattttaatgggattatgaagctaggcctaggccgggcttaagcctaattaagtgccgtaggctggcctgtctctgcccctgctagatgtaaatttatataatcatgattaataagtaggcttaataatgtaaaaacatgcaacggacacgtacaaatacgattaagtaggcttaatgtaataaaacatgaacggacacgtataaatatgagttttgtctatttagttttttttcaaaacatattctacaaaataatggagttcccctaaatttaatttgttcagacatcatgatataagctcagtaagtcagaagtatcatgcacgaaggtgcatagattattgaaaacaccagaatgtacgtatatggctaatatattagtccatgcgagtagggcgatgaattaatcaagctaacttgacaaaaatgcaagggtggcatgtggtgaaatgatatagatcacctccacatttgtgtactttgtgtagggtttgggcattttgtatagccaaaggagatactaatggagaaatgatctttgctgtgtcatgcaaaaatcacattactcctggtttgagtagtgcgggactaaagaatatctttagtcctggttcaaaagccaggggtactttttgatctttagtctcaattggtaacaccaaccgagactaaagattatttttagtcccgattaaaaatgttattaggcatgtgtcgggcctcaaccatctttagttccggttgttaaataaccagacttgaaaaatagaaaatagcgcacgggagagagagagagcgcgcgccacacgttcgcgcccttaccctttttctctccctctctccttaagatctcctgcgctcccctctccagcccctgttttcctctcccactgtccttatctctggatcccctcttctcctctcctcctgatcccctctctccttggcaagccggtgatgaggaagggcggcagctgcgtccccaacaagaagcggtagccgccggccaacaccgtcattgttgtcgtcccggtaatcgtggcggtggcagacttggaggaggccaatgggcggcgggcgtgaggtgacccacggtaggcggtgggcggcggcccatggggggcagcgggcgggatgcggcgggcggccctctcctctgctggagggcctcggcaggcggcaacgccagaatttgtgattcattggatttgtgatgtaccttttttttttagaatttgtgatgttgttactttgatttggggatgtagggagcaactcgatttgtaatcaaaatgcaagcaacaaaaatacaatgaaaaaaataaaagaaaaaagtcctagttagtaacaccaaccgggccacatagcgctactatatatctttagtcccaattatattttgaccgggactaagatgaacatgggattcgggactaaagatgaacttcatctttagtcccggattcggggtcccggtttgcaacccgggaccggggttgcgaaccgagagtaaagatggggtttccagctgtgagaggggtatagctaggtttgccatttgtccatatttgttgcaagatttactatcaacaccaatatgtgtgatatttgcagttgagataaaatatttctaaggatgtaggtcggatttttagcttttttgcccctagacatgtataccatttgccaaattccgattcacgacgaattagttccacgcgaaaactagatatgcatatcatctttagccggcgttaacgtgccgatgtattgtcttatcatggtattggtatatatacttggtgcaagcatcagggcatgtgacacacatctcatccctttcacatatgtctgccaaagtgccaagtcatcttaacatatgtttaatcagctaaagtacgttgctcatgagttcaatatcgatcagctagctccttcatgcaactattagggtctggtagttactatatctatcccaaaaataagttaattttctatccatttagttactctcgattttcacaattcacgaagttttatcccttcaacacccttcactatccacccactggtacaatgactttcctattaataagggatgtattgggtccccccctcctctctctatatatatagtaatttgtatctcacttgccaagaatgatcttatttagggactaagggaaataagttttagtattgatcaaattctcaaacgtttaatgaattatagcaataggaaaagtttaatgcatgtaggtcatcttaaaaaaaaatcataatagataatgcacgtggctcatatatatagatcccttctccaagttatagctgatacctggatggttttattttatgattagcgtgacttgactcaagtcagtctctcatcgcgaaatgaattcaagtatatatccatgccaaactctagcttttacacattctcctactcagataccttgctttcggttgccaactcttaattgaacattgttcatggatcgagcataaatctttctgctagccagtaaattcacaggcttgcggataggcaccatgagattaattaaacaaagcaagaataggagcaaccagagagcaaaacggcgtcggattgtgccttttcacgcaccaacatcatatccatgctgcccactgcattttggctgagtgcacttggtgtagaagccggatgctttcatgtacttaatgaaatgccctttatccgaaaaagaagtgtacattaaggcctattttggaatattagctcaattcttgtaaaattccatttaaattcctccatatgaagtggagttccaaaaa

SEQ ID NO: 19970 - DNA, 11804 bp, Oryza sativa
aaccccaagatttcacgtgagactcttcctcgacgtcgtacaccgatttttcacagggaatcctcctcctgtacagtactccatccgaacaacaacaggaatggtatcgtaaattaaagtagtcgtcttgtaggtaggagtagtggtatacactgtacaatggacaggtacgtacggcgagatcgattaattaatggatcgccatcgaaaaaaaaaaacggtgaatcgatcgatcttgcgcgtatggggagccaagcgatttgctttccgatcgccggatgcgtccaaacgcgctcgtcacctgatcgacctgacctgatgacccttttcacgcactcgatggcgcaccgggatccatacctttttttctcttcttctttttctcgctcacacaccggcgtaaagccgtcggctttgctgattatgccgcttaaattattgccagtttcgccgcggccgattggctcgtttgcgtcgtcgtggttgctgcctcccggaggactcgacgccgattggcccctctccggataagatcatagtaggaggagtatccttctgtctctctctcagataccgtctacactctacatacgcatatgtaacatcccaggagacagacacgaattggctgtgtttgagaagagagaaatagagaagatacgcgacgagataaattattagttataattaattaattaataatcattttaaacttgaaaagggtttaatatgatttttaaagaaacttttctatagattttttttaaaaatatacatcgtttagcagttcggaaaatgtacgtgtgaaaatcgatgttcttttcttatctttgttcaactctcagatgcagccttagatgatcgcgttagaaaaaagaaaaccaatttataaccattcattccttctaaaatataatgatttctgtttagcaaaaataaggtcatggcaaaattcacttttagtcattttaattgtcagtttcttactcttaaattgctcaggccaggttctctttccaaacatctgattggatttgaaattattaaaatgacaaagaatcatgaaaatcagtacataatatttatatcgtggtacaattttttttaaaaaaaatactaataatgtttatgttttagattggaaggaattaatgggtatgttcagctggcaggtacagcagcggcctgctgctagacgctgtttttttttaatgcttgcttcactattccaacatgctgcagcccttgcagccaaacagacccaataccactttgcggcaggtctgccctaggacactgccagtgcatgtcatttcatagtatatatcagcgggtttatgataaccatgaatgattgtatagcaggctaaattagacttgcttgctaattatgtgcaccccaaatgggtccaaaaaggcactgcatatcacacataactaattgaccgtatcggagaaaagtagtctgatgattatgatttatgattaagcttaaaaaagctagtgcaaagaaattaaacagaggcagctaggtgatcatcgtgcatatgcacaccatggtcgatcaccactgaagaacggtgggtgacgcaaaccaactttggcgacgtacgcaatgcacgtcgcattactaaagctgttaattagctagctgctcacgtatgtacgccccggtttgctttagctaattaattctccacaaggtcacggtcgatgtagtgtggatatgtgataccttctctgttttataatataaaactttcttatattgttcatattcaatacattatgaaacggagagagtactgtatcctccgcaagctaattaattctccacgaggagcactgaaatagatacgttgataataacgatgagtaaattgatgatatttttttaacaaatactagttgattgaagtttattcaggctcagaaatttttctaactctgtcactgcctggccttgtgctaatcaaggggccaccgggatcaagctcataattgggggattagtaagtataggttattaatatcgcccggcaccaccgtcaaatcatgggtggactgctggtgtttgcattgcattgcctcccctcccgtcggtttgttaatcctgcgtgtccatcgccgtcgccgtcgcgctcgcgcgctgccgcgtgacgccaccgcgcggcggacgcggtcgggtgctctcatgtgtgtccccgtgtcgaccggaggtggtctccagtttttttttttttcctcttcacactttctgaatttcacaggaaccggactactgggtgcggctggttgcagcctcgcagggacaagggtgtgttttttttgggtgtgtgttcgttcacgacgtcacgtagaaactggattataccctccggtatttgatcgaatacgagttttaaaagaaaatataccagtcacgtataagttgcattacagtataattatactatagttatatctaaaaagttcttaaacataaaaactgtcaaatgttatataactactccctattaagcccatcatcttttggcctcatcttttcgcttgtgcttgtgcttatgcttatcggttaaaatttaattttttaccttaaatttgtagctaattttaaggtttttttcatcgaaatttattttccagtctttgcttttaggtcgctaagaacatgtatataaaaaatttattcacaaattattttttgtttgcaaatatatcatttggcttattccaaaaataagcaaaacaatagggctgttcaacgctcacgatcatagactgacgaacacttccttaaaaaagaaaaacctaagaattaacccagacaaacattttatccagatttaactttagaattggattttttttaagtgacatatcctatcgtccatgcccactactacccaccgaggtcgaggacaattcttccagatcccatcatcgacaacgccctaccgcgcggacgtgtaaattggagaagttctctgcctacctccaactagggtgaaaacatgcagatacagtcagtattctcatttcctaacctatattttcctttaaatttagagtcaggtacggatagtgccggataatatatcactcatcccgtatcttatcccatattatttcatcatgtttgtaggtagatttattatagtttttcatacatattttataatgtgggacatacgggcggatacatgatttcccgtatcctaatccgtattttctaatgaattcggattaaaaatcagatagtatgtgtatcttttttttttccatattcctcccggcgagtgttggatcgggcgggcgggtacacccctacctccaaccattaacgccatcaggccacccgtacactcgccgtccacactctgccgcggcccgaggaggagggacgaaacggccggaactgctgtgtacgggagggcccaaactaattcggcccgaaaggcatactctaagtgcggaagttagttgggccggaaggtagtgcgatttgcgcaggggcctgaattagttggactggaacaggattgcagcgtactggggcccaaactagttgggtcggaacgggattgcaagttacgtgcaggcccaaactaatttggttcgcatctgcgtcgaagctggaattttttttatttttagattttttttaaaatttttacagaaacaatctatcggcaaaaaaaaatttacaaaaataaaccttgccgtcccagtggtaggcggcaagctgacgtggcagacagcgggtcaaccgcgccgtctgccgccgccggtcaaaattgcatttggccccagagggcggcaaggggctaaatgcaattttggcagcctataaagagcttggagctcgtactttttgcatttaggccccttgctgccccactagaggacggcaagggaaccagatgcaaaaagtaccgccaaatgatatttttatgttatgttaataataattaaacaagtatttattggtaaaaacttgttaatattgttataaaaatgtattgaagttggttgtttcgcaatttcatatgttaagtaaggtattattttgtaacttattcgacgtattagtacttggagaattgatataggcctatcgcagtctcggtcgtagaaacattatatggatttaaacaaggagaattatgtaacatgaagaaatagtagtacaatttgaacatgatacaactatttccattgcggttacatagatgatattagatttgaactaggagggaggtagtgcaatagttgaacacaacgacgatgtagtaatgggacaaggaagcatgacagtagaaatttcaatatgccaagttgtccgataatagctaacccctatatgaggatccatctcctctctcaaactgcgctttagtaaccctgtattgctctgatagttcaagctgcacaacacggctaggtggagttagaacccttctggtgtctatccattctctgtattgacatctccttggtggttcctggaaggaaagaatagatgtgaagcgagcaaagttagtaaatgttgtgagaaaataaggattcatgtaatcaaaatattcttaccatgaaatcgtcgtcaagaatatttggacaaacaaagaaccttcgacccaatattgtaggctttatggaacgaagaacctgacaacgatcaccacacctgcatcttggacgggcttcccatggagggagtgccgtagttagcacccgccagtcgcactgttgttcacgacattgtcgttcgaaagccgcttttctctgcaagtattgctcagtactcggatgcgaaataccagcgaccttcttgtaaacaagtggttagggtcgagaacgggattttctgtatcgacccactcgatgtatgcggaagccgtagtgcaggtctaccgaatagagtagtgttacgaagaataaaacgattgcccatacggaatgaataagcatatgcagataataaaatacctcacagtcatagttaggtcacctaaaaaagcgccttcctcgaatatcaggattcctcgaagccattagttggcatcgatcaccgcataggcagagaggacgctggcaccaaggtggtagtaggtatacacaaggatcgctacgccagttcggatcctcaacgcccaggcgtctagccattgacgaaagccggtaggatttgtaatgaagaaagtagggaagagagtactgaatgcgactgagttctgaaagattgtgaggcctcgctcgttaaggcgacttatataggcacaaaaaatcgagtgatatccctgacatgtgaacgtggcggggcatggtgggtacgcctgattggcgccgaaagttacattggtcgtatgcggcaaatggcgggcaaatactcgtatcgcacgcgaataaaggaggttgcatcggtgcggcagaaagtagtcgtgcatacgccgaaaggtatcgtgcacatataacaacaatgtattcattacacaagcatacaatactagcatgtgaagcaaataaacaaagagaagtctgctctactggccctgccccgtgccgcgaccacgcttggtcctccgggcctatgctcgcacgtggtcctgggagtaggtgaaacgatccggtggcacagcacgggtagcacgagtgtctggtggcggagtggcctgcgcctggtcctgcgtctgcaccggcggtgcacctcccagctgtgaggggccgatgacgtcctctgtcgagcctgaagcgaagtcgaagtcagtgatgtcgaagagcaaggcggaagccaccaagtggtctgacgaggtcccagcatggtccagtggtggaccctgactcgacgtgccggctgcttgtgacgaagtcccggtatactgccagaactgcgctgagtgcgaggtcgacacagttgcctgagacgctgactctgcagcctgggagaagtgggcggcctgcgtcgtagcgaactgggcaaaacctacacatcaacaacgggacccttgtaagctaagacataaaatgcatctaaattgattgtcgaagtactgttgttttgtaagtacctgtggggggcacaacaaaaggcctagccgagaaaggcggggtgctgaacggtgcacgaaaccctgaagcaatcagatgaatcggctcacatagatgtgcgaggcatgtacaaaaaatccttaaaaatacttacctccatgcggagggggagtcagcctaggaacgtgcgcagctggacggggaccagtcggtacgggtggccgctgtggtgctgcatctgcccgagcaacgtcgtctgcacgacaggtgagcactcggagaatcgagcgcatcgactccaccatccacgtgtacgtcgtcaggtgctcctctacggatactggaatccccgcgcctaaacgttggatcgtcgttgaactgtcaacgacgaccctgttgatgtcgacgacctgcatggttaatttgttcgtaaatattcgtaaaatttgatgaagagaaaggaataaaacataaaggaatggtgcgatgcagggtactcacagcacgagcgaagtcctggtcgcggtgcctggcgtagaggtctttagtgctcgcaacgtgggcctgctgctccaagggagcgaaggtgaccctagtatgggtgcgtggctggtactagcgtaggtaggcctggtacacctcctcggtgtgtggctctccctcgtgctccacgacctcctcggttgcgagcaaccagtcctcaacaaaagtccccaacttggtgggccagttgccagctgactgctgacccttgcgcgagtacctgcaaattaatgtatcatattagtgtgaatcgacagatgttgcaaattattgtggagaggtagattttaatgcaacaaatcaaagcgtagtgaaagatcttaccggtgaacatcagctgggacggtcgtcgaaaacagtactggaaaaggctgacggaagccgaattgccgcatcacgcggaaaggggcatgaggctcaacgcagatgtcgaagaccatcggaatcatagtcatccaatacgcctggtcccttgtgcagagtgtggacagacccaacggcgcacgagcctgggtagccgcggcactgtagggctcccacacgacgtcagtcggcagaaggcggtcgaactccataacgaactcaggatacgaccgcctaacctggacgtgagcccatcggcgctgcaatatgagacgatcgatgtgatgtacaatgaacttagcaatgaacttaacaataagagaagatcgatgcaacgtacctgacgacggcaccacagagtacccatcgtagggtagtcgacctccggtcgctccgcgtatagtgactcctcgtacgtgtgctggtccacctcagggcggccgattgcaatcctctcagctgcccagatagaaagaaagagagggcacccaccaaaggtcgcgctgggatccgacttcgtgcaagcctcgaaaggccacggtactgagccgccaacaacgcggaaccccacgtccactgaggcacctcgccaagagtacaagctatttaaatacaacaaatgttactaagggtacataacgatgacgtgcaatttaacatatatgtagagttcgataatattacataacataacataacattacatgccgaagtccgacattacgtcagcatacctaaagacattacgtgcctaagtctgacgttacatcacgagatctaaagacatgacatgccgaagtctgacattacacgacgaaacataaacacatcgataagttcgaaacaaattacaagcaaagccacatgccaacatagaacacaagaactacaccacgtagccagacgtggcacgacgccgcctaggacgtggtcgagttgaggtagtgccttcacccgtagggcgagctccatctgctgctgatcctgatagtcctgcctccgccgcacttggtttctccttgtctttaggacaatgcttgtaggtgtgcccacgttcatcgcatttgctgcaacgcttcaccctggcagcctccgactcgtccatatcgttgcggatgcgacgagtcttcctccttgcagccttgcctcggagcttcgatgggtcaggaatattgagtacttcatcgttagtctctgtgaactccctagctatgccgaacccataaatctcgccaccccatgtatgatatactgcttgcttactgaagtactgtgacacatatactgcatctggtatgccacactccgttgcggcagcaatgacatgggtgcatggcctgtggagcagcttcggctttgcacaagagcaatgacatgtgccgtcggctttgagaacacattcttgtttcactctcttgcggtagatacccctgcttgccttatcttgacatagtatctcaaacctgtgctgttgggtaccttgcactagagctcgatgtttcatggcctttttacacaactcctctagctttttctgcatgaaagttccgaataaaatgctgttgttcggtatagagggaagaactgcctagaaccgatccctaaaatacctgcatgtcccatgtaaaatgaactccactatgccaactagtgggagtccacggacactgcgcatcacccagttgtaaacttctgccaaatttgttgtcattattccatatctagcaccacatgtgtcatacgccttggcccatttctcttttggttcatgcagaatccactgagaaaatttccgaatctccactccagttcttctaaccaatgttggactatccgttgggagaggtccaagagcttgaggagggtcagcaacggcggtcgatggagccgctgcacgctgatcactgcatttggctgtcaactcatctaatctcttccaaagctcattgcatagcctcttgaacatgttcatgagctccttgttcttgaaatgtttgaagaaattagctctcatatgacgcatgcaccacctactatgtacatcttcccactcaccagggtatcctcgttccatactcccaaattgcaactcttctatcgctcgcagaatgccagcgtgcctgtcatgtatcaggcacacatttggcctcataccaacaacttttgttttaaccaatttcaggaaccagtaccagctgtcggtattctcactctcaacaaaagcaaatgccaagggcaatacctgattgttcccatctacccctattgctgttagtatttgatcccgatactttccagtcaagaatgtcccatcaatgcagagaacaggtcgacagttcatgaatgccatcttgcatgcatgtagagctaagaacgccccctttgcagcacactcttgccaggatgttcaattgaggggaatttcttcactgcgtaagagctcccagggtttctttcttcgataataccaagcaggcgtggcaaattgtcatacgaggcttcgtaagttccaaatctcatctctattattttctgtttggccctccacgccttggcatagctaatagtatacttgtatgtttcttcgatgtgttggattattgaccttggttcatatgtgagattatcgatgacatgcgcatacatctcagatgcaacaaatgcacatgtaatgttcctgtggtatttctgaacaccaggtagaaaacatgtatgcttggtaacgactgacactgtccaataatccttccattttcccttataagcgtgcacaatccagggacaaccatctttttccttaacacaccgaacttcatattccgaccagttggacttggcaacccaaaactctctatgaagtgacactgcaaaatattttaccgcctccttcatatcttctgctctagtataaatcgctccagaataacctcattttctttgtactcccatctcacactatcctcttcagagacgaccagactagaaaaatcctcactagcccattctgctggattaatatccgtctcatcatctgacgaatcaccttcctctacatgctcgttgtcagaatcctccctctccatttcatccacaatggcaccgacagtctccccctcataggccactccacctggttgaatgcccactggagctactacgcccctatcctctcgtgcattgacctcttccacagaagtctcatttacttcagcacttggtccctcgccatcatccatgttcatctgcacacctggatccttcgggtgaacaaacggaaccatagctagaggccacccgcgttgcaatgcatattccacataccatctccacactcgagagttttgaactggcattagttcccaataaaaaccctcaattgcccgacttactataacattgattgttatgtcacttgtctgtggatcaactctcaagcccctcattaactatccttttatagaaggtacactcctctcagccggtctgtcaattcccctttctgatacaataaattctgacagatctaccccagttggcccgtaacggacatttcctgggccatggtaaacttggaatatttgtttgttcgacatatctgtcaacaaaataactagtatcatattattctttcatgcaataaacacctacaacgtaatatcttcttgtgtatgccaattcaacggtaaaatactgattccaaactagcagatctacgtagttatcggtatctacaatacgcacttctagattagtacaactaaaaccctaaaaatataatgcatttattcaaacaaagttttaaaaaatacacagtatttaactcaatagtcacatataggatctatgaatattacctgaaatcggcgtgtgaatccggcagggcttcgccccttcttctcttctcctcccctttcttcttttttttactggatttgtggggggaggaatgagggccgggggctaggcggcaggccttttataggcagtgaggcctgccgcccgaccagagggcgacaaggggccgcctgcaaaatggccggccccggctggcttttttgcattggggccccttgccgccttttcctgcaaaaaaccctccctccgtcaccgctcgtccctcccccgtttgccacgtcagcttgctgcccaagtggtgggcggcagggtctatttttgtttttttggccgatagattatttctgtaaatatttttaaaaaaatctaaaaatgaaaaaaattcttgaagctgagactaaaattcggcccactatgcaacgaaacgacgatagaaattcagaaaaagtacacgcaaggtccctcaacttgttagccagatagaaaatcgtcccccaaccgtaaaaccgaacatctggtgtcccccaacttacaaaaccggtcacaataggtccctcggcggttttgactccggttttgtgccacgtggcggctgactcagagtgggacccacgtgggccccacatgtcaggatgccacgtcatccctcccttcctcctctctctccctctctctatctcttctctcctcttgggcaggtcatgccgtgacgcgcgtcgagtgccgcggccaccaccactacgactgcgacctgcggcagcgaggggggagggcgaaacggagcgggacggtgaggttgtcgccggcaacaaagccgatggctggtgctgctgctcgtcgccatctcctccgtcgacaacttaccggagcacgccgggttcgacggggtgcccgcgagcaccattgccgcgagctcaaccgcaaggtgctcgagcttgccctgtgcaccgtcggcatcttcaccgaccgcccgttctggaggggcggcgccagct

SEQ ID NO: 19971 - DNA, 55110 bp, Oryza sativa
  unsure (1)..(55110): unsure at all n locations
cgccgctccgccccgccaaacggcaaccacatcggcggcgccgtcatcttcgatctccccttcctttgtcgcctctaccggaccggctactggcagtgggagaaccaccaccaccggccggagctggccaagggcaccagcgcgcggcggccgcctcgccatctccatcagcggctacagtgacagctagatctcctctccgctgtcggccgcgtcgaccctcttccccgccgctgcatcggccgtcggacctcctctccgtcgcgctcctccttcgccagctgttagccgcgccgcccgcgccaccgtgcgtcgccgcctcaccccgacgacgaccgccgcactcctccctgcgcgacggcagccatcagcggcgccgcccgtcccatcagccctcctctccgcgccgctccttccccgtcagctgccggccacgtcagccctcctccacgctgcgtcgaagacgctgccgccatccacgcccagaggaaaaaggagagaaagggagagaagaggggaaaaagagaaagggcggtgacgtggtttatctgacatgtgggacccatgtggggcctacataggtcccacgctgagtcagccgccacgtgaaataaaaccggggttaaaaccgccaagggatctattgtgacaggttttataagttggaggacgccagatatccggttttgcggttgggtgacgattttgtatctggtttacaacttgagggaccttcggtgtactttttcctaggaattcgcacagccacagatagcatccgtgccacgacgcaaccttcggtgtactttttcctaggaattcgcacagccacagatacatccgtgccacgacgcaacaagaagtttcgcattctaatacttagctactaattggtaaattattactactacttgcactatgcaaaaggcaaatcagatcttaattcacatggcatggacatgataaaagcaacacaaaagaaccagagcacatctggatgagatgaagatgaagttcatccatccagcaagaagcaatttgggacgagtccggtctctccctcaatcagcaccttcccctgtaattaagcaagaaccaatttgatcagcacagagatcaatccatcatcacgaaattggatgaataatttagttttaagcatcatttacacatgcccagatgtcaaaaggataccttactgacatgtgaactgcagaagagcactcttcctgtttgagttacaagtaagcatgttgccatctcaactgaagaactggcagtacccgtgccaatatatcaccaacacttaaaatttcatatggcacggcacacctattgtggccttcaatctctttaacaaattcctcagaaaagaaattgttacatttttgcacaaggactagttaatgaatggactctagaagtgaaatttgtatgatggtggattgtgcgttgattcatggagaattacctgctactacaattttgcggaagaagaaattacattttgacactaactgttaattagttgtgaatcaatatttgttgggaacagagaaagaaaaggaacattggtgatgatcctggaagtggaaaaataacttgatttaaatggtgagtactgaataaacatatccaaaaaatactggcgataaaggtggtgtctgaatggagttttatgagaatctcttgcataattcattgctcgagactcaatactgggttaatatacccagagattagtgagaggcaaggtcaattgtcatcttattaaactgcgataactgttgatggttgattttttctttccagcaaaaacaacaagaccacattcactcaagaaagtcagaacaaaaaaagggcctaaaagagtgccaactgagtgaaatgtttcatacttcctccgtttcacaatgtaagactttctagcattgcctatattcatttagatgttaatgaacctagatatatgtatgtgtttagattcactaacatctatatgtatgtgggcaatgctaaaaagtcttacattgtgaaacggagggagtacttccaagttagcttcctgtacaactaagactcctacttatatagtcagaacttaccatgcgagaaattaatcaaaacaatcacaaacactagcaacaaatatttctcatcctctagagaacaaattagaaatcactctccttttgcccaaaacatttcagttagtaacattgtccctaagaacacaatacaaattgccactcacacaaataattagtcctgctcttaatgggtcatgaatcaatatagtggggaaagagaaaagaaagaaaaagcattgttgatcgtcatggaagcaaaaacaacttgatttaaatggtgaatgttaaatagacatatccaaaatactggtgatggcattagcatcttaatagagttatatatgaatctccaccatattttttttatgaaacaaagccaattcattggttcagacacagagattagcaggttgcgaggtcaattaccatcttactgattagactctcataagtgctaatgattgattttttttattataaaagggaacgcaattttgatcaccaaagtcaaatacaagaaggacaaaggacataaaacaatgtcacattgagtacgcaagaaattaatcaaagtaatcccaactcctagcaacaaatatttctcccatctgctagaggataaattagaaatagctcatttttttccagaatatttctgccaataacactgtccctaagaacagtataggtgtagaacacaacatgaaatggaaactcacacacataattaatcacgttgttatgaatttgcaacaaataagtcagaaaaataaaactcattagagttgaatcaggaacacccacatgctgaaattttcaccaccatatccatttacaaaattgtgctgcagggcaaaatgtaatacagaagctactctacaaattcagaataaatacaacagtatatatataggataaacttatgtaatatcctcgcaaccttaagtcacaacacaaatccctcttttaagaaaaaaagtaaacaaatcgaaaggtgcaaaaccatctctgcgactacctctacgctttctttcatcataccagtttggttctttcatcatagtaccagtttgaaacccaagacatacaactctataaaatctgtgcaagaaaagaaaggcttgccttttttttttaccgcgcagcaattcaggcagccgcagctcgcgaggccttccagctctcgtactgggggtcgtcggtgggcagctcgaagcggcagagcgggcacgagttgcgcacgtcgagccacggcatgatgcactcctcgtggtaaccgtgcgagcagggcagcctcttcacgcgctccccggcggcgacgccgtccctgcacaccgcgcactcctccccttcgccgtcctcgccggcggcgacgacggcggacggtagcgcctcgacggccgacctcgccgcgggcggcttgctcttcaggaacaaaccctccccgacgagcacctcgtacacgtcacggtcggaggtgtacacgaagccctcgtcggcgggcggcggcggcggcggcggcacgtcggcgaggacctcccactcgggctccggctgatccatcccggcgccgccggagggagatgccacctcctcccaatcgaattcctccgccgcgttggaggcctcaagccgcagatccgccaccccctcctcctcctcgtcgtcgtcatccaattggaggcaatcccaccggatctcctcctcctcctcctcatcggggaagccgaggtggtcggggcttggcgcgacgagcgcgtcgtggaagaggtcgggctccacggagaggaactggctgcggaggcggtcggcggccgccaccaccgacgccgccgagaaccccgacgacggatccgggtggaacaccggcacgaaggcgtcgtagcacgaagacgacgacgacgcatctagggtttggggcatctcgtcggaggcgagccggacgaggagagacgaggacgccatggacgcgagagatagagaggggaacgaaaaaatcgcgccctggattagcgtctcgcgagccgcttgctattatagctcccctaaataaaataaaataaaataaaaataaaaattaattctgctagtgaaactctcgtggtacgtagtagattggaacggcgaccgacgagacgaccctcgtcgctgacgagtggggccacccgatggtgggggattataaaagaaccagtggttggtggtgggtcccactcgtcagtggcgtgatggttacgtgtctcgcctgtcggggctgtgtcgtgcgggagcagaaaattaaaagtgctcgcgtttttttttggggcctgattagctaccaaacaaaattttttcacccagtctgattgacatatgcatggaatattaaatattgtgtgtaaattgtgacacaaatcttctaagcctaattgcatcatgatttggcaatattgtgtttaataaattaatcacctaatttctagataaaatctgtaatttattttattattagtctatatttaatactttaaatatgtgtccgtatatctaatctgacacgccaaaagtttcccttaggcgaactaaataggccctatgtgttctctgtacttttggggcaatgacaggtggggccgtgtgcttttgtcccgaggtgttagtgagagaagagatggtggtgggtacggtttggggaggtggggggcagtgtggtggcgctgtgcagtgtgagcggagcaaaggggaagaagggttgggtggttgcttgtcatgtgcgcgtgtgacaggctggaagaacagcgacgcaacgcaaccaagggaggacgctgagcggggcagcgtctggggcggaggcgagcaaaccgttcgttacctggtagctgttgggttggacggttgactatacggtgatacgccttggttgtgtagagtatttttttaaggagtaaattatactccatttcttaaaataagtttcacttcggcattatgctgtgtcatatgattaagagtaaatttcgtagaattacggatacttgggtcaaattatctcgaaactacatatttaacaataaatttattataaaattacaggtttaaggctaagtattataaaactacaaatttaataataaaattatcatagaactatagattttagagtttaaatccttagctccaatgttttatttgagttataaatgttcaaattttgtgattaaattgatataaaacctgtagttttgtgataactttgttactaaatatgtaattttgtgatatttcacctaaatatgtaattctatgataattttagtgttaaatttgtagttttgtgatacatcgtaataaatttgtagttttgtgaagtttactctgtaattaaaggaaaatattgtaaaatctaagtaaaaattattgattttttttgaatttagaccatatttcatgggatttcattctgattttgtgaaatttctatatgtttgatgatgtattctagtgttaaacctgtgtaaaatgaaacgtgttacaatctacctagtgcaatttaagagtaaagtttgttttttcatttgttaatctttagagtttaactgatgtcctttggttcagtttgatattattgagaagattattgcttaaagaaaatttgacaatagatcaagtcacaataaaatgatatttacatgaatcttttaaatcttaaaagatcaacgacattaaatattaaaaacggatggagtatttgtttttataacattaaaatgaaaaataccaacaattcatgggctaacaataattcgcattttctcgacggaatggtatcctttgttgggcttacattttttttccgaggggtaagggcaggagctatgccgatttcattaaaagatgggagaaagaaaagttcacaacacataatttacaagaataaaaaaaatcccaggaatcaagaggaggatacaagaattttgagttagtgcaacgcaactagcagcaggatgttgcgacggatcatctaaacaatctgggcttcgtcaaaagccttgcacatggcagacgggtggtaaggtgccttacaggtttgaattttttttgttatgattcggtacaggtgtactcggctagcacatgctaactttgaatctttgtcaattcaatattttatcttcatcacgtcgggtttgtaatacacgtacatgccagaaagtgttattagcaaataataaaatgttgtgctgaactgatgactaagtgtgtgagtgggcaaacgtgtgatgtggacatttgagctgcaattttacttcagaaagcaataaaaatgtgtgcttaactttaataaacttggctctcatgttttctctatcaagttgcatgcccctttaatttgcaattttggcaggagtggaatattttattttagttgatgactcttggattagctggtgagagggactcatcaactatggtgtactatacgaggaatcattagtactttggacgataatgagattggcttagaaaatttctgccttgagttggcaaccataacagattttgttggagtgtataaagtgaattgcccgtctttccctatcagtttaggcttttaggtgcaactgacttgtgcatgcaacttaatatggtatcagaacnnnnnnnnnnnnnnnnnnnnnnnnnnnnnnnnnnnnnnaaataaaacaattgcagcccactccaatattccacgcttgagacttgagggggtctcgcgtgagggggagtgttggagtgtataaagtgaattgcccgtctttccctatcagcttaggcttttaggtgcaattggctggtgcatgcaacttaatcatcgccagcgtcgccgtatctttctcgactacacttcgctcttctccggcaaccgcgtgctgctccggcaattctccctctatgccgttctcgtgccgcgaccgtctcggaggccttctctgctagtcccctccgatattggcgtatggttcatggtggtcccctacctcgcctatgcggtattggcaacaccgttgcgcgcattcatcccgagttgtccccgggtttggcaaacccggcgtgacgtctcgtccttcacggttcgactacatcagctcttcggcgtcatcttcctccacgatcgccgtgattgtgtcaccgtcttcgtctctagcgtgtcttcgcgcaccattggtccacgatgccctcctgtgcatccacgaccactctacggcgcctcatgcgctccctgcggctcgactacctcaacatcagcttcctgacttcggctacatcgaccacggctactatacgcatggcttcatcgaccacggctctctcggctccttcgctttggctacgtcgacaatggcacaaagggctatcatccgtgttgagcactcttgccggtttcttctccagtccaagtgtccgcgttgctcacgcttggactgcggggggatgttagagtatatggtagttagagttatattaggataggattggtttgtgtggactccttccatatctgtaatccttccttatctcctccccatgtactcctatatatatcggccccctgaggctcaatacaaagtgtctcacgttacgcaatatacctctcctatactatccatcagatttcacctgtccaggttttgagaatttgaggtccagcttctcggttatcaaaaggttttgagattcaatgagatttctcaactagtgcagaacagaggctttgaattttggaattctataagatttgtacagattgttctcttttgggttacaggcttacagcatcgctagagactgaaacaactgaaatgatgctgtagtttgtctattactccttctgttttcacccctgcgtgggtgggtgggtaaatggttggtaagagggtgcaaatgaagttattttggaacaaatggctgaggctagaagtgaagttattttgggacggagtgggtacttaccaagattgttctgagatactcttttgcaatgaaattttcaattaaagaaaagttatcttttgtcacaaaatattttgctattacaaatttacaattcatatgtgcaggcacaagcatacatgctaaatagccttacaatgcattaatttccttaccactaaatataggtcattaggtcttcctgtgatccttgagatcaaacttcaggagaccttgaccattaacttcatgcatatagaatcagcatcttgagaacaaatgcaattagatgtttcttagaagtatttcataatgttttcattgatatatcattacaaatatcatgtctaaaatctttcatagtttattttgtgcttgtaattgcattacagattgcaacttattctagccctggggcacaaaattggaatttgacacagcagcctcattcttgggccctgcaatttcattggcaagggcccaaataatctcaatctgtcaggctcccagattatacaaaagatggtcagcttatgcttgctcaagtttacacattcctttcagtatttctccacaatttgtactagtagtatctagtactactagaattttattattgtattgttacaaagatcatgactgaatctcttatcagagtttatttttgtaattgcattacagcttgcgccatgaaacttattctagcaatggggcacagaaacaggatccgcgatggcggtctcattcctgggccctgtcatttcactggcaagggtccaaacaatctcaatctatcaggtttccagattctgcaaaataggcctgttcagcttatgcctgctcaagtttacacatttcagtatttctccacaaattgtactagtatctagtaccactaaaatttactattggagccaaattgtttctccattggcacacaagatgctgaatttttactcttcagttacccatcttaaactacaaaccttgccataaagagtataaacattgttagtaaagagaagctcctggagcaaatcaggtaattgctcatcttttctcttttaacgagctcagctgagcaaggcaggcctacactaatcaacatgtcctgtagtctctgtttgataacgctgtgtcctgaactgctccttctgaatattttgactaatcatttccatcttctcggtaatgacccaatcagctgctctgatcaactgctctttcgcttctcgctgcgcctttcgaagaacttagcacgaactcccttgtctcttctctttacagtcacagatggatcatgatgagctgaactgatcgtgtattcgtgtgtgtgagtatgtgtttttctctgaactctgaagattctgacgacgacgacgataaaagatcgtatcttgggggcctgacactcactcccgtttgcttcaggccgggtgattttcttgataaagctaaagacgcccattttgcacaggggacgctttaatcatgttgcccaagaaccctgtaaaaaccagctgcattgcaatgttcgtgtcgagaggggtgagttcgatgtcacgtccttttcatctttatctcgcggtttgcacgcatttcgcaaagcgtttttcgcaggagccacctgtaatccccccctctttcccgagcccgacggttatcagccggactcgggtaagagggaggcagctgcgaggaagagggaggaagaagaaaggcgaaaaggattcagaacagtgtcatcaccgaaaggtgaagtacttcatgcctagaagaataacctcacggtttacacgcatttcgcaaagcgtttttcgtaagagccacctgtaatccccccctcttacccaagcccgacggttatcagccggactcgggtaagagaaaggcagttgcgaggaagagggaggaagaagaaaggcgaaaaggattcagaacagtgtcttcaccgaaaggtgaagtactccatgcctagaagaataaaaggtggacaatgtgttgttaggcagtagtacagggtgacttgcatttcactccttgcaaagtgacaatgtgcaacttaggtaggattactgtcagtgaggaggacaggattactgtgcggtaaaaaaatggggttaagaggggtaagtgcccctggtaattaccgtggctgggcaaaagcgtgtctggggtggataaaaagaattgcatttggttggctttgctttgccaatcaaaaggcttgattcggggtggcgcgaaccccgaggctaatgatagtttagtttagggttagagtgaggttgggggaatcagaagagcatctaaaggctctcaggttggttaccttaattggagtacactagttgtactataagcattaggtgtttgcaatttgcttccatgatcaatggatgtgatgctttagtttggaaattctaagcatgtaaaattgcatttttcttacgacctactcactctttcccaaattaatattcatataatagaattcaaaatttctcaaattaattatcatataaacgtatggacacatatttcatcgaaatataattaatgcgacatgagaaaatgtgtatatgctaaggtgtaattggcatggtgttttaatcaatgcatgcataatgagagaatgtgtacatgtgtcttgattgatacaatttaaattaacttttggtcttggtacataaacatataaacatatatgataatcaatttgggatggagggagtatttagtttattgccacttttaatctgactaaatttttacattatcaatcggacaataaactaaacacatttcaaccattgctacattatcaaattttggcagctctagaaacttcatctcttaaaactctaccataattttgcaaagacatcaaaccaaataaaaccaatgctaccaaaatttaatgatactaaaatgtatcaaaattcagtattaacaaattttggtatggctgattttgacaataagtgaataaggttttaatttctcgtactcctctgccaaaaaaaacttaattcagaggatgtatctagactatatgtatgtttagatacatcttcaggattggaatttttttaatggagggagtacgtgttaacgttcaataaaatgactaaaatgattatccgcgaagtgacccgcacccttctttgcgacgaacctgtcactggaagaaaactagtacgagtgatcatgttgatcacgaaggtgtagacagttgttcgtgtccaataataactgtactaaagtaactgtaccgacatgacagtggtggtcaaacgatgatgagagagaatggtacttgatttacagcaaggcttcagaaaggcatcagattaaacaaagcctgtgatagttggcattgtcagaaacttgagtgaggatgatgccacttgcccagatgagaagatggcaggggtaattagtgagtaagcaagctaaagcaaaggttaaaacagcatgattaaagggtttgtttctactttttactgtactttgctaccaagaaatggtaaaggcagggggtagtaataaactcaaaactaccctcgatctcctaggctgtaaaaatcatgtcgctggatgcagcaaactggctataaaatcaagaacacttacaacatctctctctctctctctctctctctcctggagtctctctgtttgattggttagggagcaaggcgatggatgctaatggcggcaatgggtttggagtagagagcaacgcttcggctgtccatggtggcatggcgatggcttggcaatggcatggcggccagatgagcggcggcagctcgtgcgctgcggcgccgccgccggtgcaacagccggcgatggattctctcgcgtggtcgtcgacggtctcgccgagcaccggcgctgccacggcggcgagcggcgccggcttcttgctgccaccggcagccgtgcgcggcggcttcggcagtttcccggtcaactccggcggcatcgtcgagccggccggtgactgctcgtcggagtccaagaagaggagatcagacgaggtacacactcacttgctccccgtctcatcgcatcgatcaaaacattcttaataaaaagcttgatgaatcgtttgcacaattgcttgcaccggcatttgcaagattgctggaacggatcacgcgaacgcatcgaacgcgcttgccgattctgggaacgagaccgagtgtagcaaagatgtcaacggcgaagtgatcggcccgccggcgacggcggcggccggcggcaagtcgaaagggaagggagccaaggacgccggcgaggcgcagaaggaagggtacagccatgtcagagctcggaaggggcaggcaaccaacaaccacagcttagcagagagggtataccctacatacaaaatttgaacagtttcaaatttttttaaatattttttttggggggaagagaacagtaatatttacaaatttcttcaaactgatcacctgaactatgagtcaaataattgaagattgtggtgttatgtttcttggcagctgagaagggagaagatcagcgagaggatgaagctcctgcaagaccttgtccctggctgcagcaaagtgagcattctaacccagaactgaagctacagtgcgaaggtttctgaatcatatgtgaatttcataagaatggatggtaatttgtgtttctgaatttgattcgattaggtcaccgggaaggcgttgatgctcgacgagatcatcaactatgttcagtccctgcaaagacaagtcgaggtactgacatgatcatccacagggaatgactgcaatttcacctgacaaagcacaacgcaaacactgatattcggttttcactttccatctctgcagtttctgtcgatgaagctctcggcagtcaacccaagaatcgatctcgacattgaatcacttgtcaacaattccaaggatgtatggaacttgaaccatcttcccttcctcctctctgtttttcttcttcagtttgcttcgcgagaaatcagaaattcagaaatgtgtgcgacaagttcatcatatttcttgatgatttcaggttcttcgttttcccgggcagccttcctctgctcccatgggattctccttctccacggagatgatgccggggctacaattatcacgaccgggcatccttcagggaggtgtccatggcatgatcaatccagatgtgttcaccagcctcatgcagaagcagcagcaaaatgacaagggagcattcagagagcctcaggtttgcatctgatacatgccattgttatttgttagtatcacttcggctaagttatacaggaaggtttaagccattagaaagaactaggccagccaaataccattcagtttcatctagtttcatattattatatactctctctgtcccaaaatataacaatttctagctatgtatctggaatctggataaggagatatacatagctaaaaaatgcatattttagaaaggaggttgtagtacagtagcagtttgcaagacaaacacatactgttcaccattctacactcattgcaaacgtgatcatctgatgggctctctgattcttgaacagatgcatcagactttggatggatcattccgtaacaccgcacaaatgccgtatccacaggtcatgagttcagaagagctaagcatcaggcaagatcaagatgggtttcacatgtgaattgcagcaacatggatgaagcaggtttattctgatcagaaagcagatggagtgacaagcacaaacagcatgtgcataggaattactgctgctgagcaattcagaattgcaattctagttgcctgagcaagtgaccagctgcaatctgacttccaatgggaagggaagaggtttcccatagattcagtacatggggtgtagctgtgatcaaatatcagaactgaagcttcactgaactggacagctagaactgcaatccatgatagctagaaactcctctgacataggacggaaaaaaagaactgaagaaaatatatctgtgcatgtgacaaaaaatggatgtccaaatatttgatgcgagcaattgaatcgcattgggatgcatatcttgttttttgtggctccttccaagtagcagcgaaaagcaatgtttgatagaaacactgaaatacaactgttcagcatgaaatttaatgcttatgcatcatttttttttcgcaattgcccctttttttttcatattgagtataccttcctttcagagtttgttttctgttctggtggtcctttggctgtgagattttatgggacatgatcacaatagataatcttaggcagtcctaaaaatcaaattttgatttatgctaaacatcctgtgagctccattgaccatttggatattgggtttatctcgccaacttaaatcgcaacagctgagagtaataacatacagattctatcataacgatgatgcctaaataggtcaacagttgaaattttgagacagtaagaatgcatcatttgtttatcttgcattttgatattcttttcttactagacaaaatgcttcttcaaaatgtgtagcgcaagaatattaggcttaagcattgatctccacaatgtaaattgatagtaaaaactgcataaatatagaaaacaacaaagggacatttgtattgtactgattatttttcatgttttattgataagaccaccccctccaatagatagaggtggccaatgagtctacagactctactgcacctacaaaaatgctgggtaacaacccaagtaatatctatgacaaaatcatgtttttaaaccatgattatatcccatagcaactatttctgaagttctaacaaaggatgcccaagagaactcacttattaatccctccatgggtcactctcaggcctcacttcagaaggctcaatcacctccgtcaccgtggcttcagatgagcctgtctctgtgctggcatcaccagtggttgctgcttcagtctcggtgtctgacctcccccatctcccgccaagggcaattgtcatcatctcatagatcttaccacccaactccgcaggactgtcaggctggacattccaagtaaacaaacagtcaaatggtaaggttcatgatgaccaagaaatgaaatataatgagtgtgttttgcttacagtatatccactggagatcagagcagtctcatacaacagctcaacagccctcttagcttctgtactttcaggctcatttttgcaggcagcctgccaacaattgtttctcattcatgttaattattgcttatgtagaaatgggtacatcaattactgatgataagcaacaaatcttacattcaagtccttgacaatagggtggtcagggttaatttcgaaaatccttctacccctcatgaactccaagcttgatgtgtccccaagtgtttgtgctttcatgagtctgaattgttgaaaaatatgcgttagaaatcaagcatagtacaacacaatgatttaatcgtacaggaaatacctttccatgttggcagaccaaccaaacttgccagatacaagaacacatggtgacaaactgaggcgctttgatatttgaacctttgctaccttgtcaccaagctgctgttttacccagtcacacagaagagtgtattcctgtttgctttccttattgtcctcatcttcatcacctgtgcaaacaaatatatattagagtgatgcagatagccatgaaaaactgtatccagagcaaatttcaaacacttcctcagtcctcacccaactccaggtcctctttgctgatatcaacaaacttcttctctttataggtctgcaaattctgaatggcaacctcatctattggctcaatgaggtagagaacctaaagagggaaaaaaaacagcaacatgagttaagtggaagcaagaatgacagttcttgtctcatcggtattatgttgtgttcatacttcaatgtctttctgaaccaacttttctaggaaaggagcagtctttgcactctggagactatctgtagcaatgtaatagattgctttttggttctctggcatgttttctacatattgatcaagacttatcaaatctccctcatttttagaagtgtggaaacgcagcagaggtgcaagacgcttgtgatttccggtgtcctcaatgcaaccaagtttgatgaacttgccaaagctctcccagaacttcttgtaatcctgcagtacatatgacaaggcttcaacacgtattcaaacataaaaactcaggggacagggtagctacgagtttttacctccttgtcatccttttcagaaatctcctcaatcatatcaaatgtcttcctaacaagtctctttcgcataattcttacctaataaacaacataaattatctcgaaatgcccataggaagatcaacaatgataactttccttgtatgtaatttgaaatataagagctggcatgcatttcttattaacttactattcgactctcctgaagaatctcacgagaaacattgaggggaaggtcatttgaatcaactacaccttttacaaagctcaagtatctggggaactgcaaaatgcaatgctaaactcagaaatttgttctattaatcaaatagacaatcaaggaaggacaacacaaatgcatattcacaagcaactatcttgtggactgagagataatataccagttcaccatcgaagtcatcagagataaatactcttttgacatataaccggatattcttagtttttggattcattatctcctcattactaagcggagccattcctggaatgtaaaggacactcctaaattccacctcaccctggtagcagaaaatatcatgtcataaacaatattccatgcacttaagttaagtgaagtgatgtttgacaaattcatgtacctctgttgtgaagtgagtgtaggccagaggatctaagaactcattgaatgccttcttataaaattcattgtattctgttttctcaatttcctttggacttctcatctgcacacagagaatatgattcaactatctgcttccttaaacagtggatagcacctcacatgcattttttttgggagatagaataccaaataggtaaggttcaaagactgcaaattgtgtgcaatggaagtaacaaagataaaattacccatataggctttgtttcattggctagctcccaatcccagtatttctcagtaattgtcttctttttcttttgttcaccctataggtggatgcgaatcagtttcaaagaacaaagtcaatataaggataagaaattagaagcagatcatccaagataactaacctctttcgcctcttcaccttcttttgcctcttcatcctcttcaacctgtcaagcaaggaggtcacatcagtgaaagaaatctgaaaggaatcaagaatagtagctctaaagaacttgtaagatgcatgttaagagaattagcaagaaaaaaccaccaaggccttacctcgacagttctggatttttcctgccatgtgtatatggggaaagacacaaactgagagtagttcttaactaggccttgaatccttccaggatcagcaaactcaaacttatcatcaggctgcatagttacagaatatgaggtttccatttttttgtgacgaagatgtgagattttagttataaaaaggtattcatttcgacaaatagaaaagaccaaactcacccttaaaacgagagtaatctgagtgccacgtgtaagcattttttcaggatcagtctcttccttgatgacataagagctactgtcagctacaccttcccatacatattgcttatctgatttggggctcttagtggagaccacaacctgcaaacacataatttagggggaaaaagatcaatgaaaaaataaaaagaaacatattccatgaaatatattttacaaggatagcatccaaaaaatgtctcataccttttccgctacaagaaaagctgagtaaaacccaaccccaaactggccaatcagaccattatcggctccaaggtctttattctcctggattgtgattgatttggtattaggaatgaaacaacgaagcaaacacacaggtagtacacattgcctagacattggtacaaatattcagaaagtagaaagggaaggaacaatgctctacctttagagccttcaaaaattttgaggtgccactctgagcaatagtaccaaggcaatccttaagttcatctttggtcattccaatgccagtatcactataagaacaataacaagattgtactagtaaactacctgcactaaacagttcgagtcgacaaagcacaactattagagaataacttacgtaatagttatggttcctgcatcagggtctggtttaatccttatctccaactcgccgccatcagcaaggagagaagaatcagtcacaccaagaaacctcagcttatccaatgcgtcactcgcattactgagaacacccacccgatagttagcacataaagtgatgagccatgggatcaaattttaaaaggcttttaaatggaactatcgtttggctatgttattattgatgaaacactacatttggcgagagttactactgacctcacaagctcccgaagaaatacttccttgtggctgtaaaggctatggacaatcaaatccattaggcggctaacctacacagcacaaaagggattaaacagttactatattgggctatacaagtccatcacaccacatgtcgaattcacgatgaaaaatgatgaatcataaattcataataacaacattccattactgtaactctagtgaaatgctagcataatcaaacagcgaagaaactatttccatccaaccccgaagccatcccgacccgtcgtcactcacctccgcctggtactcgaacttctcctcctccgccgtctcctcggccttctccgcgacggcggcgtcgcacctcacccgcaccagtctccccctgctcccgctccccgcctcccacctcacccctctcccgcacctcgccgacccgctcccccgcgccgcgcccgcccccggcgccctaaccctccccgcgcacggccgcagcgccgccaccgacgacgcccccaggctcctgctcagcgaaggcgccatgtgagacctctagtagtagagcgcggcggcggctgcacggcggcgagccgaggcgaggcggagaggataagggtggaggagttgctagggttttttgttgcgggtttaggaggagaggaggaggaggaagagatgaggcgacgggggaagcttctagaagcggtcgaagcgagccgccgctgcagtgcagtgtcgcgcttgagtgtggggttgggtcgttctgaccgttcgatccgcggatcggacggctggattgagatcgaggagaggttggttctcatttcctcggttcctccgcagagtgtggggccacctgtcagtgagagtactttcatgggccaactcgctgcttgggcttgggtttgggcttattaatttcaaggcccatttaggactttggggccatttgaaattttgaagtttgaactacttcacgtcaaattcatatatttggaactgatgaaatcgtgtcaaacttgtgtgaaatccatcaaaccagagaggcatacacaataatgcaatgcaatacaaaagaatttaacagggactcaaattgagaggcagcagtaaaaaaaaaacaaaaaaatgacgtgctatatttctctttactgttcatagatggtttatgattttgatcatcatccggagcacacaccacacagaccaatgttgacatctaacatgggagagaagactagctacagccacaacgccactctctgaatcgatcaccgatctcggctagtctcgatgcttcgaggaggctctttgaagcaatcaacattgcagagccccatcgatctgatcatctctccgagcctgtcaaaaatttacaccaatgtcagtttgtggcaagagtatttatcatctttttaatcacaacaaatctgcggcaatatcatttatcatccaaagtttcttcactaggaaaaatgacttaggtaacatgattactgcaactctgtatgatgatggtggaagtgaagaattgttcagagaaccaacctgtcgatgctttttcttggtttatctggctgatcgtgttcatccctcgtcctgtcaaatgtgtcaacacttctccttgatttttctttcttctccacgatggatcttggcttctctctgcggcccgtgcttcgccttcgtttatcgacacgatcattgctcaatcgaggcggcagctcatgcctcgtgctcttcctcggtggctctagcctctgtgaggtcgtccatggagcgtcagagagagcagaaccatcggaagccgtttcggtttcggctagcagcttctcattctcggttgatgatgattctttctccaaaggcatattttcgatcgtcgatatgaacttcttcagatgccttatgtacactgggaaggtctgcaggttacagtggtctcctccctcgatccatagaggttcatacttattttggcacagctcccatagctgcttcccatgggaacaatcgacaatatcatcatttgtgccctgaaaaacaagtgaaaaggatatattaagttaaattacataaagttgtacatgagaaatgcacagagatgcatatatattcaggcttacatgaattaccaaaacgggagatttaacaaggggcattttctcaatgttctgcaaagaaaacaggtgttcggttagcatggacaatgcatgggaattaattttagtatctcttgatagttcagtcgtcagtgaggcaaaccttgtatatgtcaaaccagtatgttttcttcacagaatacatgacacgcaggccagacaatatggggctgtgcagaactactgctcttatacgatgtaactgagcagctaaatcgacagtcggaccgctaccgacagactgaccgtacaggataatgtcttcttccctggtgccatatacctccacaaggcatttgtatgcagcctctatgtcagcgaaggtattagcttcacttgcctgagaatggaaggaaacagaatgatttgattcaatagggctttcaatttccaatttagtctttaactcaattattggaataagctcactgaaaagaggaattgtggaactgaaaacaatcaagtggggttcagttttgcggtgtcttgtaaaaagaaaatagaaggcctcaagtgtttccaattcatcagctaataaaacattccgaaagtaatgttaggtttattgcactcctatataggcaaagataagagcgttaatttcaggaaagaatagagagcattgttaaccttgcctgatgaccgtccataaccagaataatcatacctgcaaagattgaggaaattattccaaatgcaggaaaatgaggagctaagtacataaatacaaccattaattcacaccaattcctcatttgctacgatgaagtggcaaataaggtaacgggtaaaattttagtaggatatgaggaatttatccttaaaacagttaaaaatagatgcaccaaggtgaatgcgaatagcctatctagcataattgaaatcctccacattgacaaagatgtctctgttataaaaaaaaacgtcacaaagtccagaaaatgaaagtctacaggacaggatacaacaaaattgactaagaatcttttgcgttgtttatcagcaacagttagttctgaacatcattgaaaatgaaacatggaatgatttttgtgatcaataatcggacaaaaacatctcaaacacgatggctattgcaggaagcgcaccagctccattggaccatttgctttacatgaagaatccagacgccaattaattgaggtaggcaacctggaaagctaagtacttggctctcctgccgagtgtgggtctgtgggatcagggaaaacatggccttcttgatgaatgtgagatcaggaaaaagctatacctgtgcatttttcaagcttttttttttttttgcgaatacgcgtattgcttatcattgtatcaagatcgaaggttgtagatacaaaaatcggtcgagctggggaaaaaacaacaaaaggaaaaatgggggaaaaaaaggaggggatggaaaaccactattatgactctaatacaaaatgtcaaatccatgtataacgcgatcatcaatttcaatgtaagaatccataagaggatcttatgggaggtaaaggtatcactaaaaatcaaagtatttatgtggtttcttcaaaaaaaaaaagtaatcttgacgaaagataacctcataaagagaaaatggaggggaaacaagctatgttgtttttgtaatacacaagagaccatccaacatcttttctttgattgccatgttgcacgttttgcttggcgatgtgtcttctttgccttcaatatcccccctccccacaatgcaaaagatatttttggtaactggctaaggggagtgcctagacccacaaaaaaatgattttatttggagctagtgctctatgttggtcaatttggcgttgccgtaatgatatagtttttaactataaaaaaatgcctaacatcatgcaggttatcttcatgtgtttcaattggcttcactcttgatgtatgatgctttcacaggaacaaacatgatactatacgcaatggtgctacacgtttggaattggtagctaaggaacttttactccagtttggatggcgtagtacctacagaatttcgtgatagaatctacgtgattttaaaaaatattattttagtagatcatattatcggtagaagttgggggtttgtaccatcttgccttttttaagctcttttctgttcatttctgaactttttggctatgtgcctacgggcagaggccggagatgtaacccatttccattttctaaaaaaaaataactctaatactccccctttgtagacaagcccactagtgacttcattgttctgacgtctttttttgggcacacttgctctcatcccaacccactttccagtatgaaaattcctctgatgtacctatcacagtgtgtaatgaggacctacaactagttattaccaggttcatgcgcaatcgaccagttctttttttctttttgggtacaggagggtagccccaatgtcaacgaggaaactgtttgtacagccctcaataactgtaactctgtaagactaatttagctgtttaatcatgtgtcacgaaatagcaaaaccaaaagagcgagtagtttacaaatccaaagaatttgagtacatgtgaacacaatacactgatcaatataaactctatgaactgagcccactgaaatttcagatcaaatagaacagatgccaaccactaatcaatgctcaatcccaatgatcaggtggaaatcaatccttgacaacgcatactcgacaggacaatcaattgacggaggaagtgctaccagattccaaattgtagaaatctagttgaaagccaaaactgcaatactatgaacagtgctctgtgtactacagctaaattcaggacattctaagcattagaacaagacatattcaaaagatcacaggacttcattaacgacgaatataaactggtctcaaacaaatagacagagatgaaaatcgagctagccaattaaacgatgaatatatactggtcccctccagcaaggcagcaagttcatcaagacaccaacggaaggcaaaacaattgacccggatcaaaccaaggcccggctattcaagcaaagccatcaatcatcaattcatcatccaccaaagcagcaacgtttactcccctaagcagtgaaagttaaactaccaaaacaaataatcacacgaactgacgaacacttaccccatgaggtttacatggaggcgggcgctgaactcgacgaagagctcgtacatcttcccgatgtcggcggcgttgccgtgggagtagagcacggtgagcctcgccttggggcaccgcacgtacacggcgatgatctccgtgccccgccgcgtccgcacccgcctcgcctccacaccttccctccacgggacccccgtcagagacaccctcctcgccgtcgccgccgccgccggagcagccgaccccggcggtggcggctcctcctcgtcggccacgccgtacgccggcgggtcgggcgggaaaaacgcgaacttcgcggccaccgaggacgtcaccccgcccatatcctaccacctcacgacaccggcggcagcggcatcagagggttcctccggccggcgagcggcggcggaggctgggggagagggagggacgtgtccgtgcaaagccggaactatttggagggcttttatggaaacctccacggccaaggtctcctccctaaaggggctatttgtaattaccaaacttatgtagggacctaaatgtaataattggaaagttcaggggtttatcggagggcgagggggataaagaacgggcggggaatcagcggaggagttgccgggagaattaaaggaaacgatgtcacgtgaccgccggcaagggcgcacgtgaggtcccggctttacatgtagcactcgcatttttctttcctttgatccgggtcttgatatcctaagattatggattatgattgtaattatgctcactgctaaaaatgggggaaaaccctagtgattgtgacacggcacaagattttctctctcacggtgttgttgctaggagtgcatatctgcatttaattagaaattcaaaaatgatgtgcgactaatgctaaaacagttgctattctctgtttaatattttttgtcaatgaactgtattgtttgatccacagttgacaatcaactttgtagtaaagattttttaaaaaaaaactttgtagtagcatagttgttgttgcatcaatctgttcatcaagagggtctctgcatttggaggttgtggattgtaagtatgtcctacataattatgagtatgttttgttttgcattgcacctgaattattagcaggcaagaaatgtgctcatttttttcgcaggacgagtcattaactgaaaattttcaataattatggaaaagctattagtatatgccatatgaaaaggcatggtccatgcaaactggcttttcatgatttctgcagctcctgctgctgaggaccagacccagtgtaagctctgaaggtgacattgaattgaagaattggttggcagtagctctgatctgcctgccactgtctcttcttcctgcaccccagctcacccttgcaaacccatacctacatgccttttttcatcaaaagaaatgcacaattctgcagcatgccaagaaaatttcatccatttttatcacagcaacatgacttgctaatcgccatgtactacaagttgagattcatctgagtggatggaattgttagtattagaaaaggctggttcgaatggaacacagcaatcgtggcagattaaactaacaaaatggcattgatatcattagcctttttcctccccacaagagaaaaaaacaaagatcattagcctttctagctctgctttggatgcaactaagctctgcaatgcttaaaacggggaaagttgggtgtctcttttgatgctgcgtatactcgattgtttttccttttcattcctggtgcctgagccaggtcgaatgtgtaaaagccagtgaaaaaaaatcaaatgcatctaaaccatctgaacaaatgcatttgatttggtacttctgtctgaactagtgagtcatatatgcactgctttccttcctgtaatctacctccattaatcttcagttgtagtgtctggtaatgatgacctgatgaggattccattctcccagttggtcgagtacacaaaggctggagaggtgaaaagatgatcaaatcaaatgcgcacgcttgctgttactactctcttttggttctggctgtcagaaattcagaacgaaagttgcaagacaagtatgcctgctgtttggaagtcaatcatcatcaccggagcccgagctgcacttccctggcatttcttgtccgggccagctgtgacactccttttttttgttctcaaactgtcaattgtgacttgctcactccgtttttggccttgttcagttctaaattttttcttcaaactttcaactttttcatcacatcaaaattttcctacacacataaactttcaactttccatcacatcgttccaatttcaaccaaacttctaattttaacgtgaactaaacacaccctttaaatgtatagcattattaacttttgaaatgatatctatccattcatcttactagatgttagagaaaatataaaccatagttaaagtatttttagtgataaaacaaatcacaacaaaataaatcttgctcgcatagtctttttgacaaatagaaatagtctgacgtcatgtctaaaagacaacaacgttgtatatttaataatttaaaatgaatataggacgatgtctgttgacttatataaggcatatcttattttagtacaaatctttaagattaattttagctgttagtttctttaaaaataatagctgtataaatcaacttttcgtcaaaacacttcaaaatatgaatccgttgacatagactgtacacactacatgtaattatactttgactaattatttattgaaatttacaaatataaacttttaaaatcaaaataagattgcggaaaatctagtggtttttggggggggggggaggaccatgaatcaacaagattcaagagtacactggcacttccatcagcagaggcccagaacgatgtcagaattcagacggaaaaagtacacccaaggtccctcaacttatcatcgagatataaaaacattcttgagcgcaaaactagatatacggggtccctcaactatataaaacggtcacccgaggtccctcggtggttttcaatccggttttatccgacgtgacggctgaatcagcatggaacccacatgggccccacatgtcagctggccacgtcatcaccctctccccttctctccctttctctcccctctctctctctcttctcgtttgggcaggcagctggagaggacgtcggcgactcggcgggctgctgccttcggcggggcggggtgggagaggacgagggcgtcggcggccggcgacgggcggtgcggtggcgcggcgacaccggagaaggggctctgcgaggttcaccggcctgggggacgacgacagcttggaggacctcctcatcgattcgcacgcgcatctcggtgagcagcgcgtcgtccggctccagcacgcccgtggcggccagcgactcgaacaacagcgccatgccatcggacttgacggtgtcgagggcgtcggagtggagggcgaccttggcaatgtcgtcgaggtcgggctggatcgaggccgtggtcgtcggcagggcggcccaaggggcacctgttcaaccggccgccatcggcgctggggaaggagccgccaccgcaccagaactacgccgccgtgttcgacagcctcgacgccgcggccgcccgacgagcgcgcgcaggtggagcgcgtcatggtgggcgaagagaacaagggcgtcctactccgggatggcgcgcaccggcgggagcggcacgcccggctgcagcagtgggcggcgcgcatggagatggccgggttcaccagcgtgcctccagtccgcaccgcctcggctggtgaggaggacgcagcccccgtcgccgcgcacctcgacgccggggtcacgctcctcgacccaggcggagtgggacgacggcgcggttggcggcgtcggaggtggtggcagcgcccctgctcccggcgctcggcaggccgtcccagaggaggtcggtgatgacccgattggcggcgtcggagttgtggtacgtgtcccagaagacgaacgccttgcggtcgctgcagggccgcgagttcggcaggcacaggccccccaccgtcatgcccaccgtcgccccaccgtggcggcgagcgcctgcgactccgactgcccgccggcgtcgaggccgacgccgacgccgacgcctagcaccgggtcgtcgtcgttccacgcgacgcgctgaagctgcgcgtgtgcgccaacgtgctcggcctcgttaaggccaaggtcggcgcggtggcgccgtatgagccctgctgctcgctgctcgacggcctcgtcgacctcgaagccgtcgtctgcccgcccgcgcagctgatcagatagttttgaccccatttgatcagatagttagctggatttgtttctgaaggaagcaacgactacatcaagaacttcttgcagccgttcatggcggacggccagacgtacacgcacgacacgttctccgcctcctcatcaccactctggaccggcaactaaaggcaagaacacacactaatctcccctgtgaaaatgaccagtaaagacgaggcctgatatatcgtccatggcggtggttaaattgttcgcttttgcagaggctgtacgggttgggcgcgaggaaggtggtgttcaactcgctgccgccgctgggctgcatcccgtcgcagcgcatccactccggcaacggcaagtgcctggaccacgtgaacgaatacgccgtggagttcaacgcggccgccaagaagctgctcaacggcatgaacgacgcatcgccgccgctttgcccccctcctccccaggcggcgacgccttgctccctgctcccacgtcaccgccgccgccgccgccgcgtcgccggccgccggacctcctctcccgcctcgcctcgtcgtctcttccccactcggcggttggtctgcccagaggccagagccccagagagaagagagagagaaggggggagagagaggaggctgacgtgtggggcctacgtgggtcccacgctgacttaggcgccacgtcggacaaaatcggagtcaaaaccaaagtgaacggttttgtaagttgagagatgacgtatatccggtttggttgggggacgatttcgtaactcgatgacaagttgagggaccttcggtgtactttttccgaattcagacaggccatgtccaatatcctcgactttgggcctctgtactttaactttgcagagcagttgggcctaggtcaaaaaccaagtggataagtctattttacctccctcaagtcatatccctggttgagtcgcatctatcaaccgatataacccatcatacaactcccagaaccactgcaaatcaattccccagccggttttgtcccacgtagcatcttagaccacttggataccttcagtcttaccggcgtgtactacccggtttgaccggccacccaatgccgacctgcacagttcaccaacagaaacactattcactgtattttcaataaacacttacctttgacaaattgttcatcacatatattaaatcaacacattaatttcataccaaggttatccagacaatgctcagccgaataatccgattgtgatcggattttctgcccctttatggtacaatagctagttgctcatgtacccttgaaccagagaaactcgaggaatagtccacgagcaactatagctaattggagacgatcttttgttgcaagtgtagtgcttgagagtgatcgtttgagtacacccaccaagagtctagtgttgatcggtggcttcaattgaaggcttcatcatgtcactcttagaagcgtgtttggtggtcttataagaagattatgggagaaatagcatttgtgtgaagatttttggggttttttcacagtgggaaagaaccaaaatatgagggcgatcgtggactttgtgactatatatgaaataggggcaaaactcttacgcatagtgttttaacgaggattagtggatattgttgaatctccgataccttaaaaaacccaatatcgttgtatctggaattccctttcttccactatctgtaacactttcccaactccactcctccatttttcacgtacacgtttttcaaatcgctaaacagtgtgttttttggtaaaaaaaaatataggaaagttgttgtaaaaatcatactccctccatctctaaatgtttgacaccgttgacttttttaaatatgtttgaccgtttgtcttattcaaaaaatttaagtaattattaattcttttcctactatttgattcattgttaaatatacttttatgtatacatatagttttacatattgcacaaaagtttttgaataagacgaacggtcaaacatgtttaaaaaagttaacggcgttaaaaatttaagtaaggagggagtattagtctatttaaagttttctttagctaatatataattaatcatgcgctaatctactattccggtttccatgtgaaagagagaagttctcaacttcaaccaacgaacacggtcttagtttgtgcgtttcttttcttagtctcaactagagtgtgtaagacgtcaactaggttagaaaactttgaaaagggttactttgaccgtgttcttcaaaaatcctattttacctccttgtagaacatctttgatcctgcactccagaaagcaagcaagcaatgatctgaacaacttatcaaagtagtcaaaaaatgtcctaagatcagactttttcagcacagtagcaacaacagtagccagtacgacctggttgatttggcccacagtatttactagctgggattatcacttcgtttaaaggtagcaagtttaatagtatatacaactaatagctctaattcatctatagccaattaaatagctaattcataaacagttatctataaaaatatactacacctttaatatagtctcacctcccacacacataatgtattggagtccgtgctgtagctggctgcaaatatgtagcacgctttctttctctctcctcttctcatctccacgtacgtgtgcgaacagctaacttatagcctgctattgtactcgctctaatttgataggagtagtagtagtatttcattggtaagctccggcgttgggctgcacctctctccttttgctgtcggtcatggaagcatcggcgcggagccccagcgagcgacgtcggcgacgcgaagccgcacgttctcgtcgactcgacgtcgtgccgtacccggccggcgcaggggcacatgctcccgcccctcgcctcgcgccgctgctggcgtcgcgctcgccttcctcggtcgcgccacggtcacgctgctttcccgtcgtccgcgtcgcggctcctcccggccgcgtgcgtcggctttttacctccgtttccgttagcacgtttttcaaattactcaacatacggtatgtttcatacgaaaactctctataaaagttactttaaaatataaaatatatctatttttgtcaagtttgtaataattaaaacttaattaatcatttgcgaatgattttctcgtattacatgcgccaacttaatctttatctcagtgagttttaaacaccaccttatttttatgttatatgttaagtttatttcttaaattaataatttatgcctataatcaaatcgataatccgtcgtaataatctactcgacaatctaaatcaaacgaaaagaatccccttaaattgccactaaattcccactcttatgttttcacgcacacgcttttcgaactactaaacgtgtgtgtttcgaaaaaaattctataggaaagtttctttgaaatatcatactacttccgtcccaaaatataagtagttttagagtcgtgcaagggtattgaatggagaagtgttgtgattgattaagaagacaaagtacgtggagaatttaaatgttggagggttgtaattggttgaaaacaaaatataggtggagataaattgctagaagtcgttatattttaggacggggtagcattaatctattttttaaatttgtttatctaatactcccttcgttcctaattaatcatcatataatattttgaggttattcccaaatgatcacctttttaatatgcattccctaaatctttctattatctgcgtatgaaagtaaatggacattgatacatatatatatatatatatatatatatatatatatatatatatatatatatatatatatatatatatccatgcgcacaactatatacaatcaacatgcaacattttggtttattattggttacaaaatagtcgggattacatgtaatagagtttgttaccgaagtaaatatagtacgagagaactattaacttttattaatcttggcgtactcttttaatacgatgaccaattaaaaaaatacttaattaatcatgcgttaatctactgctcatgtaaaaaagaaagataccaaccgctacaatccatcacaacctagcttctgacagaattagaagctccccaaacaacatagctagctttggtccagattttaagaaactgtaattataaaatccagaaaatgaactaggagttagaagctgtaaaacccaaccttttcagattctcagaaactggctatcaatcaattgtttctcagaacgtcagctccctacacatatcctactaaatatgaaacggaaggacagggtacctatctcgacgtcaaagtcattcgtatacaagacataaaaaaaaaaaaggtcagtcgtacaatagaagcactttcttttatcctacatggatacagcgatgacaaaaattaaatcttaaactttaattttaattttttaagaccttttattgtagtttctttttcaagattaacgtctaaatcattaataacacatatttaaaatttctaactataaattactaccggaggaccgttcgtcggcagcagccagagtctctgacgttgcatcgattgtgtttgtctaagccaattcactccagttctagtgttgaactgttgataattgggttgcacctctcgttttgctgtcggccatggacgcgcacgcaccgccccggagccctgcgtccgacggcggccatggcgacggcgacggcgacacgaagaagccgcacgtcctcgtcgtgccgtacccggcgcagggccacatgctcccgctcctcgacctcgtcgcgctgctggccgcgcgcggcctcgcgctcgccgtcgccgtgacgcccgggaacgtcccgctcctcgcgccgctgctggcgtcgtgcccgccgtcgtcggtcgccacggtcaccctgcctttcccggcggcgtcggcgtcggggctcctcccggccgggtgcggcgagaacaccaaggacctgccgggacacctcttccgcccgtttatggcctctctcgcggcgctccgcgcgccgctgctcgcctggtgcaaggcgcagcgccgccgccgccgccgcgtcacggccgtcgtctccgacatgttcacggggtggacgcagccgctcgccgcggacctcggcgtgccgcacgtgacgttctcggcctccggcgcgcactacctcgccgtgtcgcactccctctggcgccgcctgccgagaaggcgctgccccgacgaggccgtcagcttccaggacgtgcccggctcgcccacgttccgttggagccacctgtcgtggctgtaccggacgtacgtcgccggcgacgaggtctccgaggcgatccggcagttcttcctgtggaatctggagagctcatgcttcgtcgccaactctttcacggcgatcgaggccgcgtacgtggatcgcccgctcccggacctgatggagaagaaggtgtttgcggtgggccccctgtcggacgccgtgggccggtgcaccgaccgcggcgggaagccggcggtggcgccggcgagggtggcggcgtggctggacgcgttcgacgacggctccgtcctgtacgtctgcttcgggacgcagcaggcgctgtcgccggcgcaggcggcgagcctggccggcgcgctggggcggagcgcggcgccgttcgtctgggcggcgaggggcggcacgccggtgccgggcgggttcgaggcggcgacggcggcgcgcggtatggtcatccgcgggtgggcgccgcaggtggagatcctgcgccaccgcgccgtggggtggttcctgacgcactgcggctggaactcggtgctcgaggcggtcgccgccggcgtggcgatgctcgcgtggccgatgagcgccgaccagttcaccaacgcgtggctgctcgcggaggccggcgtggccgtggccgtggcggagggcgccgacgccgtgcccgacgccggacagatggccgacgccatagcctcggcgatcgggaacggcggggcgtcggtgagacagcgcgcggcggagctcggcaggagcacggcggcggcggtggcggagggtgggagttcttccgtagacttggaagagttggtgagcatcctaagctcgccaaagctgactaattaatgtatttttattcaaactgctactctctgtttcaggttagaagacgtaatcaaagtcaaactattctaagtttgattaattttataaaaaaaataataatattttaaacccaaaacaaatatattatgaaaatttattcaattatagatttaatgaaactatgctgttgttataaatattaatattttttctacagaattagttaaatttagagtagtatgaacaaagtcgaaacatcttataacctaaaacggagggagtatatattttattcctaataaactgtgattagatgcgaatataatggttattttcggaagctgggaatagtataatggttatttgggattggggctaagccggctaacctttgtcctagcaaacttattaccatcactgtattttatagggcaatgctattgaccaaacaaaatatcttcttagtatttctaaatttcatataaaccaaataaaattttactattgctattctattgaaacctataaaaaaaattagtaatcctgaaagtttctgtcataaagggtataggccacaaatactatcatagaaagcttacctgacttgataaataggaggtgaaccaaatcggctacttgtaagtagagcagaacttgggaatggctaacacttgtaatacaagataatgggtggatagaatattcgtaagcttcctatacataaaacaagtcgtatgtggctaaattactaataactacatgtaactgtgtatctcaatctatataagatgggcgtgggtctcaagattggggcagatgcaatcacatgaacatgacatatacaaaaccctatagcaatacaattcactaaacaagagtagagtacggtattaatataattatctctcatcgagtttgtataaatctctttctcttgtatcaccattgagctcttagttcaacgcatagcgttctaacaaacgacactactattaataactttaccgaatactttacaacaaacacatataagagcaagttcatagtatagccgtctatcagctccaatatatctatagtcaatttaataactaatacatacaatagttacctactatactatagatacatggtcccacctgtcatacacacattgcgtcttgcaatccgtgctgcagctggctataaatatgtagcccgctgcacttctttctcatctttttatctcctagaaatgtatttatatctggcttatagtttgttattgtacctgctctaatactaccaacaacaataatacatttaactttgatagccttgaaagtggcaaaaaaaaatgaacatactcttttagagcaagtagtatggttctcattctcaacaaccatcttcccacatgtacacagtgacatgttattcaagatgcacctggtgtcttcttgcaactgttggagtacagaatcactagtgcagaacttcttttttttttaagttttagaattctgacctacacgtttattttatcttttagtgggatacctgtatgattcatatatatgttcatccctatctctctatatgcactgtgcttgtaatctctactatcgaaatctgtacaaatcagagggcaattagcgaggccacgtggcatgactggattcatgggtttggtccctcgcgcacagccgtcagatcacgcatctacggtgatatatcgtgcggtggatcttgttgtaaaatataatctttcgagggagtttaatgcaaaagagtagagtatccatactccagtaaatacttcgttcgtcatccgttcccatccgccgccaaggctccaatctccgctcgttccccaccgcggccgtcgcctcgctgtcgccgggcggctgccgatcccgagccaacagcccgccctgctgccggcacgcggtcgttgaatcgagggcgctgcctcgcccccatgattttctggtgcgtcgccgctctccacgtgttcctcatcagccgcaacgtccactttctccgccaccggcagccgaggcgccgcctccgcccacatcgcagcattgacttctccaggttggctcaccaactccatcggctattccaggtcatccaccgtctcacccctctgaattgcaaactactatcccctgctgcactctgcctgttcgttgtaatgcttattagtggaaaatagttcaacaatgtcatctgccaacgattagtagaacctatgatgtgaatccatcatgttgtttgtctgtgaccactgagagtttaataatgcttattaatatgttgccatgcgaatgctcctagaccaaaatgtagtctctgtcagtttcttgggtttctttgtaaccatctgaatttaaatcggtaaattgcctatctgttgtatgtaatttcagaagtttaaaatagcaaacgtcaagatggggctatctcatgataaccttaagtggtaagatgaggttggggatacaattcatatcaagagttttttactgatttggaccaattatcatgtacaattttaaaatgacacaaataaaaaaaaatgacacaaagaaaaattatgtagacatgaactgcaaaaacatatatggtgattagatacttagatgaatgagagagaatccttgcttacttggtgcaagattaaagattaaaagaaacggtaaagtttatctacggtaaagttcagctgcatatataagttacaatgtgcaacacgtaagaccaggcttctttgcaatcatttatctactaagaatctactggtacaagaggattaggaggcaccagcatattctgctcatgtttgaggtaaacgctataccaaattattaaacgaataatcaattcctcaggctctttgtgtaaactgaaatgcactcaaaacgtgatctttaaagaataagaagtgaaagttattttaaaaaaaggatttccagagttcttatagacatctggagggataaaatgaagataagtactttcattactttggttcattggactttagaatttgtgcgcacatattcgactttcaactgatgtcgatgaactcattgtcttgcagccttcaattgatctgaataaagcttattccagaaactatgtcatatctgagaacaattagatattagaattaaattaaattcatattacagagagcagaaattggtactagaactgttatgtcgttagcattattatgttactttatattacagattgtttctgcattttctcagcactcaagtggaaaataagctggaaattcatgcatcgttttgtaattttaataaatttgtaaactaataaatagcccatggagatctttctcatacattgtagtgctgtcgaaactcaagtatggttgaattagtaccatgattaatcgtagcttcatgcactttcttttattttggcaatggtctctttgcgtactcttctattcatgcaatgacatgatactgaatactgagcattgaattctgaaactgaactggcattattttgaagaaataaaaaaaaaccaatcatgttattaggcaacaagatcagtgatcatgctcaagttgataaggaaccatattattaaatgtttaattttgattattttcctagcctggtactgaagtactgtctaatttgacctctgaagtacttgacatttgaattttttctaccattgccatgaagattttgtaaggttgctttttattatacctgtacagttagatgcaatatttaaccaatcgaagtaggagtttttgtgtattcttttaatatataatttttttcctttcaaaaatgcggaagaaaaacaaattggaattgcaaaatttaacgctgacaaagcatccattcaaggcattcctttcttttttgagagaatcccttatatgccactagaaattggttagttctcttatatgccactcaaaattggcttctcccttatacaccactagttaagtttttctatccttttatgctactcccagcactatagcatttgttgactgttagtcaaatattagttttttttcataaatgaccaatatgccatctcaactaaaaaatgtgtaaacttcaaaaaaatcataactaatttattttaaatcctttttgagtgaacaaagttttgtcagaacaagtggaaaatgctctttgtaataaaaatattgttggaaagctgcatgtttcatacttgtattgaaaatttatttgtgatggtgatggctaaaattgcatgtgattgaaaaacaaaatcaattttcatatgttgtatccagtagatatattagtactaaaatacctatcattggttatataccaactctcaatggtaaatgtgtctttttactatgaagttaacggtcaactgacggtggagtgacggcaatggcataaaagggaggacaaacttgaaccggtggcatagaaaggaagagccaatttgaaggggcatataagagaaccggttaatttggagtgacacataagggattctcactcttttttcatgttagcaatggtgtaattaatactcacctgtcaaatacataaatcccctgccaatggttctactgagtcctttttcttgctcttgttcaagaacattttattttcctcttctgatctcaagtcccaacgtctattaatttatttctttaggtttctggttcaatatgttaagaaaaaaaaccattgatcctaaacaaggccactgacaaaatagattggcctaatctaaattgggcgcggcaaagccgcacgttgtttctagtaagttttctaagttcagcaactttttttgtaagtcatgggtagagaaaccatttttggttggtcgacccaaattcacaatagtcccggttccattaaaaactgggacttataagaggatgatctttagtcccggttggaaactccaaccggaattaaaaatcatttttagtcccggttgattccatgttaggctgtattagggccctaggatctttagttccggttagtaacaccatccaggactaaaaacctatttttagttctggttgatgttactaaccgggaataaaaatcaaaacacactatatagtccctagtaccgatcctcttttcccatccacacaacaaactcctccctctatctcttttttcctctctaacttcttatctctttccttatctctaactcctagccttctctttcctttttttttccttccattcaaagcgagaagagggcgggccggccaggcaacgggcggcgcggggggccgcgcggcggcggccggcggcggccggccgccgcggaggggaggataggaggcggcagtggccggctgattgttcttttttttttacaatttatgatttatcctgtgatgtatttgatttgtgtgtgatgtgaatcttgatgtattttttagaacttgtgatgtaatttttttaagagtttggatgtatttagagatgatctatttgaggatttggagatgttctgtgatatgtgatgatttggatttgggatttcttagtatgattaggggatggtgtgaaatcaatattcaatgttaaaaataatgaaaaagagaaaaaaaaagaaaaaatatctttagtcccggttatttgaaccgggactaaatctttttagtcccggattcgtagtcccgggattaaaaagtacttctccaccagtgagtgttattgatgacgggggctgatacagccttgtgtctagcttcataaatttctattaatattttataacaatatcatataatttataaaaacatttaaacttctactattagaatacctaattatataaccctacacgcgaggatttcctagttgctccaataactgatgcctatcatggttcatggagcaagatgacaggagtttgagacatttagctaatttatttattatgccgatgggtttccttggaagagttgagacattttattatgccgatggactcaagggttggctgatgactccatattgttttcttcaccagtaagggtttgtttggattagtgtcctactattattttttaagttttgtcactactaccaattatttggtagaataaatttgtattcatcttatttggtttgctactaaaatattgctaaattgtgatactatactgaagaaagttctatattactaccaaatttggtatagacattaccaaaaagttagcatcaatccaaacaaatgataggtactatttatgctactaaaatattgttttggtagcaatccaaaactaccctaattctctgctaaaaggcttggacatggacacgtaagtatacctgtgtctgcctgccaatttaggtctggtgccaaaattaaccttaccaaaatttgggaataccaaaattttaacaaactgacactattgccaaaatttcggtaggattagcttaataatgttaccaaaattctatacatattgccaatatttggtaacaaactaaatatagctacataattgtcaattttaacaaataatggtatagttgaaaatgtcatcaatctgaacagccccttaatttgcaagtggagcacacggtgaaagtggtgactgcaagacttcttctacagtactacaacagtactacagagtagggatgtcaattgtgcccgtttacccgttaacccatggataaaaacctattagggttgggtttgttctccattttatacccatgggtatcttgttgggtcaaaagctatgcccgatgggtaaatgggtatgggtatgtgtaatcactacccatgcccgctttgcccgtttacccgtgaaatctaacttacatttaggctaggatcaaaatccactagaatacataagccacgttctttgttttctacggtttcccttttattttccttattatttctctccccctctatcgtcaccagaggagagacaccacaccgaggcggagaatatttgatgttttaagtttgatttgaacttagaagcttgtagactttttgttccactgcttttgttgtggcgggtaaccatccttacccgtcatgtagtaatgggtatacccacgggcacaaataatctcacgggcacgggtatgaataggcactacccatgcccgtcacacccaattgccatccctactgcagagatgtactgttcatatgagggagcagtgaactaatgccataaacagtgttgcttactgtagctactggaaccaaaaaaacgtactgttgcatattgtctgtaccaaatttaccttagcgtgcgatccgattctgtcggtctacagtacccctaatgtgcagtacatttcatcctctccctttagtatctcttatgcagaggatctcaatttagcttggtggggtttttttccacagttagtacacgaaattctggtgggcattctataattttccacggtgaaaggtatgggcggcgctctagtggaagaatatggattgattcttcaggctattccactgtggccttgtttagttctaaactttttctttaaacttttaactttttcatcacatcaaaatttttctacacacataaacttctaacttttccgtcacattgttttaatttaaaccaaacttttaattctgacgtgaactaaacacaccctatagcagctaggattcatgtgctcgaatagctttgaaatcatgacggctaaatactctctctctgttcctataatatagcaagttaaaactagacgaaaaattttatagtataataaatctgaccacatttttatttagattcgttatactataaaatatcttatctatttttaaattgctatattatgttacggggagtacaaacaaggatctttcgaggagtgattggagtgaagaccgatgcaccacttacagtataaaaggaacacgtgtgtacagttgcgacaatgatgacttgtagtacgttgatagtgttgtcggcgtgtggttggtgagttttcttcaagttacagtcttcaaaaagataatctgagtgtgaagattttaaagtatacggactcacatttaaatcattaaacgtagaataataacaaaataaattacagattccgtctataaactgcgagacaaatttattaaacctaattaatccgtcattagcaaatatttactgtagcatcacattgtcaaattgtggcgtaattaggctcaaaagattcgtctcgtaatttacaagcaaattgtacaattggtattttttcccctcacatttaatgtcccatgtatgtgtccaaactctaaacatttgatgtgattttttttgacaaaaattttaggatctcaacgagacctttgtcctactataccaatagaaactttatgttgtccaatgctattcgttaaaaaaaaggtcatgtatggtatgcgtcactcgaatttacctctgtgcatagtcttgccaactaggtatcccctccatccctaattgtagttttttctttttttttcttttttttaaaccgttgaaccaacggtactccatacatctgctcgtatttagttgctataaaaataaccactttacctttatacataaaagaaatatgaaaatccgtagaccaaattattagggttaattacaaactagcatggtggcccgcgcagattgcgcggctagtatcattatattctctctcatataatagcatatatgttttctcattatattattcaaatatattaaaatcacaacatatttttaaattttgcaataactttacaaaactattaatgtgtaatatttatattgtattttatatacgtgttagttattaattatttttaatattaaattttagttatttgtaaattatatatattcctatatggactctagactcgtcttttaatacttcttttttttaatttcgaattttctgtaaattgtatttctatatagactctatgctcttctttcaatattatttatttttatttcttaatttttattatttttaattgtatttctatgtggactctaaactcatctttcaatattttttaatttttaatttcgaatttcagttacttctaaattgtattcctatatgtactttaaactcttctttccatgttttttttaatttcgaattttagttatttataaattgtattttatacagactctaaactctacttttaattttattatgtttattctaaattttagttagttagaagcccgacgaccgcgccaagcacttccgctgccgcacgtcgcctgcaacccaacgtaacttaatgttgttggatttttcatttcatgattttgtggatttgtgattcattttcttgctcagatggatcggattgggagagaggtaatacatgggtattaggtttcttgcggggatcaaattcatgaggtcgagattggtattttcgtgttgtttttgattatctggttgattgattgatttgaggatctagctcggggattctttctgaaggcagactcggactcggggaaggacagatcacacggacgagtgaaaaatcatacatacgaatgaaaattatgtgacgataggaaaaatactaatcttttaattagttaagatatgtactctatactctacttctaatatttcttatttttaattccgaatttccgttatttcctaattgtatttctatatggactctatactctacttctaatattccttatttttaattccgaatttcagttattttctaattgtatttttatatggactctagtcccctcttctaatattccttattttttaactctgaatttcaactatttctaaattgtatttctatatggactctagtctcctattctaatattccttattttttaattccgaatttcagctatttcctaattgtatttctatatggactctagtctcctcttctaatattccttatttttaaatttcgaatttcagctatttctaaattgtatttctatatggactctagtcttctattctaatattccttatttttaattccgaatttcagctatttctaaattgtatttctatatggactctgctttttctttttctccgattaatgtgagaatttctaggccataagagcgaacgtggaggctcctttttctattcctttaataatataatagatgtgcgtatttagataaataccattacaatttgtctatttatagttgtgccactcaaatttaataaaattggaaccataccatcgccgttcatttttcatcctctccctcatatgctcgtgggacccacctgtcagattcatcttcttcctccaccctctcctctttctctttttttttccaatctctctcccccacgtctgtgatgttcgccgttgcgccagggaacgggtcaccggcacggaggttgttgtcagcgtccgtcaccctgtgctgctgtgcaccaccttgtgcgttggctagccgtgctcgccgacgccattctctgcaaagatttaacgtttctcactatcaatttaacaaatgaactcatcaaatctaccgatagcgattggatttaacaagaatgtaccaaccaagatcgaagcagtcggcggctcggcgtcgtgggggctgcccatggcgggggcctcccggccgaggcgacgtggaagccttcccgccgcacagggcgtccctaggggcgtacggccagcgcgcccgcgcagggtccccaattttcaggggccccctaggcccaaaacttcaacgcactagatatataactcaataagtaaattggtagtctaactagtcctaaaaatctgttatttttcttgtcgtttcggcttcgattacgcctttgccggttcgcacagttgcgccggttcgcaatcttgaatcgcctcccactatggaccttgccaatcacaacgaacgagaggagtaaacgacgcctcacttctttctctcgtgcggtcgtgccggttgacgcctgccgcgcccctgacctaattctttctggtaatttctaatccggtaatctctaattttggattatcattttaggccattctagattgctatgaaatatattacagagtataattattttcatattatatcatcaattaagtttttatccttcaactttacacagggccctcgaatttaacgggacggccctgccgccgtatgtcaaggtccccaaccgccgacacgttgccgccgccgccattcgtcttgacggactgcgccactaagcagcagcacgagatggcgaggaggaggcagagaagagaggcggcgtccgccacgttcacaagaggaggctgagaagtggtagagagagatggaaaaaaaagagaaaagaggaggatggaggaagaaaatgaatctgataggcgggtcccacgtgcatattgggggagaagatggaaaatgtggtggcgatggcatggttctaattttaaaaatttgagtggcacggttataaatagacgatttgtaatgtcatttatctgaataggtatatttgcaatggcatgaatcaaattaacccaaattattaaaagtgtacaattttggtagggttagtgaaggtgctatttcagcatcctatgccatgtcatgttgaattttggatcggtgttggtatatttagttagtttagaggtcttaagatactttttaaaatagtttataaattcaatacatccactcacatgttaattaccatcaatgtattttactcttttaatgcactactgtttcttttttccttcgattattggcacggattgtttatccaggtaagactataaatcaatatttaaaaaataaactacgtaaatagcttagaataggtggtataatcatgcaacaaagaaagtttccttttgagaaatattttttttagaagcgtggagtacaaaaatgcagggaaaacactgaaaaaaaaaagcataataataacgtagttatatttttttttacggaggaagtgtataatacggcctcgcgcgaacctaccaggtttttactcctgcaaaaacacggatacaaaagcttaaaaaaaaacagtattagatcgagaaccctagccccctagttcgccatggactttcgacgacggaagccgccgaaggacggcagggtgttcgtccgcggtctcgccgcgggcaccgccggcgaggcggacctcctccgccacttcgatcgttacggagtggtggacgaagtctccatcccgagggtcgtcggcgaggtcgacagcctcaccggcctcccggccctccgcttcgccatcgtcaagttcggccaccccgagttcgccggcctcgccctcaacgatcgggagcaggtcatcgacggccagatggtatggtcggcgtctccgatcgacttgacacagttaatctctctttctgaatataagcagaataaggcgtgtcaaattttcttggtttatattgcgccatatgtaattgtgctcaaacaaacaaatcatgttttaaatatgtaattgttgctggaacgggacgaccggctgcaggtagccatcgtgctgcggctgctgctgaaatgggaagccctgctgcaggtggacatcgtcgtgctgcggcggctgcaacggcaagtcctcctggtgcgaagcctgatcagtcaaccggtggagcttggtgttctccaggaacagagcatgcgcaagagagatgacgtcctccagatactgccacgaggttcctcgtggagggtagattccttccatgtcttttcccaagttcttgagagcaagacttgccatatggattcgggattggattttaatccctcgtgcgtgtcactaaaatagttacgaaaaaaattgagaagatatattaacatgtgatatatcgcttcacaaaaatgcaaattaaaattcaatttctacatctcgcaaaataaatttaactgtgaatatatgttaactagctatagtttaattttttttcgttgcgagatgtagaagttaaatttgaacttgtatgtttatggagtaatatattacatgttacatcttctcaaattttcttcataactattttaagtgacatacaaataacgatgtgacatccttcgaaggatcgaaatagtttcccatatggattcggagtcctcagcgttctcgcagttggttgggtagtatagggaagcatcctttcgcagggaccgtagatttgatcgggcgagtttggcgagtggcgctggttccgaacctcgcacgtcgtgtttggcaagcgcatcattctgcaactcgtggctggtgtcgcggtggcgctggcgcatcaggatcaggtccgcagcttcggccttcgggatctctgaccgcgcggccgtgctgctctgcgtccgcatcgttctgcaactcgtggccggtgtggcggtggcgcagcaggttctcgtagtcgtactcgtactcgtctatgacgatctcgccgccgtgccgctcgaagtccgaactttaagcagcctcggccaaacgccatggaagagacatcacaacccactggctcctgcaaaaaaaaccattcacaaactcaggatcgattctgcattactcggctaagaatctaatcgaaacaacacacagtaggatgcaaattcagttactgtcaaatgcagtttcagtttgatccacaaaattcattctgcacatgtaggatggcaaaaccattgcacgattagttgatcaccttcagtttaatttatctaagattggagtaaatgacagtaacaacgcacttctagttataaattattgtaatttgagatttgagatacacccttgccgcgccatgcagttaacaatttttaatggcacgcacgagcacaagaactttcaccgatcaaccgactcgaggtatgcagtttccagctcattcgccatcttctccatcgcgatccacgagctgccaccttcctccaccgccgccgcggcggccgcggcgagctcgctggtcttggccctcacatccgccagcttcccggcgtccgcggcgtcggcgaacacgcgcgcgagcgcccccgggtagggcacagcgcccgcgccatccgcggcacgcacaccggcgccgtgcaggtcgaccacgagccgcgcgtcgatgaactggtcggccttcatcggccaggcgaggagcggcaccccggcggcgacgccctcgagcgtcgagttccagccgcagtgcgtcaggaacgcgcccacggcggcgtgccggaggatctccatctgcggcgcccagccgcgcacgacgcggccacgcgcggccgtcctctcctccagcccctccggcaccacggcggcgtccgcgcccacctcccagacgaaccgcgcgccgctcgcctccagcgcggcgcccagcgccgccgcctgggccggcggcggcttgtacatgctcccgaagcagacatagaccaccgaacgcgagggacacgtgtcgagccaggagaacagctgctctgcttccgatgacctctcctctccccggcagccggagtcggcgaccgggccgaccgaccacacgcggccatggccgaagaacctgttcaggtactccaagaactcgccctcgatctcgtcaaatgaattcaccacggcgccccaagctctggagttgagcaagaagccttcccgcacgagctcccagtccggatcgccggcgacgtagctcctcaccaccgacgggacatgctcgtacgggaaagacggggacccgggaagagggggacacggaggtcgtcggcgaggagctgcacccatccaagaaagaagtcggagacgacgacggtgggggcatcgtccgggcgagaccgcgcccaggagaggagcggcgcgctgataccggagagatggacggcgaggagcgcgtggtgtgagttctcgtggagggaggcgtcggggagatggatcgggagggcggcggcgaggggggtggatgcgaggaaggcggagaggagggggagatcggaggccgtgacggcgacggtgagggcgacgccgtggcgggtggagaggcggtgggcgaagtcgaggagcggcaggaggtggccccgcgacggcaaggggacgacgagggcatgcggccgccgccgggagggcacgccgtcgttggtggacatggcggccggagaagagtttgattgcgcgcgaggaccagtagtctctggagatgagtgaacctccgaggcttggagtgagtggtgataggctgtcgagcagtagcatttctagctgctctatgacaatcaacatcagtcaattattacttcctccggctcgttttaaacataacgatgatttcgtgtctaatcttaatcatttgtattatttaattttttttatttttattattattagataacaaacatgaatactactttatacgttacttatattttttattttttaaaaaataattaaaataaaatgaatgattaaaattgaacgtgtaacctcatgactatatttataatatgacagtggaagcattttattagaagactttatacttaattagttgttgaaatggtagtagtatgaacagcttgtgctcgccaccgacccggatgcggaccgccactgggcgtgctaggctcgtgaagtcaaattacacggcgactcggctgggccccgacgctcgcagggatttcggcggggcttttaactattcgccatttttagatttgggctgtgtttatatctaaactttagatctaaatttttaacttttttcatcacattaacctgtcatacacacaacttttcagttacatcgtaccaatttcaacccaaactttcaacttttaaaaaaactaaacacagacttggcaaataactatttgccacccctatcttaatgacatgtgggtccacatgtatctatgacatgtgggttcagtggcaaaaagttaattgccacatctaaatgtggcaaatggttaagagggtgtttaggaagaagggactaaaatttagtccctcataaaattgtagtccctcccacagggacttatgcttttgtgtccctccttcccaaacaccacctaaatatctcgatttcggggggctcgcgggcagcttgggggaccacgagagctcacggaataagttcaccggatgtccctcaattgtacgccgagtctttctgaggtctctaaccacaataacaaaaaatgtgtatctctaagatatgtaaaaccgttcaaaaaaatcccaaaatagtatagatgtctggtttcgttgatatgacattatagtcaacaaaaaataaaaaaataaaaagtgtggcccacatgcaagtgagaagaaaaaaatatgaagcccacgcgtcagcattatcttctttctttctcttttctttttttttccttctacctcaagctgtgccacaggcacacacagggacgcaattacggcgcgctcgtgttcctcaggctggagcttatgctcgtcatcctcgccatgccctgcgtctcccaggcgtcggcggtgctcatccgaggcggcactacgaccgggctggcaccgggctggccggtgggatcgtgctcacggcgttcctggttgctctgctgctgttcctgtcgctgggcgtcactacggggaggctgctgcactacaaggaggtgcaccaggagattgttcgccggacgctcggccccggcaagcgtgctcagtggacgtggaaggaccccgcccgccctgcctggctcgtcaagctcagtccgctcttcgatgacctgcgtgtctcgcccaagtacatgctctcgcagatcgcaggcagcggcctcgtagcggatcatcgtgtccgacgacgagaatgaggacgccgaggcgccgttcctgcagaagttgctcggcatactacggattgttgacgattcttaaatcataatataatatctgactgtcaatatctgcatataataaaataaaacatgatatccgacttagtggtaggtattattactaatcatttccactagtgatggtgaaatatgtgtatgcaggtgttttaagaaaaaaacacatccgtcaagcaacaaactgcacctccgcgcattcaggatacatttacacagattgaaggccctataaatcaagtaaacaactctaaatgggcccaactatcatgccaatgggctgagggcctcaaaattagtgtccacgacaaaaaaacgggccgaacggagccgtcccgggttcggccgaacctccaattcggccgaatactttttgtagccgttgatcgtgagattcgacatggacggccctgatctcttcccgatgacggttggagggtagtttggtcgtttcctatacctgtaaccgtcatatggaggctataaatagagctcatctcattcattcacaacacacaactttgagatgaattattattggtatttcttaacgacattactagaaatataatttccagcaatgacgcagaaatacttctggtatattatggttatagagttcatccgcaagcgcacggatacaccatagtagcatttcacccgagagtattccaagagtatcgtatttattttatcccgtgggaagatcatgtagagagaactcaactaataacttatatattacttgtgataatcatattctaagcaggggttaagataatccaagggtacagtgacacacaagcattactactcatcctcgtaataattaatctaagctaggtagaaagaaaagagaaagagaatctattcctatacttctaatatacatagtatacatacattctagttaactggtatactagctaataccctctatccgtaataattaatctaagctaggtggaaagaaaagagaaagagaatctattcctatacttctaatatacatagtatacatacattctagttaactggtatactagctaataccctctatccgatgccctcctggtacttcgagaagccacccctgactgctgagttccttacgacagcccgtcatgaccatccaaccagggctaaatacggaggaataccctcctcaggaaattaacttaggattatatataggcgcggaggaatacccgtactgagctgtcaccatcagcggcacacctctcatctgcaatatataaccccaaataatgatatcccgtaacctagacaccacgtctaaactaccagatactactctaatattatcatcatgacatagagtaattgcataagcaaacactatacccgcaccaaagcatctcccagataagctagcagtatattcagtataacatgaacataatgtaaagtaggtactaacatactcggaaagtatttcaataccataaatggtacactctgtctgtcaagaaattccacggtgaatgggaggagcttaagtgcaatttctgccttactttcttgacagacagagtgtaccattgtttcgcttcttctctaagagaaagaaacaatttccactttagagtttcatgtgtcatgcctacgatggataggcacgaagacactagctcaaagtcccgaagatggaggtatgggcgttcaccgatactaccagagaaggttttctctcgaaccatggctataaagccaggactgatttcgtagccatccgaaaggattggttttgaagaacaggatggctcacaaagatcagcccgaggagcagaaatgttttgaattgtgggttgctccatcaaggaaaggaatcaaagaagaagaaatatacataaagatacgaggatgacctagactcggataaattaacaaccgttccccggcaacggcgccagaaatacttgttggtatttcttacgaccacagataaatccgcaagcgcacagaataccgctgtagcacttcaccttcgggtgaccccaaaaggatatcaaactcagggaacatgtgtaatctacctaatgctaagacaatccgaggagaacaactaaagataggtaggctaggctagaaaggtctttctaagggttttaattatctaagctaagttaaaggtaattccctatctgttgctttgggcaccgacccctgctagtctgtcagcgtggttctggctatagctctatgatgtatccgaacgtggaggattacttggacgggattcagggctgtcaccacctaccgcctacctctgacaaatccgtgggatacacaacaaacaaaggtaatatctaacctagacaccacgtctaagttattaattactactctaatactcgagcaggaacttccttctctatccggagtcctagtactagtgcacttagtataaatactaaacaatgaacctgcaaagatggaaatctatcttactcagacaaaataattaaataacataacaaaggaacacgaatgcttactttatagaagaagttctccgaatcaggagcagagtgtaccgacagctccggtactcctccagaattcctcctaggaagctacactcgtcgaggtagaagtcggatgagcgccaaacttccgggcactcctccagagcttcccctcactctctaccttattctcatgtacaaaagatacaatagagcctcttataattcagctcaaagttgtgtgttgtgaatgaatgagaggagctctatttatagcctccatatgacggttacatgtatgggaaacgaccaaactaccctccaaccgtcatcaggaagagatcagggccgtccacgttgaatctcacgatcaacggctacaaaaagtgttcgggcggaacccaggacggctccgttcggcccgtttttcatcgtggacactaattttgaggccctcaacccattggcatgatagttgggcccatttggagttgtttacttgacttatggggcctccaatccgtgtaaatatgtcctgaatacgcggaggtgcagtttgttgcttgacggatgtgttttcttcttaaaatacctgcatacacatatttcaccaacactagtgaaaatgattagtaataatacttaccactaatttggataccatgttttatttcattatatgcaggtattgacggtcagatattatgatttaaggaccgtcaacacggatctacttcacgttcatggagtcggtgaagcgggtggcgctggggatcgtggcgagcacgcacatacgctggcacacatcgtcggaccactcgtcgtgtgcgaacgccgtggtggtgctcgccatcgcctccttccagctcttcttcatccgcaaccgcgctcgcctgccgccgccgccgctgttccgcagccacactcgcccgccgacgtcatcgctttgcctgctctgggcgcccgttgccgctccctctccgcaggaagaacgaaagataagaagagaaaaaagaaaagagaaaggaagaagatgatgctgacacgtgggtcctatatttttttattctcacttacatgtaggcttcacatttttattttttatttttttactgactagatgccacaccagcgaaaccagacatctatgctgccttgggaccttctttgaacagttttaca

SEQ ID NO: 19972 - DNA, 5743 bp, Oryza sativa
tgcgggaggtgaccggcgagccggtcggccagaggattgagataatggcctagagaagaagaggagaagcgtggctgacagtgagcctcaacgtttttcatttctacgcttgacactgacatgtcttacaatctgattcagccagttagtagggtccaagatgccatgtgggacaaaatcacccagggagtcgatttggaacggttttcaaagttgggggacaggttatacccggttttgcggttgagggatgccattcaactagagacatttttggagggaggaaaatagacttatcaatgaagatgagtgctcttgattatctaggctctaagcccaactgatgtgacgtgtcagaagcgaactgccggagacgaaatcacgtcgaatgaacgggccaaaacggtcgttatgcagtactacattgtttccatttctacttttatagttttactatttttattttcgttttcatcagtaaccatttccatatagttcgattggtaaaaatcgaaaacaatcaaacgctatgtaaaagtaaatggcggtagtagaagatataggctgattgctagtcagaggcttgccgtacacggtggttcggtgcatggtctcgggtcgtcgtcaaagtcgtcgcaaaggttagtaaaattgggccgtgttattcaaaattttttctacaaaaattttcaaccttttcgttacataaaatatttggacacgtgcatagagcattaaatatggacgaaaaaatcaattgcacaatttacatgtaaatcacgagacaaatctttttaagcctaattacgccatgatttaacaatgtgatgctacagtaaacatttactaataatggattaattaggcttaataaattcgtctcgcagtttacaggcaaaatctgtaatttattttgttattagtctatatttaatactttaaatgtgtggccatataacttaaaaaaaattgggcacactgatctacatgtctttgcggcaagtgagcaggaaaattgagctctgtcttcaccatttgcagtacgggtacaatcaagagcaggtcaccacgagccgcggcgcataagagcaggtcggtcagcatatggcaataatgcaataaggcatcctcaatatttaaggtcactatggctataagatggaatccacatcatttgtatgttcatttgtatatagtatatgctacaatgtgtatagctttttcttaatcttaaactgggacccattcattaaaaaattatattcaacatgaatgaaagagcacatgcatggtgcaaaaggtatgaactaattttttatttcttatggtctagccttaagcttaaggttggccatagccatttttttcactttctcctctcccaatgcataaaggtggaacaaaaatactactttattctttaaggttgttttgcatgtaatattgtggatgccctaatgctctagcgcttcgtctgaaaactttaaaaaaccagcaataacttcagaacttgtatttttcttatatactagtgaacttgtaaatagaccaatcacaacaggagtctttgtaaatggattgtaagcagatcatgtgctatctccgtcctaaaatataataatctagtactccatccgttctataatataagggtccgttctataatataagggattttggagggatgtgatcctgtccaaattcgtagtaatatgataagttacgttcctctaaaatctattatattatgggatggagggagtaatgaatatgacacatccttacaacactatggaacgaagggagtaaataatatggaaaattttggttttttttggtaaaattcattacagcccctgtatgatggctaagagtgttgcatgatcagttgatcgccttcagctaaatgtctctgagataaattacagcacaaaacgaccccctcaagttaattggaggtacactctgccgtgccatactgctacgcatgtgacaacaacaacaaatgagtcaagaacgccgccgtgtcgcgtgacctcaccgatcaaccgaacgaaggagacatgcacgcagtttccagctccttcgccatgctctcgaaggcgacgcgcgagctgccaccttcctccaccgccgccgcggcggccgcggcgagcgcggcggccttggccctcacgtcgccgcacttcgccccgtccacggcgtccgcgagcgcgcgcgccagcgtcgccgcgtcgggcacggcggccgcgccctccgcgacgcgcaccgcggcgccgcgcaggtcgaccacgagccgcgcgtcgatgaactggtcggccttcatcggccaggcgaggagcggcaccccggcggcgacgccctcgagcgtcgagttccagccgcagtgcgtcaggaacgcgcccacggcggcgtgccggaggatctccacctgcggcgcccagccgcgcacgacgcggccacgcgcggccgtcctctcctccagcccctccggcagcacggcggcgtcggcgcccaccgcccagacgaaccgcgcgccgctcgcctccagcgcggcgcccagcgccgccgcctgggccggcggcggcttgtacatgctcccgaagcagacatacaccaccgaacgcgcgggacacgtatcgagccaggagaacagctgctctgcttccggcaatctctcctctccccggcagccggagtcggcgaccgggccgaccgcccacacgcggccatggccgaagaaccgtttgagccactccaagaactcgcgctccatctcgtcgaacgaattcaccacggcgccccaagctctggcgttgaggcggaagccttcaagcgcgacctcccaatccggatcgcccgcgacgtagctcctcaccaccgacggcacgtgctcgtacgggaaagccggcgacccggggagcgtgtcgaggacgaccgaaatcttggggtccagcggcagcgcgccattccagagctgctcgagcgcggcgacggcgaacgcgccgctggcgtagaacacgacccgcgggacgccgaggtcgtcggcgaggagctgcgcccaccccaggaagaagtcggagacgacgacggtggggggatcgtccgggcgagaccgcgcccaggagaggagcggcgcgcggatgccggagagatggacggcgaggagcgcgtggttggagttctccgggagggaggcgtcggggagatggaacgggagggcggcggcgaggggggtggatgcgaggaaggcggagaggagggggaggtcggaggccgtgacggcgacggtgagggcgacgccgtggcgggtggagaggcggtgggcgaagtcgaggagcggcaggaggtggccccgcgacggcaaggggaggacgaggacgtgcggccgccgccgccgccgggagggcacgccgttggtggtggtggcggccatgactgagaaaaaggcgggaagagggagacagggatgcgtgtgtgggccgtggagacaggagaagtgggaactcgtaggctgtagccggctttgagtgagtgggtgtcttgctgtcaagcggcgtctttttcttggttgacagtggactccggtcaagtcttttactactacttattcgcaggtcaattttgagcttttgatttttctgcacggaataaaagggactggaaggagtatatactccctccgtcccaaaataaataaacttatagagtttaaatttatgtcaaaaataaaccaacttatatttttttaccaaccatcaatccacaaaacgataaattttattacttcaatacccctcacctacacatcattcaatacaatattcacattaattaagggcattatggtcttttgtttctctccttaaaaactccttgggacgttaaggtttgagtttattttagggagagaggtaggctatcaaaaaatctcgaggctcgcgagctgctcgagcttcagatgagccgagcccgagcctcccccaaagctcgcgagctttatcgagccgagctcgagtttctatcaagctatgaatttttgttgttatttcataaattaggagatcaagtatgtgttaacgaccaaatttggtaatatcagcatcggaaaaggagattagatcaaggtggagtcgaaggtggagattaatccgagaacagagcaagaatcggctgaagtccagatcggctacgattaggatcggctgggtctgagtcggactaggtgagccgatgcaaccgattctgacagtataatttggtgtatgacattgggttgaattgaggtgcttcaagatgattgccgcacatggatagagtcctgagatggcaattgtatctattaattaggatgtttttatgtaacttccttagagatatgtttgggcaaaagtctgccgcaaagacttatggtatcttagagtttgttagagatagtggtcgtgtccggtatggacatatcttgtaattctcgggtataaatagaccccgagccatatgtaatttttaacacacacgttcaatacaatctcggcgcatctccaactttttgctttagttttgtttcgacgagttcttgctttcggtttgagctgcatcggtttcgatcttcaacaagaggtaaaacttgttatgacggcttgtgttctcgggattagtgcttccatctttatgacactctaatcttgtctacataattcgtcaagttatcatatatcttatataatctttggcaatatcgtcatctaacctacaatcggctaacatccgttaatagaaggcagccgattaggttaaatagcgacgttgtcttagattatataagatatctaccactttatgaaacacctagcggcttgattgtctagatattgttcttcttttcatacttaatgctacatcagttgagtttgatctattaagtcgtgcttagaatatcaatctctagcctgtactctggttgccgattagggtagtatcggagtttcagccgatcttatctgatttaactatattcgatctatatgcttcaaagacatgttaaatccgccctttatgtcaagatcttattgcatttaagtatattaagcttttgtttggtatattatatttgttttgatatctttatataaagtagtatcggagtattagctgatacatgctagatctatctgatcggctatgctataaacatatataatcatgttattaatatatatttcgatctaagtgatttatactgtctcggcatggtgaccgatctatcccaatcacttgatttaagtatatattaatataagaactatatatcgttaatatctacagccgatcgcatagatttagttccttactatctatttataaccgtcgatcgattcatatatgacatcggctcaaagataaatgatatctcatcggcacctagtcgatcggctatcatttatagatttgaccacgaattctttgtctctatttcttgttgattataggatcaaatcaactggcacactcatacattcgaaggcgagctttggacctgtactgaagttaagcagatttcccaggcctcgtgttttctatcaacacgcttttggcacgcctggttgaagcatctagacccccggtgttaattttggtaattaatgacaagcgctaattgtggactaaccgttgtctttgagctatacattttaagttaggtccacatcatatgtgcgcatggatgattatcgatggattaaaa

SEQ ID NO: 19973 - DNA, 1514 bp, Oryza sativa
gaccaggggcggtcagaccgaccacatagtggcggtctgaccggcgtaccctggccggtctgaccggccgcaagaaggcggtctgaccggagcataaggccggtctgaccggcggcatttgcgcggtcagaccggccccctggaggccgggatggtgctgctcgggatggccgatacagagccgacggagccgtattcggtcagaccgagccgaggccggtctgaccggccaccccatgccggtctaaccggcgaggccggtggggccctctgatagggctacaacggctagttttctagccgttgcagagtagcacggtctgaccggccacatacctccggttagaccggcagagcacagagttgggggatttcgcccccaacggctagttttggtggtgggagtataaatactcccccaccagcagcaagggggctctcttggcacccaattcaattgcatacaccccttgcacctctctcacactcacttgagctttgtgttcatccatctagtgtgttagagggttgtttagccaagagtcaagtgcatttgcttccattgtagagctagtgtggcacttgatcgtctccacaccgggtcattgcttgttactcttggaggttgccgcctcctagacggcctgtggaggagttgcccagtgacctccccgagaagattgtggaggaggcccggcgccggtttgtgagtggtttggagttcaccaccttcggagtgaaggaagaactaccacgagtgatcgaggcttgggtagtcctctccgtgggtcggctcccgccttgcccaccccttgacgaagggggcgtgcggtggcttcgtggttgagcggtggagttgggctcgcctcaacggggagtaggaaaccggcgagtttccgaacctcggtgaaaaatctcttgtctcattgtctcatttgattgtcgcatttacatttgtgcaatttacatttctagagacacacttgagatcatatcaccctaggattgcaaaacattgacataggagcgtgatttactttcctagagatataattgagccactatcaccctaggtttgcaaaacataacttagttgcttagttagagttcacccttaccaagcctagcaacttaggttagatttgattaggtgttatttagttttaaatcgcctattcaccccccctctagtcgacatctcgatcctacactggtgggactgattagaagtcaacaagcaattcttcctcatggccgagaagccaccgttgtcgccatcctcggctagcccaagcactgttaaataaaagattcaaaagttggggttgactgacgtcaatgaaggaaacgtcgtgcccatcgatccggagaaattcacacctgagcagaagaaggattttgaagcaatgttgcagcaagcccgggatcagttcttgaactcattcatgcagacccgcaagggaacattggttcagaagtatatattattttacttaaaaattaagctcggtagt

SEQ ID NO: 19974 - DNA, 6634 bp, Oryza sativa
ggcacacgcggcggctcccggtcgtcgctggccgacttgcgcagcagcgccggagcaggaggaggtggcggccgcgacgccaactacgacacgctcgtgccgccgtccttcgtgcgcaccgacggctgcggccgtggcgaccgctccccaccggtccacacgttcggcttcagcaaggaccacgacgcggtggcgatgcacaccatcgccgaggtcaccggcgggacgttctccttcatcgagaacgaggcgttcatccaggacgggttcgcgcagtgcatcggtggcctcctctccgtcgccgtgcaggagctccacttcgacgccgagacatggagaggaccggacagaccacgagcgtggccggcgacgaggaggcggagtccggcgtcgccgagcgctccgtggaggtggaccaggagatggtccgggtggaagccatcgacgacatcgcgctggagcagggattagttatcgttttttctgtttcggtagtagaagatgatgtgaccatggctactatggatacaaccattgctcacatcatgaatcaacaagaagacatcaagatcaagtcctccatgtgctgcaatctgattcggccacgtgttacattgctgacttcaaacggccgccaaatctacatacgtgctccgttttgggcccgtgagtacttgatggaaagctctcgaagtcctccttccaacggatctagcctcatctcggaattctatctcgtttggccgcaatcacagaagcaaggtgctgcgtcacctgtattgggccaatgggcttgtaactttgtttgggaccctggcccatgtggggcccatgtggggtgcaccccaatctggtgaagcacgacccttggaccctcttggtcgtcctcccacctctataaatagttaggtaccccttcttgggtttcttgggttttgatagattaaagtttagccattgctacttgcttgcagcgcgcgtgtcggctagaccgtccgtctgcttgttcttcggaaccccaacttatcattcgtatttaactcctatttgcaattcagattgcttttatcttgttcttgcttgtttcttcgatttgcttacaggaataaggttgatttgtaccggcaagatcaacaacccacggagaggtgtatcgatcgctaaggcgcaacgcaacgtcttgtacggttgtagtcgggtcatcaacgtttcttccaaatcgtagttatcatcaactcaccgaaagatcgggccaagaacagccttgagtgtcgagacgaactcagggtttatcacgtggtatcagagctttcgttgctcggtgagtttttatcttcctataaccagaaaatagccatacaaaaaaaaatccgtatcatttacctagccatattgtgccattgtattgttcttttcagtttttgctttgttaaattttgtgttgcatcgtctcgtcgtgttgctagtcttagcgtctagttcgtttagagtttcgagttctggtcacgttttataccagagtcgtcgtcgcctccgtgtctctgttatcgtcggaacctacgaaaacggaatcggctcgctgccacggttctatttttgtagttttcataagtttctgtcggttagtttttgaagttgtggagctgtatctgggttccagttgagtggttgcgcactgtcccgtgttttttttctgttgcgcgcgaggaggaagaaacgcgcaaggaaggagaaagacgtgaggaaggagaaagaaaggataacaaatcggtttttggaggaagttttgcagattagatcagtcggttggtttgtcggttggtttgtttccttctcggttggtttgcttccatctatagccgagtctgtttcctcctagtccccacccccacgtgattcccgtattactatcccacttcggtggagtccgactccctgtctctcttctctcggtttagatccataccgtgtcttcccacatagctaggtgagaatttttgaagtgtcggattggagatccgtttgcaaaaacggaaccttcgggacgagtacattccagttttgtataattttaattttgagtttggacttttacatttgagtccttgtaaattttatatttacgtttgagtccctgtaaccttacattaaggtccttgagtcagtttttgttaaaaaaatcaagaaaaaaagtgagaaaaaaaaggcagaaaggtgcataaaaaaagaaaagaaaagaaaagccgcacaaaaaaaaacaacagaaaagaaaaggaaagaaaaaaaaagaaaagaagaaagaagaaagaaagaaaagagaaaatactgttatgtttgagctgaacttcatatatcagagttgtgcatgagttgttcctagtgctatcttgtggtatcgtttgtgtctaggctcgcgtctctagtacgttctagctaggaccaacacggtacttgactttgaaccattattcaactttgcattctctgatttgagcatttgctatccctttgctacatatttaagcctacccagagctccacagatctgattgcagccgtacagcaagtgtttgccaacgcatcgatacatccaacctccattggggtgcttggttaagtcggtgtacatcaccattccgcttgctttggtaagaacttgtaagagcttggttaaaagcttgagtgtgtgtgatatttgagctgccactacctagtagttgataggagcgtgcatatttttgtgtgtttcttgtttgcgactaaccatggcaggattgcgtaagggaatacgagaacatcgacttctacaccttcgacgagatatgacgacttctccacgtgatgcatatgaggtacacgactataattttgaacaagttgcatctaaattaccattctatgatgggaagtatgattctgttgcatacattgattgggagctagcagtagacaatgaatttgatatatatgatttttctgatgctcaaatgattaaggctgctagtaataagtttacctcttctgcattattttggtggacttatgttagtaataaacctgaaacttaggatgaattgaaaaccatgatgagaaaacgctttgtgacatcttattacaaatgtactcttcgggagaaattagaacatctgaaacaaggtgatagaactgttagggagtacattcatgaatttaaggtctgtatcatctacagtggtctcaaagagtgcaatgaaaatacaacgcgtagatttttcaatgggcttgattctgaaattcaggttttgcttgataatgtgacatataatcatattgggcttgctcgtagcattgagagtcagatcatatcaaaggcgaggatgcatgaccaatgtgatttatctcctatttctgaatccccaatatacttatgtaatgatgatgtgcaaacattggaggagcaatcttttgtctcccctgttactaacgttttgcaggaagatcagcacatccaagaaaaggagaatggtatacttgagaagaaagaggatgaagcacctgcgatgtctgaagaaagttcgcaaggtaaattaaatggtgctgagagaaatgaaggtgagtattctcaaggtgagctacacttgtccacttttcatgctatagtagagcaaccattagtggaatcaatttctgagttgcctttgtcacaagttgatttacttgctgttccttgtgataaagaagagttgtgtgataatgtttcacttatatccatgctacaactagtgaatgaacatgttagttctactatttctttgtgtgctgattctaagcatgttgttcacattgctaatgaagtagaggaacgcgaattgctatcttctttaaatactttgggctatgttcagtttgatgatttttgtgagctcgataatttgaaggagaaattatttgctaaatctgatttgccatgtccaactaatgctatttttcatatctttggcgaatataatgatagaggaatatttttggtgcatagagtttacatttgttcggatttagaacatcttgtagttccggataaaatatgcaagctagagagacatgttactgctaatcatattgtctcgagtttgtcttgttttgattgcaagaaacaggttgttttcagtggactacgcgaagagcaccatatggaaaaaccgaggacagttttccgtgaagaaggggaggatgatgtgaccatggctactatggatacgaccattgctcacatcattaatcaacaagaagacatcaagatcaagtcctccatgtgctgcaatctgattcggccacgtgttacattgctgacttcaaacggccgccaaatctacatacgtgctccgttttgggcccgtgagtacttgatggaaagctctcgaagtcctccttccaacggatccagcctcatctcggaattctatctcgtttggccgcaatcacagaagcaaggtgctgtgtcacctgtattgggccaatgggcttgtaactttgtttgggaccttggcccatgtggggtgcgccccaatctggtggagcacgacccttggaccctcttggtcgtcctcccacctctataaatagttaggtaccccttcttgggtttcttgggttttgatagattaaagtttagccattgctacttgcttgcagcgcgcgcgtcggctagaccgtctgtctgcttgttcttcggaaccccaacttatcattcgtatttaactcctatttgcaattcagattgcttttatcttgttcttgcttgtttcttcgatttgcttgtaggaatatggttgatttgcaccggcaagatcaacaacccacggagaggtgtatcgatcgctaaagcacaacgcaacgtcttgtacggttgtagtcgggtcatcaacgtttcttccaaatcgtagttatcatcaactcaccaaaagatcggggcaagaacagccttgagtgtcgagaggaactcagggttcatcagaagagatcaagcagggatcggatcgtgggatggcacggttagtcattgatccggcaagatcgcgcatgtaacaacctcctgtgtggagaagaataaaaggaagaagagaactcagaaaagctgcacaatattgcagcaccaaaacattgttcttctctggttttctgcattgtcgtttttcgtcagacactattcatcattctgaaaccgtcagacaagctaggatagccactgaaatcgcgtgtgtttgctgatagctccgtcgtggtctccttcatgcagcggccggcgggaagctaccaccatgtcgcctgccacgacggcttcaaggtgctccacctgccgtagaaggcggcaacgagcgacgacacccacaacgacctctagctccgccgccatgggcaggagttcgacgatgatctcgggttcacgctatgcaatgattactactcgccgccgccgaagttggtggacttcgtcgccgaccatccgtttgcctccttctagctactccacgccacgaccccttcccgtgcggccgctcctcggcgctgctgcgaccggccgcctcgccgcgtgacgccttgcgaagacgatggattgcgacctctcctcgacgatgaagccctgcaagggcgaggagctcgcctcgccgccgaggtgttgtcctgctcgtcggcctccacgcgcgttcgtcgacctccctccgtcgcctggagagaaaggagaggagagagagatgaagagaggggagatggggagagataaggaagaagaggaggggtgaggatgaaatgtggggcccacgtgggccccatcatttttattaatttgtgtgtgaaactgacatgtgggtcccatgggtttattattatttttggatcgaattgccatgtaggcgccacgtcaatgccacgtcagatgaagaccgagtcaaattggccatgtaggcgccacgtcagccaaaaccaccctcaaaaccgccgaggaacctaatctgcactggttttgatagttaagggacccattgtatctggtttttcggttgagggacgaaaatcggattcgttgacaaattaagggacgtcagataaacttattcccacagatattagcctctctagaaatgggccgataaattgaactaaattttctggttcatttgttggtatgggccagtatttgcattcccaaccgaggcctaagatcacacgaaaattcttagcttgaaggaaatgttccgtttaaaaaaaggaataatgcttgctttgggtttcggctccatcggttggccaaatgctcattataagccgtgcagcttatcacagtaaaaaaaataatttataggtaaattttttatatatgttttttagcaatttaaaaatcaattctgaatgataaactacaatgaagaacctcaaaataaacttcaaatttaattcttttttaaaattcaaattttaactacggtttaaacaatagtgcaaaagatgagagacgaaagagaactgtcgagttgggcctgtacaaagattttggcccaactcactccaactcttttcttggagtgaaacatagggtctgtttggtacagctctagctcctaaatattgttccaggagttgagtctagagtggagtt

SEQ ID NO: 19975 - DNA, 11661 bp, Oryza sativa
accggctagcggagccgctttagatagaacgatggataactacccgtctcgtgggcaaacgaaaggtttacaggacaaacctagaaaggattccgcacgatttacgacgcgaatcgataaagatggacggactagaataaaatagattgaaacattgaaaaagcgattcaattggcttatgtgtagattgtagattgtgtatgcaattgaaccggccttgtcccttatataggggttggtcttgcgtcctacaggtcctcctccacgtccaactcgagggtagaaaccaatggaaacctgaaacataccttcccgagcaaggaaacccaatacccgatgaaaacagacttgagctcggactctgccggtcttaccggccacatgccgccggtcagaccagccctcaagccacagtctgaccggcccatacacggcggtgactttccaaatcttggcaatttttacttaattcgagcctacgtgccaaatttgggtgcaaacaaaaagtttcaaatctaactatagtataattataatataatttcactataaatatactataactataatataacttgtatataaatattaaaataatatatgcaactttatatctaattaacttatatatatatatttcagtgtagttacactatagttacaatatagctacaatgtaactatagtgtaattacattgtagttacactacaactatactatagttacatttgaaagttttttttcccaaaaagcttgcgtacagttttttacaattccgtgaagcggaatcctatatttataacatacatctagatcatattagaaccctaacctcatgtagcgctgcgctttgagcacataacacacccgcatgtatatatacactatctcccggtcaaattcgttgaaaatactagcactagatattgatatagtattcgacataaattcgccacaactattctgaatatatgttcatcaaaactattaaaattttaattatttggatgtatttttgtatgatggatagactttatgtcaccacaacaaacaatttttagtacatatataatatatttatattcaaagaggttaaacgtggttacgtgccttctaaaaatctaaagtgacttacattggagatgggctatttagcgagtgcacacctctttacttgagagcaaacattgataacacaagtgttttggtgtgtataagagttatttgtgaataactctgtataagaattatatatttaaaaaaaaataactttacaaaatttgaatgcatgtttttaaataaggtatgtccaaattaatcattctgccaccatacacactctcttgcagtggtttgatttactagtctcaacttcgatgctagatatttttcacccccaaattctcttcaaaccagataaactataccctcaatcgatttggaggcgttttattcctatgcggtacccatgtggtattgcattaactatgcggcaatcctattagtagcattgtcctacctcctcctatccctccccctccatctctatctaaccctaatatacagtttcactgggagagcaggcaacagcgctcgtataggaagaaggtacacaccttcctctcttcatgctaatcaagaaggtccaaagaagacgacctgacaatgagcttgtagggtccaaccatggtgctagcttgtggcgaggagatcaagttcgatggccatcattgtcgtctctgtggctccatccttcgcattgtaccgtcccatggaggacaacacctgatgacctcgctaagggcacggcggaataggcttgtggagactagcaacaagcgagcttgtcaagggtggtggtggagagagctcaacggtagtagggtgtgctcatggagacccatcccttctcttccaggggtagcgcaacacattgaggacatgccacaagaggtggcagtaatggctcttcattatgccgccatgtaccaatgcccatttccctctttccctcggcagtcagcttcgtgcacgaattgttgtaacagtggaggctcaggacaggcccacaactgtggaggtagcttgtcccgtagatcagttcaattggcaatagagggagtggctacagagatggaaaattcaaggagggatgagaggttagagttggccatcagggaaagtagcacccaacttagaccaaagctttcatgtctttcctcactagtgtccgagtagatgtcgctagctagataggtagatttgggaagacaaattggggagaggaagaatctagatttggaggtagagatgggagagaagagaggaacaagattatggataggctagatataacttttaaatatattttatctttgttgcctgaacaactacatggtaaaactgtttccatgctttcatcgtcctcatatagcttgaaaggggaagggttatattaaaatagaccattttaacagttgagagtttaaacatctggtattaaagttgatggaaaaatcgtcacaaccgtatatgccatatatgttttgtttttgccatggtaggtctgtgatggtggtgctcatcataactcgttacaggacatgacttatgccagattttcgttgattcttagaaaaaaatgtgtgtagtccacaaagtattgagggtataaaatgtattcatttattaatcttaaaaaatctatattttcaatatgctctggttacaagatctgtgtattcatttatctaaaaactgcggctactcagtgattctttgattaaattaatggatgtctataaccacgcattccatttgtttgatagaaactgatttatcactaaaaatctttacgttttatatcgtgtggtggctgagagatcgtgaatatgctttgtagtagtagttggtgattttattatttctatcctaaagaaaaaatgatttaaatataatgcaaaatttgctttactaactaactctcactttctcttctaatttcagtgggccatgagcagtagtgacattagagacttcaccctacaaatgaaaattattatttatacgatattatcatgtctatcgagcgtattttgggcattatatgcttggttatttaacctaaaaacaccaaattactacatgataagtgatcatcccgtcactattatatataagacagtaggtcatttttattgttgtttttgtttctttactaattactaagaaatcgacacgctgattggtgtgtcaattgagtagtatgtgtgtacggtctttaaaaactacatagttaacatactaatattttttttatgatttggagcatcagtgagattagatttggcatagaactctagatatgaatccaacaccggaataagtgtttgttttatcataattgttgtgttttttaaaagttgaaagatttacgtattatttattttataatgtaagaaaaacatatgtttagaaaatggttatcaagattatagagtttgattcaatcctagaaagaatgagcaaattgtttttgtcatttagttttctatctattatttttatttttagtttctcgaaacataggatatgtagtcacgatacttgccccgaataatttgtaaagaattttacgaaaagtattttttctgtctttttttttcttttcctctctcttttacgtgtttgcactagtccggtcacacactgttgggttgtggtaccgtgtggcctagctacgcacatggaacagctttttttctctttttttttcagttcaccgtcgtatcttacgcacttgccaattttatagatagggtttcttacccggagctctttctgccacttgtatctcgccatgtgtcgctcaactaatggatggtgaggacaaccaatcagctagcacaaaaccaatcagtatgagatagatatatgcaaagaggaaagatattttgggaagcctctgtaatctagatgttgtgccttttgtttgcttctccgtatttctttttttattgatattctatatttatctcaaagaggataaataattgggaagtctctaggatttgtatctattgttttcttttggctatttttttatgcatagttttattagatttatcacaaaatttaataccaccatgtggcctaatgagacgagctagctttagaaagatagattggtcagaaacaagatgcccacagttcagcttggggcttagaccattcacagtaggcctccgtggcattcagcctcaccaccaaaaatagaatattcgctgccacgtcctccatccacacaacctcctcaagtccgcgtagccaaagttggctacgggttcctcgcaggtttgcaggtgggatccactgtcacaccctgaaaatcctaaatttataaattgttgtttaaatggaattattagaaatgattttaaaagcctagaagaaaagatttaattataaataataaattccaatataaaagtgggccagataaaattttattaaatacttcactcgattctatagttcctagatttttctgggatttatttgagccaagaaagtatttttaataaatggaattgcatttcatgaataatttataaaagaaacttttggctttgggccgaaagtcggcccaagtctctctctctccccgacctaagcgcgcccggcccaagtcagcccgccgagccgagccgccgctctccctcctctctcccgctgacaagtggggcccacctgtcaggccgtcttcaacctcccgccgcagccgcgccctagccgcgcgcaagccgccgccgcctccttccaaattcgcccgcgtctttccatctccgagcaaatcaatagaggggaaatgatcctcgggatctcctcttccttttctcttttggaaatttcatctaaattcgtttggaaatcccggatttgatctcgattcggattcgttttttttccctaaccctaaaccttccttctcgccgccggccaccgtgggcctccatcgccgccccctagcccctatataaggacccccgggacctcctctcttcgccgccaccctcgccttagccctccaccaccggtagagctctagccgcgtcaagccgtgcgccgccgtcgccgccgcaagtccagtcgtgcgccgccgccgctccggtcgtcgtcgtcgctcgggaaggccgccgtcgggttcgccaagtcgtcgccgtcctcgtcccatcctttgtttccgccgaggaccgccggaacatcgccgtcgtcgtcgacccgaacgtctccgccgcttcgacctcatcaccgtctccgtccgttgccgtccgccgtcgtccgagccttcggtgagttcgccgcgtcaccctctacttgttggtgccctccgtttgcgccgccgcgccgtcgttcactggcgagcacgaggtgccgagccgccgctagtgatgacgtcatcgtcgacgtcagcgcctggtctaacaatgtctttcgtgattagtctcacagctctcaccataataaatgatgctgtaattggtaataacttgtttagctcctggtttggagatagagctgtgcagccgggaatggttgttcagaatggttgggcctatgcaacgagtatgttgtatagtgttggattaatattgtttaagtaaatactttactgttttattaaattctgaagtatttattaaaggccatttatgcaaatgagactatattataccatcctttgttatcccctgcatttgcatatttgctgcgtggcttgttgagtatgtcatatactcaccttgcaatcattcatcagaggaggaattctacagtgatgctgaaggtgtggaggattaggcgtagccctggtcaagctgcttgtcggatggagacgcctacgccgtttatcttattttccgctgcttcaatttttattgtttgagaggaactatctacctctataatgactttatatttgcttattaattagagtaataattgtactctattattaatttgttattgtgtgtctcggctaattcttggacgagggtttacacacatgtaagcgtttggaattttggatagaaattctgggcgtgacacccacactcgaccttcgtgccgtcagggaaaggaaagagaggagagagacctcgtcggcatccccgcactccacgccgccgagctcactactccgctcgacgtcggactgtgtcgccccattctacgctacggcagccagaggaggagggggaaagcgcggcggaggagatgagaaggggagagggaggcatcggagaagcggatgcgctcgaggtcgaggccaacgtcgattcggagttggcgccgtcgccgctcgggccgccccgcgccatcgccactcgggccgcccggcaccagcatcgcgcgccatagctcagaccgccccgccggccgtcaccgctcacccctggcctgtgtggggaaagaaagaggggggagagagagcggagaggaagatgaaaggaaatgagagagaggagagggaggggaagatgaaaagtgaaaaaaaataatactagtgagacccactacaagtaacttgtactgtggagcatgtagcctatcttgtttttaggtggtgtttaggatgagagggacttaaataagtccaaacagcaccttaatctacgtgacatgaagaacagcaaaaatgaatgatgccctgctaatgcccggctaggggcgtatccaggtcaggaccgtacatctagagataaccagcagccacatagtacagactacagagactgctggtggggcctgcttgcaagatgctagtggtactaccagtactgcatgcacacttggcgtagtacgaacgagttgactgcgcatccaatccaataatggagcgaagcacaaatcagcaaggggtatcctccatcagattcctggactgaaccaatcaggtcttcctcctccggttgaattgctgcatactagtagtactagccaggacaccttttatttacgcttaattgctttctcgatcggaagcaaaacgctagagcaggtccccatcactgtagctcaacatgacatgaactgagccctctctctagttactgtagctgctaccaaccaactaatttgtagacgcagtagtgcttccaatggtctgcatgatggagattacacgtcctaattgtctagaaaccaattaaagaaactgcgacgcgcaatcaacctgcactaggctaaagaaaattaaggtactaatcaccgacaatatatttctttttcaaaccatcgtactcatcggtgttcatataaacagctggtgtaggggctacaagattcattttcttattcaaacagaatatcagtttgctatttaatttgtcaattcttaatttttatagtttttagtctcataaatttgcacaacacagcctaaaattgtaatgtacaaaggaggtgcggcattatagattgatgccaactaacatatacatacactagtacataaagaaagacacatacaagttggcactatagttaccagaacagctaaaaccattgcatatagcgttcttctcaccttcacatgctgaaaaaaactaatacctttaagtgactatagatgccggttctaaagaaaaaaatgacacctttatcttaggtaccttttttttaaaaaaaataaaatgaaccagaacctttaatatattataggtgctgtaaaaaccgagccaagcatagatctgattttttttggtgcacatggccctgggaggggggcatcctcatccaccagcgccctcctctcgcccatctctctttatctctctatctctctctccaactctcctccgttttctgccggctccctctcctcctctccttccgttgcacggttgatatttcttaatgacattactagaaatataattcacagcactgacatagaaatattcatggtatattaatggttacagatatgatccgcaaacgcacggatataccattataacatttcacccggaagtattccaagatatcgtatttatttaatcccaagagaagataaccgaatactcggacattaaacccataccattgtacctctctggtaggctagctacacaactatatcggtacaagtataaaataaagtcggtactcagataatataaatggaataaaatatcgaagatgtataaaaaagaatattctattacttcaatgagtcttacaaaagaagagagaaaatccgctagagccatacccgaaatctcctgaagactcgaggactaagaaaactattctattcctactctactagcactaagatactactaaacttgcgagagggagagagctcttcttcttgagtgtgtgttgaagtggagggagtgaagtccttatatagcctcccaataacggttgtggcggttggaatggacgaaaatgccctccaatcgtcattggggagtgatccacaccgtccatcgcaaaccctacatcgaacggcttcacggtgggttcggccgaaccatgggctgggccattctgtcccatttttggcaggcagcctccttaactccttccttatccagaacagtgaattttgagcctattggatcgtgtcaattatttgttcttggcccatttatccataattctggatctcgacaacgtctgattgattgatcgtttattttttgtcgattctcctccatttatatgtgcttctcctgcatacatgttagtagcatagtatatagtggaaatagatattttatttagaaattatgcattgcaagcatagctagtcttcattaattgggtaatattgacggtcgaaattggtcgataacgaccttcaacaacggtccactgcgcccatggcctctcacccaccacacccgtcaccatggcgacgccggtgctggcagctggcgaccaccactgagctgaagaaggaactgaggaggatttcggtggaggtgtacggcaccaaggccagcgtcctcaacaccgactgtgccatctgcctcggtgatttcgccgacatcgataaggtgtgcgtgctatcaaggtgccaccacggcttcacgaccactgcatcaagcgtcgacggctgcttccgtgacgtatctagcattgccagcatccccctcacctcccctgggaagtaccccctcacctcccaacagcggcggcctcctctcaccttcccacgatggcggtgtcgagtgcgaccagatctgaccactgtagctcaagggcggcggcagtggacttctctccttcaactccttgtttttacttctttggattttttttggttatgtggacgttgattttgtttttgaatgttgattgtgcgattgtgttcatgttgatcgattcaacggtttagtggtgattgggagctgcttgattcattggatcgattcgagccgatgcatcaactcgcctttttttttattctttggacctcaaaggtgccagttctaaaaactggcacatttgatttctctcattagtgccgtcttttaagtgtcggttgggtaaaacgacacctatgcggggtttccaaccagcatttgtgttttttactgttaaattgtattctttttagaacatagataagtacatataaagcctactgcacattctggttgaaactgtttgttggaaaaacctatcaagaaacgctggtatgacataataaaatcgataggcactactacgaaaaccatctttcgtggcggccatattgggttttcgctagcggaatttaaagccgccataaagccatggccagtgaaaatcaagatcttcgctagctgttatcgatcgccagcgataattcattttcgctggcggtcgtcttaagccagcaaaaatgaattatcgctggtggttggcttaagacaaccgccagcgaaaatgaattatcgctgatgggttacactgtgccagccgctagtgtaaatgctagccaagttaaaaaaaacgacagatggagcgacaacacttcacccgcctcccttcacataaatttacccaagcattcaaaaatccacaaaaaattacattcaaaaatttccattcacccaagcattcaagcatcacaaaaatttgaagtcgccgtcgcggcgctgcccccgtcatcacgacgcctcccctatcggcgtcggtggcagatccggcctcccaggtcgtcgcggcagcggatccggcctcgcccgtcgtcgcgatggccggatccggccggccccgagctcatggtggtagaggcgacggcagcccgcagcggtggtggcgacggcagctggcggtgatggaggagggagagtgagaaggagagcccacggctggatccgtcacccgcgtcgttgtcgtcgccgagactggctgccgccgtcgggtccgtcgcccgcgccgttgttgtcgccgagactagatgccaccgagcccgccggatccgtcgcgccagcaccgtccccgccgcagagcccagtcaccgctgccacccatcccctttgccgctaccggagccgtcatcgcctacgccatcggtggagagggatgaggagagggctgcgcctcggtggggagggacgaggagggaagagtggatctggaggatagagtggatatgggagaggggagaggaggggatgggagggcagtggcagcgcggggagccgccggtcgtcgccgtcgccgtcgccggtggggaggccgagagggaggaggggataagaagaggaggggatgtggagagaaggagaagaggatgaggtaggtgggtggttttaatgtgaccagatatttttggtatgagctgggttttctctggcagttctgtttattggccgctaggaaaaattcgaccgccagtgaagattatctattttcgctagcggcgcacctaagtgaccaccagcagaaattgtcatattttcgctgacggcagtgttagacgagccgccagtgaaaattcattttcgctggcggttggtgccccccaccccctcgttatgactttgctagcggtttttacatttttccgccagtgaaaataataggccaatgccatgaaaaatcgtttttctagtagcgaggtctgaggacaatctgaacttagttgaacattggtaggatgtgattgtcaggtaaaacgattaatcaagaaatacgagtttgtacgtgagagttagtagtaaaaacttaaacccttcccccacaatagccaacttgaacttagtcctctttccttgaagataaaaagaccacattgaaaatcccatcgtttcgctcatacttatacttatccacttatccgtacagcttattaacaatagaaagataatttatggaaaaactttttttacatatacatattcttaacgattcaaaagtaaatgttataaaataaactacgatgaaaaaccataaaatgaacttaaaactaaaatttttagtttataagtataagtataagtgggacgatggggctattgactataagtacacataacagtctcgttgatgctggatataacagtcgcatactgttatagtagttacttactaggtaaccaagacttgcatggctttttattcattatttagtggtattagctagggctgcagg

SEQ ID NO: 19976 - DNA, 4928 bp, Oryza sativa
tctagggggtggccatatcccagtaccgcccaccatccaaacacctccaaaatttggacggccatatcctatcccagccaatctctccatccaaacacatccttaagagttcccgttaattttgtccgctttagacaaatgtagacgtgtgcacggcaaatgagatcggcatgttgtaggattatttacaccaccaagtggtatgagaaacagagcctcacccgatccttttgtctgcaggagacagccactcctacactcggtcacgacaaggatgttgtggttgtctatattcattcgtaaaagttaagtgaaggaagtatctcacaaaccctcttctacaatgtcacattaccatcaccggcagatagagaagccacatcatacgattgtttacatgatatactgtcacagacattattaacttatgacgcaaaggctatatggttgtccacgcatcatcatctgaaaatttactgaacatgatctagccggcgcgttaattcttcctgaaatgcgtgatctggacgttctccacgtccagcttcttgaagttgctgttcttcctggtgctgaagaattcgccccagttgtaggggttgtacctggccgggctctcgtcgctcacgacctcctccagtggctccaccatggtgtggcccgccgggttgaagaagaaagggatggagaacctctccttctccacgttcaccgccacccggtgctccgcgctctcgtacctgtcattgctccacacctggacaagcgcactctcaattttttcagtcaaattcaaaatgcaaataaaaatgatgtcaaatagtaacaattaaactacaatgttgttatatatttattaactaattctcttttaaaagtttgtcaactatgaataccgttataattgtagtgtaattatattataacttgtatataactgtaatataacgtgtatgcacataattttaaatcgttagatttacttcaagattcattcaacttggaacgacctccgtttcgtgaaaatagcgtgttaccgtagaaaacttatatgtaagtttcacataattttaatctattagatttactttgaaatttatttaagttggcaagaaaaaaaaatcatatgacgcgcatgggtgaaaagatacggtctcacaatctccgctttcgcgaaaataccatgttactataggatttctaaaacttacatataaggacacacaagttatgatacaattattctttcattgtaatatatttatgtccgataaattgttagaagaaaatttgttgataaatatgtagctgctcaaaaaaaaaagtacctggatgatgtcgccgacgttgatgatgaaggagtgagggacgggcctgacgcgcacccactcgccgtcggatcggcggcggacgtcgaggccgccgacatcgtcctggtagagcacggtgagcgcgccggcgtccttgtggcggccgacgccgagggcgaggtcggggctcgggcagggagggtagtggttgagccggatgaaggtggtctggtcgtccttgaagaagccatggaggcggtcgggtctcaggccgaggctcctggcgatcagctccagcagcttgaacgccagctcctccaccgcttcgccgtactcctccattgcctccctgctcaagaattcgatgaggttgaactgaattgatgcgaggatgaagaagacgatcgatcgatgtggtgacctgacctgaatcccggcaggtcgtcgggccacttgttgtcgaacaccaggtcgccgtcggccacggcggtcgtcggcggcggcggcgtctggcgcgggacgaggtcgaacacctccttccagtccctgacgttcttggtgtgctcggacgcgtagtaccccatcggcgccgcctcgctccgcgccacggccgccctccgctccggcggcagcgcgaagaacgtcctctgcgcctccgccgcgcgcgccaccgcctccgcgggcacaccgtggcgcaccaccacgaagaagccccagtcccggctcgccctcccgacctccgccgcgagcgcgtccaccccgtcggcgtcgccatcgccggcggcgaggagaggggagaggtcgatgaccgggatgccgtcggcctcggcgacggacgccttggggcggtgctcgggggcctgcacgaacgcctggtccatggagaggccgcccatggtcgatcagtagctggtggcgagaagctgtagcacaagtgttcgtctcgtgtgtcagcgtgtgtgtgtgtgtgcgtgtggcttgggtttgatatcggcgaggaaaaaggacgtgcgatgggttaggttggatagctcagttcatggctggattcaatgaatctggatgggtttcagtgtgacgcacatttggcttgtgtggtggaggccttctgatcggtgcgtgttgtctgtttgttgtagtgacgtcgatggatgatcgaccgagctagagagccgagttggcgacactgcgacacaacacacgatcgacaggaaaaaggtggccggccgggttgagagaaataacacgtacggtaccgatttgcaaatgaaaaaaaaatatataaataaaacttttatacacgtgttcataacgatctaaaagtaaagactataaataaactacgatgaaaaaaaaaatctcaaaatcaacttttaatttaagattgaaaattcaaactttagctaggagtaataagtacaagtataagcataaatgaaaaaaataaggttgtacgagttcactcaggatacagttttaacgccgctagcgccgccgccttacgtgtttatgtccttggcacgccgggagatcggccaccggcggcgagcttggacgccggcgacgcgaggcgtccttgaggggatcgaacggtcgtgttcagtgcgtggctcaatgatatgatgcgctgcggttggtgacaaatggctgggagcggagagagcacgacaaattatggttgtagcttcctcgtcaggcggacgcgacgcgagcgagagtattcacccggagctcgcggtcagtggaatctgaaatcagcacagccaccgtagtttctctccttgcaagtcgcaacaacgtacgaccacctgtgctagctagggagtcagagtaactatggaagcgcgatgaaatcatattccctccgtctttaaaaagaaactaacttaatatcaaaggtgatattttttctaaataatatatctgaatagaatattgtccagattcactgtattaagaaatatcactttcaataatatgttgatttttaggacaaagaaagtatgcaccaacggggtgctggtgtgctcgtgggctaaccaaaaaattgggccggatgatgtagtggtgactgtggtgttagttgttgtgcagagaggttgtggctgtagcaggagaggaagccgaagcgcggcggggcgctcatctcatctcgtcctgtacgccgtgtccatcagcgaggccgctcatgcatgtgcgtcttcctcgctcgacgggtgcttcgccgccgcggccaccgtccgtacgtgctcgatctggaacgtgaacgtatacctggaagtgaacacaaagaacaacaaactaataatgatatatgttatccatgagaaaattaggccaaagctgttgaaaatatggtcacatttcggtatattttaatccaaattattacgataataatcatgactttaacagggaataaaccagtacaattatcaaacagatgtaacaaataaatcatgcttaatatataaaaagtatagatattcaccataaggcaatgcactaaaaacattgcgccaaacataaacttagtagacatgaaaagtagtgtagaaagattatacccagtcaatgtccctccgctggattgtgaggcagaattgcctccgttggtgttgtcgcctggagcgccgccgttccctccagctcctggtgcaccatcgccagtggaagccatcgcgatgcagaggaagcagagcagtcacgtcgagatgctccctaaaaacttgatcgtccgcctacccgtgcaggtttctcaggtggacggagttctggaggcacctactcgtcctggatctcccatgcgcgcaagagatcagaaccggagaagacagagtagcagcgcaggaaacataagagattcagcgacaggaggaggaagtgtgagagacggagagcggaaccggagctctgtcgcggtggtggctttttatagcgcaggagggggcgcttctcgtccattaccagagtaacagtcgcgcccgcattgaatcatattcaattcccatccgttgagccggttcgaaaggaattcaattggcctcgccacggccacgcccacggcctcaacccggcccggcccggcaggcgcgcgcgtgcgcccgtgtggcagtccgcccactatctcaaccggtcaacaggggctcttctctagctccctattttaaattgagatctcttcacttaaattcctgaggtagttttattacctctaacatttattgcgggcctatggattttaattgaattaaatcaggcctaacccatttattccaacaatccccaccaaatttcatggctcactagaaatgctctcgatagcccatttgttttttataccagtgtttcggtggaaactgttaagttgaacttacacctaggaaaagagctacaccagatcacaactgaacaatggactatgccttgaattgtcagtcttgtgtaattcaggtttcactcaaacccttaactaatactgggatgccgtttgcatcccctctgtttggagcgtatgagttatactcccggccttttcatgagtatctagagatcacccaaatcttatagactgtgactagcagttggactcatataggtgtgttccttctaagatgt

SEQ ID NO: 19977 - DNA, 1059 bp, Oryza sativa
acatgcctggatgacttcatgttgtccttcgaactgttcactttgataatcactgtttgtttatcacagttcatcaggattgttggtactggtttttcaaccaccggcaaatccatcaggagctcacgaagccattcggcctcaattgtggcagtatctaaagctatgagttctgcttccattgttgacctcgttaagatggtctgcttgcaaaacttccaggaaatagcgccacctccaagtgtgaacacatacccacttgtggcctttatctcatcagcatcagatatcaagtttgaatcactatagcccttcaatacttttgggtacccggcgtagtgaatctcatagctcattgttccttttagatagtgcactactctttcaagagcatgccaatgatcatctcccggatttgagacaaatcgactcaacttgcttacagcaaatgagataccaggcctcgttgtactatctaagtacatcaatgaaccaatgatctgtgagtatctcaattgatcccttgctattcttcggtttttccttagtagcacactggaatcataaggagtagaagctgtcttgcagtcactataaccaaagcgactcaggaccttgtccacatagtgagattgcacaagtgtggtcccaccttcatctcctctcagtagcttaatgttaagaataacatcagccactcccaaatccttcatttcaaagcttttagacagaaagtccctgaccacctcaatcacattgaggttggtcccaaagatcaatatgtcatcgacatataagcacaagatcagtccctctcccccaccatagcgatagtacacacatttgtcagcttcgttcacaacaaagccaacagatgtaagtgttttgtcaaacttctcatgccattgcttaggcgcttgtttgagaccatacaaggacttcaacaacttgcacaccattccctcttgaccttctagtacatacccatctggttgatccatatagatctcctcctccaactctccattgaggaaagctgtcttaacatccatctaatgg

SEQ ID NO: 19978 - DNA, 11029 bp, Oryza sativa
  unsure (1)..(11029): unsure at all n locations
aaatatatttgatgttagatttaatgtaactaatttgatgttgtaaatattattaactttttctataaacttactctcaagtttaaatatttttaaaaataaagtcaaagtgtcaaataatttgaaagagagtgaatagatgattataattttttgttcacaatgaacaccgaagtgtcagtaaaatcaagtcaacctccagtgaatcttgggttcatagtcacccatcagtttcccttactgccggtaactgcacggttaccgaggttaccatgcttaccacgggaaacggtaatggttaccgacagtaaaatttcaaccaaattcaaaatttcccaaaaaaaatgaaaacaatccaaaaaataatcatggatgtgattcttgatttttagtggcaaatggtgaagaaatttttgaaaaagagtaaagataaaattaaatttaagggcaaaactgataatagtttagaaaatggaaaaaaagaaaaaaatatccattgaggcccaatagagaaggaaatatctccataatatacaagaggtcatgttgaattttttattttacatccaaaagttcggtttgcaactatcctatatatttttctaattatccctagtttctacatttaagtgggttttcaattttttttagcattgttacgttcatctacacaactcacggttaccgtgcaaaccatgtagtaaccacaaccaaaccgtgcaaccgtcaaattttttaattcaaatgcttgccgacgaaattcatgcggttttctcggttactgcgggggtgcgataaccgctctccaagtggtaagggaaaccctagcatccatacagcagctgcatattctgatcacacggcggaacacgaggacggccgggatcccgacaacaactctcgaatccacgcgagctccttgtcccagctgaattctcccgccggcggcgctggaaatgccattgccatgtctgggcacggcacgacaccggacgccgtccagaaaatgtcgccgccgccgctaatggagcatggctctgccgccggcgccgggaacggcgaggattcgccgggctcgccgtgcttcgggccaagcaactcgtcgacggttgcccccatcgccagcgccatgatcacctcgtggtccgtgcgagggccgtccctcgtctgcacgagcgtctgctcctccggcggcggtgggaactggacggacggatgaatgctgccgacctcgtcgccgttgactccggcgggcatcacgtcggcgtgccggtgccgcgagctcgccggagcatggatcagatcgtcagccgcctgcttcctcttggagcccgaggtggacgccgccgcggcctgcaggcttgcctctacttgagcggcgcgaggcgaccggtacatcttgcagaggaccaggccgccggcgtcggcctcgccgccgccgccgccgccgtggtcgacgccgaactccgtcatgcaccacccgagcctggtcaagcggcggccggaccccctctccctcaccccgtaggacagcctgcgcaggtgcccgacgcggcgcccgccggcgtcgagcacggccttcttgcccgccctccgggtgccagcagccacagtgcccggcctccccgttggcgccgccgccgccgccgaccgcgcgctgccgccgcctggccccgacgccgccgccgccgcggtgcaccgggcagaagaagtagtacaccgcgccggcgccgtcgccgcggtcggtgccccgggcggggacgtgcctggcggcgaggtcgggcggcgcggcggagtagacgtcggcgtcgtggatgaaggggagcttgatggtgtcgtcggcgatcttggggcgcaggaacttggtgatcagctcgtgatccggcggagagaaggtgaggccaccggccatgggtgatctctagtttcccgcgcccccgcgcgcgcgagagctagctagggttggaagcgatcaagcgatcgatcaacgtacaatcgaggagtaggagtagatatttgaattcaggtaggttaatttgattcgtgttcatctctaattcggctaggttattcgttttcatctcggataggctggtttggaaaaattaattgggccttcagcttaattggctagggtccaatttgactctcgttagttcgttggcttatagagtacgatgcattcaaatttgaatgtcagaagttaattaaatttggaattgcttcagacctcttccgttgttttttgtttttaagaactggcctctgtaccaccaagattgaaagtataataaaactgttactctaaaattgtttttcgtcatttaggtcgtgtcttctgcttataaggtgaagaaagaaaaaaaaacatgctggtgatggggttcttttgagggagaaaattgacattatgtcattgtcaaaagttggttttgctaaaataacatttttcaaatagacttcgttaaattaccactctttaatgttcatcattgctagaatacctttttggatgaaaatacccttcttacccatcttctctcccaaatatgtgcttgtcggtgacaatagagaaacaccagtgacaaaggagtggttcgggatgaaggcactgagcagcgagccgacgagcaaaccgtggtttcttgagctctagcatgatggctggtgtcctccacctcttgtgcctccttgagaccacttaggccccgcgctgctgttgaggtaggaagcggggatggcggggagggcaacacagagagtgcgatggagagagagggacctgagtggaggcaaagcatgagtgcggcgagccgtacgaccgtggctgcaccaaagaggtagtcaacaagagacaagcgcatcggagcttgatagaggcgcccgacccctcaagcacatccgccgacgtaccacgggctcgtcgataccttctgctcctgctgctcgtggccactaggtccttcgtctatggggattgccaccgggttcatcgacatgatgcctccacttcttctcaggtgggatgatgaagagaggcgcacatgcggatggttgtgtccgcgaagaggtgctcgcccacatatggctgtgttgatggagagaggtgttcgcgcacgaatgatggtgctggcggaggggtgctcatatgtgggcagcgacgctggggaaaagcgtggtggcctagtggggagctaggggtatcccgttccactactcaaaacgggatgctgtcccctagcgttcccaaaagttaatggtcaaatagcgattttgcaattcatttagtacctgtttcatattactacttaccattacaaaggaggtatgagagcgatccaccatatgcatacctagtactcatgatgcttctttgagccgtcatatatgtttcttcttaaattctaacgtaggaattttgtattacacgtaatatgacatgcacatgcttaataaaatgctattgaaagtatacatgcttattattagtggacacctggatttaaaacttgatgagcggtattatgcactcatgctgcatgattccatcactattcactacactacctataacctacaagaatgactagcgcatagcgctccgtccgaacgggacattcagatgacacctctgtctccctaaccaaggttaggatatagatgaggataaagacggactcagctagcccaacgaatcaatgtgcatggctctcaaaaaaatccgcatgtagcaattaatggttgctctccacgttgagcgctcctccttgagtttgtaggtcgggacatgcatttgtagtgcttcatcaactatattattaccatccatgtaaaaaaactatattattaccacactattttagtagtactaactagtatcaggtgatacttgctagctattatctgatacctgataggtatcacctgatactggatattttattacctgtttcatattactacttaccattacaaaggaggtatgagagcgatccaccatatgcatacctagtactcatgatgcttctttgagccgtcatataattgctagctatatccaccatatgcttctttgagccaccatatccaccatattcttatcaggtgataattgctagctattttagtagtactaactaggatcaggtgatttctacccggtatcaggtgattactaccaagtatcatgtgatatttatgaggtatcaggtgatattacgagctatcatctgatacctgataggtatcacttgatattgggtaggtaccaggacatataataccttagagcaagtttaataggatagtcaactattggctccaaatcatctatagtcaatttaatagccaattcatacgatagttacctataaacatgtactacataattaatgtctggtcccacctgttatacacacatgtatcttggagtccgtgctgcagttggctacaaatttttagcccgctgctcttatctctcctcttttatcttcttaaaatatgtttatagctggcttatagtatgctattgtacctgctcttagagatattaggacctgataactaaccggcatcatcatcatgctaatattaggatttgatattagcattctcataataagaaaagcacaattcttaaagagatgaaccataaagattaaaaaattaccattagaaagtcccatgtcttctcactttaagtatggacatgtcttctcactttaagtatggacacgttatgttgatttgcttagctttaccatactgtgctgtcaccaactcaggtactggtgtagcctgcctcctcatatcacgtgcccatgagcacggctgcatcacaccttggttagctgcttgtgtccgtgtgtcgctaaaggtatgattatgtacaaaatgagaatgacttatgtttgtatcggaggaagcgatcatacgagacttcataaaactaggatcccatgtagacggtattctgtacaatagtttttctgtatatccatataacaagaaatggtagatctccctttttttgcaagataaaatcaaagaaactgtgtttttctttatatttttgcaaccactgaaccacaaaaatactagtagggcagataggtcgaaatatatcaaaacaaaactccaaggcatgattgttccaccggccccctcttttctgcttgtcatcacccgcctacggcctatacccccacccaccccaaaccccaaaagcccagataaaatcccaaggaaggcgaggagacgccgccatttttcacacccaacaactaatccatccccccctccacctccacgcggtcagcgctcgctcacgcgacacgcaccaacccctctccccgccgccgccgccgccaccaaacgccgcctccgaagaagaagaagaagcctccctcgcaggcagcagggtatttaatacgccgccctgctcgtctcggttcctgggaacttctcttctcctccgatttggcctgtcagtgcgctccgctccgctcgcgcctatccgcggattatcatgggatcgacggcgctcggtggcggggctcctgctcgcctcggcttggcccccaaggtgcgtcacccgctgcgcttccccttctcgctttctttcggctcgttcacgattactgaattggattggattggattgtgcgtctcttattagttggttcagttgtgccaaggaaattgtgtgtgtctctctctatgcttatccagcgagctgtgaacctgacgagttgtacctagctacttctagttagttgacaatcgtagcttaatttgcgtcatcacttcattcgacgaatcggctgttaactcccattatcgccccttttaccactgaataacacagaaaattatactgctagaaatgaatgatagaatcgagaatgtggcgaagctaacaagtgctgttgaaatgtaccactgttgaaatgttctgtaataaggcatcctataaaggggggggggggtcttgctgtatcttgcactgaagttggtcacaagcactgaattttcctttttcctgatgcacaggatggagtctttggatctaatctgaagcaatgcggtggtttcatgctcaaaacaacccctaaggtgaatttttttttcttctttgtcatattttgtgaataagattggttcgttatactcaaaatactaaaagaaatggtcttccctgcaggttggatcctcttcagtccgtgtgagggcatctgttgcttcttcaccgcagaaacagcactctcccaagacatcaggagttaaatcaggggaggaggtgcgcattgcggttctaggtgccagcggttatactggagctgaggttgctacactctttctcctattccggctcaccacttctttgatatggtcccatttcattgaagatttctatcctctttggttcgattgctaatgtgttcaaatacatttgcattggcagattgtcaggcttctagcaaaccatcctcaatttcgtatcaaagtgatgactgcagatagaaaagctggcgaacagtttggatctgtatttcctcacttaataacacaggtaagatctttttctcaatccttggtgcataggtaaatgttttggtggtacatacaattattgtgccataaatttttgctggtcaaaactgttggataatgttgatgctcttttttcatgcaggacctgccaaatttagttgcagtaaaagatgcagatttttcaaatgtggatgcagttttttgttgcttgccacatggtacaacccaggttgttcatcctcgacatgccttatctgaatttccttttgttatctgcttaattgtataaagaaacagttatacattctgtcatatgagtttaagattttagaaattcttttaagccatatctgattgtaattttttaccaggaaattattaaaggtttaccgcaggaactgaagattgttgatctctctgcagtatgctctataatctcatgaattttctacgtaggtatcatttctgattcttgacagtcaatcattcttatgggtgacttaccatgtttgtaggattttcgattgcgtgatatcaatgagtacgctgagtggtatggccattctcatagggcaccagaacttcaggttttcctcgactacttaaacctagaaacctttttaataactaccgctgattatgtaatcgtgctattccttgtatctttaagttcaatctcagcatggattataattatactgacatgctcaatcccctttttgtatgacaattttttggtgttttgatttggacacctgtattcatatcataatttcagttatttattttgtgtcattatgtttgtttatatgaacttatttcctatatggtttatttttctgtttatttagcaagaagctgtgtatggcttgactgaagttcttcgcaatgaaataaggaatgcacggcttgttgcaaatccgggatgttatcccacatctattcaacttcctcttgttcctctaataaaggtgggggactaattatcaatagttcttagttgtgcaaatctctgattctaattgcatcaataacttgtcaactctagaaataggagtcctcagttatgtcatgcagttacattgaatctacaaaaaatcctctaattttggttgcacggaagctatattgatcataattttaagcttgtgagccattcttacatccatagtatctatatttttccttagcagtttgcttaccgtgcaggcaaaactgatcaaagtgagcaacattatcattgatgcaaaatctggggttagtggggcaggtatgcattttgcatgagatactctgactattaagtaattatatatatatatatatatatatatatatatatatatatatatatatatatatgccatcattattagctgatatgctgtgtaacacatgtattttgtaggacgtggagctaaggaagccaatctctacaccgagatagctgaaggcattcatgcttatggaataaaaggccaccggcatggtaattttgtttttttctagattagctgaaatcaacattaattatgtgaccttatactgctctttaacagaattttattctcctgtgataaatgaatatactaataatagagtgtttgcttatatttatcttgttagttacctttaaggtagcctttctttattaacacaatgtgataaaaccatgccagttcctgagattgaacaaggactttcagaggctgctgagtctaaagtcactatcagctttactccanatctgatttgtatggtaagcacatttgcactcttgttgacttagtaattccaggctctgtagttccctctgtgctgtaccaggaatgtatagaagttgctaaatcaaatgactcatctgtatatttaacagaaacgtgggatgcaatctactatgttcgttgaaatggcacctggagtgactgccaatgatttgtatcagcatctcaagtctacatatgaggtttgttgtctgatcatgtgggttaaattaactatatgcatatttgacagaaccactgtattccactgaagtgaattcatcagggtttagattcttttttagagggaatatccatactcttgatatcaaaagtatttatttactttatttattctgcccacatgcattttcagggtgaagaatttgtgaaactgttaaatggtagcagcgttcctcacacacgccatgttgtgggatcaaattactgcttcatgaatgtctttgaggacagaattcctggacgtgccatcatcatatctgttgtaagtgtctttcatctacatgtttctcaagcatttagcaatctaatgtcatagacttcagatgcataatcctatttcttgttttcaacaatgcagatagataatcttgtgaagggagcatcaggtcaggctgttcagaaccttaatctgatgatgggtctgccagagaacactgggctgcaatatcaacccctatttccttgatcctctatgtctgtgttccgtatgttctttgtcgggatgatactttggagttcagctacccatttccctctgtttactgttgagacaaggtgctcaacatcagagtgtaaccaagacaaattttctcaaagagtagcttggtttgtgctgttgtagtttttatagagataaatgacaatttagtagtttaatgagaatattagctcggtggatttgggcattgaaatcctacgggtatatcctgtactgctttgtggttatgaaatcaaataaaagtgtaaacctcagtcaagaggcatcaatcaccccgccttcattggatgtagatagggatatatattcatatttttactcgatggaatttgttttgcttgctaatgctttatgatgattgaagcattccttagtttaaatgtttctgagaagtgctcacatcctaaaccttgctgcaataattcaaccaacaagttatagtgaattgtattttctaggctataaaaataccattacctttgtttgggtcagctttgaatttctcttgttaggtctcaatttttgaaatgctttattaaagccctaatgatgtaaatgggcccttgcggtaattttctcacctgactccaaatgacaaaactagcattttgaactgggttactatgagtttcagtttaggtatttgtttcccatttcatatttactactatttttttattttgtgaacgttgcacatctcagcaaaactttctttctggttatactgatagtacataacctacctctgagttctgcccaaaatatcaatgtggtacatatattgccaggaggctgtaataagcagccaaagttgcacatggtgctacggttggtaagcgctagatatcttagaaacaattccagaaatctgatctggcaagcatgagcataatttgtggtccttaggtagcattcctcaaggaggtcctcacttgtatttctttgttggagaccttgttattggatatagttaggggggtgtatcttgcagatttttccagttaaaatcaattgttgatactttctttctggttatactaatggaagatgccatgtaccatttgacttgaacttgctagatgctaggaaatgcttttgcaacaatgtcagcctttgaccttcagttgtttatgtattatctctgacttctagttcatttctagttcttaaatatttcttttgtttagtttgaccacttgcataaatttaaagtaagatatatgttcgtctgtttctattcagctaatctgggggtatttttggtagtgctatactgtaggtgggccaattgagcatatggatggaaaatgccatttaactgttgatgcatcctactttttcacatgaatacatgattgtattacctttatgataaaaaaggctgattcacctgctgttatgttctttcattttcatgataatgacataaatgtaggcatttgggtattgtgttttctgcagcaggagatgctactggatttttttttcatagctcacgaatcatgatgggagtttgggaggcatgctgctcttacttttattttttatttaagtttgttatcgttttagcttaccctatttgctgcagtagtaagtttcctgtattgttgtcgcaaatgtgtaattgcaaacttgttaaatcagtagtagcaatttgcatgttcagagtaccttgttcaccatttcatgttattgttttgtatatatggttacacaagttagtaatgaaaactttccacatatcaaaatcttaaatgcttgtctaactagttgatgagaagcctggcaatggaaataaaattcagaaaaaagtaaaagtatgtttgtgccataaatattcatgctatagttttgaaatatgtttgatgagaaaaattagttactgaccattctattatattgacatttctgttgaagtcaacctataatttttctgatattttctgatatcaaatcaggcttgcaattcatt

SEQ ID NO: 19979 - DNA, 13504 bp, Oryza sativa
ttttcgcatatttgtgtatgatctatgattctaaatttttttttagataatatgtgattctacatttatttctatgtttattagaaatataagatcggtattaggtattccgttattcatgctatgcaatttggctgcatatcagcatggcattggaagtttccgagttcatacttcatacagctaaaaatcagaggtacaagtaatccacacctttggtcccttgaattcatttttctttgctggcatctgagcttcattttttattcccctcattgatcctctgtgtggaacaaagaggcaagaggaataaaaactcttttgaaggcgaaggggcattgcagaaatacagctcatcccttctgctacttgtaggatctgagtcatgtgcagctcctattgttgaggagatcagaaccggatcatcggataattcagattttgtcgggttactgcaaggcagagtccttttgatttcacatgctcagtgattttcaagatatacaactaccataatctgaatattatttttctctcctgcaggtctctggtaatgtttgcctggaactattacttggataaccatcagacagatgtcatattgtctgacaattacatctagcaacagactagcccagtctttgctgtgtccagatctatccagcaaacagtttaatttactcccaaagttatttcttctttaaacttagttcagaaaaaggtatatggatcactggaatgcctgtattttcagtgggctatcttaccatgagacaatgatgaaaactgtgtgcatgtgaagacaaagctcgagatctgcggaggcagtgtccaatcctttttgagctctgaagaatgattagattcccctccatgttcgtgcaagcctctcctggtagctccttgagtttgtttattggacgacttcattgcagcaacattctctacaatacaatctcataacatctgatcctgcattaattgctaagataagcccatgtttgttcctgttttgaacataatgcagtatatacttgttttttcattgtcctttgatgcatctaaactggggatgattttctctccaatcattgaaacatgtccttgtgacacttgcctcttgagctctgattggcttgacctcttaactgtgtctgatcttggggcaagtcactatcctgtctaccaacttgtaacagctagcagttgaaatttttttctaatcctcataatgtgcacaggggttgctatcacccccagttcatctccagccgtgggcatctatttattttaagcatgatttaccatttcttaatcctgcaagttgctgtgcttccattcaaccttttgtcttttcatcaggtataaatgatcctgccataacctgcatctcttcttcaccgagcacaagtgtatcaaactatcaaacacagcacggtcctcacaccacctctaacatctctcacatccaaaacttgtatcagaaatggagtccggaggggtgatcgcggaggcggggtggagctcgctcgacatgtcgtcgcaggccgaggagtcggagatgatggcgcagctgcttggaacctgcttcccctccaatggcgaggatgatcatcaccaagagcttccttggtcggttgacacccccagtgcctactacctccattgcaatggaggtagctcaagtgcatacagctctaccactagcagcaacagtgctagtggtagcttcactctcattgcaccaagatctgagtatgaggggtactatgtgagtgactctaatgaggcggccctcgggatcagcatccaggagcaaggtgcagctcagttcatggatgccattctcaaccggaacggcgatccgggcttcgatgatctcgctgactcgagcgttaatctgctggattccatcggcgcttctaacaagagaaagattcaggagcaaggcaggctagatgaccaaacgaaagtgagttaacctgatgattttttatcatttttgcgataacagtgtattaaggctgctgtttaaattgctggtgtgcagaatttgcatgctgattttgattgaaatggatataatgcagagtaggaaatctgcgaagaaggctggctcgaagcggggaaagaaggcggcgcaatgtgaaggtgaagatggcagcattgctgtcaccaacaggcaaagcttgagctgctgcacctctgaaaatgattcgattggttctcaagaatctcctgttgctgctaagtcgaatggcaaggctcaatctggccatcggtcagcaaccgatccccagagcctctatgcaagggtactagagatgatcttctgaattcactgtctaaaaacgttacagattggcaatctcgctaatgctcttcgtttattggatgcagaaaagaagagagaggatcaatgagaggctcaagattctgcagaaccttgtaccaaatggaaccaaagtaagattctgagaaaaatatcatcagtatttagtactaactgtagatcgttctttttttttaaaaaaagtagtaactgtagatcgtaaaagaatgccgacaactcaaacagtatggatctcattctcctttcaggtagatatcagcactatgcttgaagaggcaatgcattacgtgaagttcttgcagcttcaaatcaaggtgaggcttttcgcagcccatatgacaacttcagattattccctctgctcttgtcaaaattgctcagcaagttgcatttttttttctggtgaaaaaaaaaaactcaagttgttggttttcttgcagctcctcagctctgatgaaatgtggatgtacgcaccgattgcttacaacgggatgaacatcgggatcgatttgaacctctctcagcattgataagaaaacacttctaacagtgtcgagttacagaagaaagcagggatcttacttacaagttacaacacaatttggttaaatcagttcgaagagttcattgatcgttactacttattactaacatatgcaaccggtttctggtcaataaactgtgctgcacaacataatcccaaaagtaaataaagccataaaaggcccgatgcaatgttcttcagaagctgtttttttttaactcgtcagcagttaaccgaaggaatggattgtatggtggccagaaggatattatatatatttacaggaaatcacatagatactggaatactggaagaggctctgtaacttgtcaagacaagagagggcaactttgttctttttcttcttgagaagcaactccaaggaggaatttctctttcattttccttttttcaaatttgctctaggagcaaatttttgtctatagcagtgtatgcgaagtgctagtaccatataatataatgtttttaccttgagcttgcatataatgcgtcgcatgatcgtgaactgtcgttaaatatacattatagttattctaataatgcaatttatttttgtatagtggtttcttttctatgatcccatcttctcatgccactatatttatttgtttgaatcgtaattttaatcatgaagaagcgtggcatgcgttgcacattttctcctcgtcaatggatgcttgtatattgcctccattacctgatcattattgtcccaacaaatgtttaatccagctgttggtttaaattatttattcgatcaaatctaccggatttcctaccctgttctgggtaggcataaaaaaagtactcaattgtttgaaatactgctacaaaaaaaatcaaaatatcatcaacataaagctccactacttgcctactacataagatgcatccatcggcacattatcgacattgacatagttaaacttatagagttaagggaaacactagtcagtcataaacagtctcaactattttcataatcatttttttactcaaaaagttaaagctggaaatcaaaatggcataaaaaaaatcagaaaaccaaaaacagaaatatatgaatgtaaacatatcggtattgataaaaactagaaataaatatcggaaacatttaattataaaatctcacatttaactttacataactatatattatatattatgacaaaataaattcaagattacactatgtaaattataatttgtctcccctttaacctagtcctcaagttagggataagttgaggagttaataagcctctaaactatgaatcaaataaaaaatggaccataaatattgacatatttagatatttggtaattactataatataaaaaatagtcattactgtaaaaatacgataaaatttgaaaatggtcggaccacaacaaaattgtttccgtctatgtttccatatttttttaacatttctaattttgtttttatcagtacccatttttacattgcttgaccggtaaaaatgggaaatgagtgtcggttggttgggaatttccatgactattttcacctataattataagttatggaacaataagttatggactttgggtgttcaaatcccggtgtttgcaattacgcacatgcacaatagaaaatattgaggccaggagatttaccagttaccacggatttgtcttttcgagagtaataatcgagtgcagtcacgtgtgtataatggtgtgtgcacttctcagttttcgatgtaataaaagaatcacaaaatggagaaaataacacttttagagctcatttgaaatcatgaattagaaaacacactaataggaaaataaaaacatgaaagataaattgtcttgtattgttgaattcctacatgaacagagttcacatgaatttacaaagcatgtttttttttaatatcatacgaaaaacataggaactctatgactgaaacaaacaaatcatacggtttcagatgaccatatatgtaaccatgtatgcaggggcggatccaggaacaaaaaattgaggggcttaattacacagtttcttcaatctccaaccatttagggacatttagtttatcattcatggtgaaaaaaatcgaaggggatgctccgggaggtatccatgggttttgtgggtgtaggggtcccctgcacccacgttggatccgcccctgcatgtatggatttttttgcccatagagcatattttcagtttttcacctgtatttgctgatgtggcaaatgtcggggcccactgtaactgtaacgttcacctgtctgtcatgggctggtttcacgcatggtagtgggctaccggccagcccattttgaggtggtttggttacgccaaaactttaaccaataagttcagtttaggttcgataacttaacaacgagttcgattttcgttcttgaactgaaataccaaaaattacggatccctcaactattaaaactggtacgttaaaaaccggtacaacgtagttcatatgacaatatagcgggtgttttgtcagacatggcaaatttacccgagtcaacaacactgagttagcataagccccacatgttagggccttttcacctatctctcttttcctccccctgttcccatctcaccaagcgacgagtggtgaggagaaggccggtggtgggcggtgaggaggccaatggcaggtggtgaggaggatgatgaccgatggcctgttcccatctcaccatgcagcaagcggtgaggaggacaacagggatggcgggtggtgaggacgatggccggccagcaggacgccgcctctagaggtgggtggtaatgacgctctacccacacgctccaactcctgtcccaagtgccaccactgcccgaggtctagacgggatgacgagatcacgggaggtggggcggctgcgattttatccgagatctgcgtgaaatcgggatgaaacgttgcggcatcatcgtcgtcctcctcatctctgtatctgcggatccagatggcccgacgacggcgcgcggctacagcggtcaggggaagaggaaggggccaccacgagcctctctcgccggccgccacccttctccctactggctaccgccacacacctctctcgccgtctctcccaccggcctctccgcattcaccatgtcttccgccaccgagcttctccccgtcggccgctgtgcacctctcacgccagaacgcgccattagttgtcggctgccaaccctggaggtggaggcctggagagagatagagatgggaagagaggggagagagtgaacttaattgacatgtgggcccacgctgacccagtgctgttgactcaggtcaatttgccacgtcggacaaaacaacccgctatactgttatgggacctacattataccagggatccgttgttatatctggtatttcggttcaaggatgaaattgaactcgctgtcagttaagggaactaaaatgaacttattccaaactataaactgtagttatccttcagtaataccgaaactgcagcaaactgctacttacaaagctgcatatgtagctcaaacttgtgaagcatatcctttactgatctgatcgactacagtattgactaattaacatccgtgcaaaatcttattgatttggactacttaattagctagctattagagcaagtatagcagtaggctataagccggctaaatgctaagttgtaggagagaagagaggagagagaggagaagcgggctgtaaacttacagccggcttgaacataagaaccaagaaactctgtgagagagacaagtgggccctgtattaattgtaaagagctaactattatatgagtaggctgaaaaaaagctacaaagaaccttatagctaacaggtcggctatattattagccttgctcttagacgaggaagataattagctagctaagtctaatcacgcagcgagtacttaataaacaagtgctgttatgctgtccaattcgggtatccacttcttttaacccagcagattaggcactggtcccttcacttccactgatactccttcttctaattaagtaaacttccagatctatcagctactaccttcttgtttttgtttagtgttaactatcttatcagcataggtaatttactaccttatcatgcatgcatgcatgcagtagcagcagcactgacccattattcagtttggttaaatttctctgaagccatgtatagatagacagtagtgcacaggtcgttttctggcgcccattttcttcgttcggttgccccttctagctcgctaagtgttgctgcttgcggtcatatgtatataggagtgtaaattgcaatgtgtaattagttttgtgttgcgaactgatctcacctacagagcccagccccacactgtcttgtactcttgtggatgagagatactcatactctccgtattcagaagagaacacagttacacagaagatctatatatatttatgtagggaagagaaggcaataataaattaagctagtgatcatgatcagctagctgatctcattctagttaattaagctgagtatattggttaattaacttaattgcatgtgtgcccatcttgatacaagcacctaatagcagcagttgcatgcatggttacttaatttaaccccatgcattgcctgacggtgaccctaaacacaccccattacattgttgattgtgtaattgtagatcacatgacataactgtaggatcgcagtaaaaactaaactgaccagaggggtttgtgctctttgttttattgaatgccgctaaatgttagaccacctgcaaaggggaattgaccaaaaacattttgaaaaacccaatcgtttcactttacttttccccttgtccctcattagcccaagacactcccacagaccagaaagcaatttatatatgcaaatccagagcatctctaattatacacaagcaaacactgccaaaggacatctaaagagaatatgattagttgattcaattttcttacaaaacttgcagaattcatctccccctccactttctcttaactaattgttctcttaactaattgttctacacatggtaatctccccctgtctgctagatataaaaaatatttaatttgtaggatcgtaaaaggtcttccccatagtcaatgaggtgaggggctcccctacttatgtattaggtctctttcccttttacaaccaatgtgagactattcatcaatctccccttcacacattggtgtccctcagccattcactcccccttcagtccctcgggtatacttccacggcgcatcaacactatgtcctttgagccagagatgttgaactagctagctctgataccaattgtagtattgtaaaaggtcttttctacccaaaagctagccaatgtgatgaggggctcccctatttatatattaggtttattgcccttccacagctaatatgggactatttaacatgattttcagaggcaatttacttttccaaatctttcacctttctgcatctatgacccctctaaaagtcaggattatatacactaatttagtggtgaaactcttcttcttgttatgatgccaaaccacttgatccttcccccccccccccaaccatctaactgataactgttgatcatcattcttaagacaataagcttatcctgtctctgctgattcagatttcttctaaaatccagcttccattcacccttcacaaaaatatcactcacagaagcctcctgatggtaacttatctcatataaatcaggaaatttaacttttagagacaccttgtcacacgatacatccttccaaaaatacacagattccccattgcgcacatctttctctacaagcttttccaaccacttctgcaatgatgtaaccccttctaaaattgagatccaccgtcagcagaacgaccaaaagaactgccattgttcacatattttttcctaagaacctgaaaacacatatctggagccctattttccaactttatcatccacttactgacaagacaaatgttcatcaccctagtatccagcaagtccaacccaccataatcttttggcctacacagaaatgtaggaattaaaatcataggattgttttctatatgcatcattggtttcatagaaatagatctaaaaaatccataaggattatagtcttattaccttatttcataggattcttagtatggggtaagatctcttagaaaaatttataatgattggaatacatgtgacgtcctaatccaaagcatttacctttctattcctatgatttagaaatcctttgaactgaataagcacatggtgaaattagaatcccatctcttgtactatatggtaggggggaaaaacaccaatcatcatcttgccctcaagactcttcacgatcaatcctgtccagaaagtaaaaccgggatgacaaacatatacttggatttcactgtcaattcagcaatgctctgatggaacccgaatgcatcctttggattatattccctgtcaagctgccaaccctaccaccagctcccctcgatatttctcatctagtagttgcttacaaaacttttcctgtcaaaaagatggctgatttgattaattacttggctgttctgaaacttggctattaggatcgactgatccgacaagctagcaatataaaaattcagtgagaaaacattgcagtcagactaggcactataaaggcgccaccttggcttgctccagcctcgcaagcaaaggctcccactgaccccatgccactcgatccgtctctacaaagattacgttattagcttgaaggtttatctcacagagactatctctaggctgagttattttcttcactttcccaactcacctctctcgtattttgtgtgtacgattttcaaaatactaaatggtacattttttgtaaaaaatttctatgcaaaagttgctttaaaaatcctattaattaatttttcaagttatttttagctgatacttaattaattatatattagtaaaccaccctatttttggtgtggggaggagttccaaactcctgaacacaacctcgtaggagaaggagaatagggtacaccgaaactctttaatactacttcattctttttttcttcttattttagccatcatatcagtagtaccctttcctcatttcttcttttcttccttgttttctctctgaatttaatgtattttaatcttttgcttttgcttaatatatcactgactaactaaaactatagtctttaaaaactatagtttttaagggattgacggagtatatgtgcagctaattattgagctagctcgacgatgacacaccgacagacacaacatatataggcttcgtttattcagcgttttgttggaagattgggtatttgatatatacaggagtaggagtcaaaagtaatagcccgggcaatggggaaatatttgacaattctcattgacggtagatggtccacttatatgcatagagtttttgaaatacacatatacaggtctttatatatgctaaattttctcaaataagtattttgcttttgtccacaaacgaaacatgaaatcgggtagttgattcatggttgactgtggtcagtattgagttcatccgtctttggttgatttcatatagtcacttaaaactatggagccgtccactgttgatcttattatacctcttaatagaactgttccaatttcatttctatgtctaaaccagctacggtgatttttagtgacctagtatctaggcaaattttgctatagaaaatcgtgactttgcggttttagctataggacaccgcgtaaaatgacttttgggtgaagacattctcaaaagttagatatttgctggtggatactggacccattaaataataatttttggttgaaggggagagataaattgtgtgaaaggtctaaaatgtccttggacccacatgtcatatctccatctctcttctctctctatcccctccttccacacaggcacaaaaccatggcgacaggcttcggggagcaagaggagggttgcgacgatggcgacaacgagggagagagcggcggccaacggcctaggccttgccaggccagatcggcatcaccgccgtggagccctcatctcgccaagatcgccgagccatcggactccttcgcgtcagcgtcgtcgtcgtcttcctacacctcctcctccttgtcgtcctccgccaagagcactcgccggcggatatcgctgcgtgacctcctcctcagcggcacggcgaacagcaactccgccatcgctgcgggcgccgccgccgccgccgagaggtcatcgggcttctggcacctgtccttttggccatcgtcgcgatccaagaagacaacaatgctagcgctgccctactcatgcccgttcccgccgccgctgtagcctgcgcggcgatccacctcgccggagaggtcgtcggtgccgaccatggctgtgttcctgtgtggaagaaggggataaagagagggagaaatgagagatctaacatgtgggcctaagggcatttcagaactttcacacgatatttgtctcctcttcaatcgaaaattattattttattgtgtctagtgtctaccagcaaatattcaacttttgataatgtcttgccctaaaagtcactttgtgcagtgtcgtacagctaaaaccgcaaagtcataatatcctgtagcaaaatttgtctagtatctatatatgtggcgtctatatgaagcaccatgtcagcttcttttcctaggtataggtacgtggggttcatttgtacttaagatgaagttatggcatggaaaacaaaaagatcattagcgcattagttttaattattttaaacttgaaaaattaatttatttgatacttttaagcaacttctatataaaaaaaattcgcatgaaatgcactatttagtactttgaaaaacgtcctaaagaaaatcgagataaaatataatctatacttaattggaaaagaacaggacttactcactttgtccgaaataaaaatatcactcatcctaagagaactttaggagagaagagaaaaaattgcagtatccatcattaatagaaatatagcatcgatcagttggtatctcgataagagtatcgaagggataaaatctctttgattcataccaagacacaatctctatgaccaagtcatatatacccattttcatcaccaccttcctaggtagtcgcaccgctctctattttccaactaaggcgttgtttggtttagagggtatcgaagaggattggaggggattgagggagaataactccacctcaaaatagatgtgaaataaatctcctctaatctctccctcacagggattaaccgaacaaggtctaatggatcctcacaaaaatatggtgtctcctcttttcacgtgatatgatatagctcggtataaatttgcaggcctcttttaatttcctttctcattgcttcataatgctctaactatttatctttctctcgtctttaaaaagtgttacctgtccatcaggaaaaacaggttatatatgatctgcataatttttctaaggtactccctccattttttaatagatgacgccgttgaatttttctcacatgtttgacaatttgtcttattcaaaaaatttatgcaaatgtataagatataaatcatacttaaagtactatgagtgataaaataactcataacaaaataaattataattacataaattttttgaataagacgaatggtcaaatatgtgagaaaaagtcaacgacgttatctattaaaaaatggaggtagtagaaaggtagaatgccgagaaaattggacaaataaatgttgtttgttttggtttctagctaggctttagtcgatgtgcccccatggaccggaaactacattttagttacttaagtcttgcttcatgaccgggttacacgatcgtaattaaatatatactctttgtttagtagtagtacctacttgtggatacgtggctgcctactaacttgaaataattagggcctaaatgagagctttaatatattttttaagaaaatacttccatcatcccaaaatataatactactatcagtttgtggtaagtcaaacatctagcgaagggagcacgaagtattatatatatatatatatatatatatataactcgatcacatatccgcttatcactactagagaaaccatctttgccaagttggccaaaaaccacattagtcccgatttaacaaaaaccgggactaaaaatgatcttttaccccggttgaaaagaccaacgtcattttatgatctttagtcccgggccccttgcggaccaccgccgctaccgcccccctcgcgggccgccgctgccctcaccttgctttctcccgctgctaagttaaaagaagagggtaagagagaggaaatatgagaggataagaaaggaaaaagagaggaaagggaggagaaggaagttaaaatgagaaggagaggataagggtgagggattatatattatgtattgattgttagtcccag

SEQ ID NO: 19980 - DNA, 15277 bp, Oryza sativa
agcagcgggagaaagcaaggcgggagcggcggcggcccgcgaggggagcggcacggcagcggcggtggcctgcgccagtgcggaggctgaggccggcgcaagagagagggccggcggtgccagctctgtgcgcaggtggttgagcgggagggcagtggccgcgcggagttttttatcagtgatgttttgttgatttgtgatgtttagatttgtaaatttgtgatgtgaatggtaaatttgtgatgttaatctgagtatgttcatttgatctataaatttgttgaagtttttgtaaatgtggatgtttgtttttgagtttggaatgaaatcaatatgcaaacagcaaaaaacaatgaaaaaaaagaaaaaccttttgtcccatttagtgttatcaatagggactaaagatgatttttagtcccgtctatttcaactgggactaaagatcgctatctttagtttcggattcgtagccccggtttactacccgggactataagaggttgtaaaccgggggttagagagggtttgttcagcagtgtgtaattagaagtacgggtttaagaacatgtggttgttgggggagaatgtagtatgaaccataaccatttgattaccgagaaaatttgatctttttttcagttcattgagaccaaattatcttctatgccatccaaaagattatgaattctaaaaatggacagagggcggagggggccgctgtcatcgcattcgcccgccaccgctgctggagcccgcgcccaccgccgtcacccaagccctcacccggccgtcaccgctagagcccgcgcccgccatcgctgtcggaagggaggagagagaggagagaagatgggcagatcgaggaggtggttaaggaatcgtatgtgaaaatgtaagtcgatttttacagacgtgaccagcagttatagtttgtctatagaggtactcgtacaaaaaaaaattatttttttaagtagtatatgttaaacaacctaaaataactcacgttaatggacgtagggagtagctgattacctaatttatcctacgagtgaactagaaggtccaacgtctatagatgctagcccccctgtacgcacaaaccgtgtgatctgagccgtagcctacggctgtgttctaactttttcgttatataaactatttagacacatgcattgagcattaaatgtggacgaaaaaacaaattatacagtttacatgtaaattgcgagacggatcttttgagcctaattacgctatgatttgacaatgtggtgctacagtaaacatttgctaatgacggattaattaggcttaatatattcgtcttgcagtttacaggcggaatctgtaatttgttttgttattagtctacatttaatactttaaatgtgtgtccgtatacgtcaaaaaaaatttcaccaaaaacaactaaacacggcctacccataggctatagctaagccttcaatgttggaaacaaggggacggacggaatttccctctcttgcaccatggtgatgaacaaccaaaagccttgatctgaattgaaagccgtgtttccatgcacatatgaaaaaaaaaaactaacttgatttgatacatgcacgcgtattacgcgtactctcctttgattctttgacccatatctaactctgcttgcaacctatcaatgcaatgtgctgctgctgctgctgcaagtgttcttgccttgccacttacgtggaagaaggcgactgaattccgggaggtgatctgtgtctcctgcacacgtacaggagatttattgggcggacaggagagaattcagggctcttctttttgcatttttgcaagcctttcttcaatgcgttttccggtcgtcgtcggttgcagttgcgtcgacatgacatgaccactttagtcttagatatattttggccaaaaaaaaaaatttcttcctccctgacgaaaaaaatgggtgacagtcgtttttgttgctcacagactcaactgtttgggaccttcaaattctgagcaacattcgcgtaggaatctgaagctgaaaattctgacttacagatcatttttttcaagtttcacgactataagttttatgattatatttttttttaaaaaaacctagatgaaaagctgacatgttttaaaaagttcggactctttaagaaagtgcagctgataggaactcttttaatactatcttcggtctaaaaatcttaagacgttgtaatactatcttcggtctaaaaatcttaagacgttgaatctggacaggggttcagttatggtccgttgtccaaagatgaatcaaattttatcgtaactactcaatattttgtgacaatgaaagtaggttctaatctttcttcacgtcagtttcattggaggctgaagttattgaaaccgtctgcaatatttcattagttttttcccacccttttttcctgccctggtttaactgctcgattcggaggccaaatactggagtactgcgtactgtttgtgcaacagagcagagctacactagtgttgctttactcgaggacaagaaaaggcagcaggccagcagccagctactactagcagcaacctgttgttgcacaggatattttagaacaagctgtttctagcgtcccaaaattcggatatgtctgaaatttctcatggagaaggagaaggagagagatgggttaatagatcgattagattgcctttcattaatggtcccggttaatgacagtacgatatggattgtaggggtgttttcggtatttcatcattacgtataacccactatactctagaaatagcttatattttacaagagtaggggtgtttttggcatttcatcattacgtataacccttgatgctctagaagtagcttacaatttataagaaattcaaacactacaaatagctatattttttattttaagacagcgagagtaaatgtttcattgtaattcctgcaaaagaaaaaagaaatattgctctcaggtagcattactactattacatggatgacaattaaaagaaatcaataatgaaaatcaatcgaacatatactccctcccttcaaatataagcatatttagaatttaaatttatacataatataactatttatggaacattagctttaatgtacgagaatccaagcatttttaaccaatcaggtgcttagagagatcgaaacaatttaaaattttaactaattaataacgtgactaaaagaaaatcgtttctgttattttaacctttactaagcaatctagaaatgcttatatatctttctacagaagaaatgagaaagagagttagttgattaagtgagcatgggtcagtcaaatgtctactcaatagctttcgatgtagaagtttaaattaaaaaaccccaaaattgtcaccatgcatctcagaatcaatctcatctcatctcatctcatctcacttggcttaggcattgtttagttcctatttttttttcaaacacatcacatcgaatctttggataataaaaaaagtaattgtacagtttgcatggaaatcgcgagacgaatcttttgagtctaaatagtccatgattagccataagtactaagtaacccacatgtgctaaaaggcgagttatgaaattagttttttttattcgtgtccaaaaacctcttccgacatccagttaaacgtccgatatgacatctaaaaattttattttcacgaactaaacactctcttaaatttctttctccccaataggtaggtatagctagctggacaaaacaagggtattcttcaggcgcgaatccccgcttgtccgtttgtctgaaactctgaatcaatcagtgcgcatacatgcatacggacaaccctaataagcagggtaatgtagctacaaacacaagtcaagaaagagatcacaactgtggtccattccaacatgcaactgtcatatatatagtaattcagcggtccaaaaatacgagggattatattttggatagatgtgacctatcttattattacgaatatgaagattcataatatcatatgtatcacatatatctaaaatcttttatattttaggatggaggaaatagcgtgctgtcacagtagaagatttgagcaagctagctagcctccatttctattcaattccaagtgccacatgctgtgcattgttcgtgcagataactgtgtgcacattatggtggtgtggtcactgggcaaccattattttcagtgtatgtgtatccatcggtttgtaattgcatatgcggtgtattaggaatggtactgtgtttctgaatttttctttccctggaccctggaacataaattattctttaagttgtcgccatgctcattattatgagtttttttatttttaaaacctttttatcaatatgttttaaaaacaaaccctaaaaaatattcaataattgaaaaagaaaaccactaaaaaaatacacaacatatgaaaccaggaatttaggtaagagcatctccaacagcatatctatcttactctccaagttaaattttagtaattttggatgaaaaacacactccaacatacttgccaaccggatggccaagccatctggttcgccaaactcctccacgcgctagccaaagttgccttgccaatcgtgggccccatgcgtgggcccacgaatttttcctctctctctcctctcccgtactgtctccttcccagatcgagcgccgtcgacgccgtccatcagctgtgctaccttgttcatcaagccgtcgcccgccgccgtccccccgctgtggccacgagctgctatgacaccagccgctgcgccgtcttccgttgtggcagccaccatcgtcccgctctgctccggccgtcttccgcggttgcacgagccgccgtcctcatccttcccggggacaggagggagggcgcgatggccggggtgcggggagcgagagaggtcggcgaggaacggatccacgcctgtcgtcgtcggcatggccatcgcctcgcgcgcccgtcaccgttcgccgtccgagcgttgcctcgcctcacctgtccgtcgtcatctaccgtcaccttacacacacatgaatccgctgtcgccgcggaggtagagggcgctgggaggagctcgtggcagtagtagaggaagaagggagcagtatgggtggggagaaaaaggggagaaagaggaagaagaaggtaatagaggctaacatacgggtcccgctgccatagatttagaatagagagtgtagatagagaggttgttggagtgatcaatgagtttgacttgccaaatcagatggatagttggctatataggtgtttggagagtcaaatttaagtagtctgttggagatgctctagccagcttgggtgttggacgaaacttaaggaagacgctagctcaaaatatatatgaattgtttttgtttgaagactagtttttgcctactaaactgttggcattttaaatagttcttttacaagggtttgctattgaaagttgccaataacatacatatttattaaaaaaaattgatagtggtaaaagttgtcaaggtttcgacaccatttctgataaattggcgggagctatacttttcaatatataaggctcgcaatatctgagtgttctacttggattgtaaccaccagcttaatttctattatcaagaaaaagatacccgagtactttgctttggatgtatgaattttacaggatcatcacaataaacatatcaattcctgtgaaattcctcaaaaatcctactttcgaaatgatgtcctgtaggctatgcgttatgatgtgtttagatgtttcagagttgtgccctgaaaaatggagtcgatcggttcacttgaggattcacgtggacgcttgatgcgtgatttcttgctgttttttttatccaactgtttgtgctgatgttttggtagcacatgtgtttacagtaatggtgattaatttctactgaaagtgaactgtacataaatagtagcaattcaataatgtaatcgcactgcgttatctgaaaaagaaaatagaacggcatctagtagatgctagaactgcaaatcacatgtccttcaggcttcaggatgagtagtgacttctttttttttttttgttgagatcgtagtagtattaattctaccactatagatactcgacagtaattattttgaccaaccagctgccagtgaatttggacaggtcattatttatgtcatataacggcactgatctctgcgaccccatgaaaatacatcagcaaccatttgatactataataacttgtgataataactaagaaacatcaattctttctgatgttaacttatacatttcacatcaaaaccactattagcttgatatgtgcatccatctgacatgttccgtattttcgcggcgaatgaacttgtgagatgggtaatatatcatgcacccgtacgtttgttcctactgaaaaaagtggatgaaaatttgatactcatggcacgctttttaaactggtaaactgtacatttcgtacaaaaacttttgatatgaaagttgctctaaaatatcagataaatctatttttcaaatttacaataattaaaactcaattaatcatacgttaataccactttttttcgtaaaacatttaattattatttcatcttcatgctcgaattggtgcaacaattgttcatcacccatcctttgcaaattgcagaacctatcctttggtggcagagtagcccttttccatgatcattccgatgccaaccaagtgtggatatgaggtggccatatataaggcatgcatgggagagaattttaggtcagagtcctcaagatgccgtgcaacatcagatcatgagattataatcaatcgaccgtatgctttacttacttaaaaaaatgttactgtacaaaactcttaggaataaagatctcaacagttcaatttcaatgggtaattatagaaaatcaaaagtgcaaccatagtacgcgacattaaacatactcagtgaaaagtaaaatatgtactatatatataatatgtactatatataaaagtaaagtagaatatgcaagagaactacgtatcattacattaaaaataataagatttaaatatttacgtgaccccactaactaccgtggtgacagaaaaggataggaaaaaaccatccaaatcctccaggaccaaagacactgagataacaaaaagaactctaatcagtacatcacgaaaacccttcctccagctaagccacgaaaatccttcctccaaaatcaatacatcattttgtataactaccctagagcccgtgcattataacggaaaacaaattgagtttctagcttattgaattaattaattagtctaagtaattgtatgattttttttattgaataagtaggtgattttgaaatttggggaaaatgaataataaaatagtggaggatttgttgaaaggtggtctaatagtatagattgtaaggcctagctgttagtgatagaggtggtgtggaaataaacaccaccactacttatattttaagtagtatatagatcaatatatcaatatttccttttccatgaaatcaatatattttactttatattgaaaacactatagggtttgaccatgttttgcaccactaaacacgtcattacatcagtttgagtatcttacaactttttacactatactaaattaaacctatctcatcacaagttcataaaccactaattaatgcaatttactttctaaattaaatcccccaaattgcgtgcctctaatcgaacaaacctaaccatgatctgatccaatattattagttcaatccagtttgccaagatgacacagctagcgaacacacaccaactctacaatatgtgttttgagatttacaatgttcagatgctctgcaatatttttaggccagatgccagtgttgtctgcattatgtcccaaagtttccttttcttctactcacctttcatcacttcttttctactactgctattagattttttttcccctccaaatccctgggtcccacaacggatgacacgttagtcaagtggcatttgtctgaagctaaggtacacttgcacaagaaatgcagccattatttcttggccacattaagaggacttaattagatcgtcgtttaagtttaacctcggcgtcatggacgaaatcaaggaaatgcgtaaggacatgaaatgctacaaaagaggtggttgggaataccctctcaaaggttgcaacaacaagcccccatttttatataaagcctgcaagcctgtgcctgcctgcctgcctgctcttgttcttgatagatggggcattggatcacgttctgtttagcattagaattaatagccttgaccagaccagagttgggttaattttttttttctgtcatggtgatgtaatgtgtgtgtgtgtgtgtgtgtgtgtgtatatgcctcagctcagctggatgaagattaaattggacaagaatttgttttgtgtcattttttttttggcatccattgatttatgaatgtgtttcagtcttgacaccttggcaaattcgacaagttttaggtgaaaattgacgtgcacagtactataagcatatagttgcaggcttgcggcagatttttgtgtggctaagcatttctttccagtttgatggccgaaaaattcagttaggaaatacaaactgaatttttgatagacacgtcatggatactgtttgtgaattggacccgaccaaattctggttccgcacaagtggtcaagcctagcttttagatcaaagaatttgaagtacaagatttcgtacagtagaaagtacaccactactctttgagattcataaatagtatttgacatttcgggcaggattcgatcaaattttcaaattttctattaaaataagtttataaaatctaataagttcatgatgttataattgtacttttcaagaaaaatatatacatatatcattttgttttgtttttaaactaagaattttgagaagtaccgatgattgaaaaattaaaagcctgactgaatcttgccccaaatatgtttttttttaccagagagagtataccaccttattcaagaaatcaatctgatacctttcaagtgctaaggtactaggaggcgccataatatgctaacagtaaaatgtgtgacaactcccgatattgaagctcctccatttcatgataatccatataattctctagtttctttcggtatggaccatcaaaaagataacagtgaccttgcttgttataatgacagtatgaaattttgctaagcttgagcaacacattttgacgaagtgagatgctcaaggtcgctcacaaggacaaaacaaaaaatagatacactacctctgtctcataagtgtagttgtgattttctgtgaccaacatttgaccatccattttatttaaaaaaattatatatttttttaaaaaatagttaccataaagtactatttatgttttatcatctaataacaataaaaatactaatcgtcaatatttttcaaataaaacggacgatcaaacgttggacataaaaaaccacatctacatttatattgggacagagacagtatttttttaatatatatgtatatgttttggataactaaagaagagtagtggagtgagagtgtgagacactcacttaaatagcggcggctcaaaggcgatgccattgccaccacctcgctctctccttccttctccgaccatccgctcccactccggcggccggagtccggccgggagaggtcgcactcatggctgtctagccggtgagccgctcatcggcggtcgtacgtcatcgctagctaagtagctagggggtcgaacggttgtgggtttgatggaggcagaggacgagtactcggccgggtgctccttctccctcatgtgccaggaggatagcaccgacctcgacgacgacggcggcggcggtggctgcttcgccggcgacggccgcgccgacctgctcctggtttacaatgccgccgccgccgccgacgacgaggatgaggaggaggtggaggagtacatggaccatctcgtgtccaaggagagcagcttctgctcctcttcttcttctacgtcgtcgtcgtcgtgctgcttctccgacgccggcggcgagtcggcggcggcggcggcgccgatggactggttcgcactcgcgcggcgcgccaccgtgaagtggatcctcgaggtgaatgatcgttttctccggtttgggtttttcttgatggaacagagcatctctgacctgacatctcgccgccgccgccgccgccgccatttgcagacgcgagggtgcttcggattctgccaccgcacggcgtacctggccatcgcctacttcgaccgtttctgcctccggcgatgcatcgacgtgggttgatctcgctggtcaacggttgctagctatagcttctttcccctgtttcttggatggcttccattgatgggtcatgggtgtgggtggggtgcagaggtcggtgatgccgtgggcggcgcggctgctggcggtggcgtgcgtgtcgctggcggcgaagatggaggagtaccgggcgccggcgctgtcggagttccgcgccggcgtcggcgacgacggctacgagttcagctgcgtctgcatccgccgcatggagctgctcgtgctctccacgctcgactggcgcatggccgccgtcacgccgttcgactacctcccctgcctctcctccaggctccggcgacacgtcggcggcggcggcggcgcgggcgcgtccgccgccctcatcttctccgccgccgaaggtatgacacccacatcgatcgatcgatcgatccattgatgcgttcgaggaggaaccaatccgtgtgctctgtttttttttttggttgcagcggcgagcgtgctcgaccaccggccgtccacggtggccgccgccgcggtgctcgcggcgacacacggcgcgctgacgagggaggcattggagtccaagatgagcggcctctccccatctttcctcctcgacaaggtcggtcgccgtcgaacacctgcatgctcatgctcatctccatggattattaacaaaatctcccttgttttggtgttcgatcgatcaggaggacgtgttcgcgtgctacagcgcgatgctgagccagccaacttcaccggcgagcaagtcgacgacgacgacgaccggcaagagatcgtcgtcgtcgtcgtgctccgagtccaccgacgccgcgagttcatacgacgccaccgccgcctccttcccggcggcggcgagctgtggcagcaagaggatgaggctggagctgccgggaggcatcctccgatgagcggcggcggcggccgggacacgcatggtttttgtccgtcgtctcgagcacgtcatcaccatttctcttccaatttccttacaaatttttttcacttctttgatcgatgcaacagcatttgccaaacaatttgttcttggcagtgcgctcgctgatcgatcccggattggattggcttggttaaattaatcccagcagcacgcgagatcgagaggatcaaacaaacaaaaacaccaaaaaaaacacaaaggatatcaagatcgatggagcttgatcgagcttctcctaaggagaggagaaaactcaaactgctcgtgtgagacagtgacagagtgagtgagagtgagagtgtatcactgtacacaaggatggaagaaaaaaaaaacactttagcctgcacattgcactcacactgcacttcccgggaaggagtcaagaagaagagagagaagctgaagaacagtgctactaggaacagtagctgcagataaaaacgatgggagtaatgtctaatccgtctgccagttcaatgcaagcgaaggagagagcaaagaaagctgttgctgcagcagctgcaagtaccatggtccatggccttaactctgatttgatcaaaagccttctcctgctcaaagtgagtgtgtgtgtgtgtgcgcgcgcatgttgctactatggcggcgccggtgcatggctgccaaatgcatgtggctgctacactggttgcctgtaacctgtagtagtgagctactgccattgttgtagcctttgcaactttgcattgtattttcttgagtgtgtgtgagagagatggataattcagacagagtttgtagggttcttggttgcaagcttttccagtctctcttgtgtaatgtgattgctgtgatgatcgatctactgatctctgaatacggtggtggtccttcggaatcgaatcgatcgtgcagtgggcgatggatggatggcaaagccgggcattgcagcaggatccgagggcgacttttgccgattggctccacgttggtgctagcttggtcgatcgacaactactctactagtcgatggctgctttgtgtttggatctgcaacattggatgaacagtgggaatggcagagtttgcagctgtacttgagctttcggtcaaggggctccctccctcacacagttatgaactccttccctgtcctaaaatataattatttttaaacttataacatagtcttatatatactattttaattaataatatctataaaagtaagatgttttagataaaaagagttacgtatctctttaatgataaatttagtaacatgagttttacgtgattgattttttttattttttcgttattaatagtcaaagaaaaaatatttgactttacactattttaaaaatgtttatattttaggagggggaagtaatggctagccttgctagtggagtctgaagaacttcgtactcgctagtcagagtggacggcggagagatggggggccatcaagacctactaatcacgtgtagtaactctgtttggaggggaggaaggtgtagatttgttttgtaatttttgggtttgggatcaaatctgaactaaactttaatataaggttttgaatctattatatcaaaatggtgaagtacaaaccatggttaaaaattttgggtctatcaaccctcctatacgaaatttatctcccaaatgttttggattttttttcatttttttgaatttggcaaattttctttaaatttgatcaaaaattttggaccgaaattaccgcaatttctgaaattcctgtcctattggtacccctggtagaaatacacaaaacaaaattttgaacctggtacaaactatggatcaatcactcttttctcaatcgagtatatatgtaaatgaacatggttaattaagtacacattatttgtagatataatcgcagccattgacattcacaaaggttgattgtttcaggtcaataattggaaatagattaacaagggggatgtgacttttgaccggtctttgatgttttatctccactttgattttgtggtttctagtggagagcacagatcaaattaagattgaattggacgtagggaacaaggaaaggaagtgaagtgtgtcggacaatcaaaggatgttacagatgtccaggttgtggtaattaaggctccacaagtcttgtgatttaacttgtgggcagtaacatatttatgttaaaatctgtgaaaaattataatatagttccaattatagtagtagtttattttgtacactatctgttccatattttaaggctttttgatttttttctagtcacatttctttaattttaatcgattatatagaaaactttaatagcatttacaacacaaaattaatttcattcaaactaacatttaatatattttgataatatattaaagccggtgaaatatctatttcacctatttcaaaatactgttaggaggttttgtgaagttccctctcactttttagagaaaaaaaaacactcttcttgtttggtttaccttattgaacaattattggaacggtctcaaggtgttgttttttacgttacctaactctttccacttttttagtgtagtttatgccatttttcttcctatccacttttagggaatatttcttcctatctaacgaacaagtcattttagacttttgcaccgtaactacggagtactatcccacctaccctcagcacgtgaaaggagaagttttattccttcaataccctttaactacctatcactcttacaacttttttcaatgattaagagtattttagtaattctcactttccactaatttctcttggggatgctaggaatggtcgctttgtggacggagggagtatatcttatagctaacgatttttcttgcaattggcaaacacgagtcatttgagaatagtcgtgatgctggaaggccaaaggagggaagtgtattttgacagtggtttctaccggtagtagtcttccattgccagtattatcagtagaagctatctaagccattatttttttttactggaatctaagccattattttgagttgtactatcaaaaaaaaatattccactggtaatataaatagatgtgatccattagataagacaagattaattctactaccaatagaccaccataaaatttatcatatgaaaatgcttaaataccatgatgatttgttttatagaaaattcaaaaagctaatagagtactacctccggctttaatatatgacgtcgttaacttttgaacataaatttgatcattcgtcctattaaaaattatataaatcatcatttattttattgcaacttgttttgtcattaaagtttcttttaaacctaacttatattttttaatatttgtataaagtttttaaataagacaagcgattaagtcactcgtcatatattaaaaatccatatattaaaaactggaggaagtacaatacaaatttaagtaatttcaaaacagagtaaatagcatgctttaaacatgatgtagggaagtgcagattctgagattctcctaaataggcattcatctccatgatcagaaaaggccctaaggctgccctcaccgacccaaccggtgtgcagccattgcatgaatgcaggtgtttcctcgcgctgcccggtgcccgcctgcactacttatgacttacagctggtaaaagggggagcctttttgctctgtttctcagctgagcacgcactgcggattgtgttgtgcgagcgactttctgcaacaccacaaactctgcctccctgttttttctttttgaaaaaaaaatgaaagaaagaagattacgtacatttttacataatgaaataaatcctga

SEQ ID NO: 19981 - DNA, 24455 bp, Oryza sativa
  unsure (1)..(24455): unsure at all n locations
tggtaatttccataagaaatcaatccgcggtagtaatttagatgtaattaataactaaacaattagatgaattcttatagactattatagattattttttgggtaatctctataagtaatcgattcacggtagaaattcggatttaatcactaggaattttagacgtatattatatttaatcgtttagtcatagactaaattaaatcgtataatattataagataattttaggattccgtccgatatttagctcgcgatagaaatttctaacatattatatggatataatgctagggtagattaaattaaaaacttatgataacaaaatatttatacccacaaaatagtttaggatatatagatcgaaattgggtttgccctagttcgcgaatagtaaagttaatataaaagaatcgactttcgcattcgacttccatttggatttacttggattttatttgaattctaaccgaattcaaatcaatttttgcacgtaactatagagcccgagggagttgcggatccaagtgaaggccaagacccgcaagactttgagcaaggcaagtcatcactattctttgaacatgttgatcccaattgcgaaattgttttgtttacaaataaaatcgcatgcaatgatgaacatcctacttgtgattatgccatgccatgattattgtttatccttaaatccttgtaaccatgatttacgtataagtccctagtcaactatgacaaatgcttagaaatgctactctagatttatgcatactcatatttatcaaatgatatatgcttgggcaattacctttgggaaggtaattgagatgcggcatgtggagacatgagcgccacattgccatgatattgatggcatgatttgtgaaaggaaaatgaaactaaacaaatgttttcgactggggcggatggaggatttgggtggtatccggaaaaggctagtgccgtccctggtcaattaaggaccgagccatgaagttaagcatgaaacgacccccgtacaaccgtacttctcgaatgggtatagacctagcggagtagatagctgagcggaggcagtatccatgcatagcagttccttgatgtgtgaggcaggggctctacggtggggcagccattggtaggaccgcgaggcgggtgtctacagtggtgtcgccatcggtaggactgccatgtgagaatctaaacataattataacttaatgcatgtgtgagtcttcacttcccgggtgcgccagaactcctctcactgctagaaaccgtgtacgtctagagtgcatgaggatgtaaagttcatggagcgggtactgccaatgcgaggttatcaaaaggctttgccgtgacgcgtctcatgtgttgggacgaggctcatgtgttgggcagtcgcggagtgcgggtaaagtgtacatccactgcagtgtgagtaaaccaaatctattcgaatagtcatgctcgcggttattgagcaccgggacatgtattacacttggctagactctaaattcttaacttgtgtggaatgggatattgcatgatgatttctatgctgatggagccacttcctgagaggcgggaaggtggacgtcctcagaaaaccatgacgactcaatggcgggaagctatccttgggatcacaatggatggtggacagaaccgtcattgtataatatgaacactggtactaaaatttgatcagtctgtgctaggtcttaggcttgtgaaaagaattacaaaacttgctttgcgcaaaagaaccatagccatcctttgaatacccttgtcatatgcattgttgttgtggtggcttgctgagtacggttggtactcacccttgcaatatacaaacttaatcagaggtcggagatgaagcttcggaggatccctacgcttactaccaggagggtgatgaagacgatggcgctcagtaggtcttagttacggtcgttgcctgtggcaatggcgtgccgctgccttaactccgctgccttacctacttctgtttttggaatgtattccggaccgctcggtccgatgatttaagactatgcttgcgggcttatgatgtaataattcgtactagacactcgtgtatgtgcacttagtatttcagctatgaattcgtgtgtaccagactacttgatccagggaaatggtactgtttacatgattgattcctgttataaaaacgggggtccacaccctatttatgtcaggatcattcaatcggttatgtcatatgagttttgctgaaaagaggttaatatcttgtgccgtactgcaccattcagttgttcttgccagatcaagctgcctctccattgctattcaatgctcatgaaattctttagtacaccgggtgtgtttagatcacatcaaaattgaaagtttgattgaaattagaacgatgtgacggaaaagttgaaagtttgtgtgtataggaaagttttgatgtgatagaaaagttggaagtttaaaaaaatagtttggatctaaacaaggcccaataaacttgcatgctatcaggtcaataacctaataactctaaataaaataaagcaatcagtatatatcactagactatcctgcaaaaaaaaaacaataatctgcagtgcaaaaaaaactaactcaagaccatgctgcgtctgctgccaagcccagtgactcggtttttgcagtgcagcacctcagcgcaaatcaagtactaactgcttttgtatatagggttcgcgatgttgatcagttggagttttcgagcgtaccaaggggagggtggtgactagagatcgaggagaacaggtggagatcgatcatgttggtgtcgacaagggcagatcgaagatccagacgtacggcctcagatcctctcgatggcgaggtgcgcccctacgtacggcgcccagcctcgctcggcgcaggtggaactagaggcgacggccagcgacgagttggggtgggaggcggcggccgtcgtggattagggtaggtttcgtactttagccggcgtagttgggctgggctgctcttgctgggcgcgatgctggagtcccgtgtagttgtgggcctcattcacgtcaaatttaggaataagtttatttgaggccccttaactttacaccgattccgattttcatccttcaaccaaacaatcaggtacaatcggtccctcaacttctaaaaccatgcaaacgagatcccttgacggtttggaaggcagttttggttgatgtgacgctaatgtggctggtttgacttggtcttcgtcccacttggcatttgacgtggcgcttacgtggcaattcgaatccggaaaaataataaaaatcgtagccccacatgtcagctacacacaaaaaataattaaaaatggtggggccccacatgtcagcctcacccttctcttcatacccgcaagcgagcatgcgggcagcgacctcagcgaggcggcgccctcgacgacctcacgcgccaccaccgcactccacctccgaggcagtgggcagtgtaggccagcgaagcggggcgggaggagcgacagcgaccactccactcctctctcccttccccttttcgacacgtgggcggcagagggcgcggagtggtgatgcggagcggcggcggccatagtaggctggcgaagcggagcgggacgagcggcggccgacgcctgcgtctcgtttgggcttccaccgtttggctcattgatccctccccttctccgagcctccttgcgtcgccggagcggccgtagttcaccgctggaagttcttcttctctcgaagtccgctgctaatgccgccgctactgaactggcatcgtgtagatccatccgtctctgaggctgttggtgatgaactgtaacttcggaccaatctattcattttgttgcggattactttgatttgtgcatacgaaaaaaatttccagaacattttggggattcagctaggtttccatgaaaactccttggtagatcagtctgaatactaaacctggaactggtttgcctttctttgctttgagacaaatggaagaggagatggtgatatgtaaattagcaacacacatgcatttcaccgtctcctttgtcgattgttttcgaggcaaggatgaagttgggttgcgtcgatctcatctggtatacgaggggcgccattgagattcacattctttatatggctagccaacaagggtaactagggtagatgtcacgctgcagataacttagcaaagagggaatggccacaccatcaaatttgcttgctctgctcagcccaggatgagctgtagacacttgctcattggttgttcatagaccaattggacctggatgttattgcgaggctggatgaggtttcaacttcctaaacatatgcaggtaaagctaaaacaaatggtgaatggcgtctatagattgaactttagaccaatttagagaaaggctttcgtctcgctgctcatgatgatctattggctggtttgaaaggagcgaaatgtaagggcgttcgatcagcgcccacggacatctacacaactgttcaccgacatcagagacaaaactaaaatttggaagcagctcgaccttttcaaagctcctaaagattgataatatggagttacgctgttgatttagattatgtatgtttatgcacatattgttatcttatcgacagctagctgtctgtcaaaacacttgttatttgttgtatacattttaaacctccctttaatattaagattcggtcaacccagctgaaaaaaatatgcttacaaactgcagcaatagtcgctgttttttagggcagcaagactgtcgtgcccggatgaacggtgcagtaccacatcttagctcattaagttcgcttgctatgatcagcccatgatgaaagttgtagacattttctcagttaaatcttcataaaccaacaggatctagacattgttgcgaggttggacaaggtttcagattcctggagacatgcgcactgtcatcttatcgatagtttttcgttgaaacgctctataacctatacaatacatttgaaaccttcctttaatattaagattcggccaacctggctaagaaaattataattacattctctaaaaaaatcgcaacaacaaagttgttttaaccgagaagaattggacacaaacaagtgcaagacaatcgtgcccggatgaagggtgcgggtaccacagctaagggtgtgtttggttacctgtattgcacttggcccgcatctggcatgcaaccttcgacctgtttggttgtacacagccaggcccacatgatgtaaaaaggcccatggaaccaggataaaagcggaaacgaaaaagtacaataaaggtccctcatcttgtcatcggattacaaaatcgtccgccaaccgcaaaaccagatatatgacatccctcatctcacaaactggatcacttcggatccttagacggttttgaccccggtttggtctgacgtggcagctgagtcagcgggggacccacgtgggcccacacgtcaggttgtccacgtcatctttctttccccttttctctcccttcctcctctcactcttctctaggaaggcatggtggcagtgcaaggtgggaaaggagggcggcggtggccagcggcgagcgatgcggcgtcaatgttggtatttcttaacgtcacatatagaatccgcaagcgcactgaagataccgatatagctcttcacctgggagtattccagagtatcgatttccacagggaacgtgtgagttcaactcctcgtcaggtttatccaaggacacaaagctaatgtgggcagagagctgagaggattttctaatgagaaatagtgtctacgaaaagcttaattttaatcctaacgcaatacttcaggcactggcagccctctattcccagatgtcgctctacaacgtagccggactcttgagggttatcaccacctctacacccacctcaaacgtactgtgggatacgcagcaaccactgaaaattaattacccagacaccacgtctacgcaattaataactactctagtgcccgatcacacactaaagcaatcactataaaataatggactatagtaaacaatgacccggtatgctaattaggaactaaccaagaagtaattctcactaagcaaatcttaattactcataataatatttctattaaagcagcgtaattaacaagatacaaaagtaggagcagattaccgacaactccggaattcctccgatttcttctatcttactctctccctattgtaatatacgataaagtacactatagcctcttgtaattcagttcatgctttggtgtgtgtgaatgagggagaggagaggggtatttataggtggaaaggtgccttgggagagtggagatgctccaagcatcctatgagcatattccttctagcttcatctcctcttgacaagtgtcctctttatgacggtttccaccggtagaaacggccacaaccgtcattgggatgaggagtccaaccgtcataccaaaattgggctggattgggccagctggagggttcgaccgaaccctggttggctcccctggcccacatccttcttcaggatgctgacatgtgggccttattttatggtactccatgttttggctccaaatgattgcacattttatatgttgtagcttaaaaccatgtgagtccatcaacacaaaatatatttctattctttatgctcattctctcccaactttggtggttgatcacctgcatactaatatacaccaacactcgtgaaaattgttagaaataaatcctaccactatgttggatgctttatatctatggttttatgcaagtattgtcggtgttaatttggtccttaacagccgtcaacagtcgacgacgacatgggagaaggggaggcgtcgcaggcatggaggagggcgttggagtagaggaggcggcggcgacgagggagaagggtcatcgatgatgtggtccaagatggccgcagcgtgcgcggtggcgtctccgggacggagacgacaagccctctccactccagttgctggaagtctcgccggtgcggtggccgtgggtgctgactccggcgcacctcgccggcaccatcggccggtagaagaaccccctcgaagccgtccatctctatgccgatgcgccacgccgctttctgccttcggccacctccacgtcatcgcgcccgccgtcaacgacccccagcaagcgcgcactcatccttgtcttcgacggcccgggactccacgcaccctgcacgcagcgggctcgccatccacgccacccccgccccccggtccccctcgagcttgatgtgggcctaggcgcggtcggcgtagaactcggcggtggcggggctagcctcgattgcctgcgtgtaaagctcggtggcgagctcaaagtcatcgtcgacgaaggccgccatggccttgctatctagatccaacgcaccggcagttgccatgggtgggagaggaggaggtgagccaacgagagggcggggaggccggtggcaagaaacggagagggagaaggcgtggtcgtcgagggagtgggggaagccggcagtgagcgctcacagagagggaggaggtggggccagcgagggaggcggggaggctggcggcgagcgacggagagggaggaggctgggccggtgagaggggtggctggcgagctcgctcgctcgctccacccggtgctgtgtggtgaggagaaagaagaggaaggaggaaggagaaagtagaggaggatgacatgtgggccccacatggggcccatcatttttttattttctaatgtaactggcatgtgggcccatgttttaattttttttttgattgaattcccatgtatgcgccacgtcaataccacatgggacaaagacctaatcaaaaggagaaaattgacattataccattgttaaaacggggtttcgctaaaatgccacttcgcagttgggattcgccgaaataccactctcaattgaggggcttcgccgaaataccattttcttttgattctccctttcctcgcatctttgttgacctatttaaatcaatttaagcacataaaaaatacgtagattacaaagtaaataccgtcgaaataattttacatgcaatttttctccacaccagattacatagtatgcagcatactatcaccacaatataaaaaacactctcaaccggaaactcttggtttctagtgatataaaagttctttttatttatgttgtggagatattgtgttatatactctataatctggtgtagaggaaaaatatattacatgtcaagatatttggacgatatgtactctgtaaaatacatagttgatttacttgaattatttcaactaggggtattttggtcggcaaagatgagaggaaagagataattgaaagagaatgatatttgggatgaagcccccttgttgtgagtggtattctggcgaatcctaaccgcagagtgatattttagcgaaaccccgttttgacgatggtatattgtcaattttcttagtcaaaagagccacgtaagcgctacgtcagccaaaaccttacacaatactgccgagggactcatttgcactgtttttttaagttgaggatgcgttgtatcggttttacggttgacggacgattttgtattttggtgacaaggcacctttggggcctatttagttccaaaaacatcacaacgaatttttggatatatatatatggagcattaaatatagataataagaaaaactaagagcatccccagcagctcctctatccggtcctccatcccgtttttggcgcacggaggtgaaaaacaacgctccagcagaccttccatcacacacgccatttttggaggacctccaaaccaagcccttcccaagccaaatatggaggttctctctcctcatgccatcctcaaccgccgacctcgcgctaccatatggactgcataccgtgggagagaggaggtgcatactggatttggaggtggagatcaccggagtagaggcggagaggcagcggatctagcagtgaggtcgccgctgtccccaccgctcgaggtcttcgcccactccgccgctcctctgaccccgccgcccctctgcctcgccgctcgcgccgccccttcgcagagactggttggtggtggtggcgggccatcggcgggaggaggagggagatggacccaccggccacctcccgtcgtccgtcccttgcgccgctcctccaccccttgcgctgcccgcgccgctcctccgaccgcgctacccctccgcccagccactcctccgactgcgccgcccctctggtcggccctcgtcctccccgtcctctcggcgccggcggtagagaagagagaaagacggggagatcggcggtagagaaggtggggagtgaagagataaaggtggggagttttttttaggaaaaagtacgaattacccccctaaactatcgcggtcgtctgaattaccccctaaagccgaaaaccaggtatcactcaccctgaacttcttataccggacgaattaccccctgactgtatctaaagtggttttcgtcccacgtggtgtacatgtggcagtccagtcatcatttttttaaaaaaaataatcggggggacccacctgtcagcttctctccccctcaccccctttctctctcttccatcctgctcaatctctctatgcggcgaggacggtggtggacggcggtgtcgcggggagggcacggcggccggtggcccgagccgaggagaacggtggaggcgacgggcggcgctgaggaggacactggaggcggcgggcggcagcgctcgcggggagggcgacggccagtggggcccacgccccgaggaggatggtgggggcaacagcggcgatgactggctagaggaggatggtcgcactcgcctcctccgccgccagctcgcctcnccnnncnnctnnnnnnnntncagggnnnncgcncttgncacnctggcagctctgctccgcggcgtgtggcgcngntnttgatccacctncaccaccngnngccnanncagctccncctccgcctcngtagcccggtccaccaccggcctccgcctctgcccctttgtccccaagcatgctcggcctcagccgccgccgtcgccaactcgcccgctttgccactggccgccagacgcccggcgaacttccgtctccgccgccaaccgctcgctcccactggctgcccaccgcccaggcgagctccgccaccggccggtccgcctttgccgtgtacgcgtgttgcgcccgatagagagaggagagagagggattagggaaaagaaggtatcacatgtgggtcccaccattattttaaaagaaaatgatgactggattgtcacgtgtacgccacgtaggacgaaaccgctctagattcagtcgatgggggtaattcgtccgatataagaagttcagggtgagtgatacctggttttcgggttaggggggtaattcggacgactgcaatagttcagggggtaattcgtacttttttcttttttttgtaagagtggtgataaatatgtggtagttttaaagtattagtaaaatataggatgttggtatatgaaggatgtaatatggatgatccgttggagtaaaaagtaatatggagtaggaatcttttgggatgactatctaaatgggagtgtggatgatgaaatttagatgagctgctgggatgctctaattgcacagtttatatataaaatcgtgagacgaatctttcgagcctaattaggccatgattagccataagtgctacaataacccatatgtgctcaaaagattcgtcctgcggtttccagacgagttatgaaattagttttttcattcgtatccgaaaacacctttcgacaaccggtcaaacgtcactaccttaaaaattttcattttaccaaaaagtaaacaggaccttgaggtgtactttttccacgaaaacggccgattcgaccttcgctccacagcctggctcgccgctcgaggcgtgcagcgagccgcgagtgcaggcagccaggcagcgagagaagtcaccgcgcggcctcgactacttctccgcctcctcatttcctcccaccgaaagaaaagcttagggttcggccgctgctgctcatcgccgcctcatcctccgccgccgggcgtcggcgccggctcccctccatcgccggctccctccgtcgccccccctcagatccgtcggctgcccgccttctcttccactgtgaagtcctcgttctctccgttgagcccatcttcttcgtcggttttcttcctcacgccctctcctcttcggttctctccgtcgagctctccggtaagtgcaaggatggtatgccgccgcccattgtagggttgggaatcctctcccctttcctacccccttcaattttgtgtccactctttctttgatttctgtttttctttgtggatgagagcacatgtccccttcataaacaaacctagatctactaaaatgtgatggattttaggttgatttgggtgcaacaaagtgctgcataggcttggattttgctatatatttttgccatgttatgcactgttggtctattttctagatgttgctaagcatgactaaaaatatatttcttggtcgatctacttatctttcagttttgtacacatgaatatttgttaaatcgattgcctcgtagctcagatctgcactggttgtttgtgatgtgctcattcaagttagatctgtgaccctgttagttgtgcatattactgtgccccttttgttatgtctgagcaaatttccttggatgtggcagccgtggcatgggtgcataaatattggatttgcaatagttaatatgccaccaggttttggattaatgcccacgaatttgcatgaatgtttgtcgcaagcttagagttaatgcactaggtattctgttcatcatgaaacttataaatcattatatggcggaataatcatctaagaagaactttatgttggcactgactaagcatttctagttcataacacggctaaatggatatgtttgtgtagtatatttagntgtgttatnaantagaaatgnttagtcaatggngacataaagntcttcttagatgattattctgccattgtgctgctttagctgtcactgagtttggcatttccactcttgcagataactctacccaggctgagttgtggctggtattggcgatataagcttgttagctgttttctcttgtgtctttggtcttcatctttgattacgcgtcattgaaaagactgtacatgagaaaactcttttgttgaaacatttctcttgtaatatgaatgtattgagtttgtgactatccttctcctgtgctagaatcatatatttcagcttcaaagctcttatggtacttttcaagtttcctgttgaaccgaatacctagtgcattaactctaagcttgtgacaaacattcatgcaaattcgtggatattaatccagaacctggtggcatattaacattggatacttggtcaactggaaaattggagctccttattcatgtcatcaatggagagcctagcacagttagagctgttgtgtgaaaagctttacaattctagagactctgctgagcgagcacacgctgaaagcatcctcaagtgcttctcggagaacagtgactacatttcacagtgccaatatatattggacaatgcctcaacaccatatgccctgatgctggccagttcaagcttgttgaaccaagtcaacgaccgcagtctttcattgcaattgcgccttgatatccgtaatgttcctttccaaaaatctatcatgaaatcagttattcagctatttttgcttttctattgcatctgcatggcatgttttcatttacgtctctaccaatttaatcagttatgattagttctgcgttgcaagttactacagaaagcagtaagcactcgtttgtagtgccatctagtataagtggccatattttaatctttgttgttccttccttaacttatttctgttgcctttgatgtcttatgcttattgaatatggctcgagttgaatggacaaatattttacattctattcctgacttcatttatgcctttgcagcagattagaatggccaaatatttatttccatttattcattgttgttttatgcattgttaatgtagctaaattgcaaaaatacatgtgtataaacaatgcttaaatctattttgtgtacttttgtgcccttgtctactgctaattttaaatcaatatattgtgatctgtttgaagggaattatgtcataaactatcttgctacgaggggacctaaactgcagacgtttgtgattaaatccctaattcagcttgtctgtcgaattacaaaatttggatggttcgatgatgataaatgcagagatattgtcaaggaggcagccgatttcttatctcttgtaagtttgttgtctgttttgttggcatttagctgagaactttttaactgttgatgacatatttaaggactatgcacctttgatttgagtggagctatataccttggtacataaatccttggcaatttctatgaccaatgcccattctttagaactaagtaatatgaaaaaggataaccagcctaccagatctattaaagaatccatatgaggaacatttataggttttattccatgctctattgcaagttaattgatgcatactaaagttgctgcttatgcttttcatttcaggcatcccaggatcattattttataggattgaagatactatatcatcttgtaggagaaatgaaccaggtgccacctagaaacttcttttttattataattttcaataactggtttgatcctaatcaatatgataatgcaatttggcaatatgtagattaatttaaaagttgaaaaatattttaacagtattaatttttttttatgtttagaactgcacaatgtgcttgttggcacttataaatcgcacatgcacatacattcataaaacatcggatgagacacagaaggtcaagcgtacatgaaacactacatatatgcactaacctgtgcacacacaattcataccaaaaggaaaagttattctttattttcctttccgatgcttaacaaagagttataaacatgcagatagacatatataggcatagtattgtcaatcaaaatattaatggttaatccaaccaatgttaacaagccaaagttaaacattgacactgatggttactatattaatttccatttattttaaagagtattggcggcaatatgatatgtggcactttactaaattgtgttggggtagtgttggtagcaatcttttttaccttcttggaactgtgatgcacatttcagcctttttactgtactgtcccacctttctgttagcatgtcacttctttttattgccttctttgacctcttaattttttctggtatagtttcttgaatatgattgcatgtcactgtatttcttgtaatgttgagtttcattttatttaacatgaaataacacagattgcttgcttagtacaagaaaagaaagggttctagttctacaaatatcttctgtgaactgtgtctcttttttccgtaaacaattctttcaatgaatagttggattgaccattaagctttctcagtatgtacttggcttcttcttactttttgcatgctgtcttctgcttatgaattatagtgttggtcaatatcttcacttctgattgggttatgtacttgtgttgttgcttatatattttcaatatagtttatattgttttgcccatttttatccactcttgttcaatttcctttgtcaggtggactgtaatgtatttagctgactttttgtgtctgtgtatgcatgcaggcaaacgcgatgcctttgacacttcacagaaaaattgcttgttcgttcaaggaccagtttcttctacagatcttccaaatttctttaacctcattacaccaactgaagaggaaggtaaagttcaaggaccagtctcatccattttgttaaaagtagtgtgtattggaatgtccacactttctcacttccatcttctgatacgatctgtaattaaactgcagtacctgatgactttaggcgtgatcctctcttgcttgcattaaggtgcttgtcatatgactttgttggttgtcctgtggatgaaagctctgaggaatttggtacagtgcaggtatgttagtttgcacaattgttatcttctctgtaaaacatttgacctatcccagttggtctatttcttataatttatgtattttttttattgatgcagcttcctgcatcttggaggcctctccttcaagatccttctactgttcagatcttcttcgattactataaagtcaatgatacatgtgtttcaaaagaggtatactttgattgggtgatttgaataatatcgacaatataatctctgattattttaccaagtgctttgtccattactccattaacacaaaagagatatattttgcttctagttcctcatgtttagaatgtacactttgattgcatgatttttcattaatacatttttcaaacttatttctagttagctaccactacagttttacaaaatttacttccattcagcagcaatattttcccaatgttttcttttaaaagtatgacttcctcacctctgtgaagcagcaatattttcctaatgtatggatctctaagaggcatgctttattcctttcaagaatctctaagaagcaatattttccttgtgaatttatcttacaaacagctgttactcttttctttctttgtaagtaatgtgccatgttcagtggattagctcttttcttgactcttccccgcgcccctctcctatgcacttctttatgtgtcctagcccttcatttctgcaggctttggaatgtcttgtgagacttgcttctgtcaggcgcagtattttcgttgaggacccttcaaggacccagtttctttctcatctgatgtcaggcacaaaggagatactccaaactggccaaggttatcgctttgtccttttgttgccaagttctgttctattttagtcctgttacaaatttcagtaattaggaccagcgatttcaattgcaatcctcttacatagagtgaaaagcctcttttatgtaaggttaagaggcatttactctaaacacgagttgattgactcatgcctggtcacgctatgtggtgcactgtagaaaccagacttgctttttataagtaaaagcacacctttgtttattagtaatctttaaaattagatacttgtctcaaattcgctccatgcaggaacaaaaataaatgctccatatctttacgtaatttattcttctgatgtgtgatctgctcatctacaggtcttgctgatcatggaaattaccatgagttctgccgccttcttggacgtttcaaagtgaatttccaggttggaatcctgttacttaaaatgaaggatgaagctaacttgtttgttttgtgtcaaggatttgctctttgttctttccctttgcattcttttacagaattaatgacttgctagtttttgctacgtaacaaccgatgaattagttggcaacagtaatgatgcattaattatgaagtgcgcattgagttcttttaggccttggttgggtggcccaattctggttggtatcctggctgaaatgaactgggatggcggggattttgtgggattccaaacatgccttactgatgttattttaccctgatttgtggttttgtactattgctttgaaggaacagtaataagtaattccatttgtttgtaggttctagtcttttggctttactgggagcactaactagtcatactgatatgcaagtcaaggttctaaatagtggattgcatttttagagtgcattggttttgatgtagagcatatcgtagtgatgcagtgcatgttgtagtgaacagttgatggaatagttaatttgtattatatttataattctacgtaatgaactgttgtgtatacgatgtttatatgtatttttggtattgtttgcaacttgcaagtgctatttttgttgactttttttttgccttacagacatttggtaccaatttattagctttcaaagtttcaataaacaatggagttgttctctgtttagaaagcatttaatacctgtgtcatagtgttgtcaagtgaagatggccattgttccaaagtttcttttaccaattttctatatgcattcattgtcccaattgcctattactaacttactgtttgttaagttgtatctatcgtatatgttctggaacaaaaagcatggttcaatattttcttaccacattcataatttgccatgaatgaccattccttcttatctagaactttgatagtaatgtagttatgtaaattagtctatgttgatcatgaaaacaaaattgaactgtattatgtttgtttgctgttggcatatcttcattgtgtcattcggaatactcccggcattgactaccaaatgatttggttggttgattgttatcagtgttactagataatgttggctgcactggtttttgatcctttatcaagttctctgttattgtcatagtaatatccagctatgaatggacctctttgtgattaagtgtgggctcttgcattgttgtacttcgcagttgtcagagcttctgagtattgagttttatggtgaatggattggtttagtagcagaattcacaactaaatccctgttgtcatggcaggtctgtttccctttttttttttgactcattctcttagcactggattattcaataatcaatttccaatagttttaactatcgaatatttgcagtgggccagcaatagtgtctactatcttttgagtctttggtcaaggctggtgacatctgttccttacttgaaaggcgacacaccaagtatgcttgatgagaccgttccgaaaatcacggagggttttatcacctctagaattaattctgttcaggtactgatttctaatgagatgatggaactgctttctatctcagttgaagcggtaacgtttgttatatcctgttgtttctatccatctcaggccagctttgcaaacgactcatctgatgatactttggataatgtggatgttcttcaggagcagttggagtctcttccttacctttgtagattccaggtcgctatttcctgtcaagttctggtttccaatttaagagacaattttctgttaaacttttgattggatccatctttgtaatcatgtccacctgtagataagatacatcgcgtaatcaattgaatgttttcttttatggagattaaccctgttccagcttttcacataacaggattcatagttttatgtaattgatctttttattgaacatatgcattggttctatctacttgcagtttactgcatgcacttagtaatttcttgtatatggtaccagaatttctttctttaaatattgaagaactaatagaatcattacacaacaacaatagatgcatcaaatttaagtagcattatgctattcatttttatcgtatttaattatatgattttaaaacaagaataaccagagtaaatttttggccaacttaagtgctttcatattgtggacgggtgcagaaaatatagtaaataagataaaaaaaatacgacaaatttcagatgaagatctcttattatcgtttctgctgttttcagctaatttatatgccacttcattatatatatctgttactttttgtctggatggaattcttattcttatataattattttgagtcactactaacctccttgcccgttaccaatagtatgaagaatctagatgaaatgcccttattgttcttagtctcttttttttttttgagagagaattgcattttatgacatgcccatatgatgattttcttttgctgatttgcagtaccaaaacagtagcatttacatcataaatattatggagcctcttctacaagcttatatggtatgttagtgttatttcacaggcctctttttggggcataaagaatgccttttcaaagtcaaatacttttacaggaaaggtcaagattaccagctcctggagatgcgaatgagctctctgtcattgaaggacagctcacatggctagtccacataattgcagccattctcaagattaggcagaccattggttgtaggtgagaaattaacattccttgcttccttccttatattctgtttgatttccttttcttttcacttacaatgttcattttgttatgcagccaagaatcacaggagttaattgacgcagaacttgcagcccgtgtgttacagttgataaacgttactgacacaggggtgcacgcacaggttagatgaaaatgatttggtcatctaacatgaaagctgagtgctgagctagtgtacttgtagcaacaacaattttcctttctagtattgtctgcaaattatagaatataattgcatatgtaggtaggactggttttgttttttcacaagcatttaattttttgtaagtagttacatgggcacgggtcaactgttctttaaaatgtgcagcatcaaataactaaggagcaacttagatattttcttaattttatcgccaatactgtaacatagacaaccaattacttgtttctccattcgtcatgaagcttggagtcacaacaacacatgtggttgttgatggtgttttggtgtttcttacagttatcatgagaaatgaaagctgtgaatttgcacttaaaaataggctgaaattgaatttatttaatgaaaatatctaaacaatgttcccatatgaacttaatctttggccaaaatcagctcactttaagagccatttttcatattgtattatgtacagtatgtaaaccacatattgtccccataaaccaaatctgtttctgtattgcgacactacggattacggaatgctctccaatttgtcctttactttcattaacctgttttagctgctcttataaccattcacagcttcacaagtttgtgaatgatgacttgcggtgcattctttgcagagatatcaagtattaagtaagcaaagacttgatcgtgctattcttatctttgtgcaaaatttcagaaggtcatatgtaggagatcaagccatgcattcttcaaaggttagaagaaaccgaataatagaacataacaattataattttcttttttttcttgatgtacctttttttgtaaatccccatcaagttttacttctttgctgcagcagttgtatgcaagattatctgagcttcttggactgaatgaccatttagttttactcaatgtcattgttgggaaaatagcaactaatctgaagtgctatgctgaggtacctattgtttcgacgtttactgattttaggcatactttgatctatatgctgtggctgatcctttgtgtggttacagtgcgaggatgttattgatcatactctgtcccttttccttgaacttgcatctgggtaaagttgtagctatatgtattcactttacatttctcatgcttattatgataacaattcttcatatgtattttcgtagcagctatatgactggaaaactgcttctcaagctggagagtacaaaatttataattgcaaatcattctgtacagtcttctcactagcttctgtttcatattatccctgtgtcattcctggtcttagaattgattatattttcattattgatattttcagagggagacttttccatttcttgaagaatacagatgtgcccgcagtagaacaaccttctactacatccttggctgcttgattttcatggaagacaccccagtaaaattcaggagtttcatggagccactcctacaggtgcattgctacttgtattcatactccctctatatctggccctgtccagatcgtaggtagaaatagctatattttggggcgtagagagtagtagttaagttttttctctattcttatatggttttcttctttgtattctctataggttgcagttaatttggaggcaactgctgatgctgctttccggactgatgttgtgaagtacgcatttattggtttgatgagagacttacgaggcattgctatggccacaaacaggtgcacaatttgattatatatagtatatgtgtacatcaactcttcttttggaaactaactacttttgttggtctgatccagccgcaggacctatggcctcctatttgactggctgtatccatctcgcatgccacttttattgaaagccatctcactctacgctgatgagccagaggtaactatgaaatcgcaatgctttccttgcatagctgttcttgctgaaaaagtttgaactgttttttaaaaattatctagagccttatgttttttttgttcagctactataaaatcacaactttgtgttcatacaggtcaccacacccctgctcaagtttatgtgcgagtttgttttgaacaaagctcagagattgacatttgattcgtcatcaccaaatgggatccttttattccgggaggttagcaagctgattgtggcttatggatcacgtattctgttacttccaaacggcactgatatttatggaagtaaatacaaaggcatatggatatcacttgctgttctttcaagaggtgagttcagaaaatatgttttgaaaacacatgtatgctctgcaattttattacagtttcagcaagtctacctgctgttattcactgttatctaatgcttgatctttttagtgaatttcatcctttacaattttatgtgttactctcattgcactttttttttgtttgaaaaaagtgtgctttaggttacacttgctgtgaaatgttatttgcattccaacatgtctacgaaatttcatgaccaaaaccttgtttttgtaccccattgagatcattgttttccaacagacaatattagcttatccccatgggccatataatgacctggactgtgaaagcttgttcatttttgttaatcatttaactccttactgatttgtgatatttgagttgaattgttgcctcgtagggcttggcagatgataaatatttaaattgcataagatttgcagtagttgagaatggatttatgatgatttaggctaaactgaaatttagctgcaactatggttaaattctgttgcaaatatggagacgttctatacttttttggtttcatgtgtgctacgatctatggatttcctttttcaagaggatactgatgtacttgaatttggtataagatgttacttggagttttctgttagggtgacagcttagttccaccctctgattcaaactttttgttgtgcttttaatgttaaagaataaaattggttgagttccactcaacttgagcccaactatttgttcttaaactgtatcttctgggaacctcatctccaattgcagactaaagatttgtatttttttttcttgtactgttattctgactagaaccattgcagctttatgtggaaactatgtcaactttggtgtatttgagctgtatggtgacagagcacttgctgatgctcttgatatatctttaaagatgagcctctcagttccattgtcagacatattggcattcaaaaaggtattcctggcaactttagtgatttactattgttttgctgtgtagtgctattgcttttattgatatggttagtaagatctcgaaaatattcatgctaagttttatagcattgaagatgtatagttcttattatatcacaatgaaagtgaattgaatgttatgtatatcaattaagcagaggttacttgtgcatcaggaactggactgagtgattttagtgccaatcttgtaatctaactgagaaccctgcatttacacccttggtatgttgatacgtttagttgcatgaattgatcagatcctagtatcctaacctgtctagaaagatttgtatactctgtcataacagcgctgtcatttttttatttgaaaacatacacattaaaattaccaggagaaaacatgaaatgagtactgccaacagtgtgctccagagtcctatcgggaagctttttctttggaacatgggatgctgcagttattttttatttttatgccagacattttcaaacattttttcaagagcatactcccaactcctagaactgtagttgacaacaaataggcagcagcacagtgtgtttggactttacttgtattttttttcaacattttgtttgtagtcttcttggcattttaccagcaggtaccctgcatgcaagcttagtatatttatttaggtgatcttgcaattgcccactggtaacatgcgtacaggtttagtgctatgttttccaacctatgtgctttttactggcttgatcacagacaaataaacagcctagacaccattccaggtcttgcgttgtcccacattgatttatgtttaaccagatgattgagatattcttgtttcattcgtggaagcattcatactaggttctttctttatttcagctgtcgaaagcattctatggatatattgaagttctgttcagcaatcatatcacttttgttctcaatttagatacaaacaccttcgtgcatattgtcagcactcttgaatctggcttaaaaggtctagatacagggatatcaacacaggtatgtggcatgatgctttttactgcttgaaaaatgttcctcgcttcttgttacaacagcatcggtggatcagtgcttaaactgtgtcctatcggcgaagaccgttccaatctgtggttgctggcagataataattgatgccatcataatactctattctcttttttgtgttttccctattagtttcttctcttggatctggatgtcgtgtgcaacctggttagggcccacatagaagcagtagtcaacctctctatttaaatcatttccatgtgagcagtaatgggaacaacatctgcctatggttactgttaaatcattttcatgttctttgatatggcatatatagtaaaggattgggttgtatctctatttattaaggaagtaatacacacaagcttttagtccttccgttttatctcctgcctccatggtgctgttgcactgcttggttccatggacattgattaagcctaagggcccttaactatgctcatcacattggaatccatcattgttctgtagtgctttctgtttggactaatctgtaaattattgcttccttttggcagtgtgcctctgccattgatagcttggcagccttttatttcaacaatttcacagctgctga

SEQ ID NO: 19982 - DNA, 13246 bp, Oryza sativa
ttttcttctctgcttgaagctttctactgtcaagttatcaacaatgtttccagtcatgagcgtgtaggccatttatttaatttgctaggagacaagtttcttttcagtaaaaatattaaattctactagtacatcctttgattagaactgtattttgtgttcatcactggtacgctgtatgtccaacttgtgatgtacttgtctattaagatctgtgcttaaatgaaatggatgttttttgaacggaaatgaaatgaatattacattggaacatatacatggttttgagttcttgtatggaatggtgtgggcagatcccctgagatggtgctgcagtaaaacacaagtgcttgatatatcccagacgtacaggatttcaagctttatttgttttaggcgactagtttatactatttcagagtcatgctggatactttaattacattatgtggatatcatcaaatctttcaacaatattgggcttgatatggtgcattatacagtgttgacttgttctgtcattttcaatttaagtgtgctgatgctttggtctcatatgtacctaagttttgtgaacttatgtctaccaataacagcattagtaatcattattgaagaactaatgtacgtcttgcttgcagcctgtagaccagcaacaacgcctttcgcaatgcttcgacaagctgatgactgatgttgctacgaatttggaaccaaagaacagagataaattcactcaaaatcttacaacattcaggcatgatttccgtgtgaagaacattcaggcatgacagctgttcaggaccagctgctttaaggtggtgcactcatgtgctgtaaatacttagcttagcttcgttttaggaaccaccattcccgtggggggaaagttatggtttaactcagtttggtttggattggctgaaagatgaaagggttctcctgctgcatgtggcggcaaaatgcagttgttgatctcttaccttgtcgtgtactagaatggctgagtgcaggggattgacttttttcttcttctctttttataccttagtgttaattccttctctttttgcttgtacagcaatattcatgtgaaagcctgtgatcgctgtttccccgagttgttagggggaaagcagccatcgctcaaaatataattcattcgttaacaggttagaagaagggaaaaaaagttgtaaatggttgtgcttcctattgcagtcaatgctcaaattgaaagtgaggagatggtaaatttgctccttgagcttcaatacaggtttttattcagctaacatcattttttgcagctctccatatttcggttcattatagcaccgggctactgttgtgcacagcatttttcttttggtggtgctgtgcagagttttggagttcgacggcgccttttgcctatggaccaatggaaggtagttcttcagtcttgtccgcggtatttgttggttaatcttgttcttcactcttcttgagagtttagattgtctgattgagtattttgggtgtaggttaatgtagctttgttcggtttctgttcaggtttccttggtttgacactactcagtttactaatcttgattggtttcatacttcccatatttcctgtaaaattcggtagcttgttttgtcagtgctagaagtgtaggatcagctaccttatattgtctcgctgcacggccgatgacagaaggtatgaaaggacgaattattcatataaaatacgtcttaatatttaattaaaataaaagcacagaatttttccagcactcaaaaaatgtcatttaagaaaataccttgtcaatactgcacttgtacaggaagaaccagtaaaatctaaaaacaagtaaacgtctgaacaatggataaattggggattcatttcacatctttgtgactgtcactgtcctctatggagggagcatgtctatcagctgtattggcacatcactcccccagtttaagctcactatggacgtgagcacagtactgtcgttatgcaatgggcatcggtggaagccagtcaagccactactaggctgccggtagacgtggatgaacgacacgagacctgtgacaggaaaatttaaataaagagcataacatatagtagcacaagatataaacatgtactccattgttgtcatgttacatccaaattcttatggggaagaaaatatatgcaaacagtaataaaaaaaagaaaactgcattgcaacacttaaacccgatgcaggggtcgaaggatagaaatggcacaaaatacgatctgccaagtctgatggaggcaaccaaacacgctaaatctgatctcaggaggtagaaaaaagagcgtaaaagtagacaaaatgtgcaatatccccattagtgtttgagagtagctaccattggtcactagttaggacgcaacgacaaacaacaatgcacttgaacatttaacaagcagatgttcatctgacaacgaggacaacatatcgataataggcatataataggcagtttggatatggaaggatgctgcatcatgtttccttcatttcctgttgctttttccatagagttaagtggatccaataagtccgataagaaagccgagtgccaacatcgcctcagctatgccaacctgcttgctcgttgtcgctgcagtattttccagtctatccaatctccctgcaaaaagacctctcttgcacatataaatagttacaaattcaagcgataaccaccgtaagtccgtaactgggtgagtatcgtcgattcgccgctaggggagcggtggtggtggtttggggtgtggagtgggtgtttcaaatactgggtccccgatttatgctgcattcatacgtgcaatttgcttgagcttttcgctggaacgtaaaacaaggacgagatattaagatatgattaattagtataaattattagaaacttgaaaaatagatttatttgatttttttaaaagaaattttgatatataaagtttttgaaaaacatactacgtaccattttacccgttcgaaaaatatgctaatgaaaaacgagaatttattgtttggagttgttcagaagagggagtaccattattttgagttagccctcgctagggatgaaatcggagcggatagtttccgtccgctctggataaaaacgaatacgtacctctcggatcggataattctcggatagttcggatacggatacgaatacggatatttttctctcggatacgaatacgaatatggtatcagggtttccgtcggatacggataataattcagatatccggtgaacagtgctattcggatatccgcagaagccacaagacataccccatttctttataactctatgaccttcaatatacctttttagattttaatagtagttcatctcttaacactagtccacattattaatattatttaaaattttaaaaatatttataaattatactatattttatataaaatgatctaattatatatgttgatatttgtttctattagaagttgaattggttttcgtgttccgagaaaaatttgttcccgtattcgtgtccgatcatattcgattcttattcgtattcgagatagtccgtatttgtttccgtattcgagctatccgtattcgtttccgtatccggcaaaaaatataaaaacgaatatggtatgagcattatccgtccgtatccgctccgttttcatccctagccctcgctcagaccgcttggttgtatagtacatggataatatggcgcttgtgtcatcttcttcctctggcttgccatctgatttttgtggatcgctgaccatagcagctcgaaagaaagctgaggggtcggtagtcaacctcgtgatggactgatggcagtctctggagtgcgtgatggactgatgacagtctgttctgctctactccctccgtcctaaaaaaaagacaaaccctaatttccgtgtccaacgtttaaccgtccgtcttatttaaaaaaattatgaaaaaaattaaaaagataagtcacgcataaagtattaatcatgttttatcatctaacaacaataaaaatactaattataaaaaaattttatataagacggacagtcaaacattggcacggaaacccacggtttgtctttttttgggacggagggagtagtgttatgcatgcagcaggcgcgtcaatatatgatcgattttttgtagacgtggctatggttcgtctaaaatctaacgagggttcatcttaaaaaaaatcgtttatgtagcagttgcatggccacgtatatttcaggggttcatctttaaaaaatcgtttatgtagcagtggcatggccatgtacatttcaggccaggttcgactcagccacgcttactcccctcgtgctaaaatacaatatttattaactttgtccatataaggcttattccattgttcatcttctcaacttctaccttatttttcgtgtgcatgtttttcgaacagctaaaaaaagttactttaaaattataataatctattttttaattttttagctaatacttaattaatcccgcgctaatgagttagcttatttttcgtgtgaaggaagtgagttttgaagaaccttgacgttcgaatgcacccttgcccttggcatggctattatggctgtattatagctgagtccggtagtgtgttgagctttttcaactcacaatgttcaaattactaaacaatgcattttttttcaaatttatttttatatagaagtttctttaaaatgtcaaatagacgtatttttaaattttgtaataatttgtactcaaataattataaactaattgcttatctcattttacgtaatatgaaaactctcactccaatcgtccaaccgaactcatcctaaggagaggaatagaaaaacttatttgtcttctcgagatagatgtggtataagctttggactataataaagataagagatagtaggggtagtatggatagtttattggtaaaagttatacttacaggtactatgttatatttgaaataatttttgaactctaaaagttgctatattttagaatgaaagaagtagtaagtagtaatattgtacaaatcatatataaaatacaagctcagactataacaaagataaaagacagcagggtagtatggatagtttattgataaaggttttgtttacaagtacttgattattatatttagaaaaaaaatccgatctatatcttagagctaaaggagtactccgtgataactagtactacaattgctcgtctattactccgtactgttgttttgaataaagaacctctgtatccttattagttccctatttggctagcggttctctgctgatagaaaacacagtggcatgagagattttcttaactctagtacatgtccacggcttgcgttgagtgctaagagcgtgccaactggtttgatcttgtaatcagcaagaaaaaacaataaacaaagttaaatgattgatagacgatcgcccgatgagccgatgacgtatcgatagagatcttagccgatatagttaggccatatcggcagtggattgaataagtaaagcaaaaccctaaatatgtcctatcggtcgcactaccgccttcttagtttttataaatctccttttagacaatgttataaaaatagccgataatctagtatttagagtaaatatagctaaagtactagctattactctagtacaaacttatatagataaatcaatatatctatagaaatatatcaaataacacattcattcaccagatttaatgattatgccgagattgattaaagcttcatatacttataaaaagtgatctatctagataagtggcaaatatacacaaaatatatcatgaaacatgcactaccatgtatattaggtaagatcggctaaaaccctagtactatccttagttatgattgattccaggttagtttttagggttctagaaaggactagggttgatgcaacacaaagtgtgtaaagaaacctaaaatctaaacaatcaaataattaaccacttttcaggatggtagataccttagctaatctaatttggcaaggtgatttagccgataccaacttaaaccctaaagtgagaatcaaccgatacgactaaatcaaggtgctaaactagattaactaacatatatgataacaatgaccataatgacaagactaatacatctaaaataacataatagcccccgatagtgcaagccatcgaaataagttacctcttgttgagagatcgcaaccaatgtcccaatttgaagcaagaactcgtcgaaaagtaaaaggaaaaaggtgacgatgcaccaaaagttgtattgattagattgtcctctcttattaaaatgatccagggtttatatttatacccggagtacaaaatttagtccataatggacacgacttaaactttcctaaagataaaaacaaacaaatccacatgacggactcttaccaaatctctaattcaaaccagcattaaatatcctaatcaatagatataattgacttaaatgagctcaatttctaaaccgcaatgacggttatctcaatcgaggcccaaaccgagcccaggttgagttgtatatgctacttccatatcggctttaaacgtttacaattctgtttcagccgatacgctctccagccgatgcacaatctgtttccaaactgactcaatctcgcaccaaatccgcttcgatttgtttcttcttctctgagtctgatgcgaaattctgctgtaaacattctctaaatctggctttctaattacatccatctacatacaaacctttttaaaaatccaaataactacccatttctacatgctattttttttcacatacacaaatcacctatatatacatatcaagtacaaagaaaactcatcacatctgtttgttgaaatgatttatgtcctcatgtgtacaaatcaactctgctcaagtccctaaatcccacctgcccctcctaatgcatgcatcctcctactcaactctttctattaaaatgtgtgtacaaagttttagaaactttataacaaaaagtttttcggacattaagattattttagatttagttaaaattttatgttgatattcataaatatttcttattggaaacttccaactttgtataaaaagttcaatttcaaacttaccatatttgcatgcaaagaaaaaacttgcgctaagaggaaataatatgttacaatctgcatagaagataagctagcacacaagggtgaaaaaagcactgctagacatatacatgtctcccgcaagcccaacacgtatgtactagaaacatctaataaaagtccaattaaaaaagagcactatagcagtggaaatcgaagtcgacaacagagggctccctaaattggagattcaccgagataaacaacgacttttaaagggaaaggagatatactgtgcctttctttcattcattttctgttttcttgtccctcatagcctaatattgattttagtttctcaaccgaaaaatcaggtacaacacctccctcaactattcaatttgcctcccttagcagttctaacggtggtttcattctacgtggcattagtatcaacaaaagaaataaaagaaaaaaaactgcaagatccaaatgtcattctcatctctctcttcttcctctcttctcggtgactccacacctgcaacgtcaaagcattcaagcagcatctttcccttccaactttcgtctccccgctgcgaccctccaagtaggcgccatatattaattgaaaccactatctaaactactaagagaattcatttgaactaactttcatagttgagagggacgatatacccggtttttgcctacaagtgagggaggccgagatggactttttcctttactagcaatagtgcccgtgcgttgcaacgggaaaaacaccgtttgatagtgtgacaccttgaaaacctcaaataggtaaaaatcaagtctaatttgatatattaacaaataggtagaaccgagtctaatttgatgaattagcgtataatttatgatttagttttagatttatttttcgagcctacttaggagcttatctgatggactttgattttaaaaatctgagccacattgtttgatcaaatttgctttcggcccaggtcttactagccggcccaaacttgggctggcccatctgcggcgacctaagtcaaatcgacagcccgcaagccgggcagctgagcgtggcccacatatgtggggacggtctgatgcacttccgcggcccattgggcgcagcgtaatcaatggcggcggcggttttttaagtagtatttttttttcgattcggatctatagtttttctcaccacttaggagaaaaagacttttgttgttgttgttttcctttattttattttttgtgcggcttttctttttctttttatgcacctttctgcctttgatctctctcttttattatttttttaacaaaaacgacctcaagtaccttattgcaagattatagggactcaaatataaatataaaaattacaaggactcaaatgcaaaagtacaaacccaaaaactaaattcatataaaaatggaatgctctcgacccgtaggttccgtttttgcaaacaatcttcaattcggcacatcaatttttttcaccaatgtagagtcggacttttttttcttttctgaaagggaagtcggagtttttttcttttctgaaagggaatcggatataggtgtcggacttttttattttattttttttcgctattatttttgttttgacggacgaaggaagcatctctcgttttgacttttgttgttgttgtttttctttattttattttttgtgcggcttttccttttctttttatgcacctttctgcctttgttctctcttttattatttttgtaacaaaaacgacctcaagaacctattgcaagattatagggactcaaatgtaaatataaaaattacatggactcaaatgcaaaagtacaaacccaaaaattaaaatcatataaaaatggaatgctctcaacccgtaggttctgtttttgcaaacagatcttcaattcggcacatcaatttttttcaccaatgtagagtcggacttttttttcttttctgaaagggaagtcggactttttttttcttttctaaaagggaatcggatataggtatcagacttttttattttatttttttcagtattatttttgttttgacggacgaaggaaacatctcttatttttttaagtagtagagagtaaagacagagatagagatagagaagtagagattaggaaggcagtgcaggtccctcgtgggtggtggttgtgggcttgtggaaataaatccacatccgagcccatatctcccaacaagagaagcccacccaagcccaaagcccaacccgtctctctcttcttcgattcgacgtctcctccttccccccaaatcgcgctcttcatttcgaaacctcacctcgccctcaccgccgcaatgccgcccgcgcgccgccgccgccgcaccgccgccgaggtggacggcgaggccgtcccctcctccgccgccgacctcctcgccctcgccgccaccctcttccccgccgccgcagacgcgccgctcagggaccctccccacctcaagcacctcgtccactccctccccgactcccaccccgtcctcctctccctcccgggcgccctggcgccgcccctctccgacggcggcgcccccgggtaccccccgcgcgccgccgcggtgctcctccacctcctcctcacccacccgtcccacccgccgcgctggggcgacctcctcccgccgctcgcccgcctccacgaccgcctcgcgcagctcgccaccgacgacccgcccctggccgcgctcgccgtcgcgtgcttcgagctcgcctggagggccgccgcgccggggcgggaggcggtcgttgcacagaccctgccgtacctcttcgccgaggcgctctcgtgcggctccgccaccgcgaggccggtgctccgccgcctcctcgcgctccgagacgcgctggcgctgctcgactacgacgacgacgacagcatctccgacttcaagatgctcctgctgcgctgcttcgtgtcgccgctcttcctcaaggccgaggaaggcaggaagctcctgtccctcgtgctcggcgtcagcgagggcctcgccagggaaggcctggagctcatcagagcgcaggtggggatgccgggggtgaagcgggcggcgctggtggcctacggggaggtggtgttcagggcgtggaaggacgggggttgggtcaggggggaggtcggggaggcgttcctgcaggggatgctggagggggccgtgcacgccaggagcaaggagcttgccaaagcggctaggaagcttctgtctgcgttcgtcgagcagagaatggtggctggagttgaaaaattaatctttcagcttgccgagcccgtgctgttccggtctttgcaggtatgaaactgtctagtatctttttctgctcctgtgctaatgtattactctctccattccaaattgatctacatattttataggtacaccaagaccaagaaaagctaataactctctcatactatatttactctagcaacaaactcaatgcatgtatcattcccactatttcctagccaatagcaaatcaaaatattgcatgtgggttataaatacttgtgtgcatggatgcatgcatcaatgtccatttactccgatgcacaaataacgaatagacttaatgaatgaacacaaatatgtagatcatttaggaataacctcaaaaaaactatatgtagataaatttggaatggagggagtaactagtatgatgtgcttacgatattcattatggatgggtcgaaggtgagcatcacagaataaaattgttatgcactacttgtgtacatgaagttacagccaaattaaaattagtagttatgatgaatggtagaagagcgaagagtggagtattggtcttctagcattacatagacatatcaatcatggtgctgcttgactaggattattctttgttacattggtcaaacagtacgacaagctcaataacacattaacatgatctggtaataggtagactatttaaatggttcagcaaatacctccctctgtttcaaaagtaaggcatatacctcctggcttcctgcaagcctttttttctttttgaaatatactagcaaaaatgcccgtgcgttgcaacgggtgaaaaaattctaatgataatatatgtttttcatgcataattatgtcaatgacaatgtttgtattttaatgagcgacttgttttttataaacaatgttttttttcttgcgcgattttttcaaaccatttttcagaaaggtgcatttctttctaacagtttttcctagcatgttctttttgctttttttacttacaacgaaaaccgtatttttctcccttttttcttttcttttctcgtgtgttttttgcatgtttttttttctaacaattattttctcacgctttttttgcttgtttttttcgaatgttcttttttgtttttttccaatacaggagaatatatgacgaaataaaaaccgtgtagtagatgacaaaaaatcgatggatcctatccggctcaagcgtccatcaatttagtgttttttctgacagatttttcagagtgatttgttttttagtagacgatatttttatcttgcgcggttttttcaaaccattttttagaaatggcgcgttttttctaacattttttttcctcgcatgttttttttaaaatttttttaccgacgatggaaataatttttctcgcgtgtttttttattttttatggaagatgcaaaacctttttagtgtgttttttttgcgcttttttctgacttttctcacatgtttatttgaaccgtttttattttgtcgtgcattttctctttttaaatagttagattagattagacatagcgaagagatatatactgattagaaatcggaattagttttgccctttccattttttctcgcgcgcattttttattttttacgaaccattttttcttcttatagaatcggacgaactttttttagatgttttttcggattttttttcgcctttacaggaatcagacttttttttttcagtttttaaaggaatcagatctagcattttttcaccacttttattttgccttctataggaatcggatctacggttttttttcgccacttaggataaacagacttttgttgttgttgttgttgtttttctttgttttttctttattttattttattgtgtggtttttctttttttatttttatgcacctttctgcctttgttctttcccttttattatttttcaatcaaaaacgatctcaagtatcttatttcaagattgtagggactcaaatgtaaatataaaaattacatggactcaaatgcaaaagtacagacccaaaaattaaaatcatataaaaatggaatgctctcaatcggtaggttccgtttttggaaacagattttcaatccggtacatcaattttattttttgtttttaagggtgaatctagagtcaggatttttttccccttcctgagaaagaatcggtaggagtcggacttttttttatctttttcgctttttttttgacggacgatttccttttctgagagggaatcggtaggagtcggactttttttatattttttttgctattttttttgttttgacggacgaaggaaacatctcttattttttaagtagtagagatagagatagagataaagcatgcatgtaacatttatcgctgattctctttctttcctgtctttctttcctgtctttctttcctgtctcttcaacattcagtactaaaacactaactactcccccttattctctagacatcaacgctgtggactatgatttacttgcgctagtttattgtttccaacttttctttccctatttggtctttgtgtttgacaaatttatggcttacaaaaagaagtagattgtccaattatcaacatgagtgctaaacaacatatgatattattgttttatcactttcttttggttgaacttccacgtggtcacaactcatagtagagtcagttattaagtgtctgtacaaatgaaattgctcagtattgtg

SEQ ID NO: 19983 - DNA, 3351 bp, Oryza sativa
aaaactatgatttatgtgttgctttgatttgaatgctcttccttagaaaagcatgctcaatagtttgttttactttttggtttcacaacctgaagttatgacatgtatgcatcaacaaataagaaatatatagaacagtttatgctttaaacgtttccgtttttatctgaagtcattactgtttggcaggttgcaaactccaatgtacgccataattctttgcaccttctattagatttgttcccccttgaagacccggatgtgacaaaggatgtcaatgatcctctactagagaagcaatacttcttgctagacaaacttctcatggacgattgtccagaaatacgaacggttgcgattgaaggactctgtcgtattcttaaccagttttgggaagttattccttccctaactatttcaaaatttttaagtaaaattgttgatgacatatccaaagattcttgcactgaggttcgggtgtcaaccataaatggtctgatatacttacttgacaatccgcaaagtcatgaaatactgaaagttctacttccaagattaagtgacatggtctctgatcctgctttatcggtcagatcttctgcagttgatcttcttttggctatacgtgatcttcgatctttccagtttaataaggtacattacgtacttcttcattacatatgcatgtgataattgattctgtaacttaagtaacctttggatctttattttcttcagtttgagactttgaacaaacaaactagatgtatgccttttgtttcaggttgttggattgggtactttgctgtcttcactctcaaatgaccacccccgtgtcgcacagaaaatcacaaagcttctcatcccttcatattttccaacaaaattgccactgaaagaagcgtgtgctcgctgcattgcacttataaagaggtcacccacagctggagcaaggttttgtgaatttgctttatctgaagggtctcccccaagatcccttgttgaactgatcaaagtctctattactctggcactggcaccaacaggaatgaactctgaacagactgatggtcttgttattgcttcagccaatctaattaaaagcttatctgaggagcgctctagtttagcttccttaagagaattctttgcaaatgcaaagttgaagctactctttaaaacagaaatttctgtgggagcccggtctgctctactcagtatggctccagttgtatcacctgatgatctatctgctttgcacgatgaatgcatgaatgtagtcatgaacgctgcaggggtttccacgcaacaaggttgccaagaagcagtgctagcagcacataagttggttttttcaagtggctggtctgacgaaatgtttgaagcactgacaaatattctgcaatctaaagtgtcttgttttgctgagatttatgatatagaacctcctatctgtcccgttgctacttcaaagaggaagaaaggaaaatcacttaagaaaacaccagcaaagtctggtcatgatattggaaacgggtcatccagtgaagactttgatattgttgcaggtgcatcatggcagattaatgacatactgaaagatgaagaaaagagagttgcctttctacaatcttcttattcagacgtcgcattttcatctctgaaggtcatttgtcaagtgtacattgagcagtgcctgcagtttgactctttaaatgccacacctcttttggcttatttgagtttggctacacacagcgctcttcaggatattgaccaaactgatatcagcacctctgaggtgagttaacccccacgattccaccatgcccactttctttgataattggcacaaaaatgttgataaaacagtcagttccacctcactgtatagttgtcacagaaatgttgatgaactcaaacactagccatctggtcaaacattgatggtaactggaaccgatatttgttggttgcacttaagctatttttgctacggttatgtagattattgtgaatgtgttcaacatttttttttcatttaacaattaacatgttgccattctcataagtttgatctcttgtttcagtcaacaaccatcaatcactcactggaccatctgctgaattgttttgacaaactcctaaatgaatctgttactggttccacaaactcattgaagttgaagcagaataagaaatctgcacggcagaaacaccatcatggagttcctgaaggtatacctgcacagatatttacaacttttgatgcagaaaacctctttgatctgaaactttatttattaacggaatattgatatgattttcgaaagcatgctagagaaagtagttatgtaattaactttaaaactttcaacttgtagtcaccaaaatcagtatgttatctatctggcattatcacatgatataccttgtaaatgagtgggttatgtatcttgtgcagggaatgcattgagagggacagttaatgtatacatgcttggcacttcaattctcaagtttatcgttgacacaataaccatcaagttgatcagtgataataaagtaggatgtctcaattttgcattgtccttcacaaaatatgcatcatcagccataaaaatgcatcaggagcagagctcatctttcaaagggaatgatctgaaagacatattgatgcttatacggagttccttcacatatgcagccaagctgcttcatttggtcctagcaaactcaattgagtcacagagtcccccagaggaagccttctttcttgccaataatcttcttgatcttgtaccctctgttgagtctgctgcaggctccaaatttgctctcagtttagtttctgtcgtaaagcagtggctaccagttgtcataatgggtcttggatgccgctggttgattgggccacaggctgagggtaacatgtgtgactttggtgggtcttgcttgccactatgggtggttgcattggccaagaatgagctgcttgatgatgaaaaacctagagatgatgatcaaagcgagcaggccagtgaggactcacagtcatccagaaaactagcagaaatgatggtaattcttctgaagaaagggagcccgaaaattcttgattctgtggctggcgtcttcctgtccaccctcaagttggcgctgcagagagcggagtacggtgttgtcttgggcttgacacgctttgtctgtgtcaggttgcttgggagtgactcctcggcatcggagaagctgcatcttgctcatgattcacttcgtgagaacttctttgagattgacaagcatgtcatggacgatctagttgacagcgaggaatcgaggcagcaactggag

SEQ ID NO: 19984 - DNA, 1822 bp, Oryza sativa
cctacccgcatttattgcgggttgaacgagcgcgtcacgccgcatgtaatgcagcgcagcgcgctcgcttatccggtccgtgaccgggcgcagcgtgtgaccggtcatagaccggtcagatcgcgggttaggtggtggcaggtggcctgttacacgcctcgccccgtcccgtcggattgatgagagcctccaggcacttgtccctagccggaggcggcgtgccagctcctgaagatggcacgtcggtcccggtcagatatatgccaggcttcatcccaaccattgcaaggaagtcattgtatgaagaagggcagacatgcagcttgctaaactgacgcgtggtggacgagagtgaccggtctgtgactggtctgacgcctgtcatgtcataggcagacaaccgcgctcccgttttgcacctccttccagcggagtggaggtaggtatgacccatcccatcggagggtcattcggacagcagccattgcaaatctctgcccatttatgaagggatgacaaggtgatctccgggagcagacgagtgaggacgcctggccacactgaagaacaagctgtgttttagcttccaagagaaggtgagccaagttttggtgaagatagggtgggtccccacccaaaagaaaagtaggtagaagtggagcatgtgggatccccttgagttataaaaggatgaccttgcccaccgaaaagaggaggaaggagaagaaagggaaaaagaaaaggaaggagaagagaaggaaaaagaggggttctagagcctgagctctctagctcttctactctctgtaattccttcacactcagatccaccagaacacaggagtagggtattacgcttctcagcggcccgaacctgtctacatcgcccgtgtcttgcgtgtttgctctctcgtgtacattccacagatcaagggcttagagcctcactcagcgcccccggccgaaccggcaaaggggggcctgtgcggtctcctggtgaggagccccacgctccgtcagcatcctataggcttatacccatatggatgctcaacgacttcccaagtaccattagacataattgagtccatctcactgcgtaccgcttccttacaatagtcactgttaggagatgaatatgcctcttcaatggttcttggagtgacatccacaaggtatacaatgtagtcatctccaaaggattttgcaaccctttgtctcttactcttacgagtatctacaatgttatcctcctcaggattttcctctggcgtttgatcattgtgttcttgttgacggtcattatcgatcagtcttgaccgtcaatattaccaaaatagaggagaactagtgatgctttcaatgcatatatatatatatatatatatatatatatatataatattccactagtattaggtttgctaacctttttgcagagaatgacaataaagtggaggagaatcgacatcaacatagatgataaatcaatcggacgatatcaagaatcagacttatgtatgaatgggccaagaactcagaattgacacgatgaattgggccaaaattcacaagtctacgaagagaagcaacagaggaggccgccagccaaaattgggttggattgggccggccctaggttcggtgaaccagggggttcagccgaaccctccttagtgccgttggatccaggttttggctggacggcgtggatcactccacaatgacggttggagggcaattccgaccattccaactaccacaaccgtcattggcagcctatttaaggagttcctctcctcacttcactcacacacctcaa

SEQ ID NO: 19985 - DNA, 12567 bp, Oryza sativa
atctggaccttgaagattcaacatggatgacatatcagacatattttcctcttcctctaaatctgcatcaatcactataggaggaatgtcatccagagtcgcctctgagtcagaacttgaatattcagaaccactcattggagctacgccctttgaagcgttattactcatagagagagagagagagagagagaggaaagtagtataaaggggatagccttaaacaacttgtcaaatatataatactaacacaaaagggtccaaaatagatgttgtcgtgtgtgaatacgtcctggttgccctgaacatttacagctcatgcttccaactggaattggtggcatactgtagtaatgacaaaataaagtgtatcgctttaactgatacatatcttcctccatacaaggattcaacatttaatgcgatatatatttcttcaatatatgggcgtatcatttaattctacatatatacatctttcatttgcacaatttaattctacctatattttgcttcttatttgaagataccatttaatgtgatacttttttaacagatacacatatcttcctctgtagcacaaggctggatcattaaaatttaatgtgacagatattttgatccatttatggctgtgtcatttaatacaatacattttttcttccttgtatgggtgcaccaattatttgtgacaaatattttgttcgtatattcacatatcattcaatacgatacgcattttttttcttacaaggatgtaccttcaagaaatacatgctttcttcctcgtctggttctgctgtttgttgcaatacacgtcctctaacagatgcctgtatttacaaagacatttgtcccaccaactagagggaaaaaacaacgtacctcatgacaagcatgcatctgtggtccacatgcataattacaatattataattctttatatctttgcccttttttggatgtccttccattttcttattttgaatgtacatctacataaggatagtgtgaataatccagagtagtaacattctccaatgctttattagctatgtaccaaatgaatggcacacctaggaatgtgttccaagctgtataattttttggatgaatgtacaccgcaagtaataggaaaactttgaagcactttgtttttcttttctattttagcagaacaattggcttttctaagaagcaaccaataaattggttagccccaccttaccatggtcaccttcgcatccaaataggtcatggttgtagcatgttacacatagggtttaattactggtagttaccacgaaaactaggcttaccatcgagctttagtagcggaaacgaccagtaaggtttggcaaaatttatttaaattcatttctttttccaaagagaggaaattaaaaataaaatcatataagtagtatagtgctatctggtgaaacatttatgaaatatatgaagttaactttatattttgtacccaacccaagttgaaaataaaaaaaagaaaaataagcaaatgggctaggctaatagtgagtgctattcacaaaacctatcttagagagccgatcgtgatttctactatgtttcagtttccaaaatacaaaaatggtcacacgaaattgcatgcttgattgctttattcttttacatcttctgaatttgccctactttttctagaattatctatgatttacctgaatttttgaaactttttctcacttttcgggtttcccaagaataatgtttgtccccctgagtttgaatttttgaattcaattttttttaatatgaattttatcagggttatggataccacatacctaatagtagttgactaaatctcggcaggacccaccacatactatgtcttatacggaaacaatcttcggatataggaggagttccgcacaaggaaggatgaatagagttctacatggaaacgacaagaactactcagattgtatccatattggttttcctagttctacttggacaaggggacacctatgggtataaatacaaggctccataggaggagaggggacacgaaacaatagatcaagacataagatcaacatacaagccaacatacgccaaaacaagacgccggatatcgacttcagagataagtatggctagtcccctacagcgtctacgaatactgtcaggagagacatagcgatgtctttgatctcgctggatgcggattctaggaggaaggctaccctgttgtcgactatgagtcagcacttcagaccgccatgtcgacaatagttagataggctaccccaaatattgtactagtgtgattatgatgaataagagcaacgaccggcttcgaccaacaggagtaggcttattacttgacaatttaggggctcgaacctgtataaaaatcctcgtccctatatcttttattacaatctcgcatatatcataataccaacgatcctcatactatgcaaataccggaatcgcgacatcaaacgtcgacaaatttcatctagttttcacatttaccatgtgctatatgtgttatcctagggtggccgtagggtttcaattatcaaagcacaaggtcactgataagtccgattttcccgtttatcgctacccccgataaaatctcctatcggccaaacatttcgggttttttttgaattttctggacatagcgtcaataactactacaaagttgctttgattaattcgttatgacctgtaggttttaatcaataggttttgtgttcgattcaagcaaagatatgaatttcttctctctctcttttttcacttccatttgcttgcgttgtgtgtgctataaaaatgttgatattatctcatttataaagtatatattaattttttatacaaaatggtttggatataatctgtatgatttcctaacaacttttgttcaatttcttttcaaattttatccaaattttttttctatcaccgttagaattccgataaatctgataatcccatttatcgctacccttcgatattttttagctatcgataattaaaactaactgtggaaactactagctttttatttttttttaaaaaaggaaacaaactggccttttctaagatacaacaaataatttggttagccccacctaaccattatccacatcaccacccaaatagtccatcatggcacgcattaagcccatccacaaccaagatatcatgcatggtaactaggtttacaaccacgcaaggccttcttcgtttagtcaacaagagagggattagagggattgtgaaaaattaattccacatctcaataggtgtggaattattctcctccaaatcctcctcgatccccttgtgggtgggattaactgaacaaggtctaaatgatagccaatctaattagttgtagtcacagtcaaagacttagtgcaataggtgatgttgtcaagctaaatggtcttatgggcgagaggggatagatgcatagtactccatctatcctaaagtctttatccaatttcattttttgtatttttttttcaaatgagatatgcttatctgtagtcttcatacatctaaaacttaaataaaagggctgtcttttcattttacaatgctaaattaaatttttgatcgaaactagagcgaccatcttaatattcattggttgcatgcaaacatataatttcttgattttgttatatgagggatgaattaatccctccttaggttgtgttcttctctcaactttcccaacctcttctctcttgttttccgcgcacacttcccaaattgcatttttttcgaagattttctatagggaagtttgtcagggttacggataaggtataccctttatccttggatgtatgttgtatactgatacggtatacccgcgcgtatacgaatagtttccgtatacgttaaggaaatctatcacgtgatagagacggtatctacggatggaaggagttctactcggacaaaactgggtctttaccatatcgtgaggggtccgatatctccgagtcctacttggagatcaactgacccgcggtatataagggaccccctgggcaggacctaaggcatcaaatatcactgccaacacacccaccacagcctacggagctagagcgtgcaggagccaagtcgccgggagatatagtcggaccaactcgactgcggtcttatcggtatcatcgagttctgctattccctttgtaatctgtggtttccatcatataatgccataccaactggattagggctattacctaccaagggacctgaactagtataatccttgtcttttgtttgcttgatatcgtactacgtagatcctcataccaacggaccccaataccctctatatccggtctacgggtatcccccgtcgacaaagttgttttaaaaaaattatattaatctatttgtcaagatttttttaactaatacttcatcaattatgtgctaatattttgctttgttttccgtggtggtgtttggatccacggattaaactatcacatcggatgttttgacattaatttggagtattaaacataggctacttataaaactaattacataaatgagagctaattcacatgacaaattttttaagcctaattaatctataattagcacatctttatagcatcacataggctaataatagattaattaggctcaatagattcgtctcgcgaattagtccagggttatgaaatgggttttgttaatagtttacgtttaatagttctcattagtgtcaaacatccgatgtgacaggaatatttgggagacttcctcattgcaaggctgttaacagtcatatatttgagttgaattaatttagtcggtctgaaacgagcttaaagaacatacgagtatttttccctatgcaaaaaaccctttttaacctttgtatgtggctgtgtttttgaaatgtacacaacatgcaactttttgacaaaaggatttgctaatcaaatccttctctcccacacaacgcactccgaagtccaaggaagaattctccccatcaaagctgtaattgcaaagccagcaatctcacgctgtcacaaaatcagctaaacttgatgcctatcgcacaatgccaaacccaaaaaataaaaatatcaaattttggattgcctcgagcccctgcattttgtgcggatcaatgcatcggcctgtagtagctgtaggtgccgtagaaggtctgcgtcatggtgagcagcagcaacaagacaccggcgaccaccgagacgatcgcccatgggttgctgaagtagttgtgcttgaggctggcgatccaggtgctccacttgtggtcgtagtacctgttcacctggtccgagagccccgagaggtagctgtcgttgatgtcgaacaccacctcctggcacagccggttgaagaggtcggccacctcggcgtcgctgcccagccagtgctcgatgatgccgcggtcgtggaggtacttgacgtcgtcggcggagttgatgaggttgtccatgaagatggcgtaggaggtgatgttgttgccgcccggggtggcgatgtccatgtggcattgctcgaacgcgatcaggttgaggaagagggacttggtgccgtcgtggatgaggatgcgcgggatctggagcacgccgtcgtggaacctgatgtcccagaagcggtccgtgttccgccgccggcaccggatgccggcctcccggagctccgacacgcagtggacgaactgctgccgccgcttgtccgccacgcgccggagccccgaccacttcttgagccacagccgcgcggggggcggcggggtgggctgcagccccgcgcggaggaggctgcgccggaacacgtcgaggcaatggagcatcgggccggacagcgggtcgaactcgaacgccgccgccgccggtgaggcgccgatggaggactccagcttggaccggtccttgcggagcagcggctcgtcggtcggcatgagcgggtcgaagaagcgcacagcgaggccggcgacggcgccggtctgctccgggttgccgagctggaggccgagcaggaggtcgagcacgaacaggggtatctggttctcgagcaggatcatgtcgttgcggatggcgtgcatcgcgccgcgcatggcgaagatggggtcgtgccgcgagtaccccaggtcgtcgccgagaccccttcccgccgtcgtgcgcgccgcggaagagctccagcacgaaggtcccgtccagcaccaggcactcgacgagctcgttcccctgcatcccggcgacgcggccgtcgtagcaggcgcgcgcccgctcctccatcggccgcagcgcgtcgaggtaggcggtgacgtcgtgccccgtgcgcttcaggacgtggtgcagcgcgcgccacttgtgccgctccatctcccgcagccgccgccggccgcggtggagcgggccgatggacaccacctgcggcatgtacgcgcgctcgtcgccgtcgcggagcgacttgggcacgcggtacacggacagccgcgcccacgggcacgctgcctcctcggcgcgcgcctgcgccagcttcccgcggatggccaccacccattccgggtcctgcggcttcgggctgtgcgccggcgactgcacctggaccttcacctcccgctcccgctcctggcgcggcggcagcgcgtcgcctcccgctccggcggcctcgccgttggtgagcagcggcaggttgcggttcagcgcctgccacagcggcagcgcgccgggcggcggcgcggacttgttgaggttggcatcgacggtctccttgagcttgaccgtgatcaggtaccagctcaggacgtccttgttgaagacggcgaccatcgagatggaggctggcagtggcaggtgcagcggcttcgccggcggcgtggggctcgccgcagtagcgtctcgtggttgccaagatcagtggccccgggacagagagagcaagccaactcgagagggaggcgaggcaagcaatgtacctatgaatatcttagaacgataattttatcagctgatgatgattgatagtggaatttttgggattgcttgcttgttgtaaaatattgtgtggtctttgacaaaattaaataaagtttcctcttgcgatcatgtgcaattttcaacgatggacattgctgccagcctgcgatgtgcgctcatcagcaacttacgctgcattgcacgtactccattccgtcgaagactaattggcgactgcacgataatcccaccgctgtaatataaagaatatagatactttggatttgtaatataacgatgtattccatctaattaaaatattttatattttaagacggattgagtatttaactacgacacgtatgatcggtactccctccatttcataatataagactttccaacattgctcatatttatatagatgctaatggactagacacacatatatatatttagatttattaacatttatatgaatgtggttaatactagaaaggcttattatgaaatagaggaagtagttcgctaccctaacaatctcagagtttttcttttccggagaggatctagacatgtagttcgatccagtgcactgtaaccgcacacaagctaacatcgtagaagtacctaccacaagcgactgaccagcgatctgaaccagaagattactctacccgagcaaagcgccaaccagaagcccagaggcaaccgattctccttacgcttcgggaatcgtggaccagcgaaagctggcgaggcagtccggcacatggccgcatgcccgcatacatgtatccccttgattcccatagccgttgggttgcctctcggggatcggaagtgacgagctagtgcgacgccacgatgaacgcacatcctcactcacccagcgaaagccggaacacccagctgaagccttctgccggcatattgtcacgcgccccactggcgaaaaatcacgccgcccgtgctacgaaatgtacgcgtcgatgaagatggccgccaggtcaggtcaggtcacgtcaggcgggtgcggaagcggtgggccgatggtggcaggctgggcctgttggaggcagcctgcgggcaattaattggaaggcctgcagtagcagcatgggcgcgtatttagagcaagttcaatagtataacccgctacagacttcaaattaactataactaatttaatagcttatttatataatagttaattataaaaatatatattactcctattaatatccggtctcacatctcatacacacatacgtcttgaaattcatgctgcagctggctacaaatatatagcccgctttcttctctctcttctatttttttctcgatacgtggttataggtggcttatagcctgctattgtcgctgctcgtatgctccggggccgggggcaaaggtggataagctctttcggtgagacggtgacaattattgaagtaactgatcgtgattgtgatcccttcattgcatgatcaggcaatatttgagcagtagtaatttttgctgcacaatagattgggccttcaaacaggccgatgggcttcagtgcttcaccaagggaataagttcacttcgtgacccttaaaaagtgatcaaaatctaatccgtgaccctaaactacaaaaccggatatctcgacccccaaactcttaaaaccagtgcaatttgactccttcagcgtttttggagagcggtttcgctgacgtggcgcctacgtggcatcccagtcatcaaataaatttaaaaaattaagtggggcccacctgtcagtgactccctcctatattctctctttcttctcgttggcatcaaataaattaaaaaaaataagtggggcccacatgtcagtgactccctcctatattctctctttcttcttgttggcagcggcggcgggaggatgaggggagcggcggcggctggcggcaccggggcgcagcggaactaggggcggcggtcggcagcgtcggcatccggtggtggggacggcgttcggcagccgggggaaggagccgttgcccaatcgacaaagccatcggcttcctccgcctcatgccacttccactcgcttcctcccacggcggtggcatgatgcggtcgggagaggggtggtgagcggcgcaatgtcgccgcgggacggcgctagacgccgcagccttcgctttggcgccccgacgcggacggccaagccgccgctcctccttaggccggtgccgcttccattcgcctcctcccacaacggcggcgggatacggtcgaggaacggggtggggagtggcgcgagggacggcgctggccaaaggagttgctgccgggggacgcaacggcgaccaccacgacgtcgccgtcctcgcctttcgacccgaccgccgcgctgccggggagcggctcctggtgttctttgcggcgtccaggtcgcgcacccgcttcttttgctgcagcctccccttgccgcccagcgcagctccagcgctcgccacctgccgccggcagaagggggagaatggatgagaaagggagagaaagagagagaaaagggagagaagaagggatttatgtggagaatagaaatggaatccatggcggcggctccggcttgctcccacccgccgccatccatggcgaccgccggtgccggaaaggagaatagaaaggggaagaagaagggggagagagagagaaggaagggaggaggaagaaggaaggtcagagggaggactgacatgtgggccccacatgtcagtaggcccacatttctttatgtgtgaatgactaatgggtcccacgcacatttttttatttctaatgccacctaagtgccacgtcaacgccacgtggaaagaagaccgagtcaatactgctacgtaggcgccacatcagcgaaaccgccctccaaaaccgcccagggagtcaaattgcatcggttttacgagtttgggggttaagatattcggttttgtggtttagggttacgaattagatttcgatcacttttgagggtcatgaagtgaacttattccctgagctaatgacagaagggatgggcctcttgagttatgtatgaagaggcatcatctcaggcattggtatcaatgcactgcatcaactttccttctctttttcagaatccgagggagcgatgcctatccagattttgtttggatgggaaataggaggctatccagatttgtaatattagaatatgtttgtttcaaccaaaataagggagtactaagtacatggacatcatactacttctttgttcatcctcaaataaaatgttgctacctagtatctgattggagtacttcctagtacaaagaatctgaacagggagtatctaatcaagtactaggtatagtaacattttaggacagatgaagcaaatgatgagcagcagtgcaggtgatgaagtggtcaagagactatccttctcattgcactagatgtcgtagcatgccacgcctctcataccgctacggaacatgacgatggggggcatcgccgcgcaactagaacactctgggactctgagtaaacatatttaagtataaataacaggacctcacgaggaagaaaaatacatcatataaaggtagatactatatagaaaatatgtatcagattaaatagtatgtgcatataacaaacaaaatatttgtcccgttaaatggtgcactcttgtgaggaaaaaagatacatcatatcaaatgctacatccatatcaggaacataatatctatcatattaaatggtgcaaccttatatagaggaagatatgtctatcagttaaagctaaaaactttattttatcaatattgtagtatgcccccaatttgcaatataagttgtaaaagtttgaaatacctagaacatgttcacaaaacacgacaattattttggagcatttaatgttcacatggtatatctatcaatgatatttcgcagaagaaatgtttaaggttaatggatagattcctcctatccccttacattttactttctctttggaactctatccaagagcactgaagctccaaagagcgtagccacaaagagagataggagtcgtctatctgttacccttaaacatttcttttgagaaatatcattgagagatatatagtgtaaacataaaggcttcaaaatagctgttgtgttgtttgaacacgtacgagtattccaaacatttacagcttatgttgccaactagtgggatactacaatgctaacaaaatgaacttctaaaagctttaattgatgtacatatctttccctgtacaaggttgtgtcatttaatatgttagatattttgttccttgcatagacatagcatttaatatgtacatctttttttcttccttataaaggtggaccaattaatgtgacagatattttgtttctataccttttaatatgatacatattttcttccttatatggacgggcctatatgaaatacattttagaatgaaagagtagtaattatcccatcaatcaactctcatttaaatttcttcatatctcataccccagtcatccttgaaccttatccacctctcatttaatgttgtgtgccaaagtgttttgttttttcccttattctctataattattttataaatgattattgtagtcggagggggtatattctaggataaaatttgaactctaaaaaagagatattccctctgtcccagaatatgaggattatatttttaacctaagttaaactattttaagtttgactaagttttaaactacacccgtctcaaaatataacagaattttcccatataattacatgagccaaatcacttattctttgaaatgggtatagcacagaagaatattaacatctaccacacaatctaccacataaaaacagtaaattataatgatatattttataatgggtctaatgatgctcatttgatattgtaaatattattttgttttcataaacttagttaaacatagtttgacttacaacaaacataaggtcctttgagacagagggagtatatgatatagtagtaccgaatgtaagagcatctccacgagtcccctaaacatattctgtaaatttaaattttgggaattaagttaaaacacatgtctccaacaaatacccaaaagagctcccaaattttaaacacctctaataccggcgccatcctgagctagatatggggcacctcatagaactcccaatccccggccacaatcacgccaattttttgccgctggcatcattttttggcaatcgtgcgcgatcaacctcgcaatgatgtacaggagaaatataatcggccaaaaatagttgaggagggcccactagcgatgagataatatatttcaatgttttgaaacctaagcactgactctgttggagaagtgggtgattttcttcttgcatatttttgagatgaccataatccaagattatcgggagtacaattttaagccattggcctaatctatacacacttatcacagttaacaagtataatccaaaattagcaggagtttaattttg

SEQ ID NO: 19986 - DNA, 5632 bp, Oryza sativa
ttgtgtcccaactttccccacataaaatttcccgtcaaaactttacctacataacccttccttgtataaactttctatcgagaaactttcattgtataaactacttcccgaaaatattacccatataaacttttttcccaaaaacttgcccgtataaactttcgcccaaaaactttccacatataaactttctccacataaactatttccatataattttccatatagaaacttttatagagaggagattacaaataaatgaaaaaattatttcaaaatcatatgaaattttaatcaaatctcaaaaagtatatactcaaattcaaagaccttgaaatgaatctttcaataaaataacttctcaaaaccctgaacttaaccatggcatggagctcaccggggtgcagtggattttttgctggagagaaacagatttcgtgcacacaacaccttgccagagggaggaaaaagcacgtcgtcgttgacaaccacagctgcgacagggccacctcgcccttcgcttcatctgtgatgacgacctcatcactgtgcgctccgtccatctcgccaaggtgagaagagaggggaggggggaacagggctcttaccgaagaggtgaggaggaatagggagtatgcacacaacttgatttgtcgcgatagtggtggaggaagtgtgagaggaactcaagcagggaggaaaaaattatgtgatagaacagatctacttcctccgtccttaaaaagagtcgattcctagatccccaatgcaaattttgtataaacgtgaaaagacaaaagtgccctcattaactatatccatttatcaactatgccgtttctatgcacatgtatgtaagagacatcttatgcataataaacaacgccaaaaaaatttaaaaaaattcacttgctggaagaaaagaaaacatctacgatctctccaatctgaggggaaaaatgctcttaattccccctgtaagaactactactgcaaacaacggcaaaaaccaagaataaagaaaaaagaaagacaaaaaagaatagagaaaaaaatacaatggtatttgcctttaccactgtaggcttgtgcatcgagagtcaggattagatcccctgtaaatgaaaagcatacaaaacgcaagagaagagagatggggcggagataagatttgtggtgttaaagcgtgaatgatagggagagaggccagagtcattgaatgcttctattttttaagcattctaagtcggttttttataggacaaactctccctcgtacattcgtggtgaacgttcccccacccccacacaccccccgttttcacaaaccgatgcctaacatgcttgcgtgcaaacatcgatagtgcgaagtttttgaatttgaaatgaagagctggaattcatgagcagaagtatcaagatttcgctgtacgaaaatataaatgcagagacgctcagggggtgctaaacaacaaaaactgaacgaatgcacgcatccccacgctgggctcactcttcccctgtttccgtgccaaagatgagcatccgaagcaaaagagcgtagcgcaagaggaaaggagtagacaaaaaccgacaagcttcacgtttcggattaatggcaccgaggcattttcccagcacccaggcgttcgactgacgccgacggggccaacggcatttacgcctagcaacaagcacacacagtgcttgtttaccctacagtggcattgtggcaagcggccagccgaagccatgttcatgataagggagggagttcctgtcgacaaattcgcacggcagaaacaacagacgtttttcagtttttcacatgcatattctgtagattgtagatttccttctggttaagcaaggtttgcaattgctcccgtagccagctgaatacgagaatgtttggggagcttctgggagagagagcataaaagctttatcaaacagttttatccgttcagaagttatttagaagttaggggaagttaaggccggaaaggctgatcgcgatcgatcgccaaggccaactggtagcaatcagtgcccccctccctccacctggttttatttttttggcaccgcattactttcatattttagtaaatttatgcacataaagtttatacatctcgagtttacacatctaaagtttagagactaaaagtttataagtcaaaagtttatatatccgattcaaatttgaatttgaattcaaatatttttttatatatagtatttctagacctaaagtttataagtcaaaagtttatatacccgtttcaaatttgaatttgaattatatctgatttaaatttgaatttgaattcaaatattttctatatatagtatttctatatatctaaagtttatacacctaaagtttacagatccaaagtttataagtcaaaagtttacatacccgatttaaatttgaatttgaattcaaattttttatatataatatttatttacataaatttttctaacttttgttttttaaaaacaattttgtggtgttctgtagtagggaagagaaggagaggaggggggagaagagggacgtataggggagggggtcagcgatcacccgcttcatacgattaattatttttggaggaatactatccaaaaaaaattccctttcctttggtgctggtttcacaggaaaagtccaggaaaaaatcatccatcacaagctctttttttgcttcctacatgcaagtcctagacagtcaacttactgtgatccgcatgccctcaacttttgtactcctttgtttttcattattctgttttacgcttaaattccttctctattcctatacttttcagatcctatggttttcctatcctttaatccaaacgagcccttatatttacgaactctagaaaataaactagaagctagaaacaagtttttttcttcttctagattgtttctcaagactcatactctcccaaactcaattgtactgcttggagcctttggatgcctactttcattaccatccagtacccagttacccacagaagaaaggcaaagaaaatttccagccccccatgacgaagcatcgaagaggacatcattgactaccaagggaattcgttgcttttccagctcagaaagtgccctttaaaaccaatcgtgtctaacacatccacggtatcagaattaatcgacaacaaaatggcaattttcccaaggactaaataaaagtacagcaaaggtctcattattaagaggtgaaacttagggcatgttcactttgatgccaaaaaaaaaccttaccaaattttggcattaccatgacaggatttcttatatagttaccaaaatttggcagcaaactaaatgtagccacttttttttgataactttaccaaaatttggtaaggttgaaaatggcatcaaagtgaacatgcccttattttacccagatgccatactaacttccatcttcatacctactattcgctacgcagttgcaaccgagttgcttgcacataaacattagactatcgttaggatacctcgctactatttgatattctgattgaactcattcaattaacactctcaaggatgtactaacagagggcatcaaattggggagaactacaaatacaagaaggcataccatacataacatgaaatcttccactatcagcatatcagtatcacctactgcctttaactaaacttcaaagcaacaactagcatatcactatccaacatctctataattaacgacaaaaaatggcacttggcataacatatgcattatcttcattgtttacagaataccatttcaatagcacactacatgtataacaagctagataaatggaagaagaatcttaaaagagaacacaagttcaattatgcatgtttggttctaaaacctaatgcagaatcggagactgcagtgcaaagagcaaccaattatatataccatgttgtaggctgccctatacagctaattattccaatgtgctcgacagcgatggcagctatttttagtactgaggtagttaagcttgcaggccagatttctacaactcgaagcaaccaaagaaataaatttgtatagatgcatcctaatcatcaacaaaaagctaaaccaaacccttttttttaatcagagaaagggcaacaactgctgatgaaatagcaatggtaacacagaattatccatcatgatgattttgcgagaactagatagtaaaattaataacctaaggaacatgaatatgagattagaatgcataaagtagcaaataggttcatcaattttttttatctcacatcacagagctggaggattgccaaacctcctcctgagtgctgacatgacgctcctcatcctactacttgcctgggcagatgattgtgcattgctggcgttagtcgggagatccatggctgccatctgatcagtaagctctgtaatttgcacctgtccagcctcttgcccgccattttcaattgcacctccagcatcacgctccaatacaatatccaagctgatagagaatgagccacccctaaccaccttcaggttctcaatacattcatacgatacgccccggcatctcttcaatttcaccttgaccaagctggggcagcccccattcagtgcccacatcccacggtctgagactgggcaacccttgatgcaaagcttcttgagcgcagcgcagcgctcagccaggcaaatgatctcaggatccccaacggtctcacacccacaaagggcaagacgctccagtgagcggcaatgttcaccaagcatacggagactctgcacggtagggttgaccccaatcaagacgagctcttgcaggtctggacatcctcgtgcaacagccatgaggccatgatccccaatcctgtttgtgcgccacccatcaatatgtagcttgcgcagtttgtgacatttctcggcaacgctgattatgcctgcatcagtacactctggggtcttgacaagaaacaggacttcaaggtttgcacatgccgatacagcggagaggccgcggtcacccacctgcagcttctcaaggtggagctcaacaaggccaggtacacgcgcggcgatgacctccaatgggaggtcccaggagccagagcacctcaagatcttgagcgaccggaggttcggcgacgaggcaaccaacggcacgaagcagagggcgctgtacaggtctttcaggcagactgaccgcagcgacgaggcgggcgggaagaggatctcctcggtgatggcggtggtggcgccggcggtgtcagggaggccgcgaaggcgcttgacggagaggtcctcgaggagggggcacgaccggaggacggcgacgaaggccttgggcccaaaactgcaggacgcgacggagagcttgcggatcaccggcgtggcgccagcgagcgacgcgagcccgtcgtcggagagctgccggaggccgcggagcttgagcctggcgagccgcgcggacggcagcgcggcggccacctggcgcgccccgtcgtcggagaggctgtccgtcccggagccccgggcgcagcggagcgcgagcttgctcaccgccgtgaaccgcgcgaagatcccctgcgcggcgtacccgagcg

SEQ ID NO: 19987 - DNA, 10105 bp, Oryza sativa
ccgccggcggtgggcggcgcgtcccccgccaccaccagcatcgtccgctgcgccctgggcggcgccatgggaggaggaggaggaggaggaggaggggagggtgaggcggaggaggtggaagaggaagaggaggagctggatttggcgaggcggggagtcgagggggattggcccatgctacgctatccccggggccgcgatgggtggggaggcgcaagccatccgggtggtggacgggatgcgcggccggatctgccgatccggtttgcggggggcaagcgaggcgacgacgcctcgtctaatcgaccaccgggagaggaggacgaggaggagatggggaaagtagccgagtttagtacaccgatgcgtcgaattgatggtgagcccgtgagagcgtttcgattttctttttcctctcttctctcgttctaatctcaggtggttgggcgaggttgcggacggtgtgtgcgtcgtcacagccgagccgcctcgcggagagggcagcaccgcagcagcgtgccagcgtctcgtctctcgtggactcggtcattcgctggcgtgtggccaaggcaaagggcgtgagcgctgctgcctcggatgcgcgcagcgggtgggggcgcaaaacttgtgtgcgtattgaccgtgtttttttttttaactgaggcgggatatttctgggcttctggcgagcggcggagccagcggccagtgtatgaacctgtgggagcaacaccgtttctgaccggtttactatactaggaatttgtttggtgtcacgcgaagtacgactatattaaggtctgtttataaaacccttatcaaattttggcatgtcaaaattttaatatagctgtcaaaattttgttaattaaatatagccactttttttttataactttaccaaaacttaataagattaaaaatagcatcaaagtaaacagtctcttaatctgaagttgttgcgggggagggatcctctctttactctcttttagtacgtgcttgacctaatcctaaacaaaagaaacgggcccgatcaggtcaggtctacctcaacctcaaccggacaattgccgtgtggttgcccaaaatgggtggtctatcgcgtgacgtgccgaattacatcgtgttttgtattcggtgcaggtgtcgatttcgcgtggagagacccacaaagagctgacgaagagaaacgaaaacttgcagcaaccattgttttgttggggagaagaaaaaacccaaccaaacaaacgcattgatgacgtccacccaaaaaccacaaaaaaacgtacggctctagctacagtagcgtaatgctcgcacattgaaacagtaataatcccttgctgttgctgaagactgtgtacatcgtacatccagcatgcgtctacgctactgctcagctgtaccgacgcggatggcagttgcatccccattatttgccgggaccggtgcgcaccgggtcggaatccacgtcggtcagcgcctcagcgggcgcggcggcaacaaacagcgcgaacgctccacgacgcccgcctttgctggagaagagggaaattcggagcagtttgttgccggtgagcctgcagaattcgcgcgcgcgtacactatttctgcagcttgcggctgaattttaacagggacatcgcatcgtgatcaccacgatatccacatccactgttccgttctatagcatcgttccgtgcaactacttgaggttgatgttttcagaatcttcagacaagcaccacaagcctgcatcagcctttcggtccatttttacagactacacaagttaaagaagttgcccggaaacattagcttcggtccagaaattcagtccatgcaatggtgtagtctttatcttgctttacagctcaggcatacacacaggtgtatgtacgcagaagcgtagtaatcagtggagtcaaatctagctaggaagatttcgctttgcagttaactacgctctctttctgctaagtggtgcagctttgctgaaaagacgagcttcccatacgtagtggggcgcactactgcagaacaacaagaagaagagaaatggcgcaggacgatgtgaaatgatgaagtgattatcataatcatgtaagacaaggatgttgcttgttaaatactcgtggcctgctctgaaaagaggaggattctggataagaaaaggagcagccattggttgctttcagcacaatactcagcttatcctgtcaaagaacaaccaacactcgagtaatcattcaccattaactttcagtgaatcctacctacaagctttctgaatcgcctttagcggctctgcactcattagctaaaattgcaaaattactggaataaagaccaaagcagttcatgttcatgttcatcctgcctcatgagtcatgaataaagttacttcgttctacttttattgtcagatttccatttgatgagtaatgagccttcagatgcaaaattgccgagctggagccctggaaggtggcgcgtctgtatcaaggagccaattttgtctcttttttggagtgggatacatcaagaactactttttatacaacttcttttgtgcaattgattgatcgatcaacagtaatacagaggagatagtaagatacagtggtttctgtaagtctattataatctcatccccatttcgtcttgtctgttgggacatgggactgtatcacagtacagtcatgacaatcgcaccgccgtgaactaactgcctttcgacatgctaattatcagttcgcaactgtattattgtaattattgctgcagtctgccgaaacatttcactcaaagaatcgagattccgaaggaacccggttcttttctttcttcagccgaggtggtcaggtgggtgtgttagctatacctggtttccaactggaaccatccacacgaaaaacggagcggtccattagcgcgtgattaattaaatactctattagctatttttttctcaaaaatggattaatttgattttataaagcaacttttgtatataaaatttttgcaaaaaaacgcaccgtttagcggtttgaaaagcgtgcgcgcggaaaacaaaggagatgggttaggaaaaggggcatccgaacacaagtatagccaactactagctctaattcatctatagccaatctaatagcttattcacataatagtacctataagcatatactacaccattaatatatggtcccacctctcatatacacacaacgtattggagtccacgcggtagctggttacaaatctgtattccgctttccttctatattttcttctctcctccacatgtgcttacagctaacttgtagtctgctattgtactcgctctaagggtgtgatgatgtcacggaaactgaggattcgttgggtttaaccgtttagagcaagtataatagtgagctataagcttactgtaaacttatgtggaggagagaggtaacaaaaaatcaaggggtggctctcatgtaagagctagcttaacacaatatctaagacaaatacattaaatgtataagtgagagatagcgagaggagaagaaaattatagccaaacttatagctaattttattatatatgttggcttaaaatgagttaatagtagaagttgagttatactattgtccttgctcttaagcgtcgacggaaggttgatcgattggtgggaatttgggtggtcaatcaccgcatcccatgagatcgttctccaactgatcgaatcgcaaggagttaccggtacttctcgcatagctatttgctgctacgcagtctgcaaagtaacagcaaaatcttcacgggaacaatgaccgaggataaaaggaagtgggctttctgggatggaaacaaaggtttcattccaggatagtacggtataactctggatttcaggattggttttataattctgacttccagtgttgaccttttttcttcagaacgattggtttccatttagatgaacaaggcttcacgtacgattcatccagtgttaggaagggcctgcgaattcggcatgttttctacagttaagatgggctgccaaagtccaacaaccttaaggctcactgggatcagctaattacagtaattgctctaactgtttaattaaacctaacatgtttgaacagtgatattcatgaaacttatttagtagtaaaaaaatatagtacttcatccactcaaaatataacaacttttaatctttaaaatttgtatcaagtataactacatattcatccacattctatttttaactgatcacaacaccattcaaatttccacatacctcatctttctaatcaatcacaacattcttctatttaattctaccaacttacttagcaatcgtgtataattttaaaacttcttatgttttttggacgaagataatactccccgttataaaatctgagctaatataccacgggatcccgtctaaatgggatgataccgatcaagtatcagattgatctgatacccgtaggtaccagtcaccaacctatacctcgttagtattagctaatgcctgctgggaccacgtacctggtcgatacccgatggtactaggcgtggtacctatcagtactagacctggtacctattgagtatcagaccagagcttagaggggaagagaataagggatgaagatggttatatgtgttggttctctcacctggagatgatgacgccaagctcgatcaatgccaaatccaatagccgaggatcttggggtttcaaatttgtcgaacatgagcaacaagaaggacacttcctcccctatcctcccttgcacttggcggcaatggtggtcggtggtggtcttactcgacaacaatggcatcgacactgcctcatcctctatcaacggtgatggaggcggaagctccatgtcttccatcaatgcaatgatggcgcttcccatctccttcggctacgacttcctttgtcctcgcagcgtaagtccacctaattttattgtggtcctacggcacaccctagccgatatgggactgttttagtgcttacctgcatcttgccctccgacttgttgctccgcgttgatccttcttccccgccgtgtcggtccaagtcttctccgctgggcataggtgccggagaggggatctcgccccggatggtagggattgggtgacggtatcttgtattttctaacatgggttatttttctttagtgacaattttgttctttcccctactctaacaccacaaaatcttccccttgagttgtgattcttactatgaacatactacgtccaaaccgagataaatatacacgtctaacagaatatctaaaccgagagaaatcagaaattagaaagagaattcacatcaacattgacacgggtggttttcgcgctgcaccaatcacgaagcacccaagcacgaatctcggagcgccgatgcctcaacgcatctgagaaaccgttccaagctcgccgccgacgacccggccggaccctcccacgccgccgccatcgcgcgcgcgatctcccccgccttcctcctcatcgcctcgcccttctccgtctcccccatcaccgcccccacggcctcggccacctccccactctccaccgccgagctctccaggttcccgcgcgccacctccacgcacaccccccactccaccaccaccatcgcgttgaagaactgctcggcccccaccggccacccgagcagcggcacgccgtggcggaggctctcgaggatggagttccacccgcagtgggtcaggaacgcgcccgtggacgggtgcgccaggatccgcgcctgcggcgcccacccgcgcaccaccagccccctgcctgcgcgcgccatccggtcctcgaatccggcggggagccacccgggatcgaatccgtccttggggtcgaaccccaccggcggccggacggcccagacgaacggccgcccgctcgcctccagccccagcgccagctccgccatctgacggatgctgatgctgttctgcgacccgaacgagatgtacagcaccgagcgccgcgggtgcgcgtccagccaccggatgatgctggtgtcgtcgtcgtcctgcgatttcgaaggatccggcgccgcgaggatcggcccgatcgcccatgtctggacgccgaagctcgctctgagcatgtctagcccggaggtctccagttcctggatggtgttgacgagcacggcgtcggtcttgcggcagcacgggatgacccgccggaagaaggccgtccaggggtccgcccccgtcgcggcgagcatgtactgcgggatctgggtgcggtggaggacgacgtcggggaagtcgggcagcagcgggaactcgtcgccgccggccgtgagggtgtgcgggaggtgctcccacacggagaagaagacggcgtggccgaaggcgcctccggggaggaacacggcgtgggacgcgccccgcgcgcgcgcgacgtcggccgtccacgcgaagaaggagtcggcgatgacgcagacggggggccggatgccagcgacgaagccatcgaaggccgggcggagggactcggaggcccggaagagggtgatgaactggtggacgtggaggtcggcgagggactcggcgccgtcgggcagaccgtggtcggcgggcgcgaaggggagcgcgtggagccggatcggaggggaggtggccgggagggagagggagccgaggaggcgtggggtggagacgagcgtgacggcgaggcccgggcggagcgtctggaggtggccggcgaggcggaggaaggccgggatgtggccgtgcgcgaggaaggggaagagcacgacgtgcgggctcctcgcctcctctccctctgccgccatggtgaggtgatgatggggacggggtgttcggtacttcggtggaagtggacgctgagagtgatgcggctcccgcgctgccactgaaaaacaaaacgctgatgcgctgaatggctggaaaggcgccctccactcaccgggtgagataccgagatgtgaccgcttcctttctccaattcttcaatttcgtccaactgaactgtgcactgacgccatgatcaaacaggtccaggtttgagcagcagagcttcatcagattatcaaaaggagtacagaaagacgaagggatggcacattggtaccgatcgatgcaatgtctgcagttctccactgcattctgctggtactcctatatgtactctggcccccggtagtactaataccacatgagtaacatcagtgattatatgattattatcaaaggcgaactttaggaagggatggagatactagctgaattgcttgaagcagaaccgtagatggagataatcagagctttccaaacgggaacactattaacaggtatttggtctatcgactattatttacaacaactgggcaatgaactcgaagaaggaactagaaaaacccacatcaaagtcagataaaaaaactctagaagtaagaactgccatcccgcccatgaagaactctgcggctctaccggtaattcttcgttgttctgaaggatatgctgagagacactggatgtacagaatggcatttgtatgagtcagttttatttatctccctagaaatatgacataaagaatgaatgcaaactcccaaaaaattcctacataagtaaacagagagagggagcaaaagggcattgccctgactagaacatatataaatacatcataagttatccttctttgaagaatgatcagaagcaggcgaggatgaagagctcatcctggccctatctctagactcacttaacataactacaacattccgcatcggtggtctgtcatatggagacatactagtacatagcaatgcaattttcaagacctcaatcatatgatcgacagacgttttgtcttccaaattcagattcttatcaagaatccctggacccaaagaattgtccctgatgtaattctttacccatgttaccagatcacctcccagttctaatggttgtacaggggcacgtccggttagcagctccagcagtacgacgccgtaactgtatatgtcacttttttcagtaaccttcatggtgtatgcatattctgatcaaaggagaactaggttagtactttgtaggaaacaatcacatgtactttctgctagtataaagcaatcaagtggtatagtagcctaggattttacaagcaatttcaagtaaaagagataagagctataacaggaataagtatgcaaagtaacagtagaagactcaccaggtgctatatatccatatgaaccagcaattgcagacattgattttgagtatggcatgtctatcacctttgccaatccaaagtcaccaacatgagcttcaaagttctcatcaagtaaaatgttatttgattttatatcacggtggatgatgcgaggtttgcaatcgtgatgcaagtaagatagcccttcagctgatcctagggctatcatgaagcgtgtctcccaatcaagtgaagacgaagattgcccatgaagtaactccccaaggcttcctcttggcatgtattcatacaacagaaggttggaaccctggtgatagatgaacccatataacttcacaatattacgatgccttatctttcctagagtaaggatctctgcacgaaaactattgtctgtgttgcttccctctctgttagaagccagcttctttacagcaattgtctgtccagctttcaagatggctctgtacactgttccacatgcacctcttccaataacacaactctcgtcaaaattatttgtggcagaaaccaattcctgaaatgtatatgcatccttggtagaaacctgcatgttagacccagcagaaaatatttgcttgtcttgcaaaggagctactgtttctagtggttttctcatatgatacacaattataacgataagaataagtgaaattcctccaataacagcagcaacaattgctatgaccttgcccaaaggggggctgcctgaattggatgactgggaagaagatattgactcagacccacatttgccaagttgtccgccacatagtcctttgtttccaagaaagctggttgacgccatgttatcaaaaagtggtatagtggggagagcgccggtgagattattgtaggagacattgaactcaagcaaactagacagatttgcaaaggtatctgggatttcacctgtcagcttgttattattgagaaacaaattttccaataatgcaagattaccaagctctgatggtatgttgccagagagattgttataactcaaattcatggcgatctgcaaacttgagagtagtccaagctccttcggtattccaccagagaattgattgccaccaatctgtagagctgtcaaatgtgaaagtttaccaagaataggtggtatctctccagagagcctattgtcagcaaatgatagcagctccagctgaggcaggctgccaacttcatttggcaatgaaccttcgaagctattttggctgagatctaggcgttgcaacatagtgcaattgaaaatttctaatggtatgcttccgcctagtctattggatgatatattgaagacgacgagctttgacagattacctatttcttgaggcaactctgatgtgaaatagttatttgttaggtcaagcctttggagagacttgcaattgcctatctgaggaggaataggaccattgaacttgtttcgacccagctcaattgttgtcaaattcaccagattgcagagatcagttgggaagcttcctgtcagactgttatcagcgagacgaagctgcaccaaggatttacaactggtgattccatgggggatgttcccaatcagcttgttagcccccaaattcaacaaaataaggttcgactgcctgcaaagatctcgaggtatctgcccggttatattattatttgagaaatccaccacccaaagccggctatagataccaaatcttggaggtatgtcacctgacagcatattgttgaatagttgcaattggattagtctgctcatgtactgaaaacaggctggaattgggccactgagtgtattgatcgaaagat

SEQ ID NO: 19988 - DNA, 12054 bp, Oryza sativa
attaacagaggaacttatgccagtacctgtctataagttcgaaaaccttgtcaaacgtagactcttttttatccattgagtcatatacgttgacggtgcaagccgacaggtcgaagagtaaaagcacccagtggaatctgcaatgtgcgtgggatgcattacatatgaaacacttagcaagttcgtacgggaatgaaatttggtatgtaggaagacagtaaaattaaactaactctgtgttgtacggcaacagtatgaacgtcttgtaatgctgtgccttcaggagatggacgagattgtcctctgtttcttgtggatattggtcgagcattgcgacgtttactctccgagggtcgatgaattcagtatcgaaaaccctccgccgtcgggccctttgaatctccattctacaacgataaaagggagtattttattttatatagtttacttatatacaaggacctaattaaataaaggagacgtagtaattaagaaatataactgaacgatatacttacaaaatccagcaactcataatagagacgtcgagggcgtccagctggtatacttgatagattcccttgaaattgatccagagaatatcatctccttgcaagaagtccgggtccctgatcctcgctccgatcatctctctaccggtggcgctcatctccatgtacaactgatggaacttgtacatttgtgtgggtagggactgcaccagctcgggcttgacaagcggtttaccgagtttgtacatgtctttcaattccgccttttctaatggttcaactcctagcaattgatccgtagttagactggtgtcaataataaattcttctatcgtcatgtcttccccggtcaccaacggcttgatctcctggtttggttgctctccaagctgagggactggtttggactttccagaagatgctttcttcagcgttcgctcatagtctgatagcttgatggcctccttgacaggtgcagacatacccctgaagaagttcctgacactggggtctacaggaatcttcttttctggacttcgaggcttgaattgtctcttgacttctgatgcaacgtaagcgtcaagctcctcttgcgtgcaatcgtaccccgggtccttgttcttggcggcgtcaacttttgccttcttcgttgcccttgtgtgggcaggcggtggagctggggggcccttgactttgaaggtgccggaagaggagcttgcggaggagtaggtgtaggagcccgaggaggagtcggtgcaggatcctgaggaggagtcggtgctggagcctgaggtggagacggtgctggcggagcatgaggaggagacggtgcaggatcctgaggaggagatggcggagccggaggagatggtacacgagacgccgcttgtcgcccagggaggatgatgtaccgcctgcgccatagaataatggcatggcttgtgtctcgtagatgcgtctcaccgtctcctccagggtaatccagctcgaggtcctcgtacgcgccttcgaccaactcaacttcgaccttcgagtatcctgctggaatcggcctgctgtggtaagtacctgaagggtccgttgggatggccatgcctgacaccaccttcatgttgtgagagattatttattagtaatcaacatatataagcagcaactagcggaatggctaaatctaaaatatataaactacgagcttacctttattgataagttcttgtaaggaatatgcagctcacatggtgtccgctgagtgatgtcatcaacgagacaggtcgattcgtcctgtgtttgcatggcgtccatgctctgtgatcttacctgccccgttgaggcgcagctgctacggtttcctgacgggctcaccattgcaggaggaatggtcggctggggatcatgggaccgatgtgcggccatgcgttcatcaaccttccttgccacctcctcttgcatgctgaggtcgtagctcgatacccggaactctagatctgcaatcttcgcctcggtatctctcttgctcctcatccgactcctgtgcgtgtggatgtcttccttgaaaccaatcttccaaggaatcacccctttccctcgtgttcgtcctggatgctctggagtctgcagggcgagtgtcagctcgtccctatctctgtccggtcggaacgtgccctgagaggaggcttccactgcatctgttagtcatcgcgcagcctctcgtatctgatcgccgaagaccagtgagccatcagctgggttgagcgttccaccgtgagcatagtaccagaacttcgatcgttccggccaattggcggttgccggttcgatacccctctcaatcaagctagcctccatctcctcccacttcagcatcgcgacgctatagcctcctgaccccaagtggtgatggtacatcttcttggcggcattttctttgtttctttccatcatcgcctgcccttgttcacctgtcttatatgcaacaaactcgtcccagtgatcccttagctttgggaatgtgtcgaagttcggtgtctgccccttcaggatatatttcttgtacaactctcccttgaagctctgaaactgttctgccattttcttcagagtccaccttttcactttgtcctctatacccgcaggaagggtgaatgtctcgagcattgtggtccacagcatctctttctccgaatctgggacaaagctctcatgatctccgcgtgcccttgttcttcgccagtacaccgtactgacaggcacgttatcccgcacaacccaaccgctgtgacgtacatagttcttggcggcttcggccggggcactaggacgtccatcttcttccacttccgttatgatgtgccgaccctcaagcttcttcgctgcacctcgttgcccgcgtgccctcttctgtccaacggagggttgactaccactagcctcctcctcctggttcccctccacatccctttccacgtgcccctgctggttcccctccgcatccctctccacgttcccttcctcgttcaagtactggtttggatcctcgttcccctcttcttcattccagtactggctacttccctccgcgattgtatcgtacaatatctgttcctcatcgcggtcagccatctgttgatacaagaaacatctgctaagtcacgagacatttatgttttaacaatctaagtcatgtatgctaagtgtaaatgtcgtacattagaaccctacacaaccttacgtgctaagtctaattacaaatcgtgatataagctaagtctaggtgacgtatattatacaaccctagctagtaaataattatatactaagtctaattacaaataaaataatcttatattaaaactcaaataatattacatgctaagactaaaatagtcatgtatgctaagtgtttcgtgcgtatatgctaagtctaattaagactacaatagtcaattgctaggagtcgcaccaattccgtagtcaataattacatactaagtctaatttgcaataaaataatcttatattaaaactcaaataatattagaacactatacaatcttatatgctaagtctaattacaagtctaatattatttgagtgcattacaaatataacaatcatttatattattacgtcacttgcctgcacgaattccttctagggctagctcttccactccggcttgagggatcactccgacaacacgtcttttctgcaagatacaaaaaatatgtattaggataaatgcgaagtaacatatatatattgcatttcacattcacgttcgttcacgttcgttcgctcgttcacgttccctagctcgttcacgttcgttcgctcgttctcattcacgttcgttctcgttcacgttcgttgtcgttctcgttcacgttaattcgttcgatcgttcttgtcacgtcctgataaattcatcccgaaataaaaatcattctctaaaaggaataatagaattaattaaaattcgaaaagaaattggcaaacattaaaatacgtacaagaaaaattcaaatgtgacccggagaatttttgttaaattctccttggtctaaaaggagccctcaaattttagtggaattttcagagcacaaataataattattaagaaataaacaaagttaaaatgattttataaaaagaaaaaccctaaaaagtcttttccccccttttttcccctcttgggccggctcggcccatccctttctctctctctcctcttccccgcggcccatccggcctcctccccgcgcgcgtgccgctgacgggtgggcccgcccgccaccctcgttgacgggtggggcccacctgtcatccctgtcctcccgccgctcccgccgcctcgcccatgccctagcgccgccgccgccgcgaatcccgccgcctcccgccgtccacgcgcgcaataaagagggggaaatcactccccgtgattccctctctctttccccccatttttctctccctctctccctcggattcggttggaaaccgctcccctaatctcgccggcgccattgatggcggccgacctcccgcgccggtttcctcccttccccggccaccctccctcgccccggctctatttaaaccctccccgtgcctccctcctccgtttccgccactcgccgctctttctccccgtcggaatcgagctcgcgccgtcgctctctctctccgccgtcaccgccgagctccggtccgccgccgtcgtcgcctcggacctcctcccgcttcggtatcgcctgcttcggcatcgccgcgtcctcgccgatctcgtctaccccttcgtttcgcccgccgaccgccggaacgccgccgtcctcgtcgacccgagccgcgccgccgcctctctccgcttcggtcgccattcccgtcgtcgccgtcgacccggggtgagccgttggccgccgtttcgcttcccccttccctcccctctctcgggcgccactccgccgcgccggtggccgccggcggcgaccatcggggcgcgggcgcgctgcctcccgccggccgcgctggttcgccgccctcgggcgcgccgagtggctgccgcgtggggcccggccgtcagccgcccgcgccctcgggtgcggctgacgcgtgggacccccggcgccggccggtgtgagccgggtgcacccggtccaccgtggaccgtggggctgccgcgtgggccccactcccgtggacccggtccgcgcgcccctcccctcggctgacgcaataaatccgattttaaattaaaatttaaatgaagaaattcgcaaatatccatttaaagagcatataaacttcaaatggccataacttagccatttgaactcggaattggaccgttcaagtctctaatttttccttaagaagtcaagaacccatttttgtgctttgtttctgcttgttatatggagtttagtcgagtaaaagccttttcttttccgttggtcgtgtagacgcagcagcttcggaagatccgctcttcgtggaagttgaagccgacgtttgggaaagcgagcaaggcaagtcacatcatcctcgaacagattgaaccccagtttataaaattattttgatttaaattattgcattgtcgctttatttaaattcccgcgttatcactgttttatttagccatacctatttacctttgttatgaccttattattattgttattgttattattaccttgttcaccctagattaaacaaaaccccaactagtggatactctactcatggtaccactagtatgattttaggtagatgcttcgctgtttaattaggtaacattaggtggttttacaactctagactttgggatattctcatcacctggacactatggaatggtttggttattgtggaatcggcttcacaccgccccctctattcaaaatccccaaaatggttttaggctgggctcggggtgcatggttttgatagtagcacctcagccatataaggaccggtcttcgggcctctgttgcaaagtactaccgtacttccacatgtctagtgggtaaggcttagtttgtggctcagtctggttataaacaaaagtacacggattagagatggacgaagtagggggtcgatggacatctctaggacaaatgaaggctacacgagctgcggcccggtagtcgagatgtcatggcacagggctggtgtcctgctgctaggggctctatcctgcctacctgtcccggaggttccggccgtaggtggggttgggtcggtactcttgtctatggctaggatgggttggaaactatgtcacgtctttcgtctgtataccgtggtggtatgtggcacgtggttacacgtgaggaagatgtgtcttgtgggtaaagatgtacacctctgatcagagtataatctattcgaatagccgcgcccttggttatgggcaagccgagcaatgtacccaagttagtgttttaattcttaaaatttggcttaacaactaaaatgtggaatggttggcctgggttggcttgggacgagctgggacccagggtcgggttgccagttcggtctgaatcatcgtaggccttgggttaaggcaggttcgtgtgggttcacggccttgattaatactactgtgtagctctaggatcgtctttataaaatggctttgggcaactaagtgacttttaaatgctgttttctgcaaagcttaacccctatattattaccccttgtacccccttgcattaatcatgcatctgccggtgtggcttgctgagtactgtggttgtactcattcttgctcaatcttttcccccttcagtaagagaagctttggagaagatgtcttaggtggagtcctggcttataccccagttgagcgcctgcgaagttggagccgtaggcccgctagtccgctgctgtttatttttgattgccaggcctgaagcgcctttgtaataatgtaaatattatcgatataataaagatgtgtcttttatatcacgtttgtgtggtgtaccccggcttttcctgggacggggattaatacactagcgttcgggaaaaggcaattttcccggtcgcgacagttctcgttctcgctctcgttcgttcgatcgttctcgttctcgttcacgttctcgcggcaacgtacgttgacgtgttcgttctcgctctcgttcgttcgatcgttctcgttctcgttcacgttctcgcggcaacatacgttgacgtgttcgttctcgttcacgtgttcgttaacggcggtgtggcggcatcgggccggctcttggcgcggcggcgtgcggtggcggcggtggcgtggcgacggcggtggcggcgtggcgttgcatgcggcggcggcgttgcgtggcggcgaaggcggcggcgtggcgtgcctgcggcggcgtggctcggcgtcggcgtggcgcggcgtctcgtggcgggcggcgcaacggagagagagatcgagatcggagatcgatgaagggagaggcggcggcggctctcaccccagagatgcggcggcggaggaggaggcggaggcggcggcgaggacgacgagctcgagacgatggcgtcggcgcggggatttgccctaggcagtggcggcgaaggagagaggccgagagagatcgatcggccgaaaacgttgagtgttggtggagaagacgagggcgcaccgggaaaatatatacccccggatctttactcccggttgttcttaacaccgggactaaagatatctttagtcccggttgttctcatcaactaggagtaaagatcttttcccgctatttccaaattctttttaaacccggttagggttaagaaccgggactaaagattatagcactgcatattattttcgcttacatatgtgtttctaaaatagaagttaatgcattaacattatttaaagtacaaagattaatgacaattacttcgaaaaattatttttgtctgtaataaattaagtggataaatcgtaataagcaaatatatgacttaaaattaataaaaattccaataatcatatatacttagcatatgaatgatattattaaattggtaaaaactctaattaagatatgtatgtacatactgcatgatttaaaattaataacaattataatcatcatatatacttagcgtaggaattatattaaattaaaagttaaaaactctaattaacatatgtaaatgccacatgcatgatttaaccttttaaaaattggaatagtcatatataagtagcatatgaaagatagtaaattaaattgtgaaaaactctaattaacatctgtaaatgccacatgaatgatttaatacttttaaaaattctctagtcaattataattagcatatgaatgatagtcaattaaatgtagcatatgaatgatagtgaattatgccatacatcaattgatttatatggataatcaatacatccaaaatagtttacatcgtgtacacaataattacggcattacatcggcggtgacggttgtccgcacgtactttctcctcactattgttccctccttgtgatcgctgcgtgagtaaggggtgtcttcatttgatagaaggatgctagggtcaatcgtcaccgtgaaaggggttgctcatccaactgatcgtaatcctcgtcagtcttattctcaactccgacgatttttattttgcctgtgagaaccacttgacacttaggctcgtcaggccctctgcccttctttcctttgctagatatgtccttcacgaaaaagacttgcgttacatcattggcaaggacaaaaggttcgtccgagtatccaaccttgttaaggtcaacagttgtcataccactatcatcaatcattacgcctccactagtcaacctaacccattggcaccggaacagaggaaccataaggaccatagtcaagttcccatatatcctcgatggcaccgtaatacgtggcagttgttctatcgtgtcccatggcatcgacacgaacagcgctgttttggttcgtgctcttcatgtcttgggctctcgtgtagaatgtgtacccattgatctcatatccctggaatgtcgtgatcgacccagacggtcccctcgccaggaaggcaagttgttggttgatcgactcgttacccatgagatgttgtcgtagccacgtgggaaaagtatcaatgtgatgccgtgtaatccatgcatcggacttaccgatgttcttggcgtgaactagagccaagtgctcctcgatgtaaggagctaccaatgaagagtgttgcagaacagtgaaatgggctttacggaataaattgttgtctaccgtcattattgctttccttccgagagttccctttccccgtagtctcccttcatggcgtgatttaggtaccccgattgggcgaaggtcttcgataaattctacgcaaaattcgatgacctcctctgttccataacccttggcgatgcttgcctctggacgagcacggttacgaacatacttcttcagaacgcccatgtacctctcgaaaggaaacatgttgtgtaggtacacaggcccgagaatacggatctctttcacaaggtgacaaagcagatgcgtcattatattgaaaaatgaaggtggaaatatcaactcaaaactgagagacattgcaccacttcattctgaagggcttctaatctatccggatcgatgaccttctgcgaaattgcattcatgaatgcacatagctttgttattgttgcccggacattgtctggaaggataccccttattacaactggtagcagttgtgtcatcaacacgtgacaatcatgagactttaggtttgtgaacttcttctccttcgtgcttattattcgcttgatattcgtggagtatccagatggtacctttatgctctccaagcattcaaacatactttccttctctgccttgctaagagtgtagctagctggactcaagtaatggcttcctttctcctttggttccaggtgaaggtcgccgcattgttccatatgcttcagatcattacgtgcttccagtgtatctttcgactttctgtatacacctaggaagctaagaaggtttatgcaaaggttcttagtgaggtgtatcacgtcgattgcgtggcgtacgtccaagaattcccaatatggtaactcccaaaatatagagttctttttccacatcgccgcgtgaccatcttcgctctatataggctggcttccaggcccctttccgaacactactttaagatctttaaccatagcaaacactgttttcccgctgcgatgtttaggcttcgtacggtggtcggccttatgttcgaagtgcttgcctctctttcgtaccgggtggtttgctgcaaggaatcgacgatgacccatgtatacaaccttcctacagtgcttaagatacgtactttctgtttcatccatacagtgagtgcaagccttgtaccccttgttggactgtccggataggttactaagtgcaggccaatcgttgatggttacgaacagcagcgctcgtaggttaaactcctcatgtttgtcctcgtcccacacggggacacctaccttcttccacaactgtttaagatcttcgaccagtggtcttaggtacacatcgatgtcgttaccaggttgcttggggccttgaataataatcggcatcattatgtacttcctcttcatgcatagccaggggggaggttgtagatgcacatcgtaacgggccaagtgctatggccgctgctcatctctccgaaaggattcatgccatccgtactcaaaccaaaccgtatgtttcgtacgtcctttccaaattctttaaattttctgtcgatgtttcgccactgcgaaccatcggcggggtgtctcagcatcccttcctgttgacgctcttcagcgtgccatcgcaacattctagcattccccttattcctgaacaaacgccttagccatggtattatagggaaataccacatcaccttagcaggaattctcttctttgttagctgcccgtcaacttctcctggatcgtctcgtctaatcttgtatcgtagtgctttgcaaacagggcatgcttctaggttctcatactcctcaccgcgatataggatataatcgttcggacatgcatgaatcttatgaacttccagtcctaacgggcagactatcttcttagcctcgtacgttgtctcgggcaatttgtttccccccggaagaatgttcttgacgagtttcaataaatcgccaaatgccttgtcactaaccccattttttgccttccattgcaagaactccagagtggtatccaactttttgtgcccctactcgcaacctgggtacaacgaagttctgtggtcctccaacatcttgtccatttataggcctccttttcactttcgcaatcctccctggcatcctgcaacatctgaccaagatcatccgcaacgtcgtaccatcagcagctgtttcctcctcgcccgtttgattttcttcaaatccaacatactgagcaaagtccggaatattgtcgtcttccacttcatcttcttccatttcaacaccttgctctccgtgggatgtccaacaattatagcttggcatgaaccccgactcaaacaagtggaaatgaatagtcctggatgcagaatactccttctgattctcacaattattgcatggacaacaaataaaacccctttgcctgttagcttcggccactctcaaaaaatagtgcacgccgtcaataaactcttttggaccgccggtcagcgtacatccattgccgatccatctacatgagtcaaaaaaaaccgtacacaaataattattcttacaataatgacagtcatacaataattataagatatctttattcatacaaaaataataaaatattacaccaaataattcttaaaaactatgtgtaaagttttaaactaattttaatgtgttttacttcttttaattttcattttagtttgttttctattatttaagattaactttcactagagttttccttctcaactattttataaaacc

SEQ ID NO: 19989 - DNA, 626 bp, Oryza sativa
tacaacttttgcaacttgaaccacattaaactgagttacaatgaattagttatgaatttttaaagattaaaccggattaaagcatttatatagattttaattgaattatgacgcaataatgaattatttttgaaaagcaaaagggatttattgcgtcatcaaagatggtccacggtagaccgggtgcatagaggcggtctacgaaaccaacggccgagatctaatctaaacaaaatggacggccaagatcgatctaatccaccacgggtctacggctgacgtcgacgatgacgtcatcgccggtggcggctcggcacctcgtgctcgccggcaatcgatggcgcggcgacgcaaacggagggcaccaacgggtagagggcgacgcggcgaactcaccgagctcttggatgacggcaaacgacgacggatgacgacggcggcgaggtcgaagcggcggcgatgattgggtcaacgacgacggcggtgttccagcgatcttcggcggaaacggaggggtggacgaggtgctgctcctcctcgcgatcccgacggtggcgacgacgaccgaaggtggtggctggaccaacggcgcggcgtggctggaccaacggcagcggtggagagct

SEQ ID NO: 19990 - DNA, 638 bp, Oryza sativa
gctgttccaatggccgaactttcgacggagctgcacaacttctggtccatatggactaaatgctcccacatagagacctacatgtacaccaagaatccatcagtcaaagcagagaaaatatcaaggcgtccgtttaactgacaagacattaccactaaatgatctgagccgttactgtcagtaatgatcctattgaaaattgtattctcagtcagcttgactcgagccttgctgagggtaagctttaagagctcttgtacttctttatttatctgcagtgaatccatcatttcacagttaacttgattgcatgaaagaaatacagcctagaatactagggagtagggacaatggagagttgacaattaccactacaagtggatgaaacaagaatagacttgatagatagaatgggtcaaactatttctcaatgctcatatactaatatgttactttgtgaaagacatgatactattcaactaattgtgaagacttcaataaaccaaagcatacctcactaaatgctctaaactccagacttatatatagctaaaccaagtgttatgctcaccttcgaagaactcttggtcgttccccataatgccttcgcaacatcagaaagcataagttctgatgcc

SEQ ID NO: 19991 - DNA, 9122 bp, Oryza sativa
cggcggtggcggcggcggccgtggaaggaggcgaagggggaagagagcgaaaaataccaaaggaggaagagatcgccatggtcatcccgtcccgtggcgcacgcactgcaagtgttcgtctctatgcgctacccaagctgctcgcttcgcctcgcctcgcctgctttcaatctggtcgggtcgggtcgggtcggagacaagtctgtccgttttctttcttccggaaaaggaaaaccccatcctttaatatttaataggtgcgtgggccggcccatgcttattatttttattcagattttcttttcgttctaaaaaaaattataagcgtgttgagaattaaacatgggaccttatggttaaaaccacacatcttttatcactgcactatcaagtgcatgagccacattttcattttgtttcagacatatataagagcttctttgtccatttagatttttgatagagccagatttcatagacaagtttttgttctttcaccttaacttctatactgtcataactatataaaaatattgaaatgtacccatcatcacccatctgaagtagattctctcattctcatcactgtgtgcatttccagaaatgtggtcttatgatgactactagactccattctataccaccgagtctttcaagttaaacgatttgctatcgacattatctctttctataatataccggtggctttatcaattcttctacaatacgtcgttgggctagatcttcttttcaaaaatatcaaaaatacacctaagagacatacaagattaacaattaatttatctcatcagaagtttcaaaaaaatatgaaaatttttatgtggcctccttacacaacatgtaagtttgtatacaagtttcaagttttttctggtaaatttagatttttttaaaaaaatatttttatgtgctatatgagagagaatttgcttatacaagacataatagcacaaaaatattttatgtagtgtatgaaagatgatttatattaaaaacaacaataaaaaatattttatatagcatatagcagataaattatatttttttaaaaaatagaaatgtaaaaaacttaaaacttctatacaaacgtccatgttgtgtaaggaggccacataaaagtttttatttttttaaaacttcaaattagataatcaattgttaaccttgtatgtccataaggatatttttgaaaataaggcctagcccaatggcgcatagaaagacaatgtcaaggcaaatcgttgaattcaaacaaactcggcggtataaaatagattctttcctaatataactatcttgctatctgtcaacgagtgatactcgcggaccgaaagaatagggtattagggtacgttggaacagggatctacgtagtacgacatcaaaacagacaaaagacaaggattatactggttcaggccccttatcaggtaatagccctagtccagtttatatgggattgatgatgatgagaacagattacaaagagagtaaccgaattggcgatgccaatgagaccgtagtcgaggaattcgacgagatctcccagcgagttggctccggggactccggcttcgtaaactttggtgggtgtgttggcgatgagatacgatatcctttgcctttccctaggggtcccttttatatcgtgggataccttgaccctcaagtaagacttgaagatatgtaaaccgacacgatatactggagattttaccctttccgagtaggacttctgcaattccttaacttcgtggagatattttccataatttgaggcgaattcctaatgacgtatatggaaaccaaccgtatacatgaaggtataccttattggtgtattccataagtcgtaggatagagggtatgccttatccgtaaccctgacagtagcccccgactttaacttaaatgaattcatgttctcgcacgcgacttctcctgatatagcgttgtcatactcgttagatcaacctcggttatataaccgtagagatgtagagttgtcgataacgctttcagggagcctatctgtgcaggttttgaatttaaattgaagtctgaacaacggtccccagaaattttcggcggcaatctctcccctttcctcgaaatacgaaccgtcaggtagtgcgcctatataataggattttgagattcatttcgggtccgtttgccaaaaaactctcactgttcctcaacttcttcggactcttcgttccccaatcttcaacaccctccaccggcaatcttcttccgatggcggacctcgagcagtcttcctccgatgccgccacgctgaagaagctgtacaacgaaggagccatccctccgaagcaaaccatggtgagggaggcaggaggtactgttccttctcccattttaggtcgcatgatagcggtagaggatttcatcaaatgtggctttctacctcctccttccgaatttctcttgctgatcttaaacttctacggtctttctcctgcacctaaaccccaactccattgccttcctgagcatttttgctcatctctgcgagccctacattggggtagtgcctttccttgatctttttcgctttttctacgaactccggtggatggaacccaattgggtttcaggatgttgcggattccgccttcgtgatggcatgaaggcaagatacatcccactccaatgccactcatctcggagccagtggaggacgagatggttatacctggggataaaataactcgacccggttcttatcgttcccgaggttcaaccagatcgttccgaggactggaactccaaacccccgatgacgccctccctccaggcttttgtcgacatcgtgagtggtcttcgcgagcgaggactgactggctatgaaattgttgaggatttcgttagtcgtcggatccaaccgctgcaagctcacgctcaccccgcattcgactacgccggaaccgaggacataactcagatttcttcgcggggtattcgtccttgcgttgcactttcttttcgctcctgatgttgaaaccgtggacgagatctaaccatgcttccttccatctttgtttgtttcagatcttcctgacgatacggtggcgcagcgagtcgaggaggtcctgatcagcgcgccctccacggcggaaggggtgccggccccgctttgcgacaagtcggcagccgagaaggctaccgccatcaatgtaagcgagaaccaggacaccttatatcttttattcctttgaagggccaaagtgacttcaactcttgcagattctgccgttgacggatgtaatcggtcctcttgtcgatcaccgggctccgcttcgctaaaggagaaggtcgacgacgaagtcgccaagatctcctccgctcccaccatcgctgggggcagcgggacaaagcgtaagccgtgggcgagatcgagtgcccccaatggttctcggtagaagtctgctggttccgaggtaggcgtgctgccttcgccctttaacttcttttacgaggatgtcaaaaatggggtcatgatttactgtcttacgtgggacacgggcagtctggctcctcccccgaagaggaggacattgaagctgcccgccgggaggtaagcgaaattcttgatcgaccttgttgtcgcattcccgatcttcaatgacgtctgttagccttcgtaggaaagcgtcggtggtctcctcgcagagtgggagtgaggcggcgatgagtgggtcccctgtcgctgtcgctcctcatgtagaggttgctcccatcgtcgcggagtccgtgggatgtgccgctgctcctgtggccgcgccaccacctaagatgaccacttggtctgacatggtggccgagtgccaccgccttctcgagaggggttctcgggtggtggtggcccaaatggaccgtgtggaggctcgcgcgacggcggcggacggaagggtggcacagctggaggcgcaactcgtggttgcccacgaggaccttcagaagatgaaggaaatcgtggccagcaacgagatgcagcgccaaggtttggagaagaggatgaatgatacgtaggacatcctcttttccctccacgattccctccagttagcgttgttgtgcggggcgaagtcctctattccaacgcaccccaatgagacgtcactgacgtcggcattgtcggaactcgcggatgagatggagaccatcccgtcacggcacgccgctcacgttgccgaggagatctctaacgggatccacacgggggcgtgtcacgtcctcgcgtgcgtgaagctggctctccctaacgtcgacctcaaggagatcttggcgaagggggcagctaacactacgcgggagagcgtgatggcgagcgtatcggatctcggggagagtgtcctccccctttttgaggagtaaatttctctgtcttgtattatggtctttgtataaacacttccattgttctatggatgcagcagcttcctttcatgaattatgtgttgatttgtcgcgttcctttgccttccgtagctgtgtagatcccgaggacgtccagcaaggcggacatcctcatgtcgagatggttggactgccttcctcggacgacgccgtcaaggatgggggattggacgcgacttgctgcctgcttgaggccggtgaagtcgggttcccacgtgcgagctcaggtgtgatgttttatagaagtctctctcctaaacttgtgattttgtttaggaggtagcatccgtcacatcttctgccctctgtagacctcgatagtgtcgtcgctgagcgagataggcgtatcgactactggaagacaaagtttgaagtcgccaagcttgagcgatcactcatggttgtgaaaaaagaccaagccgtggaggtgcttcgtggtcgcgaggtctgggtgaactcatacctcaagagctgctgtagtgccatggctgatgtctgtcgtcagttgaaggtcaaccgcccgaagcccgaggagagtacggcaggctacttgtcttagatgacgggggcgtgtgcccaactcgaggacataggacagcgcatcgacatcagcctcaaggaggagtgtcgtcgtgcgaggcgctgcgctaggggccacgtccttgcttgcgtccaagatcatcgtccgcaaatggatctcgggttcctgcgtgggggttttcgacgttctcggttgtcggcgcatgaggtcgaccggtcggcgcgatcgcttgcgcccctagccgaggaggtgtttgcttccatgaactggcaatggccgtcgtggtagatttttagtccttgtaaaaaacatctgacagaaattttgtaatatattattgttaggggttttgtaatcataaagaacctatctactgaaggtgtaaataggtcgtgtcatatgcgagtactactctttttacaggctgtctttagcccgttgtcgagtaaggtaccctccctagcccccagccttgtcctcggagaagtctgttctcataggggaaggctcgatggcccgtaacttgcctatctgaaattgcaatttacctagccccccagccgtgaagttggaaaaaccaatttccgattacacggcttagttaatacaccttttgagcactcttacatgaccaggtcttacatggttcgttcggctcttcgaatccgacaagcccttatctgctctgggcgtccccagccgaaattcccgtaggtttctcggaggtcttgtcgaaatggcgtaaagggtcaataggttcgttttcaagagtaggtgttatcgtggtaagggatctctggaaaaaggacactggtgtataaggagatcaaaatacctttggatatttgatttgtacatgtctgggatacattgactttatacataaaatttacgtaatttatcaatgttccatgagttggataactcgctgccatcgccatctacaattttgaacttgcccgatcgcagtactcgaaccaccgtgtatggtccttcctacttaggcgagagtttgttacgccctgcctagttttgaactcgtcggaggacgtagtcgccgatggagagtgtgcgagctctgatgcgcttctcatgatatcggcgaagagcctgttggaatgcggctgctcggacggcaactcgttcgcgatgttcctcgagaagattcacatcgtcgcttcgcctttcgtcctgttcctcatcggtatacttctgtacgcgtgtgctttgatgttgtaactccatagggagcatggcttcagatccgtatacgagaaagaagggtgtttccttgttggatgtagtcggcgtggttcgtacggcccatagtactaagggaagttcttcgacccactttttatcataggccatgagcctattgtggacgcgagttttaatcccttgtagtactattccgttggcccgctcgacttgtccattgctctgagaatgtgacactgaggcgaagcagattttgaccccgagttcaatgctgtaatcttggaaatcactgctggtgaactgggatccattgtttgtaaggatgtggtgaggcaacccatatctgcagaatatccccttgatgaatttaatggcgttgtcggctttaatttctcttgtcggctctacttcaatccacttggtgaatttgtcgattgccacgaacaaaaatttgtagcccccttgtcctcgtgggaacggctcgagtatgtcgagcccccagcacgagaatggccatgtcaaagggatagtctagagcgcttgtgctggcaacttggtgtgtttgctgaagaattggcaagcttcacatcattgcactatttcacatgcgtctttaagagcggttggccagaaaaaaccttgcctgaaagcttttccgaccagagtacgtgcaccgacgtgagatccgcaaatgccttcatggatgtcgaggagaagagcttgtccgtcgtcggatgatatgcacttgaggagaactctgttcagggcctttttgtatagatcgttgccgatcatacaatatatcttagcctgacgggacagtttctcagcctccgtgtcgtcatccggcagctcgtctgactccaagaatttgattagcggagtacaccagtcgtctgtcgtctctatgattgcagcgacatcaggtacctctgcagcccctgcgagttgctggtatcagccgtggtactatcgtcgtgcgtgtccttgacggatggcttcgtcaggacatccaagaacgttctgggctcgagaggttctcgtctggaagcacgtcgtgcaaggtcgtctggttcgacattgtcttttcgataaacgtgtcgaacttcgattccgtcgaacttgcgttccagttttctgacttcggtgagatatttggctaattcggggctagagcatttatagtctttgtgtaattggttcgcgaccaactcggagtctcccttcacgactagtcgcttgacaccaagtactactgctgctcttatctctacgagtagtccttcgtactcggccgtgttgtttgttgcctggaagtttagatggattgcatgcttgaactgatctcctgtgggcgatgtcaagatgaatccagcgcctgctccttggctgttcagtgctccgttgaatgccatggtccaggtctcgttgatcgtttgggcggctggtctgtcctctgggatagtccagacggctacgaagtcagcgaagacctgtgacttgatggctgttcttggcacaaagtggacgtcaaattggcttagctcgactacccatttagcgattcggccgaccacatctttattcctgacaacttcacccaaagggaaggaggagatgacggtgaccttatgagcctggaagtagtggcgtagctttctcgatgtcatgacaacggtgtagagcagtttttggatctgtgggtatctagtttttgcgtcgtggagggcctcgcttacgtagtacgcgggatgttgtactttttccctttctacgatgataactgtacccacagaataaggcgtggcagcaatatacaggaataattcttcattgatttgaggagcaacgagtacgggaggatttgacaagtagcgcttgagcgcgataaatgcgttcttggcttcttggttccactcgaacttgtcttgcttcttgagcagggcgaagaagggttgtcctcattctcccatctttgcgacgaatcggctcaattaagccatacatcctgttagccgctagacctccttaagccttgtagcgacttcatgttctcgattgccttgatcttctcggggtttgcctcgattcctcgacctgaaaccaagaaaccgagcagcttccctgacggtactccgaacgtgcacttctccgggttcagcttcatttgatatcttcagaggttgtttaacgtttccctgaggtcgtcgatcaatgagtcgcttttcttggttttgatgacgatgtcggccacgtacaccttgacttttgtccaagctgagtaccaagtgctccctagatgccgcgctgatatgtgttgcaccgaaaggcgtgatgaacgctgtcttctcttcgtcctcttttgccatgctgatttggtggtagccggagtaagcgtcaaggaaacttaacaactcacagccagccattgagtgtcgcgtcccaaaacgactctaaaatacatcctcgaaattatgcctagaataattaaaatccgtgtgaaagcctccaacaattaaaatgtgcaaagttaaaagtcaaataaggcttggaggatttttgtatatttcctaaaagcctaaaatgcgtaaataaattttagtggaattttcagagcacaaataataattattaagaaataaacaaagttaaaatgattttataaaagaaaaaccctaaaaagttccctttccctccccctctccctcttgggccggtccggcccagctccctccccctccctctcctctccccgtggcccatccggcctctccccgcgcgcgcgccgctgacgggcgggcccgcccgcctccctcgctgacgggtggggcccacacgtcatccccttcctcccgccgctcccgccgcctcgcccgtgccctagcgccaccgccgc

SEQ ID NO: 19992 - DNA, 12175 bp, Oryza sativa
cccttccctcccctctgtcggccgccgctccgccgtgcctatggccgccgccggcgaccataggggcgcgggcgcgccgcctcccgccgcagcgccggcgtggtcgccttcgggcgcaccgagcggctgccgcgtggggcccggctgtcagccgcccgcgcccttaggtgcggctgacgcgtgggacccacggcgccggccggtgtgagcccgggtgcgcccggtccaccgtggaccgtggggctgccgcgtgggccccacccccgtggacccggtccgcgcgcccctcccctcggctgacgcaataaatccatttttaaattaaaatttaaatgaagaaattcgcaaatattcatttaaagagcatataaacttcaaatggccataacttggccatttgaactcggaattggaccgttcaagtctctaatttttccttaagaagtcaagaacccatttttgtgctttgttcctgctggttatatggagtttattagagtaaaagccttttcttttccgttggtcgtctagacgctgcagcttcggaagatccactcttcgtggaagttgaagccggcgtttgggaaagcgagcaaggcaagtcacatcatccttgaacatattgaatcccagtttataaaattatgttgctttaaattattgcattatctctttatttaaattcccgcgttatcaccgttttatctagccatgcctatttacctttgttatgaccttattattattgttattgttattattaccttgttcaccctagactaaacaaaaccccaactagtggacactctactcatggtaccactagtatgattttaggtagatgcttcgctgtttaattaggtaacattaggtgattttacaactctagactttgggaatgttctcatcacccggacactatggaattgatgaattattgtggaattggattcacaccgccccctctattcaaaatccccaaaaatggttttaggctgggctcggggtgcatggttttgatagtagcacctcagccatataaggaccggtcttcgggcctctgttgcaaagcactaccgtacttccacatgtctagtgggtaaggcttagtttgtggctcagtctggttataaacaaaagtacacggatggagatggacgaagtcgggggtcgatggacatctccagggcaaatgaaggctacacgagctgcggcctggtagtcgagatgtcatggcacagggccggtgtcctgctgctaggggctcagtcctgcctacctgtctcgggggttccggccgtaggtgggattgggtcggtactcttgtctatggctaggatgggttggaaactatgtcacgtcttccgtccgtataccgtggtggtatgtggcacgtggttacacgtgaggaagatgtgtcttgtgggtaaagatgtacacctctgatcagagtataatctattcgaatagccgcgccctcggttatgggcaagctgagcaatgtacccaagttagtgttttaatccttaaaacctgcttaacaactaaaatgtggaatggttggcctgggttggcttgggacgagctgggacccagggtcgggttgccagttcggtctgaatcatcgtaggccttggggtaaggcaggttcgtgtgggttcacggccttgataaataatactgtatagttctagaatcgtgtttacaaaatagctttgagcaactaagtgtcttttaatgctgtttactgcaaaccctaaccctttatattataactcccttgtactccctcgcatttattctgcacttgtgggtgtgtcttgttgagtacggtggttgtactcagtcttgctcaatttttcccaaacccagaagaggagcccctggaagatgaaggctttggtgtctagctcgtgcctgccgtcaagcgtctgtggtcgtcgccctagtcttccgctgtttcccgtttgtctttatgtgtgctaggccttcgccgcccatgtaataaattatctatttacgcttccgcttgttaaactctgaactgtatcaacttttggtgtaccttgcctcctgggacaaggaataatgcacgcacgtaaggaacgcccgttgggttatttccggtcgtgacattgagtccgctaattggtctatttgaggaagagggaagtggtccttggggcacgccttgttgaggtcggtgaagtcgacgcacaacctccacttcctgttggctttgcgtaccattactggatttgcgagccactctggatggatgacttctcttatgaagccagctttgagaagtttgtccagctcttctcatatggcttgttttcgatcgggtgcgaatcaccgcagtttctgcttaactggcttggcgttgggtcacaccattagtttgtgctcaatcacctccctgggtactcccggcatgtctgacggttgccaagcgaacatgtccgcattgtctcggaggaaggtgatgagcgcgagttcctatttgtcatccagtgatgccccgatcttgacggttttgtcggggttggcgctggacaacgtgatgatcttgatggtgccatctggttttggtgtcttcttgattttgctcactttcttggggttctcggttgtggcgggtgggttgggagtatgctcgactatgtcgaggctccgcttgtcgcactgcaccaccaacttggcgttccccaggatattgattgtccctttcggtcctggcagtccctttcggtcctggcattttgagcacttagtatgcataatccgaggctgccataaacatcgcgagtgctgttctcccaatgatggcattgtacgcggtgtcgaattccgcgacatcaaaggtgatctgctctattcagaagttctcggcgtgtccgaaggtaacatgcagcgtgatctttcccaacggtttagacgatgattccagggtaattccgtgtaagggttgatctgtgggcgtcaggttgcttcgaggtattcccatcgcatctaaagtgctggcgaagagtagactgatcgagctcccgccgtcgatgagaactcttgccaccttaatgttccgaatagtgggctccaacacaatcggatatctgccaggtgtagttgtgtcacgccctgaaaatcgcctaatttaataattcattctttaatgcatttttagaaattattttaaaagcctacaagttaaactctaataatctaggaaaaatttcaacataaaattgagctagataaaatttcattaaatactttgcttgtttatctattttctagatttttctaggaattatttgagcaaggaaagtatttttaataaatgaaacatcatttcacgaattattttaattgaaaaagtctttaaaaccctcccctaggccgttgggccgtttccggcccaactctcctcccagccacgcgcggcccacgccggcccaagccgagccgccgcccctctcctctcaatccgccgacatgtggggcccacatgtcggggtcatcttccacctccggctggccaagccgagcccgagcgccgccgcctcccctccaaatccgctgcctccggccatctccaagtccgattggttgaggtgtttttatccctttgttgtcctccatcatttcccccaagaatcggagctaattgctttgtatttcatcagaatcaaattcgttttcgagtttatctctccaaactaaccctaggatagtccgatctctctaatccaagcctatataaagcatcccctagttgtcctctacgtttcccctcaagtcccgaactctaccgttgcccgtagcgccgccgccgtgtagccctagtcgccgccgtcgccgacgcccttccagccgcgccgcgccgctgctgtagctgtcgccgccgccttccattgccgccgttgggttcgcgcggaggaggagcacctcggccgcccctttgcagccactggagaccgccggagcgctgccgtcgacgtcgagccaagccgtgccgtcgtcggagctcatcgccggccgccgtacgtcgtcgtccgtcgtagtttcttgcaccggtgagttcgcgtcgtcgtcctcttcgcgtaggtgttctcggatagcccggccgagccctctatcaccggtggtcgcgtcgtcccgtgccatggcctgtgatgatgtcatcgtgacatcataaatcatttatttaattcgtgataattttctgtattagatgaaaatcaattaaacttagaaaattcataactaaatcatcgtaactcggattcgagtggttcaagttgctaaattcatctagaatcaagatctacatgttaaaaatatccacatgtactgtttatgcttgtttttgtactgttttgttgattttgttcatttgttttagtttccgacgttccagaggagagcgtttacgttgaggaaggttcagaagggtttgaagaagctcaaggcaagtcacacagatcccaaacaactctttgagcatgttgaacccgtttaaagctaatgttttatttcaacttatgcattattttcgagtgtcatcgagtggtgagcctttcccgattaattaatggccgaagatgactttattttcctatgggtaataaattgatttagcttggaccttatatattggtttagttcagctaagtgctatataggcataattgcttagccatgcttagaaacattagctcattaatgggatgaatcatattacattattacttatggttataattaatggtagctcacgatggttaatcgtgttatgataattaattgataaataaaacctgattaaaggtgggttgtgagcacatggttgtgatggtcatgctcatgacaattaaggaccggttcacgagctactgttgtgaaacatttactgtgccaaccacaagccagcgtgggcaacggctttatcttttgtatagcatgattcattacggggtgccagactgtgaagcggcgagaagtccgtgggggtcgctggggagtccatgcctctggttttgagggggagattatgatccaggaatggtgcactgtggtgagttgtgttgtttgagaggtattgtcacagttcctttgcaaggtattgtggtggtactgaggcgcatggtgacgtgttgtggaactgtgtcttgtgggtacagtggtacatctctggccagagtaaaactattcgaatagtcgtgcccgcggttatggctgggtttaacaatgtttttcgtgattagtctcacattactcattattaatgataatattgtgataattaaattgactcctggtttggaatggtatattcctggtatggaggtttgatttgtacaaccggggttggttgttcagttgtggttgggcctacgcaacacgggtgtgttgtatagtgtttatttaatattgcttaattgcttaactattttactattttctcaaatgtttattaaatgttgtttatgcaaataagctttattatgccatcctttgttatcctgtgcacttgcatatttgctgtgtggcttgttgagtatgtcatatgctcattcttgcaatattcattcatcagaggaggagtacttccgtgaaggtgatgatcaggaggattaggctttgttcgggtcaagttgcttgtggagtggagtcgccatagctgtttagtcttttgtttttatttccgctgcgtagaattttattcttctgagaggaactatccacctctgtaataattattcattttgcgaatattaattagttgtttgatagtactctattatcaatttgttattgtgtgcctcggctgattcctggacgaggatttaacgcacatgtaagcgtttggaattttggatagaaattccgggcgtgacaagtcacggtcttggggtggtcggcttccgagaactcgatcttgtgctgcgaccacttcatcttggtggtagtcgcctgtgaagtggagcaaacttcgcgttccgctttcttgtactccctcttagaggtgtacaaagtggatccaccgaagatgtgggaaacatgcaaatcatactccgggaaggcggagttagagttgtcggtggtggcttcttttgcagtctccgtactcgctttcctctttcgattgctagttgtttcgtgagctcctttttgatgacgtagcaatcttccaaggcgtgattgcttgtcatgtggattgggcaccatggcttgcgagagtcgtcgccctgagggttggagcgcctggacggttctacttgctctgcggcaaggacctctccagaagacttgcgcttcccgcttttgcgacttctcttcttgcttgactctggtgcgtctttatcagtcgacttcttcttctcgtctcccgctttgctctttccctccttgcgtctcagagtgtcgtctgcgtggatgtgatccggcgcgttgccaactcttgggtggtgtaccgatctcggacgccagacttgaatgctcgaatgacagaagcgtcggtgatctcgaggatcgtatttctgcactcattgaagcgcagaatatagtcccgcaatgattcgcctgggttctgggttagtgcatgtaggtcgtcctcgatcgcgtggcgcttgtaagtcccttggaagttggcgacgaattgctgccataaatcttcccatgaacagattgagtttggcgggagatggacgaaccatgtaatgccctgattttcgttcgggattaaaaatcatttaataatgcttttctagaaattaaataaaagttaaagcaatttaatcaagtgaaattattgagggaattaaaaatttcctttaaaaatcatggccgggaatattttgtaatattctttgcgccctaaaatattctctgaaattttcccgtgaattttcggagctcaagaagtaattataataatacaaagttcattaaaccaattaaataaaaaagaaaacgaattaaaatcctcattctttgctttgggccgtttccggcccaagtttcctccccctcaggccggcctccctcctctctcctcccttcttggcccccaaggcccgtccccttgcaaagttcacttcgcctccctcaaccatcacctcctccctccctcgccgacaggtgggcctggcgaccccacctgtcagctcctccttctatcttcggcgtccagaaccaaagccgccatgacgcgcctttgtactcccgctcgcgtcctcgcgcccaaactgcatgaaattggttcccctccacctcctctgcactctccccacatttcccccaaaaatcgtgtcgggttcgagctccacttcgcccatgatgtcgcccatgtcgccggccgttgccacccgattccgccctctcggccacaatttccctcccccacgcccatataaagcatcgtccggctctcctctaccgtttcctctccacccccgagcttcccatcgcctccctcgctcttcccacaccgtcccccacttctgctactttccggcgaactctagccgcgcgctaccgccgccatagccaccgccgcaccgcgccactgccaccactggctcctctgcgccgagccaaagcccggccaccacttcccctccccaaaccaccgccaaaaccccgtcgccaccaccaacccgagccactgccgcctcccgccggcgagcgtcgccttgcccggccatgccgccgccacccacagcgctgccacgccccaccgcacctcggctgccgttccaagccaccgaaatcacaccgaagctcggcatctctcggtcgccggtgagctccaccattcctctcctatccggcgtggtattctcaccgctccgatcacctatgttcctccctaacccttctatcttcttccccagggaatcccggccgccgtccgccgcttcgtgctcatgggtcgccgtcggacctccgctaccacctttcccgagggagcgccgccgccgcccgttgcccccgccgccccgacgcatggtgagcagtcccctccatctcccctttctctccttcggcggcagcctcccatgcccgccaccgcgtcgcgtcatgtcgccggtgttgtcgccagaggccacatccggtcgtgagccgccgccgcccctggccgctctgtgtcgccgcccgtggaccactcccgtggtccgggtccacggtgccgcccaggccgcggtggaccgagtccaccgtgtgtcctccctttggagccgctgacgtgtggggcccgcgtgtcggcgccagcctcccccctttgatgacatcagcgatgatcttatcccttgagaaaacaattaataattgcgcaataaatcattaataattctagaaattcatttaatggctcaaaacttataaaattcatatctaactcattcgaactccaaattgggccattcaacttgcaaaattcatctaaaattgagatctacatatttatttaatttttatgtactgtttctttggttttattagagtttttcctcattttgcgtgccagtgtgtagtttccgccattttggaagatcgcggtcgcaaggaaaagagttcggaagattgtttgaagaagcaaggcgtcacacattccccttgagcatattgagcctattttacaaatgttttaccgtttgcaaataaatatgcatgttttgctaattacatgcgatccgggtattacctatctgctcgcttgtgccatatttacttgatatctgtcctttgtcaaccttgggtgataaatcgactagctcgtgttacttatgtgacctagctagaattatttgcttagccatgcttaattaacgctagctcagttgatgggataattgcagtattagaccttctagtatcttgatgagctgcgtgctcgagacatctggccatgtttcgtggtcataattatccaactaaaatgcgactgaatggtgggctatgggtgcatggttttgcgggtcgcacccatggcaattaaggaccggttcacgagaaaccctgcaagacttatagtgcttaccacaagcgggagtgggtaactgcttgatttgaagtatagctcgaccctttcctaggcaccggtggtgagggtgggcatgatggagttgggtcggtcggggtgtccggttgtccagctgccggactcaccgcggcgcacgaggggactgcccacctccggggtagggggtgggggtgaaagcttagcgtggtgtggatggttaggggagagttatgcggagagtctggtcataatcactcgacatggtgacgtgcctgcacaggcacggtgacatgccggtggattgtgtcttgtgggtacagttgtgcacctatggctagagtaaaactattcgaatagccatggccgcagttatgggcgatcgaccggattcaccgtgattagtctcacacttaataaatcggcccaatgcactgtagttcaggtggattggttgggcctgctcaacgtagtgtagcgttgatcagtggagatttaatattaccttaattactcaacagttctaccgttttgctcaataaaatgttttacaacaacctttctgcaaatagccacaagccattcttgaatccccttgcacatctgcatcgttggtgtggcttgctgagtatggtggttgtactcagccttgctattgttctcccttttcagaagtgtagtgcttctgagctgaagacaaagttagaggatcaaggctcagacaccagttgagttttgcctgtggagtggagctgaagcccctctaggatcgccttttccgctgctgctgctttcttttcagtgtgaggactaagagcctattctgtaagtattttatgctttatttacgtttggaactgtatattacttgtcgttttgtgtaccctggctagtcctggatagggatttaatacacaaaatagtctaaaaatttagggcttaatttctgggcgtgacaaaccatgaccgggcagagcctttcagcgcggccggcaaataatttgccaggacgttgtcgtctgcgccagcggcatagaaaactgtggagtagacttgcagaaattcttctgggtctgtacttccatcatatttcccgatcgatcccggtcagaacttctcgggccaccgcacgttgtgaagtgcgggtgtgaatgccctgcatccattgcctgggacagggcatggcccacgatcgcgatgcctttgtggaggtcgatccgaagaggacgatgaagacgaagatgagggatcgcttggatcaggagcccgacttctcgaacgatgatcacgtccacgatctcgactcggatgaggagatttggagtttcgatctcgtcattcgtcgttattcctttcttgtctccggggacagttgtcccgatcccggtcgttgtcatcgcgtcggtcgtcacgagttcgacgatcacgattcctgttggagatgttccttcggccatcgtcccgctctcgttaagatggggagtgaggacgatgctgtcggtgcggattgccatcctcacgatgaggagaacgatgttggcggcgctcgttctcgttgcgttccctcctgttacgccgacgtccgtttagatgttcgcgaaggtcgccatcttcacagtgcggtggtgtagggtcacgtcttggaggggagcggttgccggtaggccttccgtcggggttttcatcctctgcatctccggtaagtcgctctctatctctgttcggctctgggccacctgcggcttcagcaaacgcggtgttgaggttggtcacggtctcacgtagccactctgcccatctgctggtgtctaggtttgttaccggatcaaaagggccttccctcaatatcgcgtccaggttccgcaactgatgagctggtgttctcgcagcggcggacgagctcgtctcagtgttgtcaaccacgtttacatctctaggcgactgcgaggaggactcgtagccttctaagaggtgtaacacggatggcttgtttgcgtcgacaaatccaacaaaccgatccaggaccggagccgcatctggttccttggcaacacacggagtttgaattcgtggccgctggacgcgatgatgcgctggtttgagggtcctgaggaagaccctgcagttggtgagatcatgcactctagatctgtggatcggacagtaggtggtactcgttggtgaagtgcgttgtatcccccgttcccaacaggcgtagagttcagcttgcacgtggagtatcaccgggcagtcctcgagagcatgcttggttgtcttatgtatgggacaccaagttctcggtttcagggtggttgtccttgtcggcttcgatttttcacacgaggggtgaaactcagccgcttgagggttcctcccaggtgttggggctgtcgatgttccattctccaccggagtgggaggaattgtcggcggggcattgtttctctcagtcgtagccgtacctttctcgttcccgatgacgattgggccagtcgagattggtgtaacgatgtagatcggaacgacaatagatccgacttgagtccacaccagcggtgtcgaggtagaaactccttgattggcgctggtaacgaggctattgtcggggagtcttgaagtcatactggtggatccttgagcaccaagtccccctacctagcgctccactgtcacgagtgatactcgcggaccggaagaatagggtattggggtacgttggaacagggatctacgtagtacgacatcaaaacagacaaaagacaaggattatactggttcaggccccttatcaggtaatagccctagtccagtttatatgggatcaatgatgatgagaacagattacaaagagagtaaccgaattggcgatgccgatgagaccgtagtcgaggaattcgacgagatctcccagcgagttggctccggggactccggcttcataaactttggtgggagtgttggcgatgagatgcgatgccctttgactctccctaggggtcccttttatatcgtgggataccttgaccctcaagtaagacttgaagatatgtaaaccgacacgatatactggagattttaccctttccgagtaggacttctgcaattccttaacttcgtggagatattttccataatttgaggcgaatt

SEQ ID NO: 19993 - DNA, 22886 bp, Oryza sativa
attgatctcgacagtgccctccaaggcttccttaacagaagcagatacaagctccacctcactgagcctactctccaaggtttcactcacaatcatagacttacgagtgtaaaccttcatctcaagcaatcctttactaaattctttgtcattgcactcttcattttccttaatcttcaaatttatctcaaaaaagatttcaccatggaaaacaattcctctagttgggcccgtgagaattatattttcattctacaagaaaaattacacaagaagttagctagtcacactaatgctatatatataaataggtgatgacattatccatagaatataatgttattatttaaatgacatggctcataatattacctagttatatttaagcccactaaaaataagtactggtatttcatatgaaactaggggtactgtggatgcatatagacaacttaaatgtagctagctttggtatgcctttaactgtacagaactgtaaagaaattagttcaatgtatcatgtgaaatagggaaaattggtagtgtttaagagaacttagcaatacctctgactggataacttggcaattgtccctattgcgccggaagatgaagatgcagttaaaatctaatccatctctgactatcacagtcccatatagattgataggataaccaacatctgatgattttaccttcagagaaagtacattcaacgagctagtcaacatgtggtccttgttgataattgaatccgtaaagcgcattggaccatattgcgctgagaaaaacgaaaatggagttagtttgcaacagggaagaatagtatgtcgacagaagtatacactagataatgtctctagactctagagttcaaaagtctctagaggacatacgtctgcatatatatcaaccgtagtgaaaattattttagctgtttcagaaatcaaattattgtagttgagagagtatttggccatttctaatcttaatcaaccattgttgagcaaattccaaccatataactgtccatttgctcaatgagatctatgggctgagagagagagagagagagagaatatgttcaatagcatacagcatgcaagttaaattctgatattggtcaggaaactgaactaaatcctttccaatccctgcttatcttagcaaagcctaaacagtatgagctttctaattcatcatataacagcttaactgtgtttgactttgacctgccctccaatcaagaaaattgatcatttgcatctcatctcatccacctgtggcaaactacaacatctcttcccagtattccccatcatccctgacatagtgtccctagctgtagcatgcgtgggcagacaacagcaccgtgatgttcctcctcatcctccaccctggatcgagcactcaacatttcaggcctctgcacctgcatctagagctcactaccagcgtctaggccctccagtgcaaggtcctcaaggaaaaatacaattcactgcttattcgcaatcactgtgaaaagaaggcccctagaaatgagcaggtggattggtccatggctgctggtggtggtactaccactgactaccgaagccgaaaatggtgaaattgtgccaccgaatcaaattccttcttctcagtcaccattgcagtttaagctcactgtcaccattgctgcatgggaggtgaggtgaaggggaggaagaatggggatagatggccatttcagaccagaagtggcaaatagtcaactgcattgtgggcagagtggcaagtgatcaattgaaatataaggagctggaaacgattaagaaccactgtgaagagtggaacaatcaaatttccccagttagtgaggattccatctagttaatcttaatgccactaacaacagctcccaagcaaacagagacatgatagggtttgaatgataagggtatatttgtctaatctttgattgttgaacaaaatgtttatcacttaatgaatgccactgtttctgtgcttgttgttgcattgttttgtacttaaaattattggcctgccattcactctgcatgtttgattggatttcgcaattacatggttcagagctgcgaacaatttgatggcgacagatcagtagcccacatagggagtaccttttactagaatttgaataaatatagactagaatttgaataaatatagactagaatttgaataaatatagaatgctcatcctcatccacagtcttagaagtaatgtgttattaggtactattgttgaggtgtatacatactctccttgtcgaggtcgaaggtggtgaggtcgcggaagcaggcgcgggtgtagtagctgattcctgtcttggggtcgtgctcccaatacttggccgccaaagcactgctcctcgcccgcctctccttcacctccggcgtgtccagaaacgacggcgcccgaggccgccggggcttctggctctgctcccgccgcctctgcttcgccgccgctcctgcttcatcttcctcctccacaaacaatggaagatcaaagctgtcctcttgctgctccgccatggtacgcgcggattcagtcccaaaccctagtccataaaattgaaatagatcggactgaatcagattggaagaaaggaaggaaggaattagcagatagcaaaagcctcctacctcctctcctcctcctcttcctcgtcctcctcctccgccgccgccgccgtcaccctcgcgttggggtccgccgaccagccagccgccaccgtggagatcgatcgatcgatatagatataggagaggaaggaagggagaggttggatgtatgggccgtagatgggcccaaattcgttctgtttcatgaatcatgagatgagaggaataaggaataagtctattttgcttacctcaactcatgcccctagttgaatcgcatccattaaccacaaaactgggcataacatgtccccccaactcctaaaaccgttgcaaatcgactccccgaacagttttggaggcggttttatccctcgtcaagagccccacttatcaagagcgtcccacctcatcctattctcttcctcacctctccccccccccctcttctcttccgtgatccctctctctctctcacacacacaccttccagccacccgcttgttggttctgccaccaccgcgctcgtcgctttgctgctgctgcggacgaccttcaccttgcccccgccgacctctagtgaaaaaggtttttgattacacaaaatctaaaccgagagcgctctcggtttcgctctatcgcgacgcgttttggagccatccgattgcctgcatcgtcgtggcatctatccgtgcgggcctcccagacctgtctccgtggataaggatagagacgagaccacttaggcctctcacagtgcggtgaactggaccggtgctataccatgccagctgagatttccgcgcacatggcagatggatggtgtaacataccgaaaattagctattttcttatcttgcatcatgccaggtcttatgttcttaataacttcctaaacctaggaaaatataattagcgagacctcccaaagctaacctgcataaaattcctctttgatattcaaaagcccttgtgattttcatttaaaatttatcttgaaatattccttgatttggttttaatctaaaaccttctttcgtctaaaacttcctttatttaaatttagtgtgaaaaaccctttttactattatgaattatggtccaagaaaccttcccatattgtcctagaacctaaaccaaagtaattccaattttattggaattaattgttagcccatcctttgatcttaaacccatcctttgattctatctaaattcctccttttgatctaaccaccaattttatctctgtggcttgatttcctcttcggcacacgaataatattattaaaaatattatgaataattgctcttgtgctaagagaatagactttatccctccgtccaaaatccagaacctcatttagcccatatctaattctctaaatttcataccacatattttgggctaaaattttatttactctactcccaccatattccctccacatactcaaaaatattcaaatctagagccatattatttatggtgttgaatattttgaatttctatttgagtgcattaaataaactccctgtccaaaacattgcactcaaaccaactagagaaatatttcttttggaaattatattcaaatataatttccttctaaactctctctcagtcaattttccttcaaattcaaattattcaaatcctttttcaaaatctagccatccaaattcctcgaaatctattatttgaatctctaggaaaattagacttcctcctttttaactttgggccgaattcttcttctctctcgcgcggcccaagtcggcccatagctgagccgcccctcctcctcccgcaagcgcgcgtgccgtgcacgcgcacgccgccgcaaactcccttccgtcgccgctaaggaaacgaagccggcgccgtctccttctcctccactccatcggcgccgtgacccattcatccttctcctccgaactgcctttcacccctataaatagccggccatttccccccttctctacatacaactcgagctctctttctctctcttttgccatgtccggccattagtgccaccgctcgatctccctcaccagagcttcgcaagccaaaccctcgcgccatcgtgttcgcctcgacgagatgattccatttttcccctttcccctctttcctatccactccatcaagccaccataaccacctcctttgcagccgaagagaagctcttctacttgccgttccggcctcctctcctaactccttcgctgggcgaccacttccccgggtgcgcgttgtccggtaacacacttggccgccgccgtcgaggccgttccaccatcggagcaccggcgccccttctctctttctctctgctgttgcacgggaagaagaagagaaggaagaagaagacgggaggaagaagagaaaaagaaaagaaaagaatctccctgacaggtgggcccatcaacagtagcctttcatatttttcttagttaattcaaatcctatcctttagaagcacatatctcctaaaccgtagatccgattccggtgaaatttggacctaaattcatcttaattcaaaagctatattttgatatcaaatttgctatttgatcattttatttgataccgtttgaatttatatttaccttttcaaatatcttcttttagctcaaattaccctttgccactaaacaaccaccgtttgaaactttacaccttccatggggacgttcgtacggtctactgaccccccgatgtcgaaccgttggttgtaaagtcagacaaaacccaaatctaaagtcgaagtgttgctcctaacaccttacgcctcaatgcgtataacgttcagagcttcactattcagtcgacctcaactgtacaccacacagttagcttttaagctctgtgtaatcctagccgctccgtcgctacccacggttgccggagtaacacttccgccccactaaacctgcacccacctcctatttctctagctgatatattgtccaacgatatcggctagagaagataccaaacttagtcgtcatactacccaattctaatgacgactagcaaatacccaaaacccttgccgatgtttatcctacctcgatatcggcttaatcaaatgaaaccctagccatccagcctgctattcaaactccataccagccatttatcctccaactacccatagcttaaacatgaaatacgagccgatatgctatcctatttcagcatcgactcgagaacaactaaaccctagccactattccaccaaagcctaatcttgattccctcttcaacctagcctccaaccaactagagcctacgcataaaatactatctcaataacccattaaagagatagttataccccaaacctagcttttctcgcctttcatcattttcttgctattttatggcttttattgaatttggttattcctcttctttaatagagtctattttattctggatggcaacctgtggtatttcgagcatcggataatcaggttgcctatcttggatttatttgcgttggagcaaggcaagttattattcctctcctttgagtataattatcctatactctatagctttattctatgcattagccattcatgattttgaatgcataacctgaacatatagcaaaccagatatatgctagattttgcttagccatgcttagttagaatatgcataaaatttaatgaacttcgattgggacagtacgtaagatttggttgatttccgggtggctagtactgtctcgatcgatataattgccaccgaatacttatgtcaaacgaacgagtacgaccgcagcttctagaatggggatagacctagttattaggttaattaacaatgtggtatctctgtacagtggttcttatctaagtcctcgcgaaggaggcaaacttatgccgcgaagggcaaatgtgatatttaccgaggcgcagataaatatcttgattatattacgatcgctgtgtgtgtgattttatggaaacctggttgagatgacgtggggtctctcaactagttctctctaaaaacctcgggaacaccagaactcctctcgctgctgataacgttacgttcagagcgcatggggactagagtttatggaacaggggccactattgttaataacctaaggctgggctacgactaagctaatgaatattggcaagtcgtggactgcgggtaaagcgtacatttactgcagtaaagtgaaaatgaatctattcgaatagccatactcacggattgagtatcaggactcatggtatttggttagaaacttaattcaagattttactaaatactgttgcataaagacatcccaagctttctttctctattctcagctttcagccagtaaacctagatctacttaaatactatttcatgcattcattatttgatataatagcttgctgagtacgttgtactcacccttgcttcaacctcctttttaagagtccatttgatgttcttgccgaagtcaggagttcaatcacataagttagttcccttttaacttaatcttcaagtctaagttatttagatggtttaagtctatagtaaaacagcaaagttgggtcattctaaagcttctgctgtaatagttagccacaatctcgtaaataccatattactttatatatccttcaaagctatgtctaaacatatgcaaagacgatccagattattgaagttgtatcaacctactgatccagggcttgatacagttaaacatgtcggtttccgaatcattagttttgggacccgacagatgcgcgccctagctgagctcctcgccccgaagcagagccgcgtggaacctggtccaagcgagggagcgcgcgttgccgaaagtcacgggcacgcgcgctgtgggcagcgtcgcctcgctctcccgtgacctcgcgcccatacctcctggtgaaatcttcgatttgccctccaaaatcctctcccgccgcacctatttccttctttccgccaccgaaacaccccaagcaagaactcgatccgtcccaagaacacaagaggaatcaccaagaagcaaaagaaacaaagaaatctcgatccgtcccaagaacacaagaggaatccaggccccagatctcatattaaccaatgaacaacacatctcacatgcacaaaaacaacactcaataaccggagttggagccaatccatcattagatcaagcgcagccaagccaagaaccggcggccgcacgccgccaagaaccggccgcccagaaggtgccgccaccgccgcccgagacgcctcccgccgccgacttcatcatagttgccgccgcgccagttgctcccgtcggggacgtctcccgctgccgggccagccaccgcgcgagccggcaaccgtggctgccggagggaggagaagagaagcagagccggcgccggccaccggggacgccgcccgcttccgcccttctccctcgcccgcttcctcctcgccgccatccgctcccgcccttctcccgagcccgcttcctcccacgcgtgagagaagagaggcagagcgtgggacagagagggaggggaaaggctcgccggtgcgcgcgatttcttgcgacgaggcggcaccgtcaacctcaccgttttgtgggaggcgaggaggcgcgcgagcgtggcaggagaggaggaggcggtcgcgccgaggaggggaggcaaaaggctcgcgcgagtagtaggcgagggtagttgagagaaataattgtgtggtaacgcgtctggggtcacgcccactgtgggcttggtaccctttactagtgcctccattcaattaaaccacacaactagatgtgcttgcactatggaatgggtgtctctgggccaattttttaggcgaggggtacgggccccatggcttgcactgtgagaggccttagaacaagtctaatagtacagcccactactagctctaattcatctatagccaatctaatagccaattcatacaatagctgcttactatactattaatatatggtcccacctgtcatacacgcagtgtatcttggagtccgtgctgcagctggctacatatctgtagcccgctgctcttctctctcatcgtttatcttattaaaatatgtttatagctggctaatagcctgctattgtacctgctcttagactgaacgtcgcactcaatcccgcttcactgtttgaaatcgggagtcgcgtctgagagagagagaagcagaggctgcggattctcccccaaatccctcgacggcgacggtgtcggcgactgctggcttctgcggaggcgacagcgactcatccaccgagcggagaggggcgacggtgagcacaaggtcttcctcgttgttgtcaccaggcttgaggcgagatctagcaggggcgacgaccatggcgagcgctaggctgagcagtgaagcgcatcgtgcaaatcaggtagtctcatctctttgagctcttctgttggctactttagttcggtgctctgttgccgtacaaacatgtttaaggtcaaattagtgctcacatatctctccatcccttttacttctaattttgtctaatgcaaatcactgaggttccctttttggtctgtgatttcaattggtttcagcaccacatttggagattttcacacggattttgggattttgtcatatgacctatagataagttttctgtaaatgcattccgtgaatgcctctgtgcaattatgtgtgattttctagtgcaaaaaattaggatgtggatgtcatggtgttggaattcgacccaaattagtactttgctttaaaattagtagggattacctttgtgctatgtattgttggtgttaatttagtatgtgtttacttgctgcatgcacaggattaggtcgaggaaccctgcatggtcaaaattttgtccatgaatttttttattttagtgtcgagaagcctgataccatagcttgtagttagttgtttatagagcaccatggacgaaggcttgctcgggttagagggaatggatgtacttataggtcactggttttagagtagatgtttttatagggcgaatggaattaatgtgcttaacttcagattccatcaggaagatactagaaaactatttttctatgacgtaattttgcttactgtagaagtaactttaggtgtaagtggttgttaacttttaggtgtaaatgatgaggattttttttttgttgcaggctatgagttcagaaaaaatgcttggtattatcatcactgaaatttttacattttggtcctttttgaaaatttattttacaaatagacccctgaaaaaacttaaaccgggaatggtcctttttgggacgccagagaggctggcgccgtcctccaacatagcggcgccagccacaatagcgccgcggccgtgccaccgtggcaccagggcctacgtggacttgctgactcggcagagcggggcgccagccaccctggcgccgcccctcataccacagcgctagcttgtctagcgcacccctcctctgcgggccccaccaactttctcccccccaattttcgccaagtctcttctgtctccgggcaatggctggcgtccccccccagaccgcggtgccagccatcctggcgctgcccccttcccccacccgaggaccttctgcctctgggccgaggctggcggcgccctcacagaccacagcgccagggtggctggcgccgccctcctcccccccgaaacccttctgcctcgcggcactggtgtaacgccctgaaaatcgccctaaatttaaatcgtgctttaatgcatttctagaaattttaaaagcctaaaagagcttccaacaattaaaattcaccaagatttatatcaaattggcttgtgggtatttttaataaattccccatgcttaaaaatgtttaactaatttttacttgaattttcagagcatcctaaatatttttaaggcaacaaaaactattaaagaattttataaaatggaaaatataagagaagtcctcttcctcctcttgggcctcttctggcccatctctccatctctccctctcttggcccagccgccccctctccttccctctctcccctcccctccctctccttgggccagcccagctcctcccctcccgcagaccgaagtccgaagtctgttttgcctcctccgcgcgcccagccagagacagctgtgctccctctcgatgacaggtgggtcccactcgtcatccctaacctccagccatcctctctctctccggccgaattccaagcgacggcaacctccgattcgcctcctccacttgccgtttcatcaaattaattgaggggaattaattcccacctcatcctctccaatttccccataatttcccactcaatcccgcattattcgtggtggattttgatgatgttctttaatggtgagctccaccatggccggcgtcgatctccctacccggcgtctctctccctcccctccggcctataaaagggacccccgactccctcctctctcccctcacaccgccgccctctccctcctctctccgcggcccacgtgccgctctcttcttgtgccgccgccgtcgcaactccggccgcccctcgccggtggtcgggacctcatcggagcccggcgtcgccaccatccgcttcgccgcttcctcctcttccccgtccacccctccgtggagcatgacgaccgcgggaacgacgacgacaccgacgacccgaagttcctcgccgtttcttcctcactgccgacaacaccgtcgacctctcgccgccgtgtctgctcggtgcgaaccgtcgtctcctcccctttccgtttttccccttcccgtactccgtcgcaccgtcgccgcgccgttggctgtcgccggcgtgccgcctggctcgggtgcttctccttcccggccgtgcttgtgcgccgtgagccgccctcatggtgtaccgagcggctgccaagtaggacccgcccgtggacccctctctctcttctctgtgcaataaatcaatttcctttagaaaaataattcacaaaattacaaatttccatttaaacagcacataaacttcaaatggccatatcttgactgtttgaactcggaatcgacccgttcaaatctctaatttctcctaaaaatgagtagaacccatttatgtgtttattgcttctgttcatatggtttttattagcctttttgtatttcttcgcattggtcgtgtagatcctgccgttccggaagatcggctcttcatcgccgtcgacgtcgaagactttgtgagtgatcaaggcaagtcatatctaccttgaacatgttgaatcccatattgtgaaaattatgttgttttacttatattgcattgctttataaattatatcgttcattattaataatgttttattagttattcctatgctcttggttatggccatgatgttgatttgatatccatgatctttgtgaaccctagtaaaattataacttgactagtctagtaccctacatgatggactgactagttgctttaggtaaatgcttagttatgcttagttccaacctagaacttttggttaaactagactatggtggttaacaactaaaactggattagttatggactattgacgggtttgtcaataggtggtgataaaatgctttgtgcaactaaaatatatttttgggttgggctcagggtctaagctagttactttggtagtcgcaccccggctaatataaggaccggtcttcgggcctctattgcaaggcatcttcgtgcaaccacaagtctagtgggtaaggcctgactggaagtttagatcttctcaaaacagagaccattggttggaagggtgtggagccaggattaaggccgttttttcactcggcgcaagggggggcctgtctcatccgggggatccgacaacctttaccttgtcggggaccagcgggcggcgaaaccccagcaggttctcctattttgggtagacctagatggatagtcttgtcacgacctctatccgagtaccgtggtggtacccggcgcgtggcaacgcgtgttgaggttgtgtcttgtgggtaaagttgtacacctctgatcaaagttaaaaactattcgaatagccgcgccctcggttatgggcaagctgagcagtgtacccaaagttagttctgttttacaaaaccttgggtgggtgaaatcatgatggtgtagtcatgtggagattaaggcaggttcgcaggctcatgcgaccttggtgatattataatattggcttagaataggatcgtgttttaaaatgtgctttaacctgattaaaatgtttaaactatggctttatgcaaaataaaccctattaggccatttccttgtttctccctatgcattattgttgcatttctggtgtgacttgctgagtacggtggtggtactcactcttgctcacaaaaataatccagaggatggacctgaggaagatgaaggcttggatctctagttcactccgccgtcgagtgcctgtggctgctgctgttccgtagtcttccgctgttttatttgtttatctttgagtgcgagggcttgagtcgtccatgtaataaagtacttcctttacacttccgcaagtgtggctagttcactccgccgtcgagtgcctgtggctgctgctgttccgtagtcttccgctgttttatttgtttatctttgagtgcgagggcttgagtcgtccatgtaataaagtacttcctttacacttccgcaagtgtggcttgtaataatcaacaatgtctatgtgtaccttgcctcctgggacgaggattaatgcactgagcgtttggaaatggtgtatatttccgggcgtgacaactggctggcgccgccctccccaactgcggcaccagggtggctagcaccgccctctgcctccctgcaaaatgaagatccatattgcacaaatgtaccaattcacagttcgcaattcaaatcacaattcacagtttcatacagactaaaaccagttccaattgcacaaatcacaatgccaaaagtccatcacatagtccatctgtcacaccctgaaaattcaaaatatataaattgttgtttaattggaattttttagaaataattttaaaagtcttgaagagaagatctaattttaattaataaattccaatataaaatggggccagataaaatttcattaaatactttgcttaattctataattcctagatttttctgggatttatttgagctaaggaagtatttttaataaatggaattgcatttcatgaataatttaaattgaaaaaggttttaaaaagtcttcttttggctttgggccgaaagtcggcccaaaaccgctctctctctcctcggcccaagtcggcccagtccaccgccgcgcgcgcgcgcatccgcccgctgacaggtggggtcgtcgtcaacctccggccgccgccgcccgaaaccctagtttcgcgccgccgccgttcctttccaaaatccggccgttccttttcgtttccggtgaaattgattgaggggaaacaatctttgggatctcctctaccttttctcctttggaaacatcggctaaatcggtttggaatgtgtttgattcgagttcgaatcggatcggtctctttcctccgaaccctaaaccttccttctcgtcgccagccgccgtgggccttcgccgtcgcctcctagcccctttaaaaggacccccgagctcttctctacccgccgccaccttcgccttcgcctctcgtcgtccgtagcgccctagcgccgtgtgccctagcgccgccgtcgccgccgtcgctccagctgtgcgccgccaccgttccagacgtcgccgtcgctcgggaagaccgccgtcgtggtcgtcgtcgcgtcgccgtcctcgtccgccccttcgccgtcgccgaagatcgccggagcaccatcgccgccgtcgacccgaagaccgccgccgtttcttcgtcgtcgccgtcaccgtccgttgatcttccgctgctcctttggtcaccggtgagttcgccgcgtcgcgctctacccgttggtgctctccgttcgtgccgaagcgccgccgttcgccggcgagcatgcaagcccgagccgccgagccgccgccgccggtggtgacgtcatcgctgacgtcatcgtcgccctcttccgtgagccggtcgtagaccgatcgatctcggccgtccgttttggatggatcgatcccggccgtccgttcgcgtgaaccgtcgcccgtgcgcccggtccaccgaaaccctagcccgctgacgcaataatcctccttttccttttcaaaaataattcattattgcgtcataattcaattaaaatcaatttaagtgttttaatccgatttaatcttcaaaaattcataactaattcatcttagctccgttttagttggttcaagtctctaattttttctaaaattgagatctacatgttaaaaatatccacatgtactgttcatgcttgtttatgtgctgttttggtgattttgctcttttttgcttagattccgtcgtttccggagagtccgttttcgcaggagaagagtttgaagagttccaaggccagtaaggcaagtcacacagatcccaaacaaccctttgagcatgttgatcccgtttaaagctactgtttctattcaaatattgcatttattttcgaatgtcattgggtggaattaacctattgtttgttatagcccttttgttcttgattactttattccttgatacctgtgttattataacttgactagttgagctttacatattggttcagctagatattagatgtgattgcttagccatgcttagaaacattagcacattattgggataacttatgactcactattatttaatgatggcttaatgatagttcacgatggccaatcgtgattggttaattaatgaatgtgccaactaaaacttgataattgtgggttgtgagcacatggttttgagagtcgtgctcatgacaattaaggaccggttcacgagtttcggttgtgaaacattaaccgtgccaaccacaagccagcgtgggcaacgactttatcttttgtatagcatggttcattgcggggcaccagactgagaagtggcggagataagcccacgggggtcgctggggagtccatgccttgtttttaagggggtgattatgatccaggaaaggtgcgctgtagtggattgtgttatgcaaggggtattgtcacaactcctttccgaggtaccgtggtggtattgaggcacatggtgacatgatgtggggttgtgtcttgtgggtacagtggtacacctctgatcagagtaaaactattcgaatagccgcgcccgcggttatgggcaggtctaacaatgtctttcgtgattagtttcacacttctcaccataataaaagatgctataactggtaataatttgtttagctcctggtttggaatggtatattcctggtttggagatagaactgtgcagctgggatggttgttcagaatggttgggcctatacaacagggtatgttgtatagcgttggattaatattgtttaattattacttaactgttttattaaattctgaaatgtttgctaaatgctgcttttgcaaatgaaaccctactatgccatcctttgttatcctgtgcacttgcatatttgctgcgtggcttgctgagtatgtcatatactcaccttgcaatcattcatcagaggaagagttctacaatgatgctgatggtgtggaggattaggtgtagtcttagtcaagctgcttgtggagtggagccgtccgcgccgtttattttattttccgctgcttagatctttattgattgagaggaactatctacctctgtaatgacattttattcgcctattaattggagtaataattgtactctattatcaatttgttattgtgtgcctcggctgattcctggacgagggttcacacacatgtaagcgtttggaattttggatagaaattccgggcgtgacaccatcacgtattccacacatcaaacaatgccaaaagtgagaatgattgtttacaattctttcatctatttgacatgagggctagagggtggtcttggagcaagaaaagttgggcaggattatggtacgactgagactgagttgggcaggagcaagcgggttggattggcctgactcttcaataccaaagatactcggcttcctcttcatcaagtcacgaaattcgacccttagttagctgcaccaaaactagagcaggcccaagacaagcaagaacagtcagtcagcaccgatcaggcaggaagcagacagtaagctaagaatactggaagaaggtggtcgctcagccaaagccctagttcaaccagaacagtggggaaagcggtagaggctgctccgtagctttggtcgtcgcactctaatccgctttagaagaagcagctattctattggactgcttggctataaagcctataagtaagaactctggggaaggaatccgcagatgaagcagaagcaggcaaaaggcgagcgcacagcgaggaattttccatactagatcgactcaacattaccaaatctactctgagactctcttctcttcatggttggctgtcaaaaaagagtctctttagtccccaactctatggattttactttttggctcaacaccctgctcttgacgtttgctcgggacgggaggctatgaaatagttgaaagcagatgcaacattaaagaaagtaaatccagtagccttaagtcgtaccgaacactatgtcctaatagtaagggatttctttcaacccggtggtaccaggagaaaacgttgcccgaaggaagggactaaacccatctgttcaagtagtagccaagtagtaccgaaggagtatctccgagttaaggagtaccgaagggaaggcagaaaaaccaagtgaaagaaagagatcgcaatggtctaagatatagtcagtgaacaataactcagatctgatgtcggatcgaaacataaatgcaaaaagacaacataaatgtaaaagatcgaactctaatttagttactgagtgagatgttttgctacctacaaaaggttggttctgttgatatccttgaggagcatgtgtcattatctgcaccggcaaatgatgacagtgatgaggtagaagatgtgtatggtgagtcgatactaaagcaatcccggaatttttcattggatggcagtaaagagtctccttcgttacctacgtggtacgatgaatctcgccttatgctaccaaggtggtagttttcatttagttggatacagcgatgccgagggatctgctgataaagatggacgaaaaaaggcaagggtatatgtttatccttgaaggaggctcaatatcttggtgcagtaagaaagaagattgtttctctttgtctaccatgaaatcagaatatatagcatgcacggctgcagttcaagaagcaatatggctgagaaattatcttctctgtcttgatgtgactaagcatgcatatgagacaaccgtgatctactgtgataacacggctgccattcttttcttctcgacaaatatcataccatgggctgtacaaagaactgaccatgatctcttgctaggggaaggtatgtatcgggacaagatggttggtgaggtgggcgcaaacacttttcattccaatccctatcgttgtggttggaccagactacatgccaagaccctttattccaacattttctcgctgacagctccttcaacttatttttctattcaattgttgctttcacaatcaatcactaaccacattcttgcaattcatgtgcggttggcatctattttagctttttaaagagttgactcgtcgggcatgcttggccttcttgtcgccttcctttgttcctcttctttctgcgcagatacttttgatccactcctttcctataccgcgccctctgcctattacggtcgatacccagaaagtagtttccttgggagaagaggcagttcacaaaccagtactaaataaggaaaaatgtgctaatctcatcgagaaagaagaatttttctaaatcacttcgggtgagcggggccttcaagcatccgaaatatgccggggttgtaaatgacatagccttcctgatagaaaatgacggcccgacgagtcatctactaaaaaggaccctccccgctgtgcgcccctccttgaattattcggtcatgcaatacttttttaatacaaagaacaaaatgcatttcgaccccgtcgtagttctcaatcatttcgtggcaccgggtgtggctgaaccatctacgatggggggagcgaagggaggaagcttagataagagaatacgctctcgcaacagattcaatagaagaactcacagccaaaacaagcgaaagaggaagggcggaacatggattgcctttttttcctaactatcagaaggtcgttgctgtctttttcgcattggatttctttcacgagactcggaaatcaagaggatgggaacgactactgctcaaacgcatcggactgaaaaggagggagactctcaaccagagccgttatcacatattccacacatcaaacaatgccaaaattttacctcaaacattgcggagtgtgttctccgtgtcctcaccacccctcggagcttggagggcatgccccatttcattcacactcctgaggagctctctcgactgaaagcgtgagaagatatatgttagggtctagggtgcaaatggaaataactttgacaaatgcaagaaaacttacgactctgtctctaaatggggcgtgctccatttgatatccaactctagtccggacatcatagggattccgcctctcatcggagtcgcggtccttctctatgtcggcttccgtccaagtagggcggaggaatagtctatatgtcctatacagccaactaagctactctgagaaaagatgattttggtgtattgtcttgatgtacctgtcgttccttccggctgtcctccattcatcaatgtatctgttatgctctagcccccagtctttcaccttctttgttctcaccctgtcatacctagacaagtggaaggtgatgaaacaatagtgagcatcgacaagggttaaatggtacaaagttgaacattaacaatgaaagcaaacaaagataacaaatatttacttgtgtaattcaactccagttgagatgtcctcaaccagacagtcttgtttcttcccgaactgtcgcatgacacggtgcggaaagtggtactcaactgctcagaaacaaatcaatgggcactggtacatgaagtagtcagagtctcgattgcacatcgagttcagggtcaggcttgaagcctcatttgtgtggtatggtaaccactcaatctgcaaaagttgaagagatgacgttggttagtatctcaattaaagaagtaaatgtcgaagtacaagtgatattggaagtacttacatgttgaggctgtaagcagtccatctcattgacataatgcttgtatgccacatcccggtgagcatgtgcagtggcagtactctcaaacaggtaggccactgtcttctccatgtctggctcattgtagggccaaggagtgaaggttttgcctccacttaggccttccaaccggtagtgttaaccacatccacaactgaatcgatagcacacaaccactcatgttggatgatggtgcctgacgacaacaggcctcacagagctgtctatatgtccacgccaacactgctgagccccaactgaaatggcccagatcaccaaggttggcgaccaaaggaatccatatcaccgaagcaatgtcacccccagcatcaggaaacagaaccacactcaacaagtgcaagatgtatgcacgagcataacactcaacacgccatggctcagcgtcgtcgtcaagatgtgagaagttctgactcagctaagacaggggtattccattctgcttcttcttgcccccttgcccctacttaatgttgagtggaatgccaaacaggtgctccacttgtgcacgccatccaggattctctgtcctgcccgtcaccgcatgcccccgtaatgggagggccaagatcatagccacatcctatagagtgatggtcatctcaccactgggggggtggaagctgtgtgtctcaggcctccatctgtccacaagtgctgtcaatgcaggagcgttgaacactggcattcctctgctcatgaccaaggccaccccgagcaacccgaccgcccttaggtacgggatgtaccttttgtcaaacactgggggggcatgagttctaactcggagcggttgaagtatctgcattagcaattgtaaatcaattagttaatataatgtcaaacacacgctaccgatacttaggtacaagtgaatcaatgccgattcataccctccccgcctcgatcgcagccccgcgatgacgggcctcatagtactcctccaaggctgggtaagtcggcggttgtccctccttggccatcctacatgaaaaagtaataaattcaccgttagttatcaacatgacataacttaaaaggaaatgaatgcgagaatccaaaataaataaatagacattaaatagacaagaataaaacatgcattgacttaagtaggaaaacaaaatatttacctccctaacacttctattttatttttggacttcttcttttttggacgcttaggacaattaggtttcttgtgaccctcctggttacacaacgagcatctattttgcaccggcgcagcatctagttgaacacatgaaggtggtttccttctagaaccaccaagacccgagtccatttcgttcttgaatcgcttcgatctcctcttccctcttgttttaatcttcaaatttgggtcagcaacaaattcttcaccatcgtatggtggcaactatgtggggttgaggtatggctcaaagcgacttgcctatgtgttcacaacggctcttgaagagaactgatacggcattcggttgggagattcctcatcaattgcatgaatcagataaacgtggatgagatgtgagcaagcatatggtagagcaatggcctttggtaagaacatgagttcccctcaccttcatctttgaaggctcttgcaccgaatctaacaccaccacgcgttataccacccctctctgtgacctcgtatgtctttttctacttatcgaaacaccttgaagtgtgtttgttagccttacttttttgcaccttcatcttactagcaaccttggtggaccaacgctcccataactggactcgcttcattgcttcatcatgtctgttcacaaagtaatcattgaacttcatgaaggtaaatgatactatggccgtcactggatgcttactaacaccaactagcacgctattgaactgtttggccatgttggttgtcaagtaaccccaccggcggccatttctatcaagccatttacgaggaccttcgggaatacgctgccttagtgcctcaacatccctctcaaatatccacttctcgtcaatctgacatatccttaggagctcttttgtctgatgcttatctgcaccggccttgtggaaattagcactgaagtgcctcatgcaccatcggtggtgaaccggtggcaatcctggaacaggagtcctcatggcattcattataccagtatgtcgatctgagataatacaaacctccctgtgctgcccaaccacaacccgtcggacaagatcgataaaccagcaccagtctcgtgaattctctttctccaccaaggcaaaagctaaaggtacaagttggtcctccgcatcagctgataatgcagtcatcaaggcaccaccgtattttccagttaggaaggttgcatttatagctagtactggcctgcaatgcttaaaagcctcaatggaaggaccaacgcaccagaatgcacgcataaaaattttcttggtcactccatcaacgttgacaaccctatcaggatgagtatcgatgtggtagaccatactgggatttctctgcttaatggcttgtagcaaagtgggcaaacggacgtacgcttcaccccattcaccgtaaatgagcttcatagcctcctctcgtgccctccaagccttgccatacttcgcccatcataaaacgggggatcc

SEQ ID NO: 19994 - DNA, 8287 bp, Oryza sativa
agtagcacagctatgtgccttaccaacccgtgatatcctccacgtgccactagacctcttagttgcatggaccttccatttgcaccatggtttttcacatttaacagtgtacttcctatttgcggcagaattgacaacacggtatggacgatggtgcacgatggcgtactcctggagccatagcttcaatgtgaccatggatgggaactctaaactctttatgagaccatccacctggaatggttctggcaactgatctaggttgatgccgccatctagtattgcaccatgggcatgtgttaggtccctaaactcaggaatatccggcttcctctcaaacaccttctcaaatgcacgccattcctctaatgctaacttgtcattgttagttagtggagggaatggacggtcattgtcacatcctgattttcgtttcaggatttataaattatttaataaattattattagaatttatattaaatgttcattaatttataagtgaagttaaatgtgggaaataaaatttcctaaatataaagcatggatggatttaatttttattaaattctccatggttaattatactctctgaaattttctcggatttttcggagctcaattcctaatacaaagagcatttcagaaattattcacatattaaattaatcattaaatggtctgcttataatttttttaaatacttatagtgttcaagtattttcaagatttttcttgaaattattcgagcattgaaagtatttttaacaattcaaagatcatttcagtgattaatttaattggaaaagtaataataatcctcttcctaatcttgggccctttccagcccatctccctcttttgtgtgcacggctgtgcagcccaagtcggcccagccgagttcccccttctctttctttctttcctttatttttcagccagcccaagacgaaagtctaatttgcctccccgtatactgttcatcttcaagcttggacagaagcccgagctgccgtcctgtgctctagccgacgccgcttcctccaccaaatccgccgcatcccgtgctccgtttgcaaaattagttgaggggaaatattcctcttatcctcctctaccctttcttccaagaatcggactttatcccgaagaaatcaacgcggaatcgaattcgttttcgagcttatctctccaactaaccctcggtttttccgactcaaatcctctcggttggagtccgatctcttcaatccaagcctataaatagcatccccttgacgtcctcttccgtttgccccaagtcccaagccgagccgtcgcccgtagagccgccgccgccgtcgccggcgatcctccggccgcgttgcgctgccacggtagccgtcgccgctgccgtccgtcgccgccgttgggtgcgcacggaggagaggaaccccgtccgccccttcgcagccgccgaagaccgccggagcgccgtcgccattgttgacccaagtcgagccgccgttgaacctcgtcgccggccgtcgttcgtcgtcgtccgtcgttgttctttgcaccggtgagttcgcgtcgtcgtcctcttcgcgttggtgtcctcggttagcccaaccgagctctctagcgccggtggtcgcgtggagcagtgccatggccggcgatgacgtcagcgatgacgtcataattcccttttcttagtttctttattagatgaaaatcgattaaacttcggaaattcataactaattcatcgtaactctgattcgagtggttcaagttgctaaatttttctaaaatcaagatctacatgttaaaaatatccacatgtactgtttttgcttgtttttgtactgttttgttgattttgttctttcgttttagtttccgacgttccggaggagagcgttttcgttgaggaaggttcataagtgtttgcggaagatcaaggcaagtcacacagatcccaaataaccctttgagcatgttgaacctgtttaaagctaatgttttatttcaacttatgcattattttcgaatgtcatcgggtggtgagcctttcccgattaattaatggccgaagatgactttattttcctatgggttataatttgattagcttggaccttatatattggtttggttcagctaaatgctatatatatatatatatataattgcttagccatgcttagaaacattagcatcattaatggggtgaattatactatattattaattatggttatatttaatggtagctcacgatggttaatcgtgtaatgttaattaattgagaattaaaacttgtcaatggtgggttgtgagcacatggttgtgaaggtcgtgctcatggcaattaaggaccggttcgcgagctactattgtgaaacatttaccgtgccaacaagccagcgtgggcaacggctttaccttttgtatagcatgattcattacggggtgccagactgagaagcgacgagaagtccgtgggggtcgctggggagtctatgcgtctggtttttgagggggtgattatgatccaggaatggtgcactgtggtgagttgtgttgtgcagggggtattgtcacagcctctattcgggtactttccagtatcgcgacgcatggtagacatgatgttgaggctgtgtcttgtgggtacagtggtacacctctggtcagagtaaaactattcgaatagccgtgcccgtggttatggacgagttgagcaatgtttttcgtgattagtctcacacctctcacaataattattgatgctataactggtaataatttgtgtagttcctggtttggagttaggtctgtacagccgggtatggttgttcaagatggttgggcctgtgcagcatgagtgtgctgttcagtgttaattaaaatttctgattaattactctactgttttacttctcttaaatctttgctaaatgctgcttttgcaaatgagcctatattatgccatccgttggtatccttgtgcacttgcatatttgctgtgtggcttgttgagtatgtcgtatgctcattcttgcaataatcaatcaatctcagttgaagaaaaaggatccagaaggagaagacgtttggcttataccccagttgagctgcctgtgggagtggagctgaagccatcgctagaccgttatttccgctgctgttgtttttcttttcttttgtaagtatgtaacgttattattatgatggatttgtatattaaattgtcagtttgtgtacctcggctgattcctggacgagggttttatgcacaaattagttcggaaattattagtgaatttccgggcgtgacagtcatcatcagagtcttcagcaaattcaacatcatattgctcaacacttgcctccttgtcaacctcctctctattgacttctactgagacagaatcgtgaccaccactcaattcgacaacaaagtaatcatctggattcacatattggcctgctacttccgtcgggtattcagggttgcctccgtacgacaaccaatgcacactctccgacaaatgttcacttagatcaagcccctcttgtactaactcccttttcatctccctcactgcatgcacatcatcactaccgcaatgtctctttgatggtcctgcctcccctaaatcatttccaagcaaaggtctcttcttctctccttccccctccaagtcttctcgtaccaactcagtcttacttgcatcccctccatgacgagaagaatatgtcacaaaattcttctcaacgtaatgataaggagatttgtttagatccaaattttctacggtacttaccaactttgatgcaaacaccactagagatctaaactgaagactcttttaccaaatcaaagtaaacttcccattccaactgacctatcacatttaatatatacttatgcccttgaccaacattgtatctcccataaaaacgaatctccacattatcctcggtccatccaagaacttctttcactcgtgaccttagttcatctagagctgggtgggtgggaaacaaaatggtcttaatgacatatcctcaaactcaatatgtgcaccaacataagattccaccactctaccactgtagtaaacacgaacaagtctatccatctacaccaaaaaatcaaatgtaactttgcaacaaaaattaaatcttcattcctaaacgtagtccaaaccgacatattataaccaatccataacttaaattgtcccaaagctactactctaaaaaaaatatttaatccacctacaactataaacaagtttactagtgcattacacatcgaaatattataaatactccgtcatacaacccaacctagttctaattaactataatcaatttctataatgcaaccaaaattttctccccttcatataattaatggttaaaagtttaacctataggctatagcatcaagtccatcaaattaaaattactttcatgcctcaaccctaatttttcatccatccatccaaccaaaccatccaaaaattaacattaccacatatatggttaaaaaaatcgtgacaccaatgagtacattgcaaatatgtagcactacaacaagccaatctcaagaacaaatgctaaaaatcacaaatttgggcaaaaggggggttctagggttaccctccgatcaacaaattcaccaataaaaaacgaaaaaaaagagggaggaatggaggagtctacctttctcttcgatttccacaaaaaatcccgcgaaaaacggcttcaaattgagtgagatttgaggtgaagacgtgagggggagagagaggaagagctgctgcgctgactgctcgggatgcagcttgggataaaaatagagagtgaggagaagaaagatagtaagacccacagggacccagggcgcggccaacagagaagaagcgcgccagccaagctggcgccatggtatgaagggcggcgccggtgtggctggcgccccccttctgcccagtcagcaccgccacgacagcccaagtgccacggtggcacgggcacggcgccagtgtggctggcgccgccatgttggaggacggtgccagcctctctggtgcccaaaaaggaccattcccggtttaagttttcccaggagtttatttgtaaaataagttttcaaaaaggaccaaaatataaaaatttcagattatcatgatcttttttttttccagaactatttgtatgctttatccaaggttccaacttctgaagtttttttgtcatgccgatagacacacctaggtgaacatgtagcattatgaggtcaaatgaccgatgctaaactaagtaggagtaagacaacagttaatttatgtgctgacagtagtaattattttgttttttatttaatttgttgattttttttcttttcccaactgtatataaatttaggatacacggaacgaagaacttggcacataaagggacgataggcacctatggtggaggtggaacaagctaaacaatagggaatgaggaaccgcggtcatgaggaaaaccagggacaagaagcaaatgctagaacatgagaagaaaagagattttggagaagatcatctacatttgtacaacaacccactccaagaaaggtctagaaagaaggtattaaacctgtcatttttttctttttttataagcaaaatggtgttgcaaaacaatgtgatcatgtagaaagtaacttatagaagcatttgcgaagcaacttttatatgactaacaagtaaggtttaggaagctacttttacatgctaaagaagtaacttttagagataaaggaagtaacttttaggtgttttaagaagaaaattatgcatgattcaacagttacattctcttgacttactcatccgatctacgatccgattacaccgttgcgttcgtaacaattaaatctttataaaaagatctcacatgattatattttgatgaaaaaatacaaattacttttagattatatctaaattacttttagatttcattaaattacatcttagacataaaaaagtaaattcaataaaacctaaaagtaattacatatattatagaagtaacttaaaacaaagagaaagtaacttgtcacgacattagaagtaaatccatcgtgtagtacccagacttacggttttacccccacaatagatttacttttaatgtcgtagcaagttactttacttttgttttaagttacttctataatatatgtaaattactttcagactttattgaatttacttttataactaagaagtaatttaatgaaatctaaaagtaatttgtatttttcatataaaagtaattacatttgtacagtttcatctccacttatatatcatcttctctggttttctttttcatatactggcagcaagggaatattagtaatctaaaagtaattacatttgtacagtttcatctccacttatatatcatcttctctggttttctttttcatataccggcagcagagaatattagtgtcttttatttttttcgtatattgatagctgaaatattcaaggtgctcgattcgacgagggatgagatcaatgaatttctagtatcgagaagtaatctggtagttgcatccatcaagattatatggaaagagattatgtgggaagtctttgagaatcagtatcatccagtgccctattatctttactaatggatcaaagcaaccaaacatatacacgacagacacttgctgctacatattttttaaaaaacaaattatgtggaattaactttctggaactaagtttaatgtttttggggaagtgactttcatgttgaaggaagtaactttcttgcttgtagaaagtaacttttacttctagagaatgtgtatgcagctgatgcaactttttgttaaagagtccatcaaaatgcataccacatcagtatgctactagatatatattttatgtttttgtcaacctaagaaataaactgcatagaagtacgcaaaatctaaatcgagaggcatctcgttttagtgctaacgagcgacgccagatgttgtccgaatatgtgttaatctatagtacttgtctatcaagtaagtataaaatatattcctaccacctatgcttcaaataaaattttctcttaacttactcatccgatctacaatccgattacaccattgcgttcataataatcaaatctttataaaaagatctcacatgattatattttgatgaaaaaatacaaactacttttagattatatctaaattacttttatattatatctaaattactattagatttcattaaattgcatcttagacattgtaagttcaagtgccttaatttggttttggtgattaatgacaaatctaactatatgagactaataatttttatgagcctttctttgactagtctcatttggatatgaaagtaaaaatgatgagaggtatgtattaaacttcacatattctaatttggtctctcttgtggatccaaaatatagtgtgagcttcctcattgatctttattgattatgtgcatatgcgttccttcatatccatatgtatgcacatcttgaggggggagcttattctatattttgttttttataagatctctaccttgatttgaaattatctttcatctcatctctctatattgtttatatcgggttattatctatcacaaaagagagaaaagattgaaagatcttggattaaacaatttgtgtaattgttgctttggtgatagatgataaaccgatatttatgggattaacctctcttttacataagttgtcaactaggtcatttcccgataatgagatgtggtagatggaccttaatcatgacaaggataaaatgcaatggagataaagcaatatgtaccacttcttatctcctactttttgataggttcatatttatgatttccatgttattgttatataagtgtgagactaatgtttacttgagccttatcttatttagtcttctttacattgagaacatggagatcatgaatgtatgtgtttttgtttgtctttatcattgctacgtgccttctccatgtgtataggataaacccccattggttctttatttatgcatacacttgcctctcttgtatatttctttgtatgcatatatttagggggagcaaatcctatacatttattatgcatgttctagatccatgttgttcacctattatttgtattagatctttacacttgagcttgcatacgagtatatgatgcttgtggtgttaatgaatact

SEQ ID NO: 19995 - DNA, 12878 bp, Oryza sativa
atgtgcaaagaaataggtctaattgtgatgaggcaaatggatgataccattagttgatggtcaccaaaccaaagacatcgccatgttgacaagaatgaaagcttgtgatgagaagaaagtcttgaaaaaggatggacaagacctcggcataaacatagttcaaccggatggtcacaagtgttgatcttggctcaagcattgacctcaagttggatggcgcaaggcaaaggtataatggaggtaagaatgttttcttagacttttcccggtcttggtgtttggtgtagaccggatttgctggatagccgccgtactatcaagaggggtctatgaagcgagcatgtggatgatcttgtgccatattagttcatatgtatgtaggtgtattttgtggccttgtctagccaagtgtggtgagttttctcaagtcctaaacaaaaagagaagtgggcaaatcctataggtttgggtagcctcatgtggttatgtccggtggagtatctttcggagtgtgaaccctttctccctgagaaaagttgtgtttcttggatggattgttcatggattggatagccctttgaataagctttccatagagtccaagaacgccaaatttcgagacccgagtcaagagatatcgccgttttactaacggtcggttgagctgaaaagtgacctgcggtctgaccgcctccattatggcggtctgaccaaagtatgttgtccggtctgaccgcctctcccatggcggtctgaccgctcatcctgattttgaaggaggtctcgtcttggcgatccagagccgccagagccgcagccggtcagaccgagcccatggcggtctgaccgagccgtggacggtctgaccggccgctacactgcggtcagaccgagccgttacaaagtaatccggtctgaccggccacactatggcggtctgaccggtagagcacaaagttggggattttgactccaacggctagtttggtggttgggtgtatatatacccactccccagcagcaagggtaaggttttagcactccattgcattatcttgaacccttgcaagagctctcacacccttgtgcacttagtttatctagtgaggtgttggagagtgagttaagccaatccaagtgcattgcttcattgttagagctagtgtggtacttgatcatcctcggcaagcatcctagacttgttactcttggaggttgccgcctcctagacagcttgtggaggtgttgcccggtgacctctccgaggagattgtggaggaggcccggcgccggttgtaagtggtttggagttcaccaccttcggagtgaaggaacaactaccctagtgatcgaggcttgggtagtcctctccgtgggccggctcctaccttgcccaccccttgacgaagggggcgtgcggtggcttcgtggttgagcggtggagttgggctcgcctcaacggggattaggaaaccggcaagtttccgaacctcggtgaaaaattccttgtctcttcatttatttgttgcatttacatttgagcaagtttacatactagagcttatttgtgctattatcaccctaggcttgcaaaccttaacataggctagcttctttgtgcacttacttgagactagttgatttaggttttgaattgtgcaaaaccgttttgatttacgcttccgcatacaaaacttggttttagccaaaagttttaaaaccgcctattcacccccctctagtcggcctccttgatcctacagacatataaaagtaaattcaatagaacctaaaagtaatttacatacttgtcacgatattataagtaaatccgttgtgtgtgtaactatgatatgtagattaaatctaattactagatagacttatgtttttacccccataatagatttacttttattatcgtaacaagttactttacttttgttttaagttacttctataatacatgtaaattactttcatgctttattgaatttacttttataactaagaagtaatttaatgaaatctaaaagtaatttttatttttttcataaaagatataatcatgtgagatcttgttataaaaatttaattgtttcgaatccaatggtgtaatcggatcgtaaatcggatgattaatttaagagaaaattatataagaagtaactttaaaattcacaccatcaaaataataagtgtctttaattttttgttaaggcaaatgtatttcatatttacataggaagtaactttaactcttcctggaagtaaattttagatgacatataagtaacttttgagacaaatgcatcttggatgtaacttttcttggcacaactgatgttttttttcctctctttttactcttttggtgtattattagaaaataatgagatgaagctcggtaaatacaactgcaagaaataactttttatgatccagacgtaacattttgatacacgcatctcagatgcaagttaacggtactgatattttttttctctttttattcttttgatacagcatcaggaagaagaagatgaaacatgttgaaagtaaaaatgattttattgggtccttggaaataactttatgtgaattgtgattgaatctgctctttttttatatgaaacatcaattcagatatgtgatctttgtgggagatgtaaatttacatgatatctttggtggtttgatgcttgatcctctccagatttgtttttctcactctttctccgttggatcttgttcctccttttatcatccctcttgttcctcgtctttttgtcatgaactttttctgtgttacgttcatggcattacggtagctacgacaatcctaccagttatggccttcgtgggctacaccttggcccaggaacgatcctgccagttgtggccttcgtgggctacatcttggcccacgaagaaacacgcacgaggggcaggcacgagggagagcacgggttgtaatatttcctttcagtaaaatacatggccggtccttaaacttgcgcgcgggtttcacttaggtccataatcttgcaaattgcacagtcaaagccaccaacttgttttaatgattcagggcaggtccaaaccccacttgaccggctctgaccgccaacgtggcacgccacgcaagcaccaattttgcaaacaagcccgtccgcaaacagtagcgccggaataattgcagttaaccccttgtagctacagtagaggcgcgtacagcaccctaaattcccaaatccatcccctctctcccattattccccaatcctcaggtctggagggaggggaagcgacgagtggctcactccggggatcatcggcgtttgctgcgattcgggcggcgcatccatctgcaggagtggcggcgggcgataggctgcgtgggccggccccctcgtcggcgtcggcatcggcgttggtgcagtggtgacgatggacctcagcctgaggggggaagctgaggcggcggcggtgtatcgtaagtaccccgccctttcttgtgatttagcatccgtttggatggtttgtggttgtgaagtatcgttttttctatgcaatgcgagatgatgatgttggagcagttaggattaaacctagggttttagtttgttgttgatggggttggttttttttgccattggtaggctctaattcgaagcagttcacaattgaggttcatcatgggggatttttctatggtatgggagtgaatcgcagttatgtggatggcaaagttagctggttcgattatgtcgattctcgagagtggggtagttctctgcagttggcagatttggttgctatgttgggttatgatgcagggccaaggctgaaagtatattggttgctgcctgggaagaacttggttgatggtttgagaattgtggacagcgaagtagagattaatgtaatgaattcagtgtgcataaagtcaagaactttgttatctatttagaccatactgaccatgtttcaggcagaaatcaagaagatatcgtagtgagcccagtctctgagttgcctatagtaatgagccctgttagaggttgtcagcagaagggagatgggaaccaggggggtagtaatgtaggagtacaagcatgtggggttgtagatgaagtagctgatgaaattgaagatgatgttgaatatgacagtgatggtagtgaagttgatgattcagactttgtggacagtgactatgagttccaagatgatgatgatgatttatttgaggataatgtggatggtgatgtggtggaccagggcccagctcctaagaagttcaatcagaagaaggttgcaggtggcaagctgaagggaaagagagtaattagagaggaaggttcagatgaggagtcaagtgatgaagagtgcttggaactgccagagaatccagatgagatcaatttgaggttcaagtcctttaacccagaagatatgaataaccctgtctttaaagttgggatggtgttcccttctgttgagctgcttagaaaaacaatcactgagtacagcttgaagaatagggtagacatcaagatgccaagaaatgatagaacaaggatcaaggctcattgtgcagaagggtgcccttggaacatgtatgcatctctagatagcagagtgcatggttttattgtgaagacctatgtgcctcaacacaagtgcagaaaagagtgggttcttcagaggtgcactgccaattggcttgcattgaaatacattgagtcatttagggctgattctaggatgacactacctagctttgccaagactgttcagaaagagtggaatttgacaccctcaaggagcaaactagctagggctaggaggttggcactgaaggagatatatggagatgaggttgcacaatacaacatgctgtgggactatgggaatgaactgaggagatctaacccaggcagctcattctatctgaaactggatgatggcaagtttagttgtctctatttctctttagatgcttgcaagaggggttttctaagtggctgcaggcctatcatttgcttggatgggtgccatatcaagacaaaatttggtgggcaattgttgacagcagttggcattgaccctaatgattgtatatttccaatagcaatggctgttgtggaggtagaatcatttagcacatggtcctggttcttgcaaactttgaaggatgatgttggcattgtcaatacttatccttggaccatcatgactgacaaacagaaggtaatattacttgtaatcatttaatgtctgttgtacatcatatgtaatcatgtaattactgattataatcatttaaatcatgtctgttaccttcttgtagggtttgataccagctgttcagcaactattcccagattctgagcacaggttctgtgtgaggcatttgtaccagaattttcagcaatcatttaaaggtgagattcttaaaaatcaactttgggcatgtgctaggtctagttcagtccaagagtggaatactaaatttgaggagatgaaggctttaaatgaagatgcatataactggttagagcaaatggcaccaaatacctgggttagagcatttttcagtgatttccctaaatgtgacatcttactgaacaatagctgtgaggtcttcaacaaatatattttagaagctagagagatgccaatactgaccatgctagagaagataaagggccagttgatgacaaggttcttcaacaaacaaaaagaagcacaaaaatggcagggcccaatctgtcccaagattaggaagaaattgctaaagattgttgagcaggctaacatttgctatgtgttgcctgctggaaagggtgttttccaagtagaagagagagggaccaaatacattgtagatgttgtgaccaagcactgtgattgtaggagatgggacctaactggcatcccttgttgccatgcaatagcatgcattagagaagaccatctgtctgaagaagattttcttccacactgctactctatcaatgcattcaaggcagtgtatgcagagaatatcattccttgcaatgataaagccaattgggagaaaatgaatggaccccaaatattgccacctgtgtatgagaagaaggttggccggccaaagaaaagcagaagaaagcaaccacaggaagtgcaaggtagaaatggtcccaagcttaccaaacatggagtaactattcactgcagctattgtcatgaagctaaccacaacaaaaaagggtgtgagctaaggaagaaaggaataaggcctaagaacaagataagaagaaatgtagttgaagccacataacagccttcagtcatgcctcaggttattaaaactctacatttcagattatgttgtgttaatcccttgaactaaccaatgttgtgttacaggaattaatgggaccacaagcaggtggctcatcactattagctgaggtgaatgacaatatgttggatcatatgctgcaggaggtaattttcttgttaaggtttagatcactttattcagatgtaaacacatgtggcatttgtaccataactgtcctcctttataaacctgtttaacattcagtttgctactttgctctgatttttaattcatgtaggcatcacagcccagtcaactaactcaggaacatggtccactacctgactgtgctttcattcaagaaaaccagccaacagctagaccagtggtattaaccacttcaacaaaagagggaagatcaaagatgaccaagcctaagaagaatgcagctggcacttcaaagaaaaagaaggcaacagatggcttgagtgatggtgctgctgcaaagaagaagaagaaggcttgaaggaatatagtactgctgctgcaatgatccatgcttgttcatagatcataggaatacttttgcttgccaactcatgttcatgacaagaaatagtgcatgtggatgtggatgtggatgtatattttggacatcaatgttgctgccatgtaaatgtgtctgtagtgccatgacagcaaacattctggatgtggatgtgttatggtgatgtgcttttggataaaacattaaactgtcatgcaatgaagtggctagttctcagatcaattgtgcttttcatttatgacatatatgtgtactgatgcaatgttgctgtcaatttcaatctgcaactgtcattttaatcctgcaagaagcaatttcttctctgaacctgtatttgtaaatcctgaaactgtcatttcaaacctgcctttttaaagcctgtcattccacacaaattccaacacatttttcaaactgaaaatgctgtaaatttcagtgcaaatggcaacattcataattattccagcccaaccaaaatacattcatttccaaaagttggcacaaccaaaatacattcagcattcttcattctccattcaattccaccttcatttcatcaagacaacaaccagaacacagactaaaataagaactccaaataaccctacaactaacatgcacttcactgccaacagtatttctctaacaatgggcactatagctatcaatttcttctcaatttcatcttgtctcccaaaagcatcttgattcagatccaaatgctgagcagtcttcccatatgtgccatcttctccagcaatgaagccattcctcttcagataattgatgtaaccttcttcccaataccaaaagttacacccagttccatctttctacagaaataacaagcaaactcaaatcaacactaatcagcgaggttgccagctaacaaattccaaccaaaccaaccaaactaaaactcacctcatggtcaggacaagtgtaaaaaatccggccttcattagcatctgtcttcgctgtgcatctcacgatggtcttcacattgcatgaggggcacacgatcaaaggtacaactaacctattccggcgggtgcttaacgacgatgagcttgcagacgccatggctgcaacctcgccgcctccgaccgccgcacaccgccccctgtcgccgccgcacgccgccctccgtcgccgccgcacacctatccctcctcgcctcaacagcctggctagccgctaaccctagaatgggatggttgcgaaggatttggggatttttgtgtccgccatggtgctactgtttgcggaggggcttctttgcaaaattggtgcttgcgtggcgtgccacgttggcggtcagagccggtcaagtggggtttggacctgccctgaatcattaaaacaagttggtggctttgactgtgcaatttgcaagattatggacctaagtgaaacccgcgcgcaagtttaaggaccggccatgtattttactcatatttcctttttcggaatatcgcgcgttcggcggggaaaacacttttggaaaatctacgtcgcgcattagcgctattacgctaccatgcgcggtgtagtcgcgtccttttgattattccaacttaccctgaaaatttcgagttttaaaatccggaaacaaaagttggaataatcaaaaacctttttcaaacttttcccatgctggtctttattagattttattttccttccctgttgtgctagtgccttaattaaattaatttgaaggattatttgcaaattctaaattcaattattaatttagaataatatttattaaagaaccatgattataaaataaaattaattaaggaattattctcgaatgaaagtaaatactatttatctttcttaaaaactcttttatgtattaatatcccttttgtgagttattttacgaatgaatttaagtgttaattagtttctaaaaatcccttctaaggtttgatcccttaattattttgtaagcaaataataattattttcctcaaacctctttttaggatttcttcctccaaggaaatgttttgcaaaaaaaagggatttaatatttttattttctaaaaacctccttgtgaagctaaggatctaattcaaaggcttttcttaaaagtccagattgcatgcctaggaagcctagctcgggccatttccaccctaacttgctctctggaaagtctaattttgatccctcaagttttcacatatccccttccttttcttcctcccagcctagcccacccggcagcccgcttgcccggcccggcctagcaagccaagtcgaccagagccgccaacacggcctagcaagaagtcccccttcttcctctgcgcgtcgagcgccgccgttcggccgtttttgcctaggccgcagagtccgggctgccctagtagaattttttttatttatacattttttattaaaatatttacaaaaataattttttttcgaaaatttacaaatctaatcgcttgccgccctttaggagggcgatttttaactcccaaagggcggaaagggacctaaatacaaaatttttatttgtgttcaaaccctttccatcggttttaattacttaaaaactaataatgcttattcgatactccaaatgattttaaatggaaaagtgataaactacaaagttatagatctcatcaagatctacaacttttatataaagtttatctccatccaatgtcgtttgaaatgtagatctgagattttttaaaatatgttttatattttgtaacgaatatttggatatctaaaacatcttaaatgaaaaagttgttaactacaaagttgtagatctccttgagctctacaattttgatataaagttttatttcatctgactttatataatataattttaaattataaaatcatagagctaacaagttgtgctggaaaatttgcatttaggtcccttgccgccctctggaagggcgatttttaagggcgggcgatttttaaaaatcgccctcccaaagggcggcaggcgattagatttgtaaattttcaaaacaaaaaattatttttgtaaatattttaataaaaaaatgtataaataaaataaattcgtcgtggacgagcccgccttcgtgcgctgccccttccgccacgccctgccaccgggaaccaccacgtacgccggcaccaaaccctagccgagccatctaaccctaacccttgccgcggagctcgtgtgcacacatggtgctcaacgcagcgccacatcgcaccatgcgccgagccacgctccagtgccgtgtgccgaactgcaccgcacctcccgcctcacatgcgtcggacaagcaacgcgccgagccgcctcccgaccgcgcgctgccctgtccaaccactcagccatgcgccacgcccggtcacaagccgcaccctccctgcgcgtcgcacgcactgccgcctcacaccaagggaacatcgccatgcactgcgtcgtgacaaaccgcggacgcaccctctctgcctccactcgcgatctttgccggacctgcggaccctacctcggcgacttgtgcccttggctctgtgccgtggcccccactcggtgacggctttctcgccgctcggccccacgccgccactgtccctcaaatcagccgccgccacgcgtgccatagcaacggaaatagcctcgccctccgccaatcgctttgaggtctatatatgtaatacttcgtgatgaatacactatcgcgttgagcgaatctctctaacgaggaggcatgcggatggtgagatcaatagacggggcaatcagctggcagcgcaatagtgaagaagaccggtcggcggggccttgcacggggtaatctggtggcggtgcgaggggtaccgaaccgcgacagatcaacgacggcctgttggatcacggcggctaggattgggaaactccatgacctgtggggcagcaacgtcgatgaggccaaattctcgatgggtggcgatggcgacagtggagcaacggtgggcgtcaatgattgtggggtaggcgtggatcgcagatgatttgggggagatctgcaaagagggcgacgtacaatcgcggacatagttactgatgaggagaagggggagccaaatgttctgagtcgttggatgtaacacaaatgaatacatgccggtggatttgatgaatgaagtatgacggatgtaggactgtgttgatgaactatagggtagaatagtgacatatttcaacgtatgtcttcattgtgtttcaaaaaattcatgcaactaactgcacatattctctgtcctctctctctactctatcaatgcaatgcatgcatgcatgcacttagtgattttcaaaatattttttctcctaaattacttgtccgatttatgattcgatcacaccgttatattcattgtaactaaatatattttacaacaagatattgcatgattatattttgatgagaaaaaaaacatatgtttcaatccgttccattgatgttttatacgtgatagcggatcacaaaattttaaatgtttcgttgactaaatgggttgttatagccgatactgatcaaccaacaatcaacaccataactgataaaacgtacgtagtacctgaaactgaaggagacatagaggtaatatagtgatcaaagacacttatttactgatagacctcatttgaatgcaagacaatggtaggcaggcaaccaccatcaattagtagagcgaacaactgcataagagcacatttttggctcctagcttggtgcttccagtatggaaaaaaaaagaaagctaatcacaaacaaataaaccgtcgaaactaaaactgtaatacccgtgtagaattggtagtggtttgccattacaaaatgttggagcagcctgaatcaactgagaaggaaagacgatgagcagtccatgcacggccaattttaacaataacattcaccataaaaatgctataagtatgtttgtttatgttgcaacgaaaaacaaaatggaccttgggccaaggctatggatctacctacagaggaagctgacaagccacaatcactagtaaatacgcattgacgatgctagacggttgtggcgttacgtcatggcgatcgactatgctacttgaaagttgtttttgatagcaacacggtttccaaaacataactttaacttcttatttctataaaaatatttattgaaaagtgatatgcataattttatgaaagtatttttcaagacaaatttattcatataatttttatatttttaaactcaacaactcgagagttattaatgatttatatttctaagatataacttaacattgttataaacgactttctttacgaatatgaagttagtatatataagtagtactagtatgttggctccccgaccccgagacggacgaccgcatggatgagatgcagatggagatggaggcgcaggcgcaggcgcatgtgctcctcttcccgtggccacagcaaggccacatcaaccccatgctccacctcgcctccgccctcctcgacgccggcctccacgtcaccttcctccacaccgaccacaacctccgccaccgcttcgctcgaccccatcacccaacccgtctccgtctgctgtccatccccgatggcctacccgacgaccacccccgcgccgtcggcggcctcatcgagctcctggactccatgcgcacggccagcagcgccgcgtaccgcgccctgctgcttaccgagtcctcccgctcccgccccgactccctcgacgacgctccgccaccggtgacctgcgtcgtcgtcgacggcgtcatgccgttcgccatcacggtggccgaggagatcggcgtcccggccctcgcgttccgtacggaaagcgcgttcgccttcctggcgtatctgtccgtgcccaggctcctcgagctcggcgagacccccgtcccttccgacgagcaggtgcgcggcgtcccagggatggaggggctc

SEQ ID NO: 19996 - DNA, 1783 bp, Oryza sativa
tgcaagggtcgccaccaataccattgcactagaaaaacacgaggacgacgacgaggacgacgacgactacggctgcaaggcgtggctggacggccaggacgaccggtctgtggtgtacgtaaacctagggagcctcacggtcctctccagcgagcagctggccgagttcctccacggcctcgtcgccgccggctacgccttcctgttcgtgctccagccagatatggtggccagctcgtcggcggtgctccaagaggcggtggaggcagccggtgagagggcgctggtggtggagtgggtgccccgtgacgtgcactacgtgctgcggcaccgcgcggtggggtgcttcctgatgcacggcggttggaactcgatgctggaggccgccgtggagggcgtgccggtggtgtgctggcccttcttcgccgaccagccggtggtcagccgcttcgtggccgccgtctggaagacggggctggacatgaaggacgtgtgcgacagggccgtcgtggagaggatggtgagggaggccatggagtcccccgagatcagggcgtcggcacaggccatggcacgccagcttaggctggacgtcgccgccggtggctcgtcgtcctccgagctgcagcgcctcgtcggcttcatcaacgagctcagcgccgtgcatgttcgatctagagacgccgacgagaattcatcgcccgcggtttcacttctcacttgatcagtgtcgaaatatgaattccgcaataataaaatggggtagcgcacgagacctaaaagtgaatggatgcggagacaaaggatttagacaggttcaggccctctcgatgagaggtaataccctactcctgttcggagatttgaatccgccgggtgaattatagatctgacgatctagttgtctcatgccccctaaagggtctcctgcccaccttatataggatgggggcaggattacaagatagaaaccttaaccaatacggtatcggtttcctaaatctactttagaatcttatcaaaccaggactttaggccgttccataatatatagggaaacgtaatacccaagtcatgatccgttacatatttcatagatataagttatcccttataaccagtcggataatcacgccatatgggtatggggtacccataatctccacaatcaatatcagccttgggctcatcttgtgggtggcatggtattctagtagtgcggtctctgaagctaatttggtcttttactgtgtgtgaagttcttcgtatgatcatttactgctttattatatgtgcggtaaactacaagtatactactccctccgtttcacaatgtaaatcattttagcattttccacattaatattgatattaattaatctagatagatataaaatcaatatgaacgtgaaaaatacatctatctagattcattaattaacatcaatataaatatgagaaatgctagaatgacttacattgtgaaacgggggaagtacaatgctataataagtagcaaggcatagcattgcatcacatttatgatgtagaggctgggatttttattctcttttttttaaaaaaaaatgtgtgtgaagatatgctcttctatcaattaaaccatttggattcttgctccctgccctcgcatgcacacatgtgtgttttttttttcagatttgctaaagtatattcaccgaactttcaaaatacagtaacagctaattaaaagcctaaattccaagctatttcctccgtttcacaatgtaaaaacttttagcat

SEQ ID NO: 19997 - DNA, 12144 bp, Oryza sativa
aaaaaccaaatatcgatttatggcttcaattcatctagctagtaatcatctcaattctgtatttagaattggtgatcatgtacgtgttaagctataagcaaattagatcttgagtaaataagttcaataatatatatggtcttttatttgggtgttatatagatcatctttatctttacctattataaaaattaaaggtatttttgccacaattttcatacgtcgctgcgtccgattcctatttacatcgcgcgacgccacatattcatggccgatttgccatgcctgtcctttccatgtcgaccactgcatatggattaaaccgtttcagtccaggggcaagaaacagccatgggcacgcatcggcagtggaaaagcaagcagagaccaatccatcggctcgcacggttcctgagaaggccaagaaaaattaatttgctgcctctgtcacttgtacagtggttaatttttagcgcacccaagcttgtgcaccaggaggttttcagattgtcgcttcgtgcaccttcgtaacagggaacagggaatcaattcatctgcactgctttggttctgtttggtaagttaggttcagtttttgctacgctcacatgccagtttactaggaggtttttatgcagatcaaaatacttcgtttttccacctagagtatcgcgtctcttctaggttcacacatgcttataccaacagattcactattattcctaatagtaagtttgaagtacggttttataatccaagtgactatttggcgcacaatgatttaggcacattatgaggttgtttggagattgaaaatttttatactacaagagaagattcatcttaagatgaagatgaagatcgttaaatatgtgatccgaatttgagcatacaatatattcgggttattagttggctaataggactttgtattacagtttcctaataggactttgagtatttgcatattaggactttgagtatttgcatattaggactcctagattttcctttatatatctcttttatgctgcgcgaaaaatgatgccacagctcaatatatctcttacatttatatctaactcctccatactaattattgccggtcgatgcacatgattttttttcataaggattttcacgtaaaattgatatctctatatccatcataacaagaaagacctatttgtctaactggctttataaatgcattcatacgtataggttgtgaatgcatgcaaaaatcatagcaaggctcctattttcatcgagcaaatgatggttagctccttcttgtcaaccttgagcttactttctagagtaggatatccaacggacttaagtaatatgtaagattaaaatttctttaacccgttgcaacatacgggtatttttctagtaaatttaaaaatacaacttcaaatcagtaaacttgttaaatgtatcaacataggtctaaaatttggcgtacgtgcaggtatggccacacggatactggcgttgtatcatcctaacccaacaccgtctacaccaagccatgattttaaaaaaatttactgctctatttttttttcgcttcttggttcacctctaatttggagaaaatatgtccatttgcacgaaattcaagtggatggccttaaatgccaacttgctcatttttagagaaaatgatgtgggagcgctctatatttttgcactcgttaccagactattatatccgtgatgctttggcgccttgcgataatagacttaacagacatattgaaggcatcaaaagtgaaaggcatccctatggcccatcactgggtttgtcaacagtgacgcgccgcaaatgcccatcacttttagggtgtcactactatgcttcagtttttaggtacgtaggtggtgcttgaatctcctgaagataaagatgaagataaagattaagtgtttcatggaaaacaagatggtaataacgtgcgattaattgagttttaattattacaaacttgaaaaatggattaatctgatattttagagcaactttcatatcgaaagttttcgcacgaaacgcaccgtttagcagttcgaaaagcgtgccacaagtatccaaaatttcatccaagagttgttgtagtgctataagttacattaatcctgtgcttcactcactcctagaaataagatttttgcaggcggcccaaaaccattttcacaggcgggggagaggaccgccactaccatctcgcctgtgaaaacagaccattttcgcaggtggacctgtggcccgcctgcgaaaatcatctcagaaaaataaaaaaaaccacgggacgccgccgccggcctcaccacggccgccgccggctagggctcccctccgtccgctgccgtcggcgccgtcttcgtcgttgtcgtcgcgttgacgaggagagccggcggcgcgcggatctagagccgtcgtcgtcgctcgtcgtggccggcggcgtgcgcacgtgggagaggagggagccggtggcgtcacggtcgtcattgtcgtcgtggccggcgtcggagggagccggcggcgcgcggatctggagcggagggagccgtcggcagcgaggagggagccggcggcgtcgcggtcgtcgtcgtcgtcgaggagggagcccgccgatggcgaggagggaggcttcggcgcgcggacgtcgtcgtggagggagctggcggcgggcggacgtgggaaaggagggagctagccggctatttttctaagtgtgtgtcaaagagagagagataggagggggagggaaatgaatggtagagaggagaggataaggatggtggagaggataaggatgactgattttttttggtaggtactatttttgcaggcggaccacgtaaggtgcgtctgcgaaaatctattttcgcaagcgtcgcttaagtggtccgccagcgaatttcatcccgatttatatttttgtaggcggtcatttggctccaagagtcatatccgcctgcgaaaataagacccctacattggggaaaatgctttttctattagtgaccggaagagacaccccaacaaaaactagcgtttgctgccaatctgtgtgcaaagttagttgaggagtccaggtacagcattacctcaacaacaaaccggtgctgtagacgaattcgtttttcacccgaagtcactaacacaacaaccaagcctatcagagaaagagatcggtagaaacatcgaaaatcaaaatcaatttccaaaataaaaaaaccctcaaacttggatggagattggtctgaccgatgtgtaaacgtcggtttgcctgcactagcaccgacggtctgactggcattgtagctccggtccaaccgctctacactactggagaaaccatctttggtcggtcagccaaatttcacaatagtcccggttgtattaaaaaccgctcagaagtattttttgatctttagtcccggttggtaacatcaactgggactaaatatcatttttagtctgggtttaaaagatggcaggcagtgtcagacccctatattttctttagtcccggttagtgactaaagatccatttgtagttccggttggtaacaccaaccaggaaaaaagatcggcatacgcggagatctaggcgtgcgcgcggatcagatctcctcctccctcccggttctatctctcctcctcctctcctttaactcccatcctcatctcctcactcaccctatctcttcctctccttctcctctcccccctcctccccacaccccacttcagagagttgttaacgaccaaaattggtaatctaagtatcggagatggagatggaatcaaagtagaagtcgagatggaaatcgatcggggaacagagtaagatcggctgaagttcgaatcggctacggctaagatcggcagagttcgagtcggacaaggttagccgattgagctgaatccgacaatatgacatagcaaacgttgtcggtttaagttgatgagcttcatgatgattgccgcacgtggatagagtcctgagaaggcaattgtatctattaattaggatattttatgtaatttccttagagatatgtttgggcaaaagtctgccgcaaagacttatggtatcttagagtttgttagagataagagtcgtgtccgatatggacatgttgtgtaattcttgggtataaatagaccccgaaccccatgtaatcaattaacacacgttcaatacaatcttggcgcatcgccacccttttactttcgttttgtttcaacgagttcttgctttcggattgagctgcatcggttttgatcttcaataagaggtaaaacttgttatggcggcttgcgttctcgggattagtgcttccatctttatgatactctaatcttgtttatgtaattcgtcgagttatcatatatcttacataatctctggcaatatcgctatataatctacaatcggctaacatctatcggtagagggtagccgattaggttagatatcgatgttgacttagattatatagggtatccaccactctatgaaacttccaatggcttgattgtctagatattgtccttcttttcatacttctagctgcatcagttgagtttgatcttataagtcgtgattagaatctcaatctctagcctgcttcttggttgccgattagggtagtatcagggtttcagccgatcttacctgatttaactacatttactctatatgcttcgttgatatgttaaatctgccctttatgttaagatctcattgcatttaagtatattaggcctttgtttgatatattctacttactttaatatcttaatatagagtggtatcggagtattagccgatacatgctagatctatctgatcggctatgctatgaacatatatagtcctattattaatatatatttcgatctaagtgatttatactatcccggcatgacgaccgatctatcccaatcacttgatttaagtatatatcgatataagcagtatatattgttaatatctacagctgatcgagtagatttagttccttcttacttattcatgattgttgatcgatacatatatgacatcgactcaaagataaatgatatgtcatcggcacttagccaatctgctatcgttgatgggtttaaccgcggtttctttgtctttgtttcttgttgattacaagatcaaatcaactggcacactagcatacccgaaggcgagttttggacctgccctggagttaagcagatctcccaggcctcgtgttttacgtcaataagagcacgcggcggtggtggcctcgtgcggcaggcggcctgcgcggcgggcggcgaggcggcggcctacacgtatccagacgtgattcggcctgcgtggcagtttctttccttttttatttagaatttgtgatttggatctgagatgtatttgatatgtgtgtgatgtgaatatgtgatgtatttgtgttgaattttgtagaacttgtgatctaatttttttaaagattttgtgatgtatttggagatgatcgatttgaggattgggaggtgataatcgatttgagacgatttggagatgattgatttgggatctggggatggggatagagtgaaatcaatatattgcaaacaatgaagaaaagaaaaaaaaaggagcaaccggacctagcctggctccatcttgttatccccatatctctaccatggaggcaccccctaggcccaaatagaggaacccccctcccctcgtccaaaccaatttagctaggtccagccgtaaaaataagccgagtgcttccccttgaaatcacgtaagaaagccaagcccaaccgttagagcaagtctaataatacagccaattactagcgatagtagtatccaggtcatctaaagcctgcaatagagccatcaaatacaataacttagctatagtaggatggcccaccaaattgtataagagaataactaattgtgacaaaagcacacgaaaccttctctctctaccttatcactttctctgtcgcaccagccaccatgcgccatccattgctttctgatctcttctatgttctctcccatcttcttcctttgttttttgtatgaacacaagcagcagccggcaggccaagcttgctcttgagcttatcgtagaccgcctcccgagttcttgcatgccacgccatcctgcggcacctcctatcaccgccatggcggcatatccttgagctccttcaatcatcatcaccgacaaccttgagctttacgtgacaagctaggaagcagtcgcaagtgagtccgctggttggaggcctagagcaagctaagcaatggtgagacggtagcgagtaagcaaggatatgatgatgaacccacgacaatcttaagctcctctcctcatcaatgtcttcatatgggaagctatgctgtagctgggcaataggatatgtcacgcccggaaattcactagtaatttccaaactaatttgtgcataaaatcatcgtccaggaatcagccgaggtacacaaactgacaatttaatatacaaatccatcataataataacgttacatacttacaaaagaaaagaaaaacatcaacgaaataacggtctagcgatggcttcagctccactcccacaggcagctcaactagggtataagccaaacgtcagctccttctggatcctttctcttcaactgaggttgattgattattgcaagaatgagcatatgacatactcaacaagccacacagcaaatatgcaagtgcacaaggataccaaaggatggcataatataggctcatttgcaaaagcagcatttagcaaatatttaagagaaataaaacagtagagtaattaatcatcaattttaatcactgaacagcaccccaatgctgcacaggcccaaccatcctgaacaaccatacccggctgtacagatctaactctaaaccaagagctaaacaaattattaccagttattgcatcaataattatttgtgagaggtgtgagactaatcacgaaaaacattgctcaacccgcccataaccgcgggcacggctattcgaatagttttactctggccagaggtgtaccactgtacccacaagacacgattccacacatgttgccatgccccgaagtaccaccacggcactacaaagggggaaatcgtgacaatacccttcgcacaacacaactcaccacagtgcaccattcctggatcataatcaccccctcaaaaatcagaggcatggactcccctgcgacccccacggacttctcgccgcttctcagtctggcaccccgtaatgaaccatgctatacaaaagataaagccgttgcccacgctggcttgtggttggtacggttaatgtttcacaacagtagctcgcgaaccggtccttaattgccatgagcacgacattcaaaaccatatgctcacaacccaccattgccaagttttaattatcaattaattatcataacacgattaaccatcgtgagctacatttaaatctaaccataagtaataatgtaatatgattcaccccattaatgagctaatgtttctaagcatggctaagcaattatatatatatatatatatatatatatagcatttagctgaaccaaactaatatataaggttctagctaatcgaattataacccataagaaaataaagtcatcttcggccaataattaattgggaaaggctcaccacccgatgacattcgaaaataatgcataagttgaaataaaacattagctttaaacgggttcaacatgctcaaagggtcatttgggatctgtgtgacttgccttgagcttcattaaacgcttctgaacctttctcaacgaaaaggctctcctccggaacgtcggaaactaaagcgaaagaacaaaatcaacaaaacagtataaaaacaagcataaacagtatatgtggatatttttaacatgtagatctcgattttagatgaatttagcaacttgaaccactcgaatcggagtaacgatgaattagttatgaatttctgaagttttaatctatttgcatctagaaaaaaaactggaaaaaggaaatatgacgtcatgctgacgtcatcatcgccggcatgacacgggcgacgacctcgccggcgatagagaggtcggcagggctatctaaaggcatctacacgtagaggacgacgacacgaactcaccggtactagcaaacgcgatggatgacgacgaatggtggccggcggcgagctctagcggcggcacggctcgggtcgtcggcggcggcggctctccggtgaccgggaacggcggtgagggggcggccgaggttccccgcctccgtgcgcacctaatggcggcgacgggaagcggcggcgactgctaacgcgacggcgcggcgcggctggacgtcgtccggcggcggcggcggcttggacagcgtggcggcggcgctacgggggacgagaaggctcgggagttggggcaaacgaaagaggacgccaatgggatgctatttatgtcttatattagagagatcggactccaaacgagaggatttgagccggaaaatccgagggttagttggagagataaactcgaaaacgaattcgatttcgcgttgatttcttcgggataaagtccgattcttgggggaaagaatagaagaggataagaggaatatttcccctcaactaattttgcaaacggagcacgggatgcggcggatttggtggaggaagcggcggctgcacaggtacaggacggcagctcgggcttctgtccaagcttgaagatgaacagtaacggggagacaaattagactttcggctgggcttctacttccaaggactgattaaaggagggaaaaaagcagacttcgggaaagagagggaaaggactgcaggctgagaggagactgggccgagagtgagacgacttttcctaattcggcccgaaaaggaaaaggtgaattttaattacttttccaattaaattaatcactgaaatgatccttgaattgttaaaaatacttatattgctcaaataatttcaagaaaaatattgaaaatacttggaccctcaaagtatttaaaaaagttataatcagaccatttaatgattaatttaatatatggataattactgaaatgttctttgtatgattaaaattaagaattgagctccgaaaaatccgagaaaattccagagagtataattaaccatggaggatttaataaaaattaaatccatccatgctttatatttaggaaattttatttcccacatttaacttcacttgtaaattaatgaacatttaatataaattctaataataatttattaaataatttataaatcctgaaacgaaaatcaggacgtgacaggatagtcgtcggctcacccccctctctcttccaactcatcactgtagtcgacatggcctccttatcgccagtccacgatggcttatcatacatgctctaagaaagcggaggcctcttgtccgtggaaccgggagaaggtatagaaggggttaaggaggctcggggtgcataggaacgacgaagaagggcgaccggagggggcagtatgcggcagagctcacctcgagctgggacagctctggcgagctcaatcttcgagtgggcagcaaagccgacgctggcgaagacatgacttgacatggctccccttgccggtggcaagcggctagagcggtgacggacgacggagcatgggtggagcaatggggaggggtttgggggcgcgaagggcttggagatgtgggggacaaggaagagggaggcacgaggggtcttttaatggctcgaggagatggtggggaggctggggaaaggcggtaaatgacggcggataggggcggtgatcttggcgaaggggagctcaattggcgtcgactttttcaagaggattaggtgaaggtggaagtggtggaagagatccggtccaacacatttgactagcaagggcgggagcgggagcacgatgacgtggtgtacgtgccttgcggttcccgggcggaggtaggagactaaggtgataggtgtggtcccatcccacctatcagcgagaggaggaaggaggagctgatccagacctcgcgagataggctacacgcgggggcgggccagcggtggggatgagaggaagtcgagaccgaagagttgggctgtgaaagtggtgcatcgtggggagaacaggatggtggcccgagtaaagtggtagggaggaagaacagacttcgcccaaggagagagtaggttggaagtaggagtggtcggaaatgacccaagggcaatgcggggattttaattggttttccaatcctctcttacaataaagttataacgcactaaatactaaagcttaacatgtaaagatgccacatcatcatccactaacagttattacatttaagcatcatgcaaaattatatataattttataatttattaaattttagagatttaaaatacaagcatgttaaatcatcccacataattcacataaaatttcatccatcatttttataatatcctacatacctaatatttgaatcatcattatatatactatttaaatttaattcacattgttggaacagaacaaacaagtgttacgctagtgtttctgtgaattcttcgattcctcctcccttccgagggttgcatttacatatttatacttagtagcatacaaaggaagttacaatgttatccctataatcctagctgatctatggtggtggactagtgagccagccaatgggttataggtaaaatccacagggacaagggacagctgagcccattaaggaggtggcatggtgccatcactgtgctggcttttacccgggtaatagccagctctagccttcacatcgccaaccgtgtcatgacgtcagcggtggttggcgggtgagtagtgcgctttaacggcaccccatgctcctttttgggattcatcctaggctttggctttggagccctggtgagagctccggagcccttgagttggctccgagacctccagcgccagttgccgtatccatgcgaaccaactctgttgggcttctgatgatggccttacatgcggaggcagactctgcaagcctgtggctggagcctccgaagcggaggccctagtcccctcgggtgaccgcgagcgggggtgggaggggggggagggtaacataagggttggaatccttcccccaacatacatcaatttatgtaagctcatatttatgtaagcatatgttgtttaagctatcttacatattatttttagttattgttttcatagtaaactcccaaagcaacgcgcgtggtttcacctagtttaaataagtgcttcaccaaaaagaatcaaataattactgaaatgaactgtgtgctattaaaattagacattaagttctaaaaattccagggagtaccttaggacatggagaatacaagacaaatattcctagccatgatttattaaacaaactttattgcccacattaacttcacttgtaaattggtttactttttaatatgaattttattaataatagtaaatgatttttaaatccataaaagaaaatcacggtgtgacactgggagatagaggtccgattcctctacttgttcatttgttcactattcggtcattcccttcttttgctctgttcccaatcaatagcaatgacggagtagttcgctgtcgcccatcgatctacgcccgtgtatggccaatcgtcgtccccgtctgcgtacctggccaccctccatcccctatctccctctccatcccttgctcaactcctccagccatgcagcgcctctgtacctttgctatcgaacccccgatgcagctggtgcgtggcggcattggtggacctacatgttggcaacggcgtatctaggattttaggtatgggtggtccaattttatataaacttttcaatatcataaatgtaacattacaaatatattacaaatatacagtacaagtataaaattaacaaaattagatcattatattagtaagtgtctcataaacgttttaaaatcaacaattagtcacaaaatgggccttgagcggatgaatttttgggtg

SEQ ID NO: 19998 - DNA, 3512 bp, Oryza sativa
  unsure (1)..(3512): unsure at all n locations
ccaccccttgtatacgccagtgcatgttggcgttgttttaatttgtgtctataccttactctccctctattgagaaatataagatgtattttatttcgttagaacaaaaatttaaccaacaattatctatcagaacatacttttttatgataaaaatgattttattatatttgtatttaaaattacttacatgtgattatgcctttatcacataactatttatattaggtggacaattattagtcaaaccttatcctaatgaaataaaatacgcctcataataaaaatggagagagagtattattgatgcttaggataaattttggtcaacgatttaaatttcgaccataaataatttctcaaatgcttagttttttttaaaaaaaaaggtatgcataaattagcctaattaaaaaaactattgtacaatctcataaaaatatatacttactaggttttataaatttctaatatgaaattcatgattggaatcacatgtactaaaattcatgtttctaataatatttgattaaagatttgatcaaatcttatttcaaatgttaatatttatgactgagtatatggatactcatgtgtggatttactttaagattggtttaagctttccagctacttgtgtaacttacctttgcacgtgattgtttttttttttgccttgtcccagctccaagatcacatttttttctggatccactgctgagcaaatctaatagaagggagcagtatgcgtcaaatctggcgagaggttgccgagtcttctttcccctccccttgctacagtagtttcctttctctcctgtttcctggcccctcttcccctgattccggcggttcaccatcggtgagtgttggaggaggggtccggccatctaccctactagtatagtgtagctaggctcgtagtttggttgtcaggtctttcctgtggttcgggtctgtctcgtatgagtgttttgctggtgaggagccatggatgcaggagtggatggcggcggtgatagcaggtggcggtggagctgtgagatcagaagatttgttgaagaaccgaagggtggtgatgtctccttgtggtggcgtcggcggcagcgctggccactgctgcgggctccccatcctgctccgtgcgttgacggtggtggctacttgtggcctttaccgatcagcgcccggctgcattggctggagtaggctggtccctattccgcaggctggtatgctttggacatgtgacttcagtgaattttgaactatttggagttttggacatgttacctattttgttcagttaattgtggttggactatatggatttggtcagtgatgtacggcctcatgtttctatctagtgtttggtagaattgctttaacttaacctagtttgctttttggctggatttggtgaagatgtatgtactaaacttatttattttgctatggtcaatgtactgatgtatatgaacatattgtgatctatgagtgaacctgtgtggtgacgacatgtgctatattggatgttaagtgggcttgtgatgtattgattgttaattgggcaatcaattgagatgcatgggtttgttatatgggttattggtatattgtttcggtctatatgggcttttgaaatgggcttgacccactttttatttggatataatataattgggctgaaaatagtgagtatagtgctacacattagatgggctaggtctaaatttaattgggcttgcaattgggcttaggccataaataggatgtttactacatggatcttgatgtgccataagacattntgtgacttttttagactagataatgacgaanataagcatcataaagttaatgacaaaagtaggatcgtcactagatctatgacgaaagaaatatattttcgtcatagagcatgattagagacgcataataggtgatgaacgaaacttcgtcacgtgaacgccattgatttcaaaacgtgaaatttttttctgtttttgtgacataaatgaaacgttacctatcgtaagatctcatgtagtgagagggggcggcgatcgtaggcgtcggctgcaggtgtcggtggcaggctgctgctatgctatgaaggtgacacagttggcggacgcctcggtgctggtgcatgtagcaaatatcttccatggcgtctccattctccgatctaggcggcacttgtttgacagcagcttgcttctctcaagtggacattcccttggcggtctggattggaggctgtggcctctaaacaatgaagcattgattttgcttttgctggatttgagttttaagtgcttcaagacttcttcagcaatccctggccttctagaaagacagaagttctatcgccaccatctgattaagggtatgtttggttgggctgtggcttttgaaaaagcagctgtgagctgtgactttttgaaaagtagctttggaaaagtagttgcgaggaagccaaaagctcatttggttacacgcaggtggcttttggaaaagcacttagtagaccccacatgtcatgtcatggtgttgctgctcagagcagcatgaagccggcggtggcgctggggagacggtgccgaagagaggtgaggcgcgggggaaacagtgctggagagaggagcaacgacagcggaggtagaggaggagcagcggcgggaggagtgtggccaggaggagcggcagcggaggaggagcagcaccggtggctcggcgaggagaggagcggcgccgggcgaggatgggcggcggccggccggggacgagaagcgtcggcggcggccggggatgagcagtgtcggcgttgggcgactgttaacgaccaaatttggtaacatctgtgtcaggaaagaagattggatcaaagcgaagtcggaggcggagatcgagttcggaaacagcaggaatcggctggagtccagatcggctatgattaggatcggctgggtctgagtcgggctaagtaagccgatacggccgattccgacaatacaacttgtgcgcgacatcgggttcgagttaatgtacttcaagatggttgccacgcacggatggagtcctgggaaggcaattgtatctattaattaggatatcttatgtaaattccttatagataaatgtgggcaaaagtctgccgcaaagacttatggtatcttagagtttgttagagataatagtcgtgtccggtatgggcatatcttgtaattcttgtgtataaatagacccgagccctatgtaatttacaacacacacattcaatacaatctcggcgcatcgccacccttttgctttagttttgtttcgacgagttcttgctttcgggttgagctgcatcgatttcgatcttcaacaagaggtaaaattcgttatgacggattgtgttcttaggattagtgcttccatctttatgatactctaatcttgtttatataattcatcaagttatcatatatcttacataatctatagcaatattgccacctaat

SEQ ID NO: 19999 - DNA, 5972 bp, Oryza sativa
gttccgttaaaggcaaggcgttgaagcagggattgactgacatcatttatgacaacgtcatgccgatcgatccagagaaattcacgcctgagcagaaggcggagttgaagcaaccctgcagcaggcacgggatcagttcctgaactcatttatgcaaacccgcaagggggcacttgttcagaagtataaaataaaagtggttgctgatagtcctgggaccggctcttctaaagatggagaagtgaaacaagctccaggcggctcgggtcagccgagtactaaaggtgctaccgacggctccccgagcgatcatggcgacaattctcaaggagttcgtggcgttcaaggtgatggtgctcaggagccacaaggaggaaatcttgaccagaatagtgaactagcacaagattttttcaataacttccaagatcgggttgattacgctgtgcatcatgctttgatcaatcagtctggggtattagtcaacacattgtcaaacatgatgaagacaatagccggtggttcgatagctgagcatcctgcaggcccagtttacttgcagggaggtgtcttcccaagttatcaatctttgatcaccgatgttcagccgtctgttcaagcagttccctctgttgcgcccacaactcagccgacggcgccagcgtcgactcctttgcctgctatactagctatgtcgccaggacagccggtgaaccctcggttgttaacaagggaacaaccacaacatggcgggcaggctacgaatcggctaaccaaaaatcaggttgctgccatgtttctaccacctccacctattgttgatccagtgcagcagcagccaattcagcaggcaccaccaatccagctggttgtacagccaatccaacaacaggtcatacaaccagctcagcaaacaccaccaaggcaacaacctctgcagccggttcagcagacgccaccaaggcagcagcctcagcagccgatccaacagactccgttgagacagcagatcgttcagccgattcagcacccggggtcagtgaatgcatcggccaggttcgtagtacctggtggtcagcctgtgcagcagtttgtaaattaggtcatcccagaacatttggttcaccatgcacagccggacggcacaatgataccttagatggttcctgagcacttggtgcgcaacatccagccgaatcttcataattaccaagggggtaacttgagctatcaatatcagcctccttccccgcaagcccaatatcagccagggggattggctcagccctagttcgcatctcagtatggtcagttcgagtctatgcaacaacagccacaaggagcagctcagcaacgaccgtgggtcgatgtgattgccgatgtaatgagagaacaatttgggcttaaaccaaaagagactggaagcttgtatcggcagccttatcctgagtggtttgaaagagtccctctccccaatcggtttaaagttccagatttctccaagttttcgggacaagagggcgtgtcgacttatgagcacatcagccgattccttgctcagtgcggtgaagcatcggctgtagacgctttgaaagttaggttattccggttatctctgtctggatcagcttttacttggttttcttctttgccatacgggttgatcaatagttgggccgatttggagaagcaattttacagctatttctacagtggggttcatgagatgaagttgtccgacttgacagcgatcaagcagcggcatgatgaacccgtgcacgagtatattcagaggttcagggagatgaggaacaaatgctttagcttgagtttgactgatgcttagttagctgatttggccttccagggtatgattccttcaatcagggagaaattctcgttcgaagactttgatagcttatcgcatctgatacagaaggtaaccttgcatgagcataggtcggcggaagttaggagaagctctaagaaagttaatcatgtttgtccatacatgtatggatcggatgacgaggaagatgattctgaaatagctgcagccgaatgggtgaggagcaaaaaggtcataccatgccaatgggtaaaaagtcctagaaaagaggaaaagtatgattttgatatcaccaaggctgaaaagatctttgatttactactccgagaaaagcagattcatcttcctgctggtcatacaatcccatcggcagaggaattaggcaagaagagatattgcaaatggcataattctgggtctcattctactaacgattgcaaggtttttagacagcaaatccaggttgccattgaagggggaaagattaggtttgatgattccaaaaagccgatgaaggtcgatggtaatccttttcctgttaatatggtgcatacagctggtcaagcagccgatagggtccgtgcaaagggttttcaagtaaattcggctaagattatcaacaagtatcaaaggaagtatgataagcagcaggagaggcattatgaagaatacgacgatggttttgatcctcattggggttgtgagttctttagattctgctggaatgaagggatgaggttgccatccatcgaaaattgccctgggtgcagtgatatcgttgagaactcgagccggtcatacagtagaggtaatcggctaaggcaggcaagacttcctgttcatcagagattgggtccgatgaatcaagattgtggccaagaggatgaggtaatcaggaagaatcaatggtgtccttctggtattttcacgaagaatcagaaaagaagggtccagagattgaggaacagggagcgttttcaggaggttgaagaggaaatcaaccatcggctgaggaaaccaaagccaagacaggagtggcgtgtcaagaatcaggttcctgtagccgatgatgctgcagccgatgaggcgaagaggttggcaaaagggaagagcgttgtagcggcaccaattaacatggtctttacattgccagccgaattcgggatcgatcaggccgatgtcgatgaggtggaagagggatcagctaagttggttctgtcaccagaacaggcagtattcgagaaacccgaggggacagagaatcggcatcttaaaccattgtatataaacggctacgtcaatgggaagccgatgtctaagatgatggtcgatggtggggccgcggtaaatttgatgccttatgctacgttcaggaagttgggtaggaacgccgaggatctcatcaagacaaatatggtgctcaaagactttggtgataatccatcggaaaccaaaggtgttctgaatgtggagctgacagtcggcagtaagactattcctaccacgttttttgtcatcgatgggaagggttcgtacagtttggtgcttggaagggattggattcacgccaattgttgcattcctttgactatgcatcaatgcttgattcaatggcaaggcgacaagatagagattgtgccagccgacaggtcagttaatgttgctagtgccgatttagccctttgggagatggatggccttgattgtttatctggaaaagtctgggatagagattttctaaaagtgtccgattctgatatacagccaatcgaagatggagaacccaagctattactttgagggcgtcgtggagggttcaaatgtctacgccaaggatatggtagatgatctcgatgacaagcaaggtcaaggtttcatgtcggctgatgagttggaagaaatagacataggtccaggcgatcggccaaggccgacatttattagcaaaaatttgtctccagagtttagaaccaagctgatagagctcctaaaagagtttagagattgcttcgcttgggagtattatgagatgcctggactcagccgatcgattgttgaacatcggctacctatcaagccaggggttagaccacgccagcaacctccgaggagatgtaaagccaatatgcttgaacctgttaaagctgagatcaaacggttgtatgatgccgattttattcgtccctgccgatatgctgaatgggtttctagcatagttccagttattaaaaagaatggcaaggtcagggtgtgcattgattttcgagatctgaataaagctacaccaaaggacaaatatccaatgccagtggccgatcagctggttgatgccgcatcagggaacaaaattttgagttttatggatgggaacgcaggatataatcagatctttatagctgaggaagatatccataagacggcttttagatgccctggtgcaatcggcttatttgaatgggtcgtcatgactttcggcttgaagagtgctggagcaacatatcaaagagccatgaattatatatatcatgatttaatcggctagctggttgaagtttatattgacgatgtggttgtcaaatctaaagaagtggaggaccacatagccgatttaaagaaagttttcgagagaaccaggaaatatggcttgaagatgaatccgacaaaatgtgcttttcgtgtgtcggccggccagtttttgggatttcttgttcatgaaagggggatcgaggtaacccaaaggagcgttaatgcgatcaagaagattcagcccccggaaaataagacagagctacaagagatgatcggcaagataaattttgttagaaggtttatttctaatttgtctggaaggttggaaccttttacacccttattgaggttaaaagccgatcagcaatttacttggggggtagaacagcaaaaggctttggataatattaaggagtatctcagctctcctcctgttttgattcctccacagaaaggaataccgtttaggttatatttatcggctggtgagaagtcaatcggctcggttttgattcaggaattggaagggaaggaatgagttgtattttatctcagtcgacggctcttggatgctgagactcggtattctcctgtggagaagttatgcttgtgtctgtattttttgtgtacaaggttgaggcattatctattatctaacgagtgtactgttatatgcaaagccgacgtagtcaggtacatgctatcggctccaatattaaagggaagagttgggaagtggatattttccttgactgagtttgatcttcggtatgaatcaccgaaagcgattaagggacaagctatagccgattttattgtagagtatcgtgatgattcaatcggctcggttgagatagtgccatggactttattctttgacggatcggtatgtactcatggttgtggcatcggcttagttataattccccctaggggggtatgtttcgagtttgctatactattaaaccatatgcgaccaataatcaagttgagtatgaagcggtgctcaaggggttgcaattactcaaggaagttgaagccgataccattgaaatcatgggggattctttgctagtaatcagtcaattggcaggagaatatgaatgcaagaacgatacgttgatggtttataatgagaagtgcttggaactaatgaaagagtttcagctggttactttaaagcatgtatctcgagaacaaaatcttgaagctaatgatttagctcaaggggcgttggggtataagccaatgatcacagatgttaaagttgaaattgcagcgatgtcagccaatgattggaggtacgatgtgcatcagtatttgagtaatccatctcaatcggcttgtaggaaattaagatataaggcattaaagtatacactgttggatgacgagctttattatcggatgattaatggagtattacttaagtgcttgagtgccgatcaggctaagtttgcaatcggcgaagtacatgaagggatctgtggtactcatcaatcggctcacaagatgaagtggttgcttcggcgtgcaggatacttttggccgacaatgctggaggattgtttcagatattataaggggtgtcagg

SEQ ID NO: 20000 - DNA, 19786 bp, Oryza sativa
aagcattgtggtcttataggatggcttgtcatggatcgattcaagttcctccttacaaacttgtttatggacatgaggctgttttgccatgggaggttagaatcggctctcaacgaacggagttgcaaaatgatttaacagccgatgagtattacaaccttatggctgatgagagggaggatttggttcagtcaagattgcgagcccttgcgaaggttactagggataaggaacgtgttgcttggcattataataagaaagtggtacttaaagatttttcggaaggagaacttgtatggaagctgattttgccgattggtactcgtgatagtaaatttggcaagtggtcgccgaattgggaatgaccattccaaattcataaggttgtgtctaagggagcatatatgttgcaagggcttgatggtgaagtttatgggcgagcgctcaatggcaaatatttgaagaaatattacccaagtgtttgggttaacgcatgatcggcttatattgccgtgctgatatctatgagagttggagtcatcggcccttgattaaacaagaaggcattaatggtgtttgaccagaagtaagaagcagctgccatcaggggttcatctttggccgagtttgctatggtaaggtcaagtgcttggccgattccaatttcagtgttggctgatattgttatatcgcccttagttgttttttatggtgtaatcgtttgtggttcgccgatgtacaatggccgatattgttatatcgcccttagttgttttataattttatcaatgctcttgacattgtaaaactaggggggcacatatatatcaaaatcaaaatggaatgcaaaatttttgagcaaatttcaaaaagtatcggaatgtcttagccgatttcaaaagtttctaagttctattacacaaagattattgagataagtatcgctggatagctgatatagccttctgcctaatctgttctacttcctctatggcttgggcatcttgagcatcggttcaagggataactttcagagacttggtcagatcagcaacatgcttgatagccgttttgagtcttgctttctgttcttcaatagactttgggagatcggctaacttcttgtgctctatatccagctcagcgttgcattcttcaagttgtgctaagagttcaatcttgcgagcctcgagtcgatcaatgttagacttgattgggccttcagatagttgatcaagcttggacttctcttcatgcacaagttgtcggttggctttgctcaaggtaaacggctggggtaaggatatcggctaactcatctgggattagagcctaaatctcatgtagccgagccctgattgagccacaatcaaccaccaagctatccagtgatgatgcttctagccgatccaagatattttccagagttttccttacatcatcagataaaggggctaaggctttgcttgtggtatcttcttctccttcatcaagatactctctgatgtcaaaagagaaaagatcggctaatacctgcagcgataatttagaagcagttagaggttaaatagtcatagccgatttgaatgcttgttgagacaaagagaaacttactgggatagcaggagcagctggttgttcttcttcctcgacgtgatgactccccacagctgaaggagtctggtcacttgacgattgctgtacagaaggagaaggaggagggggaggctgaaaggaaacaagtgtcaggcaaaatcggctgaaaattaactaatgaaaattaaaactatcttactggtggagctggtttagatgttattgcaaccgatttcttcttcaccgcagtcttctttttctatagttataaaacttgggagtgatcgactataagacagataattatgaaaggaattaaagaaagttgtctactcttgaaaagtggaccggagcagaaggagttggaggggtttgcttgggcgaagccgatggtgttctttcagtatcgcttacttcggctgtggcctgatcaacttcgtcttcaattatttcttcatccagagcttgttcaatagatggatctagggtaggcagatcatcggctgacttggttttcttcgtcttcttcttcttagttggggctgcgatgtttacagccgacgatctggttttcctctttttgccggcatcagctggttctctgataagcccttgaagaagagctgaggtcttgggggcatcatagccaataatcagaggagatagcccacctccattaggaattaagcctggggcatattggatgtccttgccactgttgctttgatgaggaggggaggattctgttgtctgcaaaccaaaaggaggattagttgagattaatcggccaaacagatatgtaattgaaatcaagcaaagttaaagacttacttgagggacaacatctagaaagaggtctgtcatatacattgaagctggttggtggaatagatgcagcttccattcgccccaccacctgtcaaagtttctgcttctgaatgttgccagttctatgttatcaatactgcccagaggaggtccttgaaggttgagcagccgatccatcatcagggttgatgaaattcctcctcggcattggatcttgtcggcgaagaataagccgattgggagttgtcccattccaagttgtctagctgagctcattggatgatagaattcgtaagaagcttggatgtttcttccttgatgaatgccaacaggaaggatgcatgggctgattgcagctgagaaaatttccctagacgattggtatacttcatggttgacgtcttcgaatctaaagtccaatgggtgctcaagttctgcagaatcttcatagagaaaccaaactggagcatctttttgaaagccttcatagaagctgcagaaccaatctttgagtagttcagccgatagttttgccccagcctcagttggtgtagaagcgtattctccgtatgatgtgcatctccgatgagtacgctcttctccatcatctcctacaatcggctctagtcttggaaactcagcttctgatacggatggccgagtgacaaccttcataactatcaggtttaaccaggtttgtagcagccaccagggcccacctactccaactactgagccgacgactatcttagccgatgcattgtttaacatatggtatagatagccgatgaggattttgtccaagggaaattgtttctttgtttctaaagcttcagctagaaattgccagttggttgtggggccgcaacttgatccacagaacagaaatttttctagccacattaacagaaagccacatgttcccgaggggtgaccgagccctggcccatgtatgccgctacgtagcctgaccaacctcctatgctctttgtcttgaagtcatattggttctttgtgttcaaactcatagggttggccgatgaggtgacatccagacccgtgatcatgctgatatctatgagagttggagtcatcagcccttgattaaacaagaagggattaatggtgtttgaccagaagtaagaagcagctgccatcaggggttcatctttggccgagtttgctatggtaaggtcaagtgcttggccgattccaatttcatcccagtggaccctcttgctggctgatacacgtttgaaccatgtagtccagctcttttctggtggaactttttctagagacggccaggacttgaaagtattctttcattgacctagatctgggttggttaatctgaaggggatcctattggtttcaccaataatgaactcggtggggtcaggattgccgattgggccgagagagtagtggttttcatgcgttagactaggaattgcgacttggtaggaaagatgctacaaatccaaggcaaccaagagaaggaaagcaatatgagataggagaaaatcgatctgctgctaaagaaggggatttagccaataagaacttacctcaacgtattcggttgatggtgcaccagatgggctggcggaagacgacattggtgcgggcggagatctcgtcgaggaggaagtcgcctagaaattgcctttgcgccgggggaatcgccggagaagagaaagaagaggtttcacttgagcggtgaaaacggaagtcacggcatgagatttctcgggggtaacggttagtatttaaggtgctggaataacggtcaaaagcggcggagtgcgaaacttgctcggagtcagtacacggcaaatccggaatattatcaaatatcccagacttggggggcatgtgttaacgaccaaatttggtaacatctgtgtcaggaaagaagattggatcacagcgaagtcagaggcggagatcgagttcggaaacagagcaagaatcggctggagtccagatcggctatgattaggattggctaggtctgggtcaggctaagtaagccgatatggccgattccgacaatacgacttgtacgcgacatcgggttcgagttaatgtacttcaagatgattgccacgcacggatggagtcctgggaaggcaattgtatctattaattaggatatcttatgtaaattcttatagataaatgtgggcaaaagtctgccgcaaagacttatggtatcttagagtttgttagagataatagtcgtgtccggtatgggcatatcttgtaattctcgagtataaatagacccgagccctatgtaatttacaacacacatgttcaatacaatctcggcgcatcgccacccttttgctttagttttgtttcgacgagtttttgctttcgggttgagctgcatcgatttcgatcttcaacaagagataaaattcgttatgacggattgtgttcttaggattagtgcttccatctttatgatactctaatcttgtttatataattcgtcaagttatcatatatcttacataatctatagcaatattgccacctaatctattattgactaacatctgcataaaaaagcagccgattaggttagatcttgatgttgatctagattatatgagatatctaccattctatgaaacttctagcggcttaattgtctagatatcgttctttttttcatacttaatgctgtatcagttgagtttgacctattaagtcgtgcttagaatatcgatctctagcctgccttctagttgccgattagaatagcatcggagtttcagccgatcgtatctgatttaactttatttgttctatgtgcttcattgacatgttaaatctgccctttatatcaagatattgctgtgtctaagtatattaggctcttgctcgatatattattcttgctttaatatcctaatatggagtagtatcggagtattagccgatacatgctagatctatctgatcggctacgctataaacatatatagtcctgttattgatatatatttcgatctaagtgatttatactgtctcggcatgatgaccgatctatcccaatcacttgatttaagtatatatcaatataaggagtatatatcgttaatatctacagcctatcgagtagatttagttcttctttacttattcatgactgccgatcgatacacagatgacatcggctcaaagataaatgatatgtcatcggcatttggccgatcggctatcatttatagatttaaccatgatttctttgcttttatttcttgttgattacaggatcaaatcaattggcacgctaacacatctgaaggcgagctttggacctgcactggagttaagcagatctaccaggccacgtgttttcagtcaacagcgacgccagcatggaagggcgggggcggcgtcgcgcggcatcagttggggaagggtcggagccgcgccggcgtctggatgggcggcttcagttgggaagggcgggggcggcgaccggcggggaagggcggggccggcgccgagcggggccagacgggtggcggccggccggccggagggcagcggcggcggaaacctcgatgcgacgatgctcggggccgtgtgcgacttgcgaggaggagacgggaagagaatagcgaaccatttttttcataatggcagaggtgggtaattttttcccccaaaagcagggggtagaggtgcttttgatttgtactacaccaaaagctgactttgggcaaaagcaactgtggcttttgggccctttggttggcttttggtttttgcaaaagcaaaagcaagttgaaaagcccaaccaaacacaacctaattttgtgatattggctacttgttctttggaatcaagcttctttttgtttcaaaacaacagtatccatgcagggtttatcgttcgggttgagcaatttttgctcctcagatttaatggtgaactctgtggaacctctttgttgagtcgggtgacgcctacaccaaaatctacgactcagcaactaaccttcgaattgtgtcgtttctgtggtgacagccgtaggagccttccagtctgtcaagaggtgtgcatgtcatcgaaggcccaagcattcagttgtcgcagcgacgccgtagagctctgtcaatctgatcctttactgctgtttagtctcatctgaaagtttgcttctttagtttagttaggctccacattgttagagattgttactttccatgatttgtatccttatgcgatgtactagggtgtataccctgaactctgtcttctttaatttaataaagctgtttaagttataaaaaaatgcgtcaaatccggtgtaaaatgaaataagcgccatccacccgatgtaaagtgcaatttatcaaagggagcatgtacatagtatttatcatggcaatacacatggtaaactaattacattcataaagaggcttgctaacccatggtataccgttggaatggcataatcattagtcagacacctcaaccctaatgcgcatggccggtgcgcatctgattgcgtgcatgtgctagtgctggtcgtggatactgtatatttttttttgggaagcaattcacaacactagctaattactactactctgcgcaatctgccatgcatgacatgacaagtgctcctcacttatacacccatagattatgaatgcctatccttttggtcacacattactacaaactcctctgtaattgcgtgcttagctatacatgctgttgttattatagctatactcagtggttgggctggtacctcagtatcttatattatgatactattttttacatgtcaaaatatgactatctataatagtacctcgaaagtatcgtaaagtacctatcataatacatgtgggtagcaaaccaagcacatatcagctggtatacgtgggtctcagttttaacatatacccagtctgatactaaggtatcacttatgatacctgatagctctagaatttgtggtactaagcatgatacatatatgtattaggttgatacctgtaggtagacccgatacttatatgcactagacatgatacctaggtaccggtcgtgatacatatagttaccaagtctgatacttataagtaccatacattatacctaggtatcagtcgtgatacatgtaggtaccagacacgatacatgtaggtaccagatctgatacttatatatgtactagacatgatacccaggtaccggtcgtgatacatttagttaccaagtctgatacttataagtaccgtacattatacccaggtatcagtcgtgatacatgtaggtaccagacatgatacatgtaggtaccagatctgatacttatatatgtactagactagacatgatacctaggtaccggtcgtgatacatgtagttaccaagtctgatacttaccatacatgatacccagatatcagtcgtgatacatgtaggtaccagacatgatacctagatacgactcatatactcacgctattttacccttgaaacaggaccattcatcatcaggtcacataggatcacatatagcaatagagaatcaagtcattttctcttgctcattggcattggcaactttaacttcgatttgatgcatatggcatcatcaaggcaggagtagtattagaccgttagacagcgacaataattgactggtagtgcatgtactcctcttcctatactactagtgcatgcattagtatatggcagacagtagtatagtacggagtacgactgtactagtactgcatgcgcaaagagttaatccgtggggctcgtgggacccatgcgggaggagagatgggtggtttatagcgatgctgggttggacggtttaatgtcgtgcataacttgtaccgtcctgacaatataccgtttcatagctcttctcttcataaaagcgtctaaaagcgtctagcactaatccatgtactatggttgtattcggagtaatctattagcgcatgataaattaagcattagcaaaaataaacttttaaaatagattaatatgattttctaaagtaaatttttctagaaaacaaatcatttagtgatttgagaagcgtgcaagaaaacgagaaagcagaaattgaaagtggtgataaaaacacaagtttgcactaaataaatccaaagttctacgcaagaaagaaaaaaaaggattagcgtttttggttgaggcagtgtgaagcaaggtgcaaaagcaggacaacggaagcacgcaacgcaacgcatcccccacgcctttggtagcactcgcaaaggcggtataccgccgttaagcatcgcatcctccgattcccattctcccctcccaaccatttctcctgggccttgctccgctccacctcccaccaaaccctaaccctaaccctaacgcgcctaccacgcgaggcgcggcggcggcggcgggcaccatgtccgcggcggtgtgcggcaaacgggcctcctccttcttcgaggacctcccccattcgccgtcctccccgccctccaagcgcgcctgcttccgtggaggttcctcgccctcccgcccgctcgccgacccggccctcgtcgcccagatccgcccgcggttcccctccgtcggcctcgaggtgatgccgtctgctcgtctccctcgtaaattagcagtcatgcgtgttatgatttgagatggaagtttaatctttggtcccaaagtagtacctggtgctggtgctgttgctatgtaaggggtgagccaatcaagcacatcctgctcatgattatgcgtggtgctgtctgtgccgcttgctattgctaggtttaaaggttagatggaattgcagcaaagctaccatatgtacatgtaatctaatcatttagcgatctctttgttttgttccaatcttgcaattttctagtttcctgacgaaataaatgtggcttctgtgttcctatattttttcttcaattatggaatgcaggtctcgcagactttgttcctggttagggtttgtgttaggatttatttgagaatggtgacttggtttatgttacagttcattttttccttggagtgatagcaattttttctatgcatggatttgtatttattattttagtttagtcattgttttctttgggaactgtcgattgtcgtttttgagcggaactggtagatattgagaacttacttacattaatggcttttaactgatgggaatctggagtgcatcggagcatttattaatttgttatccttttgtccgttgatgccgatccttgcgatccgcgcacacctcttcccagaaaagtttttgttgcctagaaaaacgtattattcatataagaattatagccagcaattctatgaagcatctatgggccttatatggttgctttcctcttttcttaaaatggccactcgcgggaatggtatgttaccatatttttttgtttgttcagatagtcatttttttctgttcgtttggattctctgaacaatgtgcttgttgttataacaaagcataatatcctacaatatctggtaaaatttccttaacctgaccactaaagattttcacttgtgtttgtcagctttctagatacaattcgtcaacatattcaaagtatgttcacttgttggagctttttaacgatttagtaacttaaaccttatggaaacttttgttcctgcaggttattgagaacgcgttggaggaatgtgaaaacgattttgattcagcaataaagttcttgttcaatttgcatgtaggacccacagaatgtaatgtggatcctatttatcaatctccatcaggaatgtctactgagcttcaagtggctgatgaaggtaaactttggacctctggatgttgtctatcttctatgatgttatgttgataccatctataagacttctatcttctatgatgttatgttgataccatcttaggtgtccaaactcctgagggttttcattatcaaactgtcttgagaattcttgcaaaattcctgtgttgtgaacagaccctatggaatcagtttttcagtgccaatgttagattgtctaatgatgaattgtaatacaatacggatctgttttcttagctttgttattcacaacaacttttccaattggagcatggctttctatgaaattagtgacacagttttatctcattgaacgcatgattgtggtgcaagtgtcaaacttgggcacgagtgtctgatatggtagcctagggaaaataggattcaaggatttgattggtatatttgaattatttgaaatcacaaaagactcatgcactaatgtaggcacaaaagattattcaactatgtagtgtgaataatcatatttactaagcaaaaaaaaggcattggcacaatgagaaaaggctgctcattaattcaatcacccgtatagaaaatatttcaattcctttattctgtgcatctcacaacctctagatcccctctcctccctagacctgactcttgccatctcctttctctgaaatctcatctgatttcaacgtttgatcaagcaagattccaatacaaaatttagtttttaacgtcttccatttaatatgctctgcatgctatcaagcaattttgtaaccatatgttttttctttatttgaggtgctgacttgaatgcttttggatctccaagacttcaactaaagttgcatggctattgctgtacaacttgagataaaatatcgttttattatatgcttttcactttgcatcctttgtaacttcttctgtatagtgcaccaacaaacttatgctttcgaactcagtatttcaaatttagttctaggcatagaatagaactcctgttagcattaaccaatttgaccactttgagaatattgttctgaagaatattattaagtatggcagatgtgttgctttatggtccaggtattttggctggtaatgaagctgctgtacctataggaaatgctccctgcgctgataactttccatcaagcagcacccagtgggttgagattcttgtgaacgagatgactaatgcctctaacatggatgatgcaaaggctcgtgcctctagagtattggaggtgtttgagaagtccatgaccgctcatgttggtgcaatggggagctttcagaaggtaattcaaatcccttccaagagtgcttcagaactttcagggctgcttgctagttatctaggggtgaaaacggatcggattcggacggataatagctataccatatcctaaaccattttttttaaacggatgcggagcgggtgcggatgacgtgcggatgcggatgcggagcggattatttcggacgtcggattcggtgcggagtcggtgcggagtcggttcggaaacggacaaaaagttgtcggatgtcaagtttgtattcaatccatacaacaagaggacgccaatacaattagccgcaatacgatggcaaaataacatctaaacatgatctcagttctctaggaaaaaccaaccaaaacacatcaataatataattttgcttaatataacacatccaacaaaataatccaagatacatccatcactcattagtcactggtcactgcattgcttaaaatttaacaatataacttataagtcatcactcatcagtagttcagtacgacatgcatgctgcatgcagcatatgagccagcaatgttatccacatcaacaacaacaatagtgttgggactttcattgccactgcccacagttgatggcccttcttccccttcagctggagctggcgacgaggcagcaatgctactttcagtagcagtagcagcagctgctgcttttgcccctctttttctaggtgccattttttacgatcctaatgaatgatgaacaattaatcaaattataacttgctattgacgtaatttccgtaagcaaagctcatctctacatttctaaatcagtaaatcccaaatttgatacttcaaattggactgcaagtgtacaagaaaacaatacctaatctatcgtcgacttgtcgttggactggaacagcagctgcagctctaggcctcgagcagttacagcacgacgacgacacggcacggctgacgacagtggtggctggcgagtggcgacgccacgacggggatggctgctggcgacagccaacagggatggcggctgggctggtgacggggatgtgacggtgcactggcggcccggcgctggagacgtgctgatgggcgacagtggacggagtggtggcggcgccgaggagccgaggaggcgaggacgaatggcagcggcgccaccagcctgtactgcagccgaggaggagcggcggcggcgctagcagccaaggaggagcggccggccggcgctgggtcgccgtcgcgctgggtcgactcgccgtcgcgccgccactcgcccactcccctacgactgagagctgacgggagaaagagagagagtcagagagagagagagggatctgccgatctgggggacagggggaggagaggaaggattaggttagggttagaatagatgggttattgggctagaatgctagatgggcctgaaagttgcggattatccgccaaacactatatcggataatccgattaaaaaatcggataatccgaatccgtcggatatcattgataccacatccgcatccgcatccgcatgacaaaatccgcatccgcatccgcatccggccggatatctaacaacccttaccatatcctcacatcggacggattcggatcggatcggataatatccgctccgttttcacccctatagttatctgacctttgatgtggttatgatattgtcgtgttctttcatccttgtccattctaggttaccaaggtatcgttgttcctactgggtaacctagtggtcagcgaaaaactgtttgagtggagaatcattttaaacatatgagcacattttggcaactctgggttttacatacttctccaggacatgatatagatggataaactaaatgtaaaaaaaaagaagcaaaatgatactttggccagcagaaaacttcaaatcttgaggaccgattctaaaatatggacacatttgatcaagcatatagccatataccaactattgttactaggctagttaaataacttttggggatgccaaaacatggattgacttggatgtatgagttgggagtggattttgatacctcaaggggatgtcctattgttgtttgcatgtcacttaaaaagttataaaaaaaattgaaaaaaatttgagaagatgtattgacatgttatcacttcacaaacatacaagttcaaattcaacttctacatctcgcaaagaaaaaaaaacaaatttgactgaatatgtgttaactagctgtagtttaatttttttttcgttgcgagatgtataagttgaatttgaatttgcatgtttgtggagtatatcacatgttaatacatcttctcaatttgttttcataattatttgactgatgcaaacaacgaggtgacatccccttgagggatcaaacatcatgaatatctatgatggattaccacgtagacttttaacatcttttatttggatgctttccagaggattaacttccaatggttatgaactgaattgcactgcagatttgtgctgattataatctattgtttactatggagaacacttgatggtaagttttaaaataaattaacttctctctgatattcttactttcaaacaggaaagctctgtgtataaggaacagtttgaagcaataaccagggaaaatactattctaaagaaagccgttgcaattcagcacgagcgccaaaaggagcatgatgggagaaaccaggagattcagcaactcaagcagctggttgctcagtaccaagagcaaattagaagcctggaggtataacaatcttagttgttttcgctattcttgtttattggccctttttgaagcatcataagtggttctggctaccgatgttttattttattcattttcttgctgtgcaggtaaacaactatgcactgtccatgcatcttaggcaagctcagcaagccaactcgattccagggcacttccatcgggacatcttctgaataacttcatacctaaaccggaggtttccatagaatgagatatcgttcacccaacaattaagggcagagttcttgttcttggcttatatccaatatattgccaagttataaacatagtttaatgtatgttgtagacctgtgtgtacatgcttgtcttgcgttgtgctgttggccccctaagatgggattgtgtgcgagcaagcgcaaagaaagcttagttcattcgaacggcagacagaatatgatcaagttagaaaagaaaaaaagaaaagaaaagaaaagcgaaagagcctttaaaattattctccaacgtcggctatttaatggttgtatgtgagatggtctgacttgaaatcttagtttcctaaacgagaaatctcaccggttaatggaatttggagagagttgtagattgcgcaggtcatatgctgttaatttgcggtagtggcgcacagctttaaatacccgcagctactcataaaatcttcattttatcaaacaatctaggttctcaatttagattctgggatgggattcaagcaccgtaccagctgttccttacgtttcttacctccaaatatgatcaaagacatgtgcgttaggatttgaacatataaaactttatctacatttctaagttataacaacggtaagatggatggagaaaatagtactttcgcaaggtgtacaccctgttgcaccttccactaaaaaacacatacttcctccgtttcacaatggaagtcattctattatttcccacattcatattgatattaatgaatctagacatatatatttgactagattcattccatcaatataaatgtgggagatgctaaaataacttacattgtaaaacagtgggagtaataggttatgcgactaacataaggtggtttgcgacctatctaataaagctcgtgaaaacgggttattaacacaagacggctagcaatctgaaactgagtagaactcgatctcaaggcagcctttcgcacaaagcagcaggtagatctagaactacgaatgcgaatctaaaccagtgaccactaacttgacataggacacaaactcaacactatggactctgaaacaaaattatgcaaaatactaaaagtggttaaaggataggtataaacctaacactactatattttttggttttttcgtgtactactggatgaaagcaaaaataatacaagggtaaagacgaaactgacggtatacctaaagctttgataccacttgatggcaacgggatgctcgaccttccatcaagtgaagtgaagatagttatcgatttagtggaaacttgacacacacgatcaacatgatctaaaccctgcaatcgcagcgccacgtctcctttggttattaatcgtgccgaaacccgattgacctcgttgagaaggctaatccctgcgtgtgaattgaaaaacacaagcaagagcaagaaagacaacaacttaattacagataaatgattaatcaagaactcgaagttgaggttccacaaatcgaactagcagcgaaactgtaatagcaaaaataatctaagcaaaacccaaccctaacacaatgacaactactgaatatataggttatagggtcgaccttggactcatggacacatccctattggactccaacatgatacataacccaacggacccaaaaacggtgacgtagcacctagactgattctgaacgcctttttgttttgacaattctcattgactcggaaagaattttgatgtaggaccatatccatttcgacgtcgaaatcggagtccaaatgcaatctcggtgataattttagtgtggactgctcctggagcctgaggtggacatgaacttgatatgagttggaccttcatctcggcttcaatgtccatgacgactttgtccatctcttagcctctctccaagtactccataatcctctctatagttcctatcataattaaatcattaggtagcaatctatcatcaaaagcacataaataagtacttaggaacgagctcacctataaattcaattgtcgggcgcgagctctagtaattggatcttgcataacaatttgagaggtagtgtgtgtattaaaaggagtgatgtcctcatcagcgggacagtagcaccaggagagagcggcagcggcggcgttgcgtggagggagaataagcggtgatggtgcggtgcattggcagtagcgcgtgaagggagatgcgctggacagtggttggggtggaccgggggagggagtggaggtgtgtggcaacgcaaggaagagcctgattggtggagtcagcgtggggaaggtgggccttgctggtgaggccggcgggtgatgcggaaaggagggcctctgggagagtggtcggggatggggtctcagacggtggcgtggcagatccaaccgccggtgtggtggatgggggcatcgtgggatccgggcataacaaacattactatttccagaaaggtgaaataaaataaacagtatcttcaatctagacagcaagagcaagatacgtgagatggcaagtaaactatatgaggaggatgatatcttgggtgaaattaagggaccaggaagtgaaaatcagttttacatacgtgcctcttaaaggaatcgactataaagttcgattttcacaaacggttatataaccatatagggaaatcgacgatacaatagttagaaatgttggttttattttagaaaaataatgctatatctcttcgttgattcaaaaagctcaatttgaggggattttctaatccgataaatatttgttatcgtattcgttttattttgtattctctcaatatctgtacttgataatattcgattttgtttacgtatccgtattatcgattccgattccgatgaagaaaaataaaaatgaatatagtagagctggtttccatccctttctgattcgttttcatacctactccatagagatgctctaattaatagggaaaatatacgcagatccttacgaagaatatatgtgggcatgtcacctactggcattgtttagtttgtaaacggccaactatgaccaaatttagacaacagtagtcatcatgattaaataatccaagtaaattgctctacccagccgggctgtcgatcttgtgatgaatccaatttgctactttctacgtgagcacaataatactgtacaaacttattatactttcatcttcaaatataactatttctaatacaataaagtaacttactccaaaataaagctaattctccacatgccccttcctctcaatcaaccacaacccttcttttaatttttcacctattttctcttctcaaccaatcacatcattcctccaatcattttcacctactttcttaatatttgtatctaccttaaaaaatacttgagggagtagtaactgatgatgtgcacacagcacgcatatatatgtaacccattaaaaaaaatccatggccacataccaaaacaccaaatgctatatacttgaccggaatgcatttcaattggatccaatttaaatggctgacccaatatatatcaagaagattaattttcctaaaagaaacatgcatgactccatccttttactagctgcatgttaatccaagctaagttgtaattccaccaatatataatcttactgaaagcacgctaaatatatctttacctttttttaagactaattaaatataatgcctgaaccctgcgcccttcgccagtagactatcacacacgcttacacgaggggatggctaggaggagcttaggaacaggtgatgtggtaataaatcacaaaaaaacaacatggcgcaaattgcaactactacctggcaacaatttgaaatagctgaattaatatgcaaatttgaccggaacaacagaacaaaaacattaggaagcttccaaagctgctcatcaatcgagcacttatttcgattagttgttgctctcactgcaattttgggtgatgatatatgcgacgcacgggtataatggtgaactccatatcatcagctgcataaaatgacattaattatcaggatcatagtgtacatgttttatgtgttgatcgaatatacgacactcgtgattggccgagcagaagggatcaatatatgtttaagcctatgattaattgattataatgatcataccgtaattaattgttcctcttaagtgataagctccatatatatgtatatggctcagaaatacgctgcatgacaactgtgttagagataagtgttgtacttatgttttccagtcaaaatagcgtacttattaaaaagtttccgctgcctgcaggtggcaattgagtgctcagtaagtgtatacgtacacagctcattttttggcacaaggtaattaaatggatttattgtactgatgatgagtcttcctcgtttgcaatgactatgtttagaagtatctgagagatacagctcgtagaattaataggggagaatggagagataaggcttcaagtccactgtttaaattaaaacgttacacattgcattgaatttacttaatttattaattttgggccatgttgttttatgttaattttctccctatatattcctgctccctaggcttatagatgcaatccacagttagccattggagcagtaagctcctactaccaacatgtttccttctcccggcggtagcagcaactccgctgcaagtgagactccaagtgagaaggtaaataagagtactccattgaaagaaaatttatatgaaatgcttttaacttcattgctgattatttcgttttactgtaagtgttctttatattctgcttgtttgtgtgtggaggacgtcctgaaaaattgtttcattttaagcggttgtttatctacatgtcctcaaccgaccaacaattttagtctggtcacatgggatctgactgattccttctgatttggtcccttgttgaattcatatagattttaaatctactgttaaattgctaccccgccgtcccaaaatgatttcttttaattgaggctatgcatctggacaagtacctgtaagaaataatgggacgaaggtagtaccgtataatttatgataatctcaatggtcttgcaccttaaatcaaacaaatatattactagtcaactccaagaacatactaataggatgattgaattgaaatcggagaacacttttaccactattttgtatacatgggata

SEQ ID NO: 20001 - DNA, 2147 bp, Oryza sativa
ctgatacatcagagtggttcaagaacatggatgatgatgatgagtcacccctatggctaaacgtactgctgagaaccgcattctggaggaagtgtgacgtgcatgatcagcttgaaaatacacatagggctgaggaaagcatcttctgcaccaactgcctcaagacaatatgcccacactgcaaacatgatcaaccgagccaccaactcctcaaggtccgccgctacatcttccgcagcgtcgtccatgtcaaggacatgcagaattttggtattgacatgtcttacatacaggtattacttagataaaattaatgcccatgctttgctatggataaaagaaaatatattataatatgcaatagatattttaaaattatcgaatatgttagtatcacttgtttacttgtttgaatatatggtatttacttgtttgaaccaaatatttggactattccataatatcaaaaaaaataaaaataatcaggagcatatttgtaaaaaactgtaaaagcagtggtgaggggacttttaaaggagtatagatgtatagttggcactgtggttaatcaacttggaaagttagtttctctagctccaactagtttaattagcttgtttcgaattaatcatgataagttcgtttgtgtaaggtttgtgtgcaataaatctttgttatttaaaactcctaatttgatggaagcaacaacaaattataatctgatcactatttgcttcatttttcttgtttagtcctagcattagtaatgataatttattttgcgacaatgtgggtttgaaggcaaataggctggtctccatttagagcccttgcaaacccatcctaactggttcactgatcagctagctagaccacacaggtcagacacaatttgacacaactttgtttggaaacaatttgacacaattagagtcgatcaaacgcactgaatttataatgaaatgaacaataatttttatatataagtgattgcacagtagcgtagtaaaggatgtgtcttgcggcctaatactactaggataaatggcaattaatagtgtcccggaggtgaatgccatgatcatctgaactcaacttttttttatttaaattactaccattctgaactcaactttaggctagaaataaaagatttaattttgttcaaacacatggattgattagaaaactgttttagctcatctgaaatgcataatttggtgcatatatatttattgattcaaaatatgtatctaattaatatcatgtagttatgcaagcacatctatgtaatcaaaatatttacaaagatatgtgtactcatataatgcatccatcacatgaagtgatcaaatcttcttatgaccatattacattgtataattcagtaataacttagtgaaatcttgaaaacatgaaagcacacattttttttttgcctttttagctttcatgtcactaagttattattacgatcatatcagttttgataattcagtaataacttagcaacatgatttcccatgaaatctcgaaaacatgaaatcaaatattttctagggttaagttctggacatatatacgcagaaataaactgcgatagttgcatacacagaaatagttataaattaataacataaatatttcacatcgaaacctaatagtgttactgaagaaaatcgatcggtaattactacacattttctcacatgtacatataatagttaatactacaataacaaacttgatcagccacttactcccccatatatatatgtgtgtgtgtgttatcccgcaatgctagctagcattagatcgatccaaaacctccaactgtatcggttcttcaaaaatcttttttttttgcatttgatcaatttgtactaactttttccaaaactgattgcattttctcatacagaaacatactccctgcgtcccaaaaaaatttcaattctagggatgaatctagactcttttttttttttggggggggggggggacggaggaagtacatacaaatacatcttgggaaatcatgcatgtttggtttgcatagtttatgaatatattggtattcatctatgctgactcctgacatatgtgatgggcttaccaagacaattttagggtgtgtttagttcacg

SEQ ID NO: 20002 - DNA, 11766 bp, Oryza sativa
gcacccctaatttagctgttagaccgcagctttcgtgcgtattatttatttgtcatgtttaagttgtactgtgcaacatgtttgtcacattccgactgaacctggcattagttgctttctcatttgctggtcctttgctccttatcaaaataataatccagtttaaactggtgaacattaattattttgtgattgactattgttctatcccttcttttgtttcttattctgaacacaggtgttgcattttctttctgagatttgtgtttgttgatttggtgatttggtctgactttgaaacgataattacctttccctttcaaattattattcgaatattcaatatgtgagttgacatgagtttgctaacttttgttggagtcaattttgtcgtgaattttcattgttatcttgttcagaagtccaaactaacatataaatagtatatggcatccgcattgcaattttttgctttcttattctattgtaacttaaatcgagcaaaactaccaaccgtgatgcaaaatctctatctcagttcacagtctacctaatgagatgactaggagacaaacacaaagaacaagattacacaaacacatgaagttcctcgggtctaggtaattccttcccgccctctgaacacaagttcaagaataaaaacaaacaagaactaagcacacccaacaaccagaagagggggaggaaaactctaggcactcacactacacatggtacaaaaggtgcacaacacaaattgatttatcctcagcctctgtagcgattgaaaaacaccttttcccaattgctagtgcattgatcccgtccccggaaaagccagggtacacttcaacaatcatgatacaaaagacacatatttattgtatcgataatatttacattattacaaaggctcttcaggcctaacaaacaaaaaataaatagcagcagaccagcgggcctacgacaacatcttcataggcgctcaactggggtataagccaagactccacctcggacttcttttctaaagtttcttttactgaaggttggaaagattgagcaagaatgagtacaaccacagtactcagcaagtcaaaccgggagaggcatgattaatgcaaggggtacaaggagtaataacatgggggttaggttaaaaattagtttgactccaaattgaaaaccatgcttctcaacaaatgaaacttttctatggttgacatgtacactctttatttttgctaacacttacttgtgaacatatatctattgtaggaacccttgctaatctaagtaattgatatttgtgatatggagatgacaaaagaaattcctttctaactgtcatgatatttgggattttatctttgcaaaaaaataaatttttgagcaatactccttagtgactatatgattacctaccaaaggccaaatatgattcatcttgcaaaccatatattttggttgcttgacattacattgagccttgtgtgtgacctatgtgagatgcttttcatgctttatgatcaagatcacacacactccacatagattaacatcctgaacttctacactagaagctagtgtccatttcatccatcatccacaaaataaatactcctcgttatttatgtatttttctccaaagttcattcaaaggaaaagggaggcatggctatgcaaaagaaagaaagaaagaaataataaagtcttgctcatacaaatatgaagcatgagaacaaaaagatagccatgccatctctcaagtctcaaaagaaggagaaagatgtgtagaaggagttatcattttccttttccacccacaatcatacacatgcacattcttgatcagaaagtgtgacttgctatctccttggggccccttttttggcctggcaaaatatgtgatgcaggtacaccccgattgatccctaccgagctccacatatatagccttctagaatagggacaattcggcaatacatgccttggtgaggatccaacaatcaaaatgagtgattcaagagagtcatatgaggagtatagctatattttgaaaatatatgaaaaactcaagtgattgacaggaggaacaggaacgacttgagtcacgaccattcgatttatcaattacccaagatggtaagatagacactgcaaagttcataggtataggtgtggcttagaataaattgtatactagtaccataccttgggatgttttattccacaatagtccttaacctttagtcgagatgagtaaagagctaagtgtgggggtttgttgtaatgccccgattttcattcaggattaaaaatcaattaataatgcattttctagaaattaaataaaagtaaagcaatttaatcaagtgaaattattgagggaatttaaaatttcctttaaaaatcatggccgggaatattttgtaatattctttgcgccctaaaatattctctaaaattttcccgtgaattttcagagctcaagaagtaattataataatacaaagttcattaaaccaattaaataaaaacgaaaacgaattaaaatcctccttctttgatttgggccgtttccggcccaagtttcctcctcctcaggccggcctccctcctctctccttccttctcggcgcccaaggcccgtccccttgcaaagttcacttctccttccccaaccgtctcctcctccctccctcgccgacaggtgggcctggtgaccccacttgtaagctcctccttctaccttcggcctccagagccgaagccgccatgcggcgcctttgccgtcccacgtcgcccatgattccggcctctcccgctcgtgccctcgcgcccaaaccgcatgaaatcggtttccctccacctcctctacactctccccatgtttcccccaaaaatcgtgccgggatcgaactccacttggcccatgatgttgcccatgtcgccggccattgccgcccgattctgccttctcgaccacaattttcctcccccgcacccatataatgcatcgcccagctctcctctaccgtttcccctcctcccccgagcttcccatagcctccctcgctctccccatgccatcccccacttctgccgctttccggcgagctacagccacgtgctaccgccgccatagccgccgtcgcaccatgccaccgccaccactggctccgcagcgccgagccaaagcccggccaccacttcccctccccaaaccgccgcggaaaccccgtcgccaccaccaatccgagccaccgccgcctccaggtgcctcccgccatcgagcgtcgcctcgctcagccatgccgccgccacccacagcgccccgtccaccgctcctcttccccaatgcattgccaaaacgccgccgccacgttcaccatctctctccgccaccattgccgcctccagccgtgccgcgtcgcctctctggtccacctcgcgctgcgcagtcgccttccccagcaccgcagccatcgtgcgcagctcggcatccactccatctccctcctccacccccgaagcactactcctaccgcgaacccaagccgccactgccattttgtcacatcctgatttttgtttcaggatttataaattatttaataaattattaatagaatttatattaaatgttctttaatttacaagtgaagttaaatgtgggaaataaaatttcctaaagcatggatggatttaatttttattaaattctccatgattaagtcaactctctgaaaatttctcggatttttcagagctcaattcctaaatgatacaaagaacagttcagtaattatttgatcaataatgatctaattataattgttaagagcttttcttgtttaaaaatccttaaattataaattgttggttaaaaggaattattaaaaatgatcttaaaagcctaaaagagaagatctaattttaatttgctaaatctcaatataaaatggggccagataaaatttcattaaatactttgcttaattctataattcctagatttttctgggatttatttgagctaaggaagtatttttaataaatggaattgcatttcatgaataatttaaattgaaaaaggtttttaaaagtctcttttggctttgggccgaaagtcggcccaaaaccttctctctctctccctcggcccaagtcggcccagtccgcagtcgcagccgcccgcgcgagcgccctcggtcgctaacaggtgggtcccacctgtcaggttcgtcgtcttcctcgcgtcggtcgccgctcgaaaccctagcgccgcgccgccgtcgtctccttccaaatctggccgctcctttcccgatccggtgaaatcgattgaggggaaacaatcttcgggatctcctctaccttttctcttttggaatcaccggctaaaatcgtttggaaattcgtggattcgaggtcgaatcggatcggtctctttcgtaagtatttatcgttttagttaatttgatgaatctgtatattaaattgtcagtttgtgtacctcggctgattcctggacgaggattttatgcacagataagttcggaaattactagtgaatttccgggcgtgacaagttggtatcagagccatctcgactgtaggataagccaaatggtcaaaccttaaggactaattttccgaaaatatgatttgtgaaaatttctcctttcttccttatctagaattctttgcaaattgtttcgttgtctactcccctctctctttcaacttgagtagttctgagacattgaaacttgaagacgccaatgatgtcaacttatggaggtcagtcaagtggatcgtggaaggaccgaagtgccaagtggtcaagatggaatgaagtttggatcctatcttagaacctatgccaccaaactatcctcgaagaatagttagtagggtagaacgtttgttgtttgctttgtgtgtaggtatggttgcattcccatcattggagtagttcattgatgagtgtgtaactatactaggttgcttgcttaatcaacttgaacaatataatggtctacacacatcagatcagtgttaacctggttaaggtcttatctttagtgtaacccctctccttctatcttctctaatatgcaacagatggtgaacactcgcgccagtggaagtggaaacaataacaatgaagggaacccaactcttgctcaagttctggctcaacagactcagttaatgaacatgatgatacagcagatgcagaaccagctcaaccaagggaacaacaatgctccaccgacgcagaacaagttagctgattttcttcgtgtgaggccgcccaccttttctagcactaccaacccagtggaagcgggtgattggctgcacgctgttgagaagaagttggaactgctccagtgcacggatcaggagaaagttgttttcgcttcacatcagttgcaaggacctgcatcagaatggtgggatcatttccggatgaacagagcagaaggtcaaccaatcaattgggaagagtttaccgaaggattcaagaagacacacatacctgtaggagttgttactttgaagaaacgtgagttcagggcattgaagcaaaaggatcgtaccgtggcagagtatcttcatgagttcaaccgtctggcacgttatgctccagaagatgtgcgtactgacgaggaaaggcaggagaagttcttggaaggcttaaaggatgaactgccagttacgttaatctcccatgactatgttgattttcagcagctggttgacaaagtaattcgacttgaagacaagaagaacaggatggataaccgtaaaaggaaaatgactgtattctaggaggcacaaggtagtagccagagacagcgtatcaagccactccaaattagtgaacctttttccgctggtcaaggacagtcgcaacagttgaacatcggtggtgagatcaaatcagagactaatgaaagcaatgaagttaacatcgagcaagctaatcagccggtgccagttcagcaggaccagtctcaggagaataacagtagtggaagggagcagcaggtatgtttcaattgttacaaggcaggccactttgcaagagagtgtccgaagccgaagcatcagcagccgcaaggtcaggtctacaacattgtcgtcacaggagccaatgcggtgccagttgtgtcttcaagtgttacaactcagccaccagtttcaaagcggcagtagttttctttaaagccttagaataattatcggagttatggaataagatagactgcagtttacctattcccttttctttctagccgttccgaatctcgggacgagattctttgtaaggggggtagatttgtcacatcctgatttttgttttaggatttataaattatttaataaattattaatagaatttatattaaatgttctttaatttacaagtgaagttaaatgtgggaaataaaatttcctaaatctaaagcatggatggatttaatttttattaaattctccatgattaagtcaactctctgaaaatttctcggatttttcagagctcaattcctaaatgatacaaagaacagttcagtaattatttgatcaataatgatctaattataattgttaagagcttttcttgtttaaaaatccttaaattataaattgttggttaaaaggatttattagaaatgatcttaaaagcctaaaagagaagatctaattttaatttgctaaatctcaatataaaattgggccagataaaatttcattaaatactttgcttaattctataattcctagatttttctgggatttatttgagctaaggaagtatttttaataaatggaattgcatttcatgaataatttaaattgaaaaaggtttttaaaagtctcttttggctttgggccgaaagtcggcccaaaaccttctctctctccctcggcccaagtcggcccagtccgcagtcgcagccgcccgcgcgagcgccctcggtcgctgacaggtgggtcccacctgtcaggttcgtcgtcttcctcgcgtcggtcgccgctcgaaaccctagcgccgcgccgccgtcgtctccttccaaatctggccgctcctttcccgatccggtgaaatcgattgaggggaaacaatcttcgggatctcctctaccttttctcttttggaatcaccggctaaaatcgtttggaaattcgtggattcgaggtcgaatcggatcggtctctttcctccaaaccccgatctttccttcgtgtcaccggtcgccgtgggccttcgtcaccgcctccttgcccctttaaaaggacccccggtgtctcctctacccgtcgccacccttgccttcgtctctagccatcggaagcgccctagtgccgtgtgacctcgagccgccgtcgtcgccgccgctccagccgtgcttcgccgtcgctccagtcgtcgccgtcgctcggggaggtcgccatcatggtcgccaagtcgtcgccgtccccgtccaccgcttcaccgccgccgaagaccgccggagcaccgtcgtcaccgtcgacccgaagaccgtcgccgcttcttcctcgtcgccggcgccgtccgttgcttttccgccgttgttttggtcaccggtgagttcgccgcgtcgccctctacccgttggtgccctccgtttgcgtcgtcgtgccgtcgttcgccggcgagcatgcgttgccgagccgccgccggtgctgacgtcatcgctgacgtagtcgctgacgtcatcgtcgccgttccccgtggctcggtcgtggaccgtttgatctcggccgtccgttttggataggatcgacctcggccgtctgttcccgtgaaccgttgccgtgcacccggtccaccgcaaaccctagccgctgacgcaataattcccttttccttttcaaaaataattcaatattgcgtcataattcaattaaaatccatataagtgttttaacccgatttaatctttaaaaattcataactaattcattgtaactcagtttaatgtggttcaagttgcaaaagttgtgtaaaataaagatctacatattaaaattatccataaattgaattaaatttatttaattctttttaaatgggctttaattatatttaatctagtaaaattcataataaattcatttgaagtcagaatgaggcccttcaagtctcataattcatctaaaattatgatctacatgtttgtttactttttatgtattgtttatttagtttttattagtctttttcttcgttttgcgtgttagcttgtcgtttccgtcgttgcgaaggttcgtgagtgcgccggaagtattcaagaagattaattgaagaccgattattgcaaggcaagtcacacagatcctaaacacaatcctttgagcatgttgatcctatatttaaattctctatttatttcaactatgcatttattttcgaatgtcactgggtggtgtgaatctattcctttgttatggcctgtttgcattgactactttattccttgataccttgggttattataacttgactagttgggctttatatatattggttcagctagatattagttatgattgcttagccatgcttagaaacattagcacactattgggataacttatgactcactattatttaatgatggcttaatgatagttcacgatggttaatcgtgattggttaattaattacttgccaactaaaacttgataatggtgggttgtgagcacatggttttgagagtcgtgctcatgacaattaaggaccggttcgcgagctactattgtgaaacattaaccgtgccaaccacaagctagcgtgggcaacggctttaccttttgtatagcatggttcattgcggagcaccagactgagaagtggcggagataagcccacgggggtcgctggggagtccatgccttgttttataagggggtgattatgatccaggaatggtgcactgtggtgagttgtgttgtgcagagggtattgtcacagcctctattcgggtaccttccagtatcgcgacgcatggtagacatgatgttgaggctgtgtcttgtgggtacagtggtacacctctggccagagtaaaactattcgaatagccgtgcccgcagttatgggcgggttgagcaatgtttttcgtgattagtctcacacctctcacaataattatggatgttatacctggtaataatttgcttagctcctggtttggagttagatctgtacagccgggtatggttgttcaggatggttgggcctgtgcagcatgggtgtgctgttcagtgttgattaaaattcctaattaattactccactgttttacttctcttaaatgttttgctaaaagctgcttttgcaaatgagcctatattatgccatcctttggtatccttgtgcacttgcatatttgctgtgtggcttgctgagtatgtcatatgctcactttgcaataatcaatcaacctcagttgaagaaaaaggatccagaaggagaagacgtttggcttataccccagttgagctgcctgtgggagtggagccggagcttcgctagattttattttccgctgcagttttcttcatggtgaggactaagtgcctcttaagtaagtatttattgttttagttaatttgatgaatctgtatattaaattgtcagtttgtgtacctcggctgattcctggacgaggattttatgcacagataagttcggaaattactagtgaatttccgggcgtgacacatttgccacctccagctgccgctcgtcgccacttccgaccaccccaagtcatgccacgaccaccattagctccaccaccgctccactggctccaatcaccgctccagccttcttctccctgttgacgtcgtcccggtcgctgtccgtcacctcacgcccgcagtacaccgtcagaccgccgccatcgtcctcaccctgaggagctcaccgccacctccctccgtcggccatctccctccgttgccgtgtcgctcggtaagcatccccctctcctcctcccatcccttccatcgcttcccgcgccaccgctcgccgtcgattgctggtggctgtgcgccgccgcctcttagctgtccggccgtgagccaccgccgtcccctttggccgtgcaccgccaccatggactcggtccatggtggagcaactcctttgacccgctgacgagtgggccccccgctttgtggacgtggtccgcgctcctcctcttgctgacgtcagcgagcacctattttcctttgagaaaataattattaattgcgtcataaattggtaataattatagaaatttattaaaatggctcaaaacttctaaaattcatatctaattcatacgaactctaaattgggccattcaagttgcaaaattcatctaaaattgagctctacatgtttgtttactttttatgtactgtttccttggtttttattagggtttttcctcgttttgcatgccaacgtgtagtttccgcagtttcggaagtccgcggtcgcgaggaaaagagttcggaagatcaaagtgaagaagcaaggcaagtcacacattacccttgagcatattgatgctactttataaatgttttgtcgtttgcaaataaatatacatgttttgctaattacatgggatccgggtattacctatgctcgcttgtgccatgtttacttgttacccgacctttgtcaacctcgggtgataatttatctagctcgtgatacttatgttgtcctagctagaattatatatgcttagccatgcttaattaccactagctcacaaaatgggataattacattattagacatctagtattctgacgagctgtgtgctcgatgtcacgcccggaaattcactagtaatttctgaacttatttgtgcataaaatcctcgtccaggaatcagccgaggtacacaaactgacaatttaatatacaaatccatcataataataacgttacacacttacaaaagaaaagaaaacagcagcggaattaacggtctagcgatggcttcagctccactcccacaggcagctcaactggggtataagccaaacgtcttctccttctagatcctttttcttcaactgaggttgattgattattgcaagaatgagcatatgacatactcaacaagccacacagcaaatatgcaagtgcacaaggataccaaaggatggcataatataggctcatttgcgaaagcagcatttagcaaagagttaagagtagtaaaacagtagagtaattaattaaaaattttaatcaacactgaacagcacacccatgctgtacaggcccaaccatcctgaacaaccatacccggctgtacagatctaactccaaaccaggagctaagcaaattattatcaggtattaacatccataattattgtgagaggtgtgagactaatcacgaaaaacattgctcaacccgcccataaccgcgggcacggctattcgaatagttttactctggctagaggtgtaccactgtacccacaagacacaaccccacatcatgtcaccatgtgcctcaataccaccacggtacctcggaaaggagttgtgacaataccccttgcacaacataatccattacagcgcacctttcctggatcataatcaccccctgaaaaaccagaggcatggactccccagcgacccccgtggacttctcgccacttctcagtctggcgcactataatgaatcacgctat

SEQ ID NO: 20003 - DNA, 6513 bp, Oryza sativa
taggatcaacatgctcaaaggattgtgtttaggatctgtgtgacttgccttgcaataatcggtcttcaagtaatcttcttgatcacttccgacgcactcacgaaccttcgcaacgacggaaacgacaagctaacacgcaaaacgaagaaaaagactaataaaaaccaaataaacagtacatataaagtaaacaaacatgtagatcatgattttagatgaatttagcaacttgatccactcaaaaccgagttacgatgatttagttatgaatttccgaagatttaatctattagaaaaaactggaaaaggagaagatgatgacgtcatgatgacatcatcaatggccggaccaagatggcgacctcgccggagatagagcgaccggctgcggatttggaggacatgaacacgtagaggacgacgagacgaacccaacgatactcaccctcgtgccaaacgacgaccgacgacggccggcgacgaggaggcgacggcggcggctcgggttgcacggggcggcggagctccgatgaccggcgacggaaaaggaagggtggccgagcttcccctcaccacggcgcacccaacggtggtgacggcgaccggcgacgacgatggagacggcggcgcggcggcaccggagatggccggcggcggcggtttgcttggcggcggtggcgacggagctacggagcacggaagaggacgggagagggggcaaacgaaagaggaggactagggggtcctatttatagccttggattgaagagatcggactcctcccgcaagaaatcgatccgggaaatcaaaaactcggttttggagataaactcgaaaacgagtttgattcggataagatactcaacgatttgctccgatttttgggggtaaagatagaggaggataagaggaatatttcccctcaacaaaattggaaaaaaagagcaacggggaggcaagatttggaaggaagaggcggcggcactgtgcacggcacggctggctcgggctctgcctgagttggaagatgaacagtagcgcagggagggaaagtagacttttccggctgagctgagaggagaggaggcggctcaggttgggccggcggaagagagaggaaggaaaggaaggaatgggccgaaaatggcccaagctgaggaggaggattttattactttcccaattaaaataatcacttaaatgatctttgaattattaaaaatacttccaatgctcaaataatttcaagaaaaatcctgaaaatacttggacactcaaagtacttaaaaaaattacaattagaccatttaatgattaatttaatatgtgggtaattactgaaatgctctttgtatgattaaaattaggaattgagctccgaaaaatccgagaaaattccagagagtataattaaccatggagaatttaataaaaattaaatccatccatgctttatatttaggaaattttatttcccacatttaacttcacttgtaaattaatgaacatttaatataaattctattattaatttattaaataatttataaatcctgaaacgaaaatcaggatgtgacactcgagacatctggccatgtttcatggtcgtaattatccaactaaaatatgactgaatggtgggctatgggtgcatggttttgtgagtcgcacccatggcaattaaggaccagttcacgggaaaccctagaagacatacagtgcttgccacaagcgggagtgggtaactgcttgatctgaagtatagctcaaccctttcctaggcatcggtggcaagggtgggcgtgatggagttaggtcggccggggtgtccggttgtctagctgccggattcaccgcagcgcacaaggggactgcccacctccggggtagggggtgggggtgaaaccttagagtggtgtggatggttaggggagggttatatgaagggtcttgtcacaatcactcgacatggtgatgtgtcaggcctggcgcggtgacatgacgatggattgtgtcttgtgggaacaattgtgcacctctggccagagtaaaactattcgaatagccgtccccgcggttatgggcgatcgaccagattcaccgtgattagtcccaccttaataaattgactcaatgcactgtagttcaggtgggttggttggacctgttcaacgtggtgtagcgttgatcagtggagatttaatgttactttaattactcaacagttttaccgttttgctcaataaaatgttttacaaccgcctttatgcaaattgccacaaaccgtccttgtatccccttgcacgtttgcatcgttagtgtggcttgctgagtacggtggttgtactcagccttgctattgttcccccttttcagaagtgtagtgcttctgagctgaagatgaagttagaggatcaaggctcataccccagttgagttttgcctgtggagtggagctaaagcccagctaggatcgcctttttccgctgctactggttttgtttcggtgtgaggactaagtgctcttctgtaagtattttacgctttatttacgtttggaactatatattacttgtcgttttgtgtaccctaactggtcctagatagggatttaatacacaaaatagtttgaaaatttgggttaaatttctgggcgtgacatttgttgacgactattaaataccaaatttacgtcgtcaatacctgcataaatatgaaaatatagaacatccaacatagtggtagggtttatttctaacaaattccacgagtgttggtatatatttggatgcatgtgataaattacaaaagttgagatgaaatgtacataaaggagggaaagaattacattcgtatcgaagcccatagactcttgggcccataaacccaacgaaatacctgcaactaggccaaactaccatgccaatgaaataaggacccacatgccatggcctaggaggaaggagtgggccaggggagccagccaggggtcagtcgaccacgcgccgatctccaatggccgcgtgccgtgcggctccgaaacagccacgcagctgctcgtaagtcgtagccatccctcctttgttttccctcctcgtccagtccttatctccttcaaagtgattgagccgaagttcgctattcctctgtagacatcaagagctaatctcgttttcatcccaaaacttctcctgccagatccaagtccggctgtgcagccgtttcgccggcgtcaatcttctgccactgcaccacggcaccgcaggaacacctctcatcggtgagaacatccccaacctttctccccttctttccttgcttgtgtcgagctcccatcgtgctcctgtccaccaccatggctaccaccgtggtcagtttttccggcgcctcatctatatcaactaaccacaaaaatggaaccttctcatcccggaacgcattttgacacgctcactcgccccgttcgccaccggagctgccacttccatgcccggtgtggcggtgtcaccatagctccagatctggaactcgcgttccggctagcttcgttgtcttccagcccagcgtccacgtcctgtgggggtgtcagcctgtggaacacgtcatgctatcgtatccgtcgccgttccctcactggagctctagagcttttctctcacctctgttactcacgtgaaaagccaccggaagaagatgaatggcagcactgtttcctattggtaccatcaaaaccacctaaatagtgcctaaccacagtaaaaccagtccaaacaattctattatgatgtttttctcatgttcgagctctaaaacaccaaatcaatttcagttttcacccttgtcatctatagcattaattgcaaattgcaatcgctactacatataccatgaatcataaccctagaataaatcttttgtcatccaaatcaagttaactcttgatttatcattttcttttgttcgggctccgattcacaatatttattttatcgtttatttataatatttttattataggcttatttggtcgtttcttcgtgtgcgcatgttagatcgtgttgaagattccaccggattcacaggaactgaagtggacctagaaggctacgctcaagcttcagaaggccacgttccacaaggcaagccacagttccaatctttgatcatattgaaatatagtagagaaccacttagttattttctgcattgagtatttataaaattattttgcgtatgaattattttttaataaacttgttagtttagttattacccattattacattgttattattggccaaatccatgaattgctatatcacgtcctttgataacctaggtgtagatttatatacttcacaataatattctagtggataagaccaccaaatatctatactcatatacatggtttacccgtcgtcacgtggtagcgtgtcgggtgatataaaatgtgttatttgatatgactcactcgcctggagtgatatggaagaacaattccgggggaagatggatgctgtggtatgtgaggccgtgcatattgttataatattttgtggaaagtgtatattacacttgaagtatgcacggacctatgctagttttggtggctttccccggatataaggactaccctcttatgccatggaaaatgatgtaatttgcgcccatccacaggactgagtaattagacttagcctagtacattgtcccactatatgaaagactgtagggtggctctatgagcaggtttggggtggacatgtggaaggggcttcggccaggttgacatgatccgcaacggtggaacccgtgaaagcagcaaccgtctagccttgcttaggcccagcaagtgcccgactgctaggacggatcaatatcccattgggcagtaactagtagtaagtgggactctcgagtggctatgttgtcctcagtctagctagctgttgacatcaggtgggtaaagctaggcagtctctacagagatgagtcttaaatcatttgaatgtgctgtgcttccggttcagaagctatgtcattgggtgattcctatttatcatggtatgagtagatttttaaattaaaatatagaatatgacgaagatgaggatgaatggtgattaatattgctgctattttaacatgatgatttacaactgtttgcaaatgaaatgttttacaaagtagggaaaaactatttataataggcttgttatcaaacctccttgatgagttcggacgatcaatccttcccggaggaggtgcaggcaggggaagaattctatggtgctgatgagttcttgttctaggtcgatctgctctcaggcgttgcctgtggtgtttttatcctattttgtgtatgggtcttttgtttgtagggagtgtttttggcctgtcggcccctaaagcctgtcttagttaaagatcgctaccaatccgggactaaagatcgctatcattagtcccgggtgaaataaccgggactaaagatcgatctttagtcccggttggtaacaccaacgggactaaagatggctcagccacgtggccggatgagccatatttactcccggttggtggagctgaccatttttttttttcatggccctgttgctgcatggtttatatatattttatatatatatataaaccatgcatatatatgtttctatacatatatatgcatatataatatatgcatatatatatatataatattatcattgatatatgttacaaaacatatgtacacgcataaaataaatgtatttataaatatatatgttatgcacatacatatgtatatatatatatatatatatatatatatatatatatatatatatatatatatatatatatatatatatatatatatatatatatatatatatgaccaaaatatatttacattatagaaaatgtgtacacatgcatatagaaacatatgtagtcatgtattaatatatatgtatttatacatatatatgttatgcaaatgcatatgtatatatatatatatatatatatatatatatatatatgaccaaaatatatttacattatagaaaatgtgtacacatgcatatagaaatatatgtagtcataaattccttgtgtgtggtctggttatccctcatgcgaataaaatatatgaatgtatgaaattgattagtaattaaacaacaaatcgatacgtaatgaaattttgaatttatttgtacgtacatcgagctctcttgtggtgatgatttggtctgcaaggcagtggcaatactcgcacacgtagtagccgcacaagttagttccctgcttttgctttgcgcagtacaaataaatgacaaacgacgagagatctaattaatatacacttgtatgtatttgaatcggagaaatataaatgtagagcatgtgtactcacaggaaatttgaacttccgcctaagtctttctctccagttgccgcggaccaaatgacggaaccgataccaagccctacatggagttt

SEQ ID NO: 20004 - DNA, 8569 bp, Oryza sativa
aaaatcatattaatcaatttttaaaaaagattagttaatatttaattaatcatacagtaatacatgcttcgttttgcgtgccgggtcccacagatactactgtgccttaaagactcacatcacaacacaataataaactaataatccatataatattgtactacctccgtcccaaaatataggtatttttggctatgaatacaactaaaaagcctatattttgggacggagtgagtaacttttatgtggtagatacctactccctctattccaaaaaaaaagacaatctgaatatagatgggacattacctagaacaacgaatctggacatgtttatagccagattcattgtcctatataatgtcccatcaatgcaaaggttggcttttttttgttgggacggagggagtaccaattctaataacttgaaagatgactttgcaagagaattttaagtacgtgctgaaattgcgagggaactttaggaaatcaagacgaagtaaaattctgtacaaaaagtttgccatttaggattcttcaacaaaaaaaaagtcctttgaaatttaaactgaaactatcagtgagctctcttgtatgcacacttgcacagaaattatgcagaaaacaaaatcagccttggcattataaaggcatattgttgctaagcaaccagcataatctgttagtctaaacaaccataaaagtaatatttagcttagaacataaaaaaatacttccatttctaatacattgtcagttaaactattgttttagttttgttgggggagaaaatatacaaatgacgctaaggacatgtacaatggatgccaataatggtctcttagcgttgctaattaggaaaacttattgacatggaagaaagagaaagagaagagataaaaaatcattattatgcataacacggtgaacaacgactattaatcactataatatagaaatatggttgcttgaggataaaaaaaggaaatatttttaccatagggaatattttttgagttagtgattagagtttttgtcgtctcaacaattgtaaagacatgatctctaaataatcttgtattatttaagagaccatactcgtctctatcatcgaacatgccctagtgcccctagctcacacaacgagattcacgtattctttttcatcctactaataataggcttgtgtattgtaacatttcagaaaatagattgacaacttattagcatatgtaggttactgtagcacttatagctaattatggactaattatgcttaaaagatttgtctcgccattttcatgcaaactatgcaattagttttttcaattatctatatttaatactccatgtatatgtccaaaaattcgatgtgatgtttttaggaaaaaaaaatttgaaaactaattgccctagtaggttcactggcattctcattatggacagaacggtgcatatatagctcggccggcattctcattctcattcaaatcctcctcaacacaggttttctcaccattctttttctttttaataatctgtgctaagtctctcattgttccttaatattaccttatcacaactactcgccaaaatacaagacgaaatcaagatatatatagagcatgcgtggggaaaaaacattgcgagaatatccgcttaggtttctttagtatgctttttttgtgttttcctttaccttgtttctttcaccttccttgttgacattgtaaatactttcttttctgcttaatattaatataacaccagcttagccttctgtttaaaacaaacgaacaccacgacaggatcaatgataaagtgctgccgttctgtgcttattagggcctagggcaccacccttagccactttgagcaagtggcattagtgccggtgccagttctcatgatgcttcgtatagaggtgcttgattagctagggaagaagcatcgtgcggaagataatttatttattatctctcttaaatataaccattattataatgataaagtatggtcaagtacatgaacacgtttgtcctctggctgaatataagttttattccctataccccaaaatattgtaatttttggttggatgagatatatcctaataatataaatctggataagagacatgttcagactcgtagtactatgatgtcctatctaaccaaaagttgatatattttggaacggatggagtacggtattttagtaaatttagacatttaacaatggagtgattttacaaatttttaagaaggtatcaaaaatatcatatcataccttccgtattagtagaaggtactaaaattgacattaaatttaggtatcttttaaaaactgtaaaattcctcttaactatgttccagcaaactttgccgaggtgcgtccagcctgcagccggctacgacagtacgaccttctcatttctcaatgactgcctagcttctccgacctcccgctcggacctccaacggctgagattaacctgggcagacacttgcctacagcgccaacgcgcaaacagcaaccactagcaaaccgtgtacattaccgaccaagcctctctccatccatttacgctcgatcgaacggcccaaatcggcgcattactagcacggcgccacggccacgcgcagcgcgtgtacgatgccacattgccacctcgccgctagctcgctctcgcggtctcgccctcccccgcgcggccgcgcctatataaatagagagctctcgcctcgtatgatcgtatcaaactcaaccatccttgctttggctgcgtagcgtgtagcgcgcgcgaacgaacgaacacaccaagctttgctctgcttttcctctgtccaaaacagccggccatggtggtgcttgccaagggcgagctcgagcagatagccctgccggcggcgcacccgccgccagccgacgtgcgcgcgatcgacctgtccgccacgggtcccgcccgcgcggcggaggcgcgcgcgctggtggcggcgtgcgaggagcaggggttcttccgggtgacgggccacggcgtgccgccggggctggtgcgcgccgcggaggccgccgcggcgcggttcttcgcgctgccgcagcccgacaaggaggccgccgcaggggcgccgctcgggtacgccagcaagcggatcggcagcgccggcgacctcggctggatcgagtacctgctactttgcctcgcccccgccgccgccgccgcggcattgccgtgcgccgcgacgtcgcccacgcctccttgccccttacggtaaataccgatctttccaaacgcagcagcagcagcgccctactgctactatctcgcggtgttctagattatatcttttaagatttgatgaagtataattataaacgttttattatcgataaatacatcgtttatcataaaaaattaattagtcataaatatgagtatgccactgtaataaatctaaacggtgaatcgtattttggcacgccaccacgtgcggggtgcgtcggattttgaccgttccgggaaggaagcgagcgaaggcaccaggcggctggacaaagcggtgacatctacgtctgcgttgcgcgttgcaccggcgggttactgttgcttccgtgccgctgcctgcgcagacagatacatgcaccgttgctgcacgcatgtcacgtctctcctccgttcctttgggcattattaagtccagtcatcgttgaatcatcattttcttcgcatcactttattttcctttaacaaactttaataattggtccattggaacgttcgtgtcaaacagtagatggagggtccgatcctagtgagctgagctcggacaagtggagtacttgtttcgacagtacggacacatgatgtgtgcaacacagggtttattggggtgtagtgtagggactgatctgaagtcgttatacgcgcgcgcgagcagcaaaacggaatcatgctattattagttccattccattttgctgtgtagtagtataagcaagcgatagttttgtccaggaatctttctgatgttcgcatgcaccagcattggataccttaggacttgctgttcttcttttccccgtgtatttccatttggcacgtggaacattttacttgagttgaagttcacaggaacgtcagcaacattctaaaaagctcattaagtgtggtgtgtggtggagccatgtcacccatgtgcgcatgacttcactcattaccagtggtctaagagggtgtttgggagagacttatgcttttgtgaaagggacttcctattttccaaacacccctaaattatattaccaaaaaatacacacgtacgcatatacttaatttatcattggtttttatctttttaagtcttagagtgtaatagtgtagtgttgtgtgattgagaaaagattcgggattcaaattcatgacgtgggtatcgttctccattaattaattcgagtcacgcatatgttttcagactttcagcattactctttccgttccatataaagtaaatctagaaccgaatataatacattttaatactataaatctagacatatttatatttagattcgtcgtggatgtatcacctccaatcttaagttaattcttctagaggggcttttgatacattcataaataagcgttcatttattgtagtgttgcccatctggtaaattaatagtgagaaaatcgtgtggataagatcgcccatcgtggccgcgtgtcgcttcacaatatctcggggccgacgtacggagaccggcgccggcggctccgtctgacgctgccgttttgattcacgtgcgcgcacggtcgcatcgccgtacgtggcgcagctcgccacatcggtcgcatgcatggtggtgatcgaccaacaccaccgccggatcatgcatgatgcatctcccctgacctgcggatctgcccgtctctatccacaaaccttttacatcatcacgatccaagccgccgatcgaattcgttgcgcgattttggcttgatctctttgttggtttcttcttcagttgcgttctgcgtgaaccgcgatcggtggtttagtctggtttgtttattttgctcgcggtgcagggagcttctacgcgagtacagcgcggcggtgcggcgggtggcgtgcggcgtgctggagctgatggcggaggggctcggcgtcgggccggcggacgcgctggcgcggctggtggcgcgcgaggacagcgactccatcctcagggtgaaccactacccgccgcgccccgatcagctgggcggcggcggcgggccgaacctgacggggttcggcgagcacaccgacccgcagatcatctccgtgctccgctccaacggcgcccccgggctggagatctccctccgtgacggcgcctgggcgtccgtgccgcacgacggcgacggcgactcctttttcgtcaacgtcggcgacaccctccaggtacgtagtacacgtactatacttccgttgcttgcgtgcacacacaaaattaaaggtcaaaaagtttggtcacttctgctgtttcgcgtacgtgcccctgtcgatgtcgaatcgaccgttccatcgatctccaatccagtcgagcaaatcagggtgatcagtgcacgatcgactgcacggtgtactatgcgtcaagcaagcgccatcaacgcacggttacttgtatggttaactagcacaatcatctgcatgccatgcatatatagggcccagcctgcacgtgaaaacacgtacacttgcatgctagtacgtacgtgcctactactactactaatgggtccatgaacggtgatgagatcgatcggtcactgcaatttgccaactctcaagaaaaggccatgcaaattgttgcacatcacatcgattaattattgacttaattatttacatttctctgtatccctgaggttaaatttctttgtgctgctcgtgtgtttgcgctttgcaacccacccaggtgctaacgaacgggaggttcaggagcgtgaagcacagggtggtggtgaacagcgagaagtcgagggtgtccatggtcttcttcggcggcccgccgcccggcgagaggctggcgccgctgccggcgttattaggggacggcggccggagccggtacagggagttcacctggaaggagtacaagggcagcggctgcaagggccggctcgccgacgacaggctctgcagatttgagaactagtagtagcagtcatctgacttctatgtacgtttgtgtatattaattcgcaagtagtgattatcactgtggtttgcctctagcaatagccttgtacgtaaatttcagtatgtgttaatctgtttatatataagcttccagcaaaagttgcatgcatgtaagtgctctgtggacagtttagttttattacaattaaatgagctctcttaagatgatggttgctagtacactggagcccagaaataacttttaaggtgaggctttacgttgttgtggtttggattgtaatccaaactgttcttaaattttagagtttaattttaaaaataattataggtaattttgtttatttatcttattaggaaccatggaaatagagctggccaatggaagtgacagagagaaaacccttaaaaccaaattctaaatattcaatgtttcaaacatacaatcgaaagcacaacctaatactcccccatccacaattataaggtattttggtcatttatattttctccaccaatatataaattaaagcctgtacatagataaaaaaaatgtttaggatatgaagatgtgatcatctgtttcttggaaaggggtggttgctacttgccccctgtttccaatcttcaatctttgatgcagaaattaatttctttgcttttagaatgaagggaataagacgagtctcttagagcagatacaatagcagactataaaacagctataacacatatcgatgagataaaagaagagagagataagcagcgggctatagatttgtagccagctatatcacggactccaaaacacagtgtgtatatgatatgtgggaccagatattaatagtatagtatatatttataaataataattgtaattaattattaagttgactataaatgatttgaagctaatactcttatactgcaacctgcggcagcatagagcctaattaaggaatctctgtttagggttcaaaaatgcgaaaataaatcctctagtatcttgcatgattggagccggccggtctgcatttagaaaccacacaataaaccggttaacttcaaactaaatgtgagttttcggtaaactttatgtaaatttcacaggttttttatgaaaccatccttaggaattgatattcggtgaccagtcgcactttctataggagtactagtattttccgatgtttcatgtactacatactccctccgtcccaaaaaaaaaatacaaaccctgattttcgtgcccaacgtttgaccgtccgtcttatttgaaaaaattataaaaaaaattaaaaagacaagtcacgcataaaatattaatcatgttttatcatttaacaacaataaaaatacgtattataaaaaaatttcatataagacggacagttaaagttggacacggaaatcaaggtttgtttttttttggaaggagggagtagtcgcctgtgctgtttgaactgacagaaacaaccagcagcccatcacgagctgagcaggagctaggtgcaaatgtaccgtactaacttaacagtactgattaccgaacaactgatgcctgctcagccgctcagcaagagaattcatcgcattcatgttctgggtcaaacaactgaaatcaggtcactctgcattactagcacgtacactacctgtaggttgtggcccttcttcttctatcatcagcatttgcaacactgatgacaggacaaaaggccatagtatcaaggcaaacaagggaaggaatccgtacagttgtctactgcgttccacccgccatgacagtaatatgaagtacgaacccgactgccctctgcacaaccccgacatagaaatagtgaaacacatcacaatggcttgcaagttgcaagtaaatagagggtaccatttggccatatataaattatactagtaagaagctcggacgtcgtaacagatttatagaaatatatagaaaattctactccctccgtttcacaatgtaagtcattctagcatttcccacattcatattgatgtacggaggaagtagcttaaaatgatatgtatttcataaaaagtttttcttttcccatttgcatgcaaatatgcaaatagccaatttgtatgcacaaaaagaagcataagtagatatttgagttgcatacatggacctcttcccttttcgttcggatcgctcttccatggtgatcatggttcaccgtgaatacatgacgatcaactgatattttctcaggaagatagagtgttctaccatttcattactgtaagccacaaattggttaattaaccgcttttacacatcattagtaatgtccgtgtgttgcaattagacagaatctgatgaacttggttcaaat

SEQ ID NO: 20005 - DNA, 5790 bp, Oryza sativa
  unsure (1)..(5790): unsure at all n locations
cttattagccattacttcagtagaatcactacagatattaaacctacaactaataatgcactagtagcagtcgaaaatcaattagacggtcaacaggagcgcccatctggaagatcactttgaagtacaatagggacaaggtaaattctgatatgccaacttcagattcatgactagtgactacacaacttgttctctttctccctacaaatgatatgcatgtctgcaaggagactgcatctggctttttcagccagtggaacacataagctttgaaagatccagatgaaactgaatgagtgaagtgcatcactggcatttttccacttagggatgtttgtatccaagcaacagtaaaagccaatatgctatagccgaataagggattattcatggtttaggataagtatatttgagattagctcaacaagccagaatggcaaattacctgaacaaattgggagggaagcaacagacaatccagcaagtgctaaagcagcgacgccaccagccaagccatcaagatgatcaaccaatgtaactccagtgcccatggaaagagaacatattgcagccaaaacgagatagatttttcctatgaatgcaaggccaagaggaggaggaagaggaacaaggaatttccttcatgaacaaattcgaattagtaaagctgacaagtgaaaaaagtcaaaaacatcctaaagtattagtcaaaatggcaaagctatagaactatgacaacggtagtgacatgtatctttttgttacagaatgctggttatggagtttaagaccacatcaatgttggttatggaatttaaggccacatcaatgctggttatggaatttaaggccacatgactagcttggtgcactaaataggaaatgaaaatcagaagtggttagcaaagcacccttgcctctaaattaacatgtgaacacgatcactagtgactagctactagcatgagttgaaaatagatgttaaatcagtacatttggaagtaatgtaaggcacgaagtatctgtgcagtgttcctgtgagtacagggaggcagaaataatgttgtgcaccttattaactgaattgtacattgtactgcatcatgataatactttgatataggccattaagaaaggttactcctcatcaaaaaaaaaaaggcaatttaccacattgcctaaccgataaagcattaattcaaactgcagttagtttttcagtatatataagttgaagtaatgcttacgtgttatatggtgttgaaatatttgtagaacttaaccagatagataagtaaatcccagcaacaatctgcaaaagaactgtaagttgctttcaacataataagggaagagcatctcccgtcaaaaaaataagggaagagcatcctatcatctctcttgaaaaagcaccattcacctgaacaaataatctcatccaatgcggtattttacgattgcagtccatgacaagatttgaaatatcatcaagaaatccaaccattgcaaatatgagggttataatagctgctccattcactccagttgaggaaccaacctgtcttcttgcaacaaaaatgccaataggtacaaagaacaatcctcccattgctggtgttggctttctatagaatggagacataagcttccctctcctccggaaatgatgaatcttcatgttatcagcaactggtgcaaaaagaaatccagctaatgctgatagaactgatgatattaaaaaaggacgtgtcaagtaaaaagagtccagaggtagtctaacaatccgccaagaacaccagtcgacaaacaaaagtaatattgctaagaaagcaatcagtccaacattattcatcagcccttgttgagttctgggaattgatgtaaagagcttcagtcagaacctagcaaaaacacttgtaaaaagcgtgtgtttcttactactagtttgataacttttaagtgccatttaccaggaataacataaacagataatcctggaagatcataatgcatgctacaaatctacacgctgaatctctagtttttaagtattatcagaagatattattatcttgcctgctgtccctatgccctttctcaatcgtggcaaacctatgggcagcaactgtcatcgcaccctctacaccctcaaagcggctcttgctctttagaggtaactcaacatcactcgttggatttaacacgacctcctcatcgctccagtcgctctcacttgaatatacaacaacctctaaagggtcatccccatcagcgtgcaccagcgagaaatcacccagatcctacataaaaaccaacgctaatagtaaattaagctactccataagaatcaatgtatcaagaaactccataagaatcaatgttatctaaagaaaaataaaacagtacctcatcaaatgcagaggcaactggaaggacatcgcgcctgcttgtgggtctcgtggagatatttctgaattggaagtcctgaaaggataattaaatgacaatgcgattgccttagcttaaccatttcacacgcattggtttgtcaaacgaatcattctcgcgcaaactcaattagttatatacaaacatccatcataaagtcaccactcagaaatccaaggtgatactgtggatgatttctccaacaggcaacatcctaaccgtctcgacgagatcaaatagcatcgaaacgaatcacacaagcagcatcccaactcgccaacacatggataatcagacggggaaaaactagaagagaacactcatttcgtgccaatagtacacgtgctaaagcctcgatgaacatcagcgaggcggctattcccccgatgcggaaccctagcaggaggagaaggaacgaaggcgcccgcgagatctgggaactcacccggagagcggaggatcggcaggcgacggaagagggaagcacccgcggctgcggctgcggcggcggccggagagatcgccgcgaccgcaagcgcgggcgatggggagcggcacgcgcggccgcggcggcggaggaggagggagcggacggaggcgacgccatgggcgaggcggctcgtcggagaggagggggacaggagcgcacgacacggtcggagatcgcggcggctttttctagaccgcgacggcgacggcgacggcgttgcgccgatgcgttggtggggtgggtcggtgggtgtgggtggggtgctcgtggactcggtgcacgtagacaagcgagctagaccgactccggtgctcatggtgggtccatgactccggtgctcatggtgggtccacgggttgtgatttgtgacaggtattagacaggtggttactggttgacggtttattccttcacgtgtccaagtggacattttttttctcctgtgggcttggaatgggccaaaagagcagcatgttgggttccacggccagaacagtctaagcggctcgaacattgtctttgcgttgtttctgtcaataaaattttcagcttaattaacacaaggttgccaagttcgctttatggattagtatgataatataaaggattttagatggatgtgaccagattcattgtaatagaatgtattatatccacccaaaatcttttatattatgggacggagagagtatactataatttctacgagctgacacgtcatgactggaatgaatttctcctttactgatgtctggtgacgaaatccgtattgtgagtgggaagttactgcatctgtctaaaatattgtaatctagtagtagaatagaatttaacttattctaacaacgaatctagttagatggatcaaatctcatcccaaggttgtacttagtaacattttgaaatgactagtatctatgcaaatttaaaaaagaagccaatgttgatggacatggccctgtttaaatcccatcttaaaactttacaccctatcacatcaagcatttgaacactattaaatataggctaaaaaataactaattatacagattgcgactaacttgcgagacaaatcttttaatcctagttgctccatgatttgttattgtggtgctacattaaacatttgctgatgatagattaattaggcttaataaatttgtcttgtggtttactaacgtattttgcaattagattttttgttagtgcccgaacaccccatgcgataccctatataatatcctatgcgatacgccaaaactttacacccctacatttaaacaccccctaagtaagtgagaaagcacaaatcaatcacctctcctctcccaaccctctttctatgagctccatctttgttgaccaatgtggcaccggccatgcagcagtagcactatgtttaaatccctatttgcttcatgcacaacatgttgnnnnnnnnnnnnnnnnnnnnnnnnnnnaatcctgtcattgttaattggagtttgagagtgattgtttagtcttaattagattatctaatgttattagatcttgttgcaatgtacggaattttttttagtcatgaatatttcaatttggccagaattcagaatttagacatgactggtcaacagcatggatgaaacaatttcgcattagtgacctaatcgatcggagcacagaatcaagcttatcccttcctgaaagtagaactcaattcatttccagatgcttttctagaactcgggatcacaagctagccgagctgaaggcgacacacgaaacaaagtgatcaagtagatgcatgtgaagaaattacaagaaagcattggacacgaggtcgaccagatctctgagttaggcttcctgcaagccataagctcccaggaagtccgtgataaaggcagggaaaactgaagccaaagcaatctgtgtacatttcttcacgtcctcctgacaacaagatgtttctttttcactaattgtcacatccagttccatgatctctctggaccctgcaaagtcagaaacaagatgacacgtgaaatgatccaaattagccgtgagttcttcgtttgcagccaaaattaacaaacaaacctaagagcctggtgaatgtttagatagcttggggatcaatagatagttaatactgatgacaagctttcgctattctcaaaaaattaaccaaaaaaaatctcttttactgtcttgtacatgtttagatggctcgaggatcatacataatgatactgatggcaagctttcgctgttctcgaaaatggccagagagacatttaatagacttatcaactgatcagaagatgtacagtacagcttcactggcaaaatgcagtcattgaactaagagttgcaacttgcaatgacatttaaactcttcgtgctgtaatgtcgacatcttctcaaaatagtacaaaattataaaggaaaactggttaaataagcacttctgcaaacgagaatcaatgagataattcaatacccttggccatcccatatttacgaaaggtccaactggaatgaaccttcagatgccaggaggttttccagttaaattcacacgtaattttgcacctcaaaaagcatgctctatgcgactatgcagacagcaaagattatgaattatggatattaggagagaactgggatagttcggggtatacaaggagtccctggaaacaacatgcacgaactaatgaaaacagagtgatatttctgctcttcttgctataatatagaatcagctgaagctgggtccgtttcaggggggaaaaacagttcattttctataaaaaaaagttcaaaattttcttaatctccgattgctacaatgtagaactctgcaa

SEQ ID NO: 20006 - DNA, 11734 bp, Oryza sativa
acaatgccttatcaagcttgcaaagatagtgaggcaccttagattcctcatatccaggaggttgtcgcatatacacatcctcctcaagatatccatgtaaaaaggcattctggacatccaactgttgcaggctccagccctgtgaaacagctaaagacaaaacaagtctaatagttgttgccttaactacaggactgaaggtatcctcatagtcaatcccatatctctgtttaaaccccttagctaccaacctagccttatatctatctattataccatctgccttcctttttatcttataaacccacttacagtcaataacatttgttcccttctgtggtggaactagatgccaagttttattatgaacaagagcagcaaattctttatccatagctatcttccaatttttatcatgcagtgcttcttgtaaactagatggttcttcagtatcagttaagcaagcatatcttaccgtcccatctgtatatttcttgggtttgtgaattccatggtgcgctcgtgtgattggacctggaattggctgtgcttctggcgttgcctcggactcgactgcagagatggttggagtaggcgatccggtagctggcgtcggtgtcgggcccgcatcttgcagagacatggttggcccgaacgcatctgagtcgacgtggctcggcgtggttggtggagatgacgccgccgagccatgagccgccgcatccgcctcgggatccacctgacgcgacaccgagtcagctgaatcagcattaggatcgtcatcagcggtataatgttcgccggaactagccagatcgcagttctgcataaaatcatggttaattgatgtggattcgctatcattagctgcgctgttttctccgtttgctccagaattttgtcctgcactctcaccactggaatcagtaggattaggattattaattagaggttgatcatgtactactgcacccccgtgatcaagcataattgaaggaaggagattgggagtaagaagctggatttcagactgaagacgagcaccagcattggaatgcaactgagcaaaggggaaaacttgtacatcaaacacaacatcacgagagatatatacccgaccggcagcaatgtccaagcacttaaaccctttgtgcatcgtgctataccctaggaaagcacactgtttagatcggaaggcaagtttgcgtgtgttgtagggtctaagattcggccaacaggcacagccgaaggtacgaagcaggaagtagtcgggaggaagattgaataggcgctggagaggagtctcataagacagaactctggtaggggttcgatttatgaggtatgcagcggtggtaaacgcctcatcccagaatttgagtggcattgacgcatgagctagcaaggaaaggccaacttcgacgatatggtgatggttgcgctcaactgatccgttctgctggtaagcataggggcaggcgacatgatgttcaatgccaacattgttaaagaaactattgaggcgctgaaattcccctcccccaatctgtttgcatggttttaatcttcctatttaggagttgttcaacaaggttttggaaggcctaaaatttctcaaaaactttagatttgtgtttcagcaagtaaacccaagtgaacttgctaaagtcatcgataaaactaacataataacatttattgccaactgaactaggggcagggccccatacatctgagaaaataagctgcaaaggttctaaagaaatactaacagacttaggatagggtaattgatgacttttgctttgctggcaagcatcacaaatagactcacgactagaatccctagtgacatggagattatttgtgctaacaactcgatcgacaattgaaaaagaaggatgccctagacggctatgccaccgagacaaagacggcttgatggcgccatgggcctgcttatcagttggcaaggggtagaggccgctttcacacctgcctcgaagaagtggcctcctcgtgacctgatcctttaccaaaaagaaacaggggtgaagttcaacaaaggctctattatctctagcaaaacaatgggcagacacaagacttttataagcttcaaggacatgaagaatgttcttgagccagagatcacgagtgggagtgcaaatagcagtatgaccaacataatcaatgtccatacctgagccgctggcagcgtggacctggtcgttgccatggtacttgtcctttatcgccagcttctccatctcgctggtaatgtgatcagtggcggcactgtcaatataccagtttgtgtcgatgctataggagttgttggttgcagcagtgctcgcaaccttctcttctcctgtgaaagagggatcaaacctcttccaacacttggccaccacgtgaccaattttgccgcaaagctggcaagtgggcttgggtttgccgtcaccacggccgcgcctgaaaccgccgccgcgtccgccgttgttgccgccttgtcccctgccaccgcaccaccggcgggccctcctcgcgacacggtgttggcagaaggggaggagttgttctgaagcagatccaggcgtgtctcaaagccaacgagcaaagcatatagctcgctgactgagattgaatctgcacgcccagcaacggaggagacaaccgagttgtagtcgaagtcgaggccgacgaggatgtaggagacgagatcctcctcgtccagtggattcctgcagaagacatctcatctgctaaagctttcatcttacccacatattcagcgacagttttgttccctttcttggtggtggagagcgccatgcgggtgttgatgacgcgagctcgagactgcgacgcaaagaggctttcaatgcctcccagacttctgtggccttgccgagcgtggccacctgggtgaggacgtcgcgagagagcgacgacagcaagtaactcaggacttgttgttcctgcgcaacccattgcgcaagagcaggatttgccaccttctcagtggtcttcccatcgtccttggtgatgacgatggtggcttcaggcgccttgttgctcccgtcaaggaagcccgccatctgagcgccgcgcaacgtcgctaggacctgcgccttccagagcacgaagttgctcttcgtcagcttctcagagactgattgcccatggagagcaaatggaatggagctggacgaagatgccattgatttcggagagattggatgcgatggagggtggaggctctgataccatgtgcggtgaaacgatgcccttcctctaggctcgcttacgtgttatataggcacgggaaaaacccccggcgtggtgtttacatctcaacagaatacatccttatctcaagtgtttagttacaacaaactcctaagaagattcggttctatctatcctaatagaaccaatattatctaacatgccaaactactggggccggggttaccgtgccccagcggtaagcatggttaccgcatggtaaccgtggcaaaccgtaaaaagtttatcaaaattttaaattattttttaaatttatttaaatttaaggagctaggttaccgcggttttccttataccatactctctccgttaaaaaaaaactaaccgtggaggggtgctcctaggttggcttttttttggatggaggaagtactcccgcggtaagcgcggtaaccggtggtttgaggaaccctgatcatcataactagtcaaagaagcctattcgagcagaaatgatcgatatactccgacaatcctactcacactcgacactgtcactgtgcaagagacatggatttaacaccgggcaacgcttgagcttgagagacggctagtatgagctagctgagaagaccgatggtgtcatgtccgtcgtgcaacacgtaacagtgacgatagcaactggatgatcctctccatcgatcgctagtcacctatctatagctaggccagccatgggctagctgctgagaaacaaagtaaagtagggtcccgtgtctcccagtcgagttgatcgatcgatcggccattcctcgcaaatgtgtgtatacgatgccattcaagttcgcaaggcgcatcatgtctctgatccactgattatgcttacgcgatcgatcgctaattcgctagccaagccaccagggcgcgcacgcaccggccagccaccctcgcgggcgcggcatctccttggcgtcggcgtgcgtgcatgcaattacacgcaaggaagttaacgtacagaaaaaacacatcggtcgatcggtacgagccgggcgcatgtggtgaggccggcccggcgctcgtacgttcgctcgtcgggcgagactaccgtgagtgcgtgcgtgacagatcagcgcggccccgccctagctatagctagcccttttcacgcacggtacggctgagtcgacgttggatcgatcgatggtcccgggcgcgggccggcctaccggccggcacggcacggcagcggtgtccggtgtgtgggcgtgttagtacgtacggtactccgcctagctcgtgcatgcgcgcgcggcgctctctggttgctctgctttttgacgtacgggcgtgtgttttgcagtacacgagttgactacggcccgtgacgatgcgtcgatcgggtttggatgtccaagagaccattctgctcagtgcaaatgtcaggctcccaatgtgtcctctgccatcaatcaatcccaaatacaatcgatctttcgtgcccacctctcagcctctatttctagtaaaggtgagtttagctcacgctaaaattgaaagtatgattgaaattaaaacgatgtgacggaaaagttggaagtttatgtgtgtagaaaagttttgatgtgatgaaaagttgaaagtttgaagaaaaagtttggaactaaactcggcctaagatatcataacatccatcctaaccgcgaaaataaagagaagatgtgattatcatatagtgctcctttcgctgattggatttgacagcatcatgcttgttctacagcaaaggagggatttctatttgagcgagcaatgtgatgtttttttactttggaagaaggtcagccacacggaaaatcgttggtacagttgatctagaaatgtctgaatttggagggcgctaatgatgatgcacgaatgcacggtaatgttggagatttggatgcacaattctacagctaatcctgctgagttctcccttctagatttgtgcagatcaaacatattacagcccttgacctttccagtagaagcagcctttttagtccaggctgggctctggacggaccatagacaagtctaactttaatttcgggccaaaattgactaacgaagccccgctcaacaagcttaggtcttcgttgaaggaattagttttagatctttcatcttatcgtcaaatttaaatcttgttcttaaatcataatagcagatatagagtaccccggactattaaagtcagatcaatttacgtacataagttgttttgatggtggttttattccacgtggcattttagttatgaaaaataaattttaaagtggtggagcccatgtatcggtgacacatccctcctctcttctccctctctacttctctcactctccttgccatttcttgattccactatcgacaaccagccgagcggggtgagtgacgacaaagggtcctcgcgacatcggcgacggcccgaacggagctacccggcagcacgtggttagggtgggaaccattggggtacctgtggtcacgcatggtgaagaagtactagtctcgttagccgatcatcgtctgggcaatgatggggaaaggggccgggtagccagcggtgcatacgtagagatagggcaccaccaacttctcatccgtcgggtgggagtggaacctcggcaacagattcaacacctctcctagcgacagaacaatgtctcgacgatgagtatgggggttgggatgttggaggtgcacgtatagaggaagtgcgccgctagctcctcatctgttgagtggaagcggaacctcggcgacaggttcagctccgcccctgcgtcacgcccctgctgcgccacgctctcggctcccaacagaagtagccgaccagttgacaaatctaggcatcaagcagtggagaccaggcggagaggtcgggctaaggaggtagcagaggcagtccggctggatgaccacaggtggagctactccttgcaaggctccgcccgaatgtcgtagtgtttgactttgcaacaccattgggcattggttgccaacgttgccaggctgttcggtgtcaacgcggtgccatgttctctatctttgccactttcgaggacctcgcgtcagcgcctgtggatgggaaagctggagaggacggtgacttagggtgtgtttggttcacggtcaagttaggatgggatatggtgatccatattttgctggatatggtgatccaattttctgtttggtggagtggatatggcgatccagttttttgtttggttgtagggataaaggtgaatttggtgatccaattttctgtttggttggatggaggaggttggatttgtaggtgtggtcacctctcacttgagatagtgaatatacccccatcaaattaatgcataatgcattttataaattctctagcaattttacaccgctacctttccatattataaatacacatagaaaaaaaaagaaaaaagaaaaagaaaaaaagaaaaaagcattagatctggggctcctcctcctcactgccgccgccgccgcctcctcccgccggcggccgctgctcgcctcctcccgtcggccgtctcctcccgccggctgcaggcgccaccgcctcccgccgacgcggctctcagcgcccgcaccgtcgtcgttgccgttgtcgggtccgcatcgtcatcgtcaccggcaggcgtctccgagctcgcgcctcctcccgccggcggccgcctcctcccgctggccacctcctcccgccagccgccgcctcccgtcgacgcggctattgcctcccgcatcgtcgtcgtcgtcgggttcgcatcgtcgtcgtcgccagttcgcatcgtcgtctccgccaacgtctccgagctcgtcgctatcgtccctcttcccgttgccgcgccagcgccggccactgcgcccgtataacgcgccggcccactcgcccgggcgaccgcctccctccctcgctcgcccgggcgctcaggcggctggatccgggcaaatcggccggatccccccatccagcatctgggggaatattcctccccgagccgccccatcccacccctgcccagcaaccaaacacctacaaaaaaaataggcggccatgtcctatccacccatatccctccatccaaacacacccttagagaacctggcagcggttcttcctcctgtccgatggttctggcgagttcaaagtcaccttcacacccgaagtagggggcttgcttttgtcaatgttgtcgagctgttccctactctgtaggagcttctatggaagaacgacttgacgtctccatccatccgtgtggtttctcaccttatcgatgctcggtgcggccgagagatcgttgccgtcgacacctagtgtacattcagcagcgtgcatgactatggtgggatgcggtacaccgctgacagacctgctatcaccattggctagctctgtcccgaccaccgctagcatcgcgtggcccctccgccgttgcttgccccactacaggctgctgtcggagtgaaatcaagaaaaagcagatgaaggatacagagaaacaaagatgagggagaagagaggagagggacatgtcactgacatgtggggtccactacttcttaatttattttttctaactgaaatgccacataggtggccatttaggatgaaacaaccatcaaaaccactaatggacataaattgatatggttttaatagttcatggtactgcatatatggtattgcggtttaaggatacgatttaacatcaaaatgagagaactaaagtgaatttattacttagttaaatgggcagaaaacatggcatatctgtgtgtgggctaatattttatagtttaattatacgcggatggattgaaatgttattaagtcctttataatgtggtgaaaaagtgagtagcaatataaaacaaaaaaaatagtgagtagtctgtgcgacaaaatgtcaaagccaagtcggagagataccttcaaaatgtcaaaaccaagcccctgtgccacaacgccggagggatacaggttatattaccatgtgcgtgatgaatttgcagttaggtttgtctatcacgtgcataccgtggtggtgaaagtttgtcatggaatcacaatctatcgagtgaatgcatgctaccaaaaaagtaaatgggaaaataaaagaaaaagtaaagcaatatgccaccgctcaataatgagctttgttttgatttgtcatcgagagcatatgcacgctttttgggtttctccacgagactgggactccatcgtaaacaacatatttacaaacagaaaataatttataaataaaacttttataaacatattatttgtgttttaaaagcaaaggctaaaaaataactacgatgaaaaaatcttaaaaatcaactctaaatttaaactaaatttaaggtttaaaattcaaattttagcttataagtataaacataagccactgcacgatattcatagtgagtcacatgtagcatgaaagttttttgtatttttagagtgatgtcaatattcttcctcatctagcatataataagtactatctccattttttttaaaaaaaaataaagtgagatacaattagtaagaaagtaggtataactaaatgagggaatgcttgattgaatgggaaatgaaggtaggtgaaaaaattgataataaataatcatgtttgaacgagaagagaatgttgatgcagaaactgttatattttaagacaaattcagaaggctaaaagttattatattttaaaactgatggaataagagaaaggttatagtccattgagtgatattccagtcatatcctcttggtgtactactccgtcccaaaaaagacaaactctagccatgaacttggacatatacgtagctaggattgtttttttgtgaggggtagaacgtagaggcagttcatgccgatttgtacgagggatgagattaactattcccttttcttcatctactccctctgtcctataatataagggactttgggtagatgtgatacatcttagttcaatgaatctggacaaatcatgtatcatatccatctaaaatctcttatattatgggacggtgggagtagatgttaggggtgagaactgagaagtgatggtgctgagcaagaaatgatgatggttccaaaattcgagcctgagacaaacttagaaaatctcagcacctatctcagtctcaatgagggcagctagcaatattatgtggtgattttgatatatatatcagatgatgaaagatgactctattgacgaaagtgtatgacggtgttacaccaagagcttctatcccaatctgattttctctctcgtacatcatgtcaacacaagaggatttttaattaatttttaatcattttctgttgtttaaaagtagataggtgcatgcttggatcgcaaaacagttctttgtttcgccttgcacctgaagatcatttgacagaaacccaacataaccatggaagttctactaacttttggtgaacaaaaccaaaacagagcagcagctggctcagaacctgctcatccaatgctccttttgggtgtttagcgagttgatgccggtggtccccacgcaccactgtaaccaagtgcaattcccccatcagttcatgggcccccatacattaaactcggtccaaaaagttccaaagtccaaactcctaaccggggcccacgtccgagggtgctttgctttcgcgggcgtgacagcacggctcgaagtcactttccccactcacagaatcacaacttcccacccccaccacgccatatctccagccttcaatgaaccaattcaccgaagcgacgctctccgtacctccactgacatgcgggccatgcctcgtgtagggcccatatctcagtgggtgatatgactgggttcctgcgtggaaagcgtctcgctcgcccgagcggatacgattgcgcggctgcgccccccgctaacgacaagcggcaatctctttggccgcggcaccccgtcaccgacgggtggtcccggctccggaacggcgtgaggagaatgggcggagatcagaagtacggccacgtcagaacaagcagagaaaggcccccaggtcactgcgtggtggatcccaccgtggcgccaccctattgggccctactcttcagcgtgacgtggatggggcgcgtaatatgtgtttcggcggtagtagtaggttctagattatttaaggcccctcggctgctatctctatctatctacacgacgcgagagaaaaaaaaaatctggctcccgagaagaaaacaaaagggtaaaaagagcagagcaaaagctctcttcagttctccacgcccaagggcagaagagagggagggagagaagggggggagacgaaggaagcacgaaaccctaatcccgaggcagcgcgcctctccgatcaactccggcgtgagtcctctaaccgctctccatccccgatcgctcgctcgctcgcgccgctcggtgcttcaatccggctagggcttgcggccgtcgcaatgtggggggtttttccgtgcgatttttggtcaaattgcgggtggtgtttggtggtttttgtggactctggtgggtgggattagtgtttcgaactcgaagtgtacggggttgggattatactagggctttggtttaggcggaggttttggtggataatttctgaaaattttcagtggtttgggtagtttttgctggtaaatggcggctggttgttgcgattgctggtgggttttgatcacgatgaaatgtggcatgttaccatatggcgtttttggttggttggatttttattttgtgtattattgaaggggtcggttttaatggagaaatttcacgtttagcagtttagtcttatgtgaagtgactaatcgtcggttttgctttacccgtagtttgttgtctcccacaaaaaaattgcttcgatgttgtggggttttggtactatgacgtttgggttttagtggcagttatcacaaccattctgtgcgtatccttctacgtcagggtgggttttattgcgaaatgatggcgacttctcttaatttattagattaatttgttttatttgtaaaacatccactattaccggataagagagcattagattatataaattccgttcgaggtgtagttttgctgcatgcacctcgtggacttgcggatttgcatgtagaaccctgattaagagattgattagctttgtgcattgtttgttatatcattctcaccattatgtggtaatcaagaaatttgattaccattggatgggacatgttagtaattgcaacactcatggtcaaattgtcttcaccaacacatttataacatgctgtatatcaagatgcatggtaattttgtagctttgattatctttgctttggttgtctcgagttaagatactgcagccagtagggttttacctcccttcatagtt

SEQ ID NO: 20007 - DNA, 517 bp, Oryza sativa
tactagacctggatactgaagcctgttttctagcattccatgagatcaaattagaacctaggaagactgcaaaaccccctgtagaccttctgtcatctaaatatcctgcccagtcagcatcagagaaggcacttacaacactagaaggtgatttctcaattttgagaccaagtttaactgttccctgcaaatatcttagtattcttttaactgctgcccaatgaacaacaaaaggattctgtaggaactgacagaccttattgattgagaatgatatatctggtcttgtaagtgtcaagtattgtaaagctacaacaatactacgatactgacttgaatcatttactcctaacttttctccttcatgagccgacagcttctctacagtggagagtggagtacttacaggtttgcatccagtcatactgacttgcttaaggatctcatttgcatacctttcctgacttagcagcaagccatctccatctttctttacttctatacctagaaaataatg

SEQ ID NO: 20008 - DNA, 13348 bp, Oryza sativa
  unsure (1)..(13348): unsure at all n locations
ctggaagtggatcgaattctgtgtgctaacttaagagcaggagagaaaagcctaaaaaaatccagagtagtaatctcttttgcagatacgattaaacttgcgtgcaagaaacgatatctctcctgggattagttacattgttgtccaatttatgattcgtcgaaagaccattccagttagaactatagccacaggactgtgtttgaacagtaaaaactgctacctccggtaaagttgtgaattgcttgcggatctctaattcaccggtgacaattggttggtgatgtgtgtcaccgtttcagggagaattaaagttgacgaaaccgttcggcgggaggaggccggcgtgcagcctggagcttaatttctacttactccgtcccaagacaccaatctagattgacatttcaactagtaatatccagattcgttgttctagataacgtcaaattcttatctggattgatatttttagaacggttggagtacttctccgtccaaaactaaatttacttttcacatatctcacatactaaaaaaatatttctatatggttaaatcgtaataacctttttttattaaaatacttttatagtaattattattagaaataattttattttgagataaatagaataggtaaaaaagaatggtggggtcgccaagatatcggtatagatcggatcaagctcctctacctttaagtgtaggtgtctatgtaatcgacatgtgggtctgatgaagcatgtatccacctgtgagtgataaaggcacggcaccaataaaagcagaggatctcaatttgtataaatctatttgtcgtttgtcaattgtcaatttgtcattgacgaatttgctccgctacagggaccgtctgctcgctgctcgtcgtgaaatttgctcacatattttagctccacgtaagcattaaattcttcatttctcgtgtcactcagtcactatgctataaaatataaaataaaatactcaaatactatcaacaacatgcacaagatccgaccttccgtcccgtgaatccgtgatgaagaatcgaggatagtactatagtatgtgcatcatcttaaaaaaaatatatgagaggatacgtgtttgtggtttagcctgtcatgtaggggcctcaggtatctagttgtattgattatattattattacttcctcgtggttaaatgaaccgaataaatcaaagcggtatctgaattgatagcacgttgtactttagcctgctcgctctttggccgtttacgtacaccgcccatggttctatcaactctttagagccgggtatggatgcatgcccgtggatttaacaatcatgaagcaggagtaccatttacggagtagcatgttggtgtacaaacctatatatcaacataaatgaaggtacatcctgttttacaacttaaaacttggattaaggtcttaaaaaataaccttacacttcagtttttcattttgtttttttctcccttcccctgacataagccggtctggctgattgcgatgtgtaactacagctctcttcttctaatatattaacgtgtaatccttttgcgcgttcgcgaaaaaaataaccttacaatttaaatatggaactattcatcataaaacttttcaaaccgtttactttagacctaaactttcgaacctagaactatttatcactctttttaaagataacagaatatttcgtgaaccgatgaaaatatcgggcctcaacaaatggataataccaagactcttctctatcgaagacattgtagctctttgttttttttctttcgattacatggcagacacatacgcacatacataactacacacgccatactatactcatacacgaatatgtcttctaacacatgctctctaagccaagccattgtagttcaattctacacagatggataactacatttattcattagttatctactaaactttaatttgctagaataatagacaccgaggtatagatagaaatcaactttacgcatctacatagagatatagatagataatccctccttttttacatcgttgacttttcgatatatacttgacaatttgttatatttaaaaattatgtgtgataaacttgaagtcacgcttaaagtacttgtaataatcataacaaaataaataataataatatacttttgtttagaggaatggttaaacttatgtctgaaatatcaaattaccaaacatatataaataaacggaggaagtacatcaaatttattgaagtgttctggagtacgtgttaggccacctatggtatcggtcgatggagccgcctccacgtcgtaccatacgcacgcagcgcgcgggcgcgcgctcgcatcggtgctccccggcggccatacgccgcacacgtagacgcgcatacaaagctgcaaacctgcaacgcgcgtagtggcgcccggcgccgttcgatccacacatatctcgctctcgctcgcgcgcgcgggagcgtgaccgtgtcgcgtcgcgatcgcagcaccgcgcccgcgcccgcgcgcacgacggcgaggcagacgcgcgcgcgacgggagcgtgagcgcgggtacggtgtggctacgctttctagctagtctcgatcagtcgatcgatcgatcgcgatcgatctcccccaccgggccggtcgacggtcaggtacgtcaaggcgcgcggccgggcccggccggagctagctagctagccgaggtagacagaaccctccggtcatccggtgtgtgcgtggtccagggcgggaacgcgaaccttctccatcgccgcgggtccgacacccgcgtgggggcggcggtcgctgtcgttcgccgtgcgccggctgggtctgacctagctttggccggggccgcccctcgcccgccgatcgcgacgtacggcgtcccgtcggccgtcgacactgacccgcgcgcgctgatcgataatatcgatggatgtattggagggtagccttccggcagcgcgcggcgatcgatcgtttacgcagttcgggacggccttcgatcacgggcgtagtacgtaccatatatatccaggggtttaccgagccgtacacggtacactcgacatgaactagcttgcttgtccgtgagtcgcgatcgatcgatcgggcgagacaagtgacaagacgatcgatgtcgtagctggctagatatgcgcctccattagcggcccgggcatgcatgaatgtatcaatagcattggccccgttcgatatgaccatgtcacgatcgatcgacggtacagggcactgtaaccggcgagggctgattcgctgaaaagagagcgagcagtcgctgtgcccggtcgtcggccgccagttgtacaattcgatacttgatagccggtccccgtgaacgggtgaaccgcgggccgaccggcgcccgtccgatctatctaacttcggtcgatctatcgatctcagtacgccatccatcagatccatccgcctcgatttacggctgtgaccgtggggcgttgccatccatctgttgtgcaagacaatctggtagggtcgccctgcgtctcctctaatcattcgtccataattatgcacgtacgagtgcattttagtagagacgcatgcacttgttagtccagggtgtacgtgaattcaaatttcaatcccatggttctccgatgttgaattcaccaagtttctacttggttgtccaatattttaagacccatttgaaacacaggaccaagaaaatgattgagaaaacacataaatagaaaaaaaatgtacgaatagaataccatgcttattgaattcctatgggactttgaaacacaggaaagtctccaagctctcgtttgattagcacataggaaaaacgcagtaattgtaaacacatgaagagaaaaacataaggtgagacctcatgcttattttccttcaaaattgctctagcaagatctattccataggaactttaaggccctctttgaatcaaaggaaaaaccataggaattatagaggattttatcctatgaaaaataatcctatagagtcatttgaaacaaaggattgtttcctatcaattcctttgaaattcctatggaatgaaccttactagagcaatttggaggaaaataagcatgaggtctcacctcatgttttcctattcatgtgtctaaggttcctgcgttttttctgtgtgctaatcaaatgacagtttgaagactttcctgtattacaaaatcccataggaatccaataaatgtggcattcaactcctatattttttctattcctctgttttctcaatcctgcgattaaaaaatgccctaaaggaattgatatgtgatagtcctttgtttcgactctataggataaaatcatctataatttctatggtttttcctatgtttcaatggggtcttagcattttgaaattcactaagtacgttttcttttttgtgcagacttgttaaactcggtatctattaacttattaaaggaatagaaaaaggagcctccacgttcgctctcatggactagaaattctcatattaactagagaaaaagaaaaacagagtacatatagaaatacaatttagaaatagctgaaattcggaactaaaaaataaggaatattgaaagatgagactagagtccatatagaaatacattttataaataactgaaattcagaattaaaaaataaaaaaatattagaagaagagtatagagtccatatagaaatacaattagaaaataatagaaattcagaattaaaataaggaatattagaagtagagtatagagtccatatagaatttaaaactaactaaaattcggaataaacataataaaattaaaagtagagtttagagttcgtataaaaatacaatttacaaataactaaaattataaattaaaaaaagagagtctaaattcaatataggaatacaatttagaagtaactaaaattcgaaattaaaagttaaagaatattaaaagataagtttagagtccacatagaaatacaattagaaataataaaaaattaagaattaaaaataaataatattggaagaaaagcctagagtttatatagaaatacaatttacagataacgaaaatttggaattaaaaaaagaaatattgaaagacgagtctagagtccatataggaatataatttacaaacaaataacgaaaattcggaattaaaaataaataaatattgaaagacgagtctagagtccatataggaatataatttataaataactaaaatttaatattaaaaataattaataactaacacgtatataaaatacagtataaatattacacaatatattatacattagtagtttcgtaaagttagtacaaaatttagaattatgtatcattttaatatatttgaaaattatattaagaaaacatatatactattatatgagagaaaatataatgacactagccgtgtaatctgcgcgggccaccatgctaatttatttgaaaaaaacacactatcatggatatatagagcaactgagtaagcaagatatttatctatgtttgtatttaaaaatgtgacgccacaaataatgacaaaattattttgttatattcctgccttctctgcattatccgcgctagctgctctcctctagctcgctatcttatattctatgcccctgcatctcgatcggcgcatggcgtggcgcggtggcggaatatacgcacgcaccgctccggtcagtggccacggagcgtcgccccgtccagtggagatcaccacggaaagcgaacgccgatgacgacgacgcccgcgcgcgcatcaacatcacggcggtttcagtgcgccgtacccgtccatgcatgcagcgcgctgtagctagccacgacgtgacgcgctggtttagcgacacgtatactcgctctccaggacagctaatatgctctgctagctcacacgtttgtatctccgtcctgtcgatcgttggggatcacgtaagatcgaaacagtggcgacagcattgagcagtggcgtgaccgagtgaggtttgatgaaacctctccgcagctaccacatcagcggcatactagtactacttttgacgatgaaacctctttttgaaactgcgtcctcttttatggggaaaaaaagaagggaacaagggtatcatatagattgaataccgtatattgcagaattgcaagcaccaacgtaatttctagttcggtccatagcttcgataaacgagcgaacaccatctgaccatccgtgtatttcaggcacttctcgcacaaaaataaagtttcccacagttggcgcaatttaaccggagtctgagttaagccatgagttttccaatttttcacagaacacaccagcacggtaaaccttttcttagaaaaaaggttagggcgggcaaacgtccttcctatttttcacagaacgctccagcgactgggtttccccgcgcttacgccctcgttcagatgggtttccattccggcccatagacatgtcagccacaagcccataaccaaaacgagcctacaaagctaccaacaaatgctgcccacatgagccacgcccgcatggacgcatgtgggtaggccactctccgctgctttgcactctgtcgatctgtctttcggaaggcctgaattttgtgggcttggtgattacttgggcctaaatcatagcgattatttttggaaaagtccactttaggttcctcagataggggccgagcttcgaatcacattcttcaaccgcaatatcacccctcgacttctaaaaccatggcaaatttgagtccctctgctttgggcggttttggcttgtggtggtggcgtccacgtggtatgttgaccttattttgaggttgatgaatgctatcaaaacccgatccctatttgagagagagagagagagagggaaaaaaaagaaaagaaaagtgaacttattccttgttctttcgagacctgagatgtttagccacattggtggggaaactcttttaatctcatttcttatatgttactcatatagttataaaaaaaataacaagatagattaatttgatatatgtcactacacaaacatgtaaatttaaattttagttttgcaagtgaaaaaaatatgattgtgaaattaatttttttatgacatcaaatttaaacctggaagtttgggtgatatatcacatttacttttataaagaaacctttgatatgtgagatagtatatgtttgtttttcaattattttcataactatttacatgacacgacagacggaggggatatccctatccctccaaagagaatccatttcccactttggtgagatactgttcaatagataatgatatttgcagttgcacgctacagttttgaatattcttcgcatcaatgtaccaaatcattaggcatgtgatcagatcttcgcgcccgccctctccacgtctgcgttggcagcgaccgcggccgccgccttcgcatcgtccacgtgggcggcatcagcgtagacctcctcgtcgacgtcgtcgccggagcacgcgccgtgcgcgacgtcgtaggtggcgtgcagcccgacgagcacgtagtagagcagcatgatggcggtgcagacgccgaagcggatgaacgcctgcgcgccgagcgagcccatgaggaagaggttggtggcgatggacagcgacggcagccacggcacgagcggcacgccccacaccttgggcgcgcgcgccgccggcaccagaagctggatgccgagcgtgcccgccgcccacgccggcaccagcacggtgtacccaacccaccgctccggcgccgcgccccagtacgccgcgatgcccgccgacgagccgatgaccaccgatagcaacgccaccagccgcctcgcgtgcgtcctgctcgtcacgccccgcacgtagtacctgcgcgcgttacaggaagccattgttggttacagaaaactacgtgccgaacttgaacatgtgcaccgccgccgtaaggtgggagaacgtgcgtaccggcggacgaggagggcggtggccatcatcatgaagatgaagagcgtgctgacggagaggaggctggagagcacgtcgaggctggagaagaggccgatgcaggcgccggcggcggcgatgagcacggtggcgtgcaccggcgtgccggtcctggggtgcaccagcgcgaacaccggcgggatgatgtggctgcgcgcgatgtgcgtggtgtaccgagcctgaccgagcgccccgaccagcagcaccgtcgtcatccccttgagcgcgccgagcgccaccacgtactgcgcccaccgcatcccgacgttgctgaacgccaccgagtacgccgcgctccggtcgatcgccgtgtacggctgcatcatgctcagcaccagcgccatcacgcagtagatggccgtgatcaccgacatggagccgagaagcccgagagggatgtctctcgatgggttcttggtctcctccgccatggtcgcgatgttgtcgaacccgccgtaggcgaagtagacgatcgccgccgcgcggaacacgcccggcacgccgtgcggcatgaacggggtcaggttgctggtcttcgcgtggaggaagccggccacgatgacgaaggctatcacgaggacgtgcacggcggaggcgacccagttgacgcgggaggtgcccttggcgctcagaatggccagggtcgccgtgaccgcgatcaccaccaccgcgatggggtccagctcgttgtacccctcggcgagcgacgtctgtatgcgcagcgcgctcgccggcttgttgatgagcgacgcgaggtacgacgtccaggagcgcgccaccgcggccgtgccgatgatgctctcgaggatgaggttcgcggcggcgatgaaggccgccacgtcgccgagctcgacgcggaggtaggcgaaggagccgccggccacggggatctcgacggcgaactccgtgtagcagaacacggacagcatggcggagaggccggaggccacgtaggagagcacgatggccgggccggcgtggtcgtgcgcctcctggccggtgagcacgaagatcccggcaccgatgacggagccgaacccgaaccacgtgaggtcccaccacgtgaggcagcggcgcatctcgttctcgctgcggcggcgcagcgcgccgagctcgtcggcgtcggtggagcggccggcgaagcggtcgcggaaccgcgcgggcgtcgcggccagcgccgcgcggtacgcgccccagctcgcgaaggacggctccgggaagaaatcttccttctgccaccgccagtagctcctcgcctccgccgccggcttaccctcgtacggcttctccggcgtatcgacggccgccatatcttcgtgtggaggggatcgaccacagctttggtggtgaactggacaactggtggagtgtggtgagctgcaggcagctgcagccttggagatatccgagtgtggatttgtcactttgtgagacgatctcttttgtagtactccctccgtcccataatataagggattttaagtttttacttatatcgtttgaccacttgtcctatttaaatttttttaaaattattatttattttatttgtgacttactttattatctacagtatcttaagcacaatttttcgttttttatatttgcaaaaaaattttgaataagacgaatggtaaaatgttataagtaaaaaagccaaaatcccttatattatgggacatggagggagtagctttgttatctgatttttctttcttctttttcctttttctttttgtttgtgtgtgtgaagcggatgccgagcatttccggcaaaccggcgcctcggtgttacttatgattataagaattcgtttacatgacgtgtaacactttcagttcactaaaattcttcatctgctttaagtagcatggactacttatagatggacggagctcctctgatgcaaagttaaaggaacgtgggtcgctgataggtagggctcacctttaaaggcccacacgttagtgacgacgttcctctaatgtaaaactggagctttatcccttctagataggataaatgaagtcgtagcagtagtgccatgagcgggatgtactttcctaattttttttcccaaaaacgtcacaccaaatctttggacatatgtataggcattaaatataggtaaaatgaaaaactaattgtacagtttgtatgaaaatcgcgagacaaatcttttaagcctaattagtctatgattagctataaatgctacagtaacccacacgtgctaatggcggattaattaggcttaataaattcatctcgcggtttccaggcgagttatgaaattaaatttttcattcgtgtccgaaaaccccttccgacatccggtcaaacgtccaatgtgacacccaaaattttttttttcacgaactaaacaaggcatgcgtttctgtcatggccctaaaatccaaagtctgaagccccttgatttgtataaaaaaatacaaaaaatttgaaaaatttcaatcctgtggaagaaattgtttagtaagtctttgaaacaaggggattgaatccaatcaatttctttaaaaaaaaactacgaaataggcaatcctacatatattttataagtcatcagcacaatctaaaagtccatccctaaaattctacttttggataagtagttagattttcaggtgtcaaaaatttcctccatctaaggactaagtaaacattaactcctaaaaatgaaaattgagtaaacattaactcctaaaaatgaaaatggatctaacactacaccaacataattgtctcatctctccactgccttgccgtcgccgaagcaggccgctcggcatgcatctctccactgccttgccgtcgccgaagcaggccactcggcatgcatctctccactgccttgccgtcgcccaagcaggccgcccggcatgccgagcggctacgtggaaggcggcggcatggcagttccttgacagggaccttgctccctatgcgacggagggggaggagggcatcgggtctaggttcctgcctctagatctggcggtgtaggagatggtagggatgtgggcggctgaggcgtagcggtggtggttaggcccgcgcctggccgagcgggttggtgacagcagcggaggtggttgggacagtggcaggtagcggtgtggcatcggcggcagcatcccttcgagcggcgacgagtgtggcaaaggacggtgacggcctaagatccaacggaggtggttccgtatgcagcaacggccctaggtgcagcggcggcctgggagtttggacagaagagggtggcggcccatgacagcaatgacctgagtgctagtgcaaggatctcagcgaggaagaggcagatctcgtcgtcggcagccctaggtgcagcagaggcatgggagttcgggcgaaagaggactgcggtagaggcagcagtaggctaggagttcggaaggtgaaggaggatcccgacgacgacagtagccctatgggcggcagagtcctaagagtccagcgaagtggaatctgatcatgtcaactcgcgtctggtcggctagttttgactagatgacgaattgacgttggatgaaggcgggccaaccagcggcgcgtgacgccagtttacctgaagcggatgaagatgtcaccaatagaggttcgcagtgacggcacactaggggcagtgaggactagacgacttctactcgatgaatttagccgtttcaggagaggattccgagaagtagggatgtgtcgaggtcgtagtttttttttttgggggggtattatgttccactctttattgagatgtgagtctaggtaatcttgtatctttttggctgatatctttcgtagatatagaggtcagattaacgaaaatccattattaaaaaagaactgcactaacataatcggaggtcaactcctctcgtcgagcgtggcacgactgtgctacctccactgcgccaggtgcccacgtactcgcggagagcgagaaacaagacatgggattagggattctaatttttggacatctctataaagaaaatgttggagccattttttaaagaaaaacaaagtttttagtaccgggttttattttgggattctattggacatgctctaagcaagagctccaaactttgactatctctagttctgattccgttcttatgtttatccagctatctactcgaacaatcatttccttattatttttatattttacacttatatttctatcgtaattacgtgtttttattttatattttaatctgacgttttatcatttcaaacaagttggtcgtgcactggtgcctgtggtttgatggctgcggaaatttagcaactactccctccgtcccattttaaatgtagtcatggttttctgcgtccaactttgaccgtccgtcttatttgatatttttttaaaaaaaatttaaaacataaaccacgagtaaagtacttttcatgttttatcatctcataacaataaaaatactaattataaaaaaaattcaaatgagacagatgattaaagttggacgcgaaaatttatggtcacacttaaaacggggcggagagagtattattttggttggtgtctactagagtagcttctgtgcacggtacacccatgcacacatccatttccaattgcatcagcagtgtggtcaaaaaagaaaaatgcaatcagcaattcagcactacagggcacagacagctccacaagcgtgcaaacaaaacaagcatttgcggtagcctcgtccgatcgatgcggcgcgatagcgcacagggggatcgatggatggggacatgtggccgccaggcgaacaccgagccaggcaattggagattgaagatccgtgattgggtgcgatcnccggcctctgcatttgtggattccggaggcacattcgagtgtggggctggggcaacacgcggggcatgcgcaaaacggcgcaaggctccaaggctccggttcgccatcatcccagccgagcaggtcgcttcctctcgctctccctctccctgtccagtggatcaatggatcatgccgtgccgttgcgctcgcgtgttcctttggttggcctggctcgtgctgtgcggcgtgcgtgatttaggattggacctttttttttgttggggggtgtacagactacaggtagtgctcctgtataatccaaagtgattagttaggcggtgccaattcattttgttcagatcactctcttcatcgctcgcctactcataacaagtttaatagtctagacagctaccggcaataaaaaag

SEQ ID NO: 20009 - DNA, 1336 bp, Oryza sativa
ggctgatttcaatttcttagggcattagcaatgcgctattgaaatatgccaaacctcaccagccacatagaccaagaacaatataagctaaatatctcacaatgcatgccacttacaatgggtcccactaatatcaacttaacttttcatctcctctctttttctttccccaacaaccccaccaacagagaagccaagacgctcctctttttttttcccaccacatgagcggagctacattggcgtcgagctgcacgatggatgacagtggcggtgccgagcggcggatctctccgtcacaactccggaccaccacgagcccctctccgtcgcctccctctccctctcttgaagacggctgggtgtcgaagccgcggatgacggcagcgcgggaggctcctctccctcttaatcgtctcactcttctgctccggatcaacctcgagctgctctccctcgaccacctctcggtagcagcggcatggagccacggacgacggtggcgccgagcgacggatctcgggaggctcctctccctctccgtcacctccctcgccggctccagatcaacctcgagctgctctttctctcccccttcttggtagcggcagcgcactgagcgtcatggcagtgacgcggagccacgaatgacggcagcgacgcttctcccctctctcccccttcttcacctcttttcttgtgggcccaaacatgcgattccgacaacgagatatgtctagtggagatgaatctttgagttggctggataaggaagaacgacagctaggtgcactgtgaatggtcttattatacctactcccagtgactaagcacatactgacatacacgcagtcaaaacactgagggaatcttggaccggggctcgtctttttttcatgctctttaacatgatcttgattctgaaggggattggcccggtgataggccgcaaatcgccgtcggtggtagactgcggtggcagggagttcagacttcagacgacgacttcagacgacttgcgagtgcgtggctggcacgagtcctggtcgacgcttgacgtcaagaaatctcgcttgtggaattgtggtgctctcgacataggccctcaccctgttgatgcgcgtcggcttgtccgctaagaaaatccatccgtttcatattacaaatcgctttagtttttttaataaaactagcatggtgccccgcgcagattgtgtggctagcatcattatattttctctcatataatagcatatatgttttctcattatattattcaaatatattaaaatgacattataattttaaattttgcaataactttacgaaactacaa

SEQ ID NO: 20010 - DNA, 5957 bp, Oryza sativa
ccctctatatggactctatactctacttttaatattccttatttttaattcctaatttctattattccctaattgtatttttatatatggactctatactctacttctaatattccttatttttaattctgaatttcagttatttcctaattgtatttctatatggactctagtctcctcttctaatattccgtattttttaattccgaatttcaactatttttaaattgtatttctatgtgtactatagtatcctcttctaatattccttattttttaattctgaatttcagctatttctaaattgtatttttatacggactcaaaactctacttttaattttattatgtttattccgaattttagttagttttaaattcatatatggactctatactctacttataatattccttattttttaatttcgaatttatattttttcttaattgtatttctatatgtactctatactctacttctaatatttcttatttttaattccaaatttctattatttcctaattgtattttatatggactctatactctacttctaatattccttatttttaattccgaatttcagttattttctagttgtatttctatatggattctagtctcctcttctaatattccttattttttaattctgaatttcaactatttctaaattgtatttctatatgtagtcaactcttctaatattccttattttttaattccgaatttcaactatttctaaattgtatttctatatgtactctagtcttctcttctaatattccttattttttaattccgaatttcagctatttctaaattgtatttctatacggactctgctttttttctttttctccgattaatgtgagaatttctaggccatgagagcaaacgtggaggctcctttttctattcctttaataataatataatagatgtttcaaagtttaactacatttataaaaaaatataacaatatttttaacacaaaacaaatctactattgaaatatattcaatgttatatttaataaaataatttttgtatggtagatattgctattttttttataaatttggacaaatctaaaaaaattaaaacaactcgtaacataaaacaaatatggagttctaagaaaaaccggttgcaccataccttgacctcgaggctcaagagggtaccgacaaaaccggttccttccatccataggtgtagccccacaactacattgcaaatagcagtagttcatatattacacagtcaaatatattggggctttttttttctaaaacagacgtattaggatttgggagccacatttttcctgtgcttaccaaaattcagcaggaagggatgcattcgtgcatgtgtttgtttagatggatgggaaagtaggattcctagcccatccacatgatgggccaatttttttaaaacaaaaatcttaaacccatacttgctgcatacatgaaataataataattaaaaaatctatttccctctttttttctctctcccctcttgtgcacggtggctactgccaccattttccacttctatccccatctccagtgcttttccttggccacaaccaacataaagaaacgcaccacattctcttccatttccttcgccgccgaaatcgccgtcgtcggagtcaaaagggccaaagtgtttgtccttaatttttctcctatttccaaagtcattcggccaccaaagctcgtcgacaacacacacccaccgccccacggcaaccgccctgctcggccttgctttgccactgaccaggccacatgacacaatccacatcccgaccacctcaccccaaaccgccgctacaaggagctccactggactttcgtggtggtcaacggcagtcgcaccatgcatctggaagctcttcggagagctgccatcttacatggcaccactatttcagctgctcgctgtcaccaacttcaccatcgactctctagccgcctccttcattaccacaggttgtcatcgctacacgctccgcctgcgccaccgctgacgtgacgtggcgtgggttggggaacaccttgtagcgatgtcacgggcaaggtacaccggcggaggcacggtggccgagggcaccaagcttgaacgtattgagaagcaccctcctggcggcagtctcatcagttttgggcaaaatcgtggcggcagtgtctgatccccccactgtcaccgcaatgccggtgatgaggaagatggagaagagaagaggaagagggagaatgagagtgtgttgcatttttatttctttcccatgtatctaatatgtgggtctcaataatatgagtgtcaacgtgacaaatcagagcacagaacgtgaggaacccatttgggtaagtacgacacaaggacaaagtttgaaaacttgaaaaataatttttagaggtttggggacttgaatgatagaaccgaaaatgtttaaggatcgcccttatagataacatagagaatatagtggcgatggcggtctcagccagatctggacgcgggcagcagttggtgacgatagccacggtgtggtgacggtgccggcggcggcagttggcaacggcgacggcggtcgtggatgtggtggctgccgtgtcaactggcggcggcggcggcggaagacatggcgtcgagcagctagatgctcggtgttggaggacgacagcgcagcggcagtttgcggaggcggtggttggtgtcggtgacagcggcgacggcggctgcgactctggaggcggtggcgacgtcggcggcggggaaggagtcgggtgcgaggtggctgggtgttcggcagcagcggctgcggtggtggtgaccgtgtttgcggtcaccggaggcatggcggcctcggttgactagccgagggcgtgggagacggctgcatctggtcggcgcggcatcgttcggtggaggggtcggagaccggcttggcgtagagaagcgcagccgatggcagcggaggcgcgggcggcagagatggaggccggcttggcgcgagaggcgcggcagatggaggaaggccggattggcgtgagaggcgcgtccggtggaggaggccggcttggcgcagagaggcgcggccggcggtggaggaggcgatctaggtgagaggaggagctgccggtgggtgtggcgcggtcttcggcgcacgaaggctggccggcgggtgacgccggtgcaggggtaccacatgtcggcaaagcttgtgtggtggtggagcaatcggtgcatcagccgtggttttgatctcgtctgtgcccctttgtgtcacgccccgaactagccccgagcggaactaacccgtgacgctccaaattaacctattaatcgataccagtcccaggaaacagtgctggtatcacaggaagacagaatatcacagcaacagaggtctctttattatagagtaggagtacagtcatgttgggctgcggacagatcccgagctcacaactgcattacaaaaagggaagcggaagccaagacttggaccaaatatcacagacgcgacttgggaactaggccgaaaccctaaaactcatcgtagccgacctgctcctggaaaaactcctcgtcagcaggatccgcttcatcttcttcagcaacttgggggggggattatttatatagagcaagggtgagtacaggagtactcagcaagccatgggaaataagtgtttaatgtaggcttcaacgggatggcggttgtttttgcaataggttttatttaaactcttttcttcaacaactaagtgagtgcttctcaaacgacacggatgagacagtgcgtctcgtccggtcggagtatgtgcaaggtatcagtcttctgaattgatcaaggttggcgtccggccaacagctttcaaacggccacccgggcctggctgatcccatcagccgcagattttccaaacatcgaacccaaaccacatcagcaaatttcacaaagcagtagtcaaacaaaactacgctaggaatcacctcacatctgcctatgaccgtgggcacggctgttcgaacagtttaataacctctgcagagagggtacactttacccacacgacgttactaacccgggtcacccagcccgtgcagaacagccacgtctggcgactttgaggctttcacgacaaggcatttccaaagccgacacatgttcaccatatgccaacgagaggggtcccagaccaacaccagattaggtcccagaccatactgtgccaggaaacccgggggttctccccgacaccaccgcgttgaatccacatgtctcttggcatcatggctcccccgattagctaattactcagccaggggcgtcccattacacccatgtggtcgcacttgtcttatgttcggatgaaattccaaggaaacggtccttagtgcaagagcgggaaaccatacacccggtacgttccccggtccgcgattttggaaattcatttagttcgcaagcaccgacccaggtgtcgggttttccaagtcttttgtaaaacccaagttttacccaagatgtttctcagattttaagtttgaaggcgaccgtcgatactcgtacagagtgcacgattaccgaggcgcaactaggtggttacaagggaacatgatataacaattaacaatggaaggatcagatgcaacaagttaggtaggcccaccggtctgcctagcaaacggtgcaaacagattaagtgcaatcctatcaatgcataatattttgcaagcaatataattaagttcaaatataggctcaatatgttcaaaggtggcttgccttgctcgagatcttgagcttgatcctcgaattcctcgcactgcgggtcttcgggctccgaaactacacgcaaaacaggaaaactcaacaaacggcgaaaataaagtcctattattgacctctaggcgtgccattagatagatctcgagatttgaggagttttggaagttgaacggagtcaaacggacttacggttggaaagatattgaatttctaagattattggatttttgatctaaaggaaaaggatttatttaaatcctttttgaaaaagaaaagaaagaaaagaaggagggagggaaattagactttcctcgggcggctagggcgcggcccgagagaaaggggcggctcggccgaacttaacgggccggccggcccgagaaggcggcctaaaacatgcgcgcgggtggggaggagagagagccggtgggccgggtccatcccgcatggtctcgggtaggacccgcttgtcagcggctcggctcaccgtgagcgaggtgcacgcagggcgtgctagggtttggggaggggaggcgcggcgcgtgcgcgcggttcgcggaggacgcggtgcggcgggcccacgcacagcctcacggctcgtggtggaccgcgtgcgcgagtggggcggagggaagccgcggaccggggtcagcttgacccggtcgcggccgaggtggcgcggacgtggcgcctacgtggctgccacgcgggccggtgggaggtagatgacgacgtcggctggaacggacggcggacggcggtggcgagcggcggagcgaaccacggcgatacaggcgaaagcgagcacaccgggaggttgcacaggacgaggggagacgagccaacggctcggattcgccgggggatgctcgacggtggcggattgcggcggcggcaaccggcggcgagggaagggggaaacggcaacggcgcgatgggagaccgattcgggcgtgctagagcatctacgcgactccgggaatccgttgctagcgtcggattgggcggagctacgccgagcgaggccagcgacgagcgggcgctacggagcacgggcggcgacggcggcgagcacacagcgagcggcagcaacggtcggggcggcgccagcttgctacggggaggctactcgagcta

SEQ ID NO: 20011 - DNA, 13296 bp, Oryza sativa
acggcaatggcgcgggcgaaaaacggggaagattgggaggggaaaaaggaagggagggtgcctgggtttatagggcagcaatgtcggtttggaaactgaccttgggcggtcaagggagcgagccagcgctcggcggtcgcggcccaaacggcgacagggggggagaggatgacgccggcgggaggctaaagggaaaaagggggaaagaaagggtgcttgcccccttgccactttggggaaaaggaggagggagagagggcgatgcagcagagggggggagctctgcctccgtcccttggaagcacgcgcgaggagaggcggggccgagtcgatgacgacggcgatgacggcgggggcggtttggaacggagcggcgacacgggcggcaggcgcggacaggcgcggcagaggctaacggcggcagcgaccaggcggtcggccaccacggcgtgcgcgcgcgcgggcggcgcggcgatttgggcggcgtcggcgggaatgacagcgagagcggagagggagggctcggcgtggctcacgggcagagcggggagagagagagagggagagagagagatggggagggagggagagatgggccgagaggaattcggcccatcgaacctgagggaggcaaaatagacttttgcggagggatttgatttgggacggatcgagattcgggattgaacttgacgatagattggggatttgagatccggaatggcacggagactgactacgagcgaggaaacaattttcgcaattaaggtttttaagagatagttttcccgctaggcgccacgacggaacgggcgctacactttattggcctagtggcggtcggtcacgcctagcggcggctgatccggtgctagccttctcctagacgtgtgggttggcgatgtcggcgtgtgggtggtggtatattttttcctttttctggttacgactctccagagttgtaatcttgtaattttttcctgctctatcaatagaacttcgcaccgtcttgtgcgagtcgttaaaaaaaataaagaatatagaaagtactactagtgtagcgctgggactgcaagcacccgcaatggtaaagcaaggtgttttctataaaatatgtacatctcagcaatagactagattaatagtaaaccacctcaatagtatgtctatatgggtatctatagctctctaattcattgcctcgtttttctctatagactatctccgggttagtagatagttttgttctctctctttatttaatctcttccatgtaggaaaatatactgacatggatctcttatagagagagcctatagataaccattgtgggtgcccttactgtcaggttattgggagattcaaagactataaatcgctcttaaatagcatgttcaagcattacgccttcaaagagaatgccaacaagattagattaagctcgaaaaataaaatacttaatccatatttttatcgtacaatatactgatctatcatcaaatacaacaaaaaaaggactacaactctacaagttggaagtacttgtcaccaacttcttcagagttcagagttcagaggccgcatcagttatgcgcctatgcggcgaagcaggcgaaccctggtgcaacgatcgtgccgccgccggccacggcgtcgcagccaccacggtaggaggccacgctggagtcgaggacgtcgctgcacgacaacgcgtcgtcaagtagcggtggcaccggctggtcgggatgccagtacagcgccctgaggaacgcgtcgctcttgcggagctccctccaccggcgcctcatggcgcgcgaggtgcggcagtgggcggccctgctgatgtccttccaccggtcgccgccgccgccgcggaggcggaggtgggcgagctcggcgtcgtcgtcggcggtgaaggggcggtggtagacgtcgcgggcgaggtggtcccgccacctgtcgcggcactgcttgggcgagcggcgccgctccctcggctgcatctcctcggcgacgcggcgccagtggcggaagccgtaccccctggcgaggcgctccaggcacgcgtcctcttcgggcgtccacgccggcgagagcctaatgcggaggatgatcctcatcgcgctcgacggggtcgccgccacctccgttgtagaagagaaatcagacgaagaagtttccatgcctaggtgaactgacgcaaagcgcgtaggcgcgctcacaaatcacacaatctcttctgatctgacaggggtgtgtacgcacgctggcgcagccgctaattatgtagatggcatgcgtgcgttctccgattcgaagtcgatcttacttcgcttccatttcgaggaagaaatttaactcggactagtccatcataatactaccccgccgtccgccaatgcaaactcgatccgattagcataaggagtgtatggcagattggcaatcgcgtatggattgtttcgctttgttcgtcgagctccacgcgcatcttccgcgcgccgcggagaagcccgacgccacacagtagttctccggcgtcgggccgtctcacccgtgacgctccgccgccattagttgcgcacttgcgcttcctcgagctaatccgctagtaccactgaaaatttcgagaggaccgatagatccgaaatttcgaaaaactacgtaaatttcgggaaacattgaacacaaggacgggacaaaaaaagcggctcacagctgacattgcgtcacctcggagtggtatttgaagctttgagctgatacggcgggctgaggccgagcgcggtctaagtgagagggtagggccgatagggccgataggttgaggcgtgcatgatatatcggagaattcgattccgtctgccgagtggcttaaggtttgttcgggattgaaaataattaattacaaacctcaatagatgtgaaaatattttccttcaaatcccccgtcaattctcttgtgagagtgacgaacaagatagctcctctccacaacggctactttataaaatgggaatgctaggggacgggataccgtcccccaacaggatagctcctctccacaacgcgattcttatccatacactcactcgccgccgtcgccgtcccttgccgccaccgccgccgccgccgccgcgcccatcccccaccgccgccgtcgctgtcccccgtcaccgccgccgcgcacatcccccaccaccgccgcgcctgtcctccgttaccgccgccgtcgccacgcccgtcctctgccgccgccgtcgccgtcctcgtctacaagggatggctacagggggcgaccgcgcgtgtcggggtgctcctcccacaacgagatgcccagctatatctagtaagaatcacctgatacctggtaggtatcatccgatacctcgcaagtatcacgtgatacatggtagaaatcgtctgataccttgcgagtatcacgtgatacgtggtagaaatcgtctgatacacggcaggtatcgcatgatacctcgtgagtatcacgcgatacgtggttgaaatcatatgataccttgcgagtatcacgcgatacgtggtagaaaatcgtatgatacctgataagtatcacatgatacttgtagttatcacctgaaacgtgtgtagaatcgtctgatacctgatatgtatcacacctgatacctactcgggatcatcctgttgtgtagaatcgtctgatacctgataggtatcacacctgatacctactcgggatcatcccgtttgaaaacaggattccgttatatagcagtccccttataaaatcatctcagtcaatctatatatgtagcaccagtgcaccacctgatccaactgatcttgtcctaacctagtttccatgtgtatcttttacattagtaaagacaaatggggttccgtaggaattaatgttcaactttgatcaaccttacttagtcacatgctttattttttttttaaaaaaaagaaggtttaaaataggggcgatctaatctaaaaggagtgattttacagtttgggagatatcatattttctagtgtaaaatatgatacctctcggtatcttgggtactagaagctacggaaattcgcaataaattttttggtacctctttctccatcttcaatataattcagtgcttgcctaattcctatcatgacttcggctgtgtttttcacaccaaaaatgaaagtttgattgaaattggaacgatgtgacggaaaagttagaagtttgtgtgtgtaggaaagttttgatgtgatggaaaaattaaaaaattgaagaaaaaatttgcaactaaacacggccttcctgaaggatcgagctcaaacgaattgatgtgagactggaataatcgatttgaatgaggaagagtattccttttcctttgacatgaggaggtatcatagatactagcagtctagcactacaaaatgtggcatgattccagcagtgaatagatactagcagtctagcactctactagtagtagacggtagtacaaccggaataacgctttgcttgtagagggagcaactcatatgttctaatacacattcttatttggctatatcaccatgagcccatgagtgtaaccaagcttagagcctatgttaaattgctaatcaacttgagtaaaaaagaagagcgcgttaggaaccggatgccttgcttgcgatagcaaaagacgtcaagcaccatgcatgcagaagcatggtagcacaagctctgaagctcccaataaaaagcaaaattgagatatgagaatgattgcaacctggcttcaccagacaccaagctgaccgatcagaccagcggatggcaatggcatcctcgttgatccgcgcattggattgcacggctacgcccggaacacgtggtgctccagctccggtcgccccgcgtcgccgcgtcgctcgtgttcgactggcgccgcggtgccagtggaggcctctcaccgcgcgtgcacaggcggcggcgacgcagccggacccggaacaccaggcgcccgcgaatggggggccgtcggcgtttcccacgaccgcgctgaaggtgggcgccggcgtggcgctggcgctggctctgggtggcgcgtcgtggagggcgcgcggcgggagcgccggcccggtcctcatgcaacccgccgcggtgtgctccctcaacgtcgtcacggacagcgcgtcacgcgccaccgcggaacggagcgccgccgccgcggccaccatgaggacgagcgtggacgcgctctccgactcgctgttccggcgcgaggacgcgcccagggaccgcgccacactgatggacctcgtctttgagcaagtcaccaaggaggtcttcctgatccatcatcccgatccatttcttgattcttcatttctcatctcaatcttagctagatcaagaaaatgtgcttctaccaactgcgtgtctcttgtcatgcgcagcaaatcggcgacaggggaaagctgacgagcttgctgcagaaggagtggtcggcgtcgcgcgattccgagaggaagcttgacctgggcttgctgctcactgacgtactgatcaaccaggtacatttctatgatccagtattaactcagtttaagcaaagtaatccggattcactcttaaaactttcttgtctcaactctaacttccaagctctgtaagtgatctgaatcacctagttagtagtgatactatgtttaatcctgtagagagaatggcagagggcaaaagaagtttgtcagcaattgactggccgataccaacgtgactcgaggccttacctgcacttggtaatgatctaaccaacttattagtcaagttttgttttggttatctgcaaagcttgtgcctaatgatgcttttcttcaggctgtcatcaacatgatgatggcagtggagaccatgctttctcctgaaacagccaatagtgacgacattgagaagatgtcaaagaatgccatggacgcgtggaaggaattcaagaccaagtatgagcatgccaaggggtcaactgattccagcacctgactgaccagtattatgcttgctttcagacaaatctttctgttgagtgctgacaactcttgtgatgaatctgtcttacccacttagttgcttgtgaagtttgccccaatctttgtgacgtaaatgttctcgattctcattatgcatacctattttacaacctacaattatttaccaacatttctagttgtgtttatcccttttgtatatttacaccaatgcaatcttcagaagaaaaaaaaaatgaaacaacgaactgacaaaatttccaaagactttattcagtagtctccccccacatcttcagaaggtatctctcgcagctgctccctgcgatgtctcccgaggatgccatcctggtgatgccctgcttccctcctgccccgccattgccacgctttaggttgtgccggtactcgacggcgatttgctcgaacacctcgacgtcgaacatgttcatgatcaccttggggctcatctggtcccggacataggcgaaggcgagctggtcgcgcgggttgaacgcctccagctcgttgaaaaggaggcaggagaagagatcactggcgaggccgtgcctcctgatgatgatcgccgtgtccggcacatctgcagcacaacaaaatctcgtgatcccgtatccctgatctttgcttggatggcgttacattgttcgtgagttgtgacacactatcatatcatgtgtcagcaatgttgacatgctggctaatcgcattttgttcatgttattggcattgttcagatgtcagtttcagtagcttcgtacgatagctgtttgtttgtttgatcaagcaagaaaccaaaaactgaaggcgagaaagcaaattctttctgtgctatattgcaatacctgacggatatggaagcttgataggggaccatggctgcaggccgttccggcagtacgtctccatctgctccctgatggaatccacgtcgccccacttgcgccaccgcgccgtcgcgatcgcctcctccatggtgtggaggttgaacgggtgcttggagaccgccatgtccgcacccttcccggcgacgaacgagtgcaccagcagcagcgggtcgacggtgagctgcatcttggcgtccacccagacgctgaacctcgcgttcgggaacagcctgtgcaggaggtacttcacgatcacgcaattcatggccgggttctcgtaggggagccggtggtcgccgccggcgccggcgacaagcctcgccacgcgccacgcaccgatcgtgccggcctcgccgcgctcgccggctaggatgttgtggctcgcgaggactctgtgggtggcatcgtcgatgaacatgaagaagcacaccgtccggagcgtctcggagccgagccccttgggctgccggatcttgtcgtggtcgttgaagatcgccgacgccaccaccacgccattgcacttctccatggccaatctgtctaaaaccaacaacgtcttcacaaagatgataacatcgaagtgtgtagcagtgtttcttgattattgcaccacaaaaggcttgagttgcatatacgcaaaagaacacataaaaacatctggcttgcaactcaagggattataatgagttttcagctcaatgatagtcatgctcacgtgccacaagaattttctcctctatgaaaaatgcgaattggccaaagaaatcaccagattctctgacggggaattccttgaagaacccacatggaatttcaactgcgctatcagtgtggttgaagaaggatctccgctcaacggtggacaaatttcccgcgaacgagttcctcctcccattctggtaccgcaatgctggttttgcataaggagacgccgagaggttgcggcagaatttgttgatctcttctaagaccgtcttatagtctgttccaagagtaaaatatagcacttgtgaatttcttatggcattcaaattccagaaattcaaaaaactgatcagaaaacactgaacgaaaacaagaaaaacagagctgagaaacaggatcgtccgcatttgttgcgtttgcatgcgaccatggatcatgaaaagagaagcagagacatccgttacgtccttcccggacggagagggatcgacctgagaagacggcggggtcggagcagagcgcgcgcgtggcggggatcgcgtgcttgtgctcgccgtactcgcgcgggtactcgaacagcgccgccgacgccgccgacgaaggagcggaggaacggaaggggaggaagacgaggcagcgcgaggcggcggaggccgggtcggagaaggagacgtagagcgcgagcgggagcgtggtgaggaggtagagcagggagaggcagagcagcttcgactgcatcaccggcgggctccgcacccgcacccgcatccgcacccaccccatttcgccgtctccacgtccaccgcggccgcggctgcttccccgcacgtcgcggttgtgtttttgaccgagcttgatcgatccgtctctccccagtgggcgcgcgggcgcgcggcgtcgcactcgcgtggcggtttcggactttcggttaggacaatgtgggcgattgggcttgtggctcagtggctcatctcacctcgctctggatcgagcagggtacgaagtacacagactgagtgtggctgtgtggggccacatgtcagtgtcagttgcccggcccgatcgacgacttttcggttgtaggtaaaactggttcaggttcagttgagttgacaatcatctatgaggataaagaatcgattagagggcaaaaaactctgaatattcatcactgctttatcgatcggcaacgcgtgtatcgtgtaaggtctttttcattcccgaaactacgggtggactctcgactgtatgtgatcgcgtttgtaattggaaatttaccatgtggccacactatcgacctggttgacctgctactgcctcgaatatcggttgcatacttgcatttttgaatcatggctgaagcaactaatgaactgcatttcctgcttaattaatcagatactccggtatgcacttggaagtgtcacagaaaattagtttattttctgcaagaataggaaaaagaaaaatctttcttcgaaacagagctgaaaaggtatatatattgatgttccccgttaaatcatgcgttaaaatagttgactaaacagaacttttattgttgttaatctcgatacgcacgagtcacaactcaactacatactttacagtgcaaaaaaacagttcactcgagcagtttagggctttaagatgccattattcttccgaccaggagcttgaagattacactagctgtgcgatcgagtctactactccggtgaacatttgaagatttggaattgccgcgcgctcatcgcgttacatgtcggatgcatccttcgcgtcgaagagcatccatatctcgttgaccctgccgctgaactcgaacggcgagttgtactgcgccaccgtgtacgacgacgtcgggtcggccctgcgcccgtcggacacggcggcggcccacctggtcccctgcaggctggcgtcgagcagcgcggcctgctcgccgacgtcggagtcggccacgaagccgccgaagcggcgcacagcggcgtacctggccccggcccacctctgcacgtgcagcccctccgccggcggcgggtccggctggttcttcgccggcacgtagaagctgaccacgaaggaggagacgcagaacggcccgtcgctcggcgccacctgcgtcagcaccggcgccgtcatctcgatcgtctcgttgtacgcgttcttcccctggatgtagttgaacaacctggcccatcaaagcccagggttatctcaagcccaaacatttttgtggcccatgtaaagcccaatagaaaaaagaaagcttcactggtactactagcctgtgatgaagcttttccatggcgagaagagggagtgtgatgagtactgacgacttactggaggaagccggtgcgggtggcggcgacgaaggagatgtcctcgatgggggcggtggaagcccacatggcgtcgctgtaccgccggatctcgaacccgttggcgctgtccaccacctcgtacgacgggcactcgatgcgctcgcacgacggcggcacggccgcggaggcgacagcggcggcggcgaggagtagtagcattaggccgctccggcgagccatggtggcgggtgcggggatgcgtgcggcggagttggggaggtgggattgcagtggggctcgggtgcgtgcggttggggatcgatcgatcgatcgggttggataaatacggccgcgctttgcgtttgctcggcgcaggtgcctccacgtcgccaatgttcgttcgtacgttggagacgcacggggaagagggaagcaggcgcaagaagcgtcgttttggtggtttctgagattttccttgccaaaattagtgacagtcgcgtcggcgcgtgtgctgtattcacctcgttttatattcttgtgtctgaaactctgagggttgttttggtctgatgtcaaaacttgtcctaccaaccagtagtcaatttaaatagtactttgtagatgttttgatgccaatatttactatagctaatacaatttatatagttcaactctaccaaaacattggtagtggtgctaccaatggtttggtagtgcatcaaaccaaatcagccctaaatgccgattcatatttgctcttctccattgtcaagtctgaactgagaccttcacctcatccgactttgttgttgagttggttgctcaactttgactgattgagtaatgagcagttacttcaagtaaaagatagagacaaaatttttcttgcatgagtaaatttcagaaaactattgattcaacgtaaaattattataaaattatatatttaaagttaagtatcgcaaaactatatatttaatattgaaattattataaaactacatattttagagtttaaatctctagtgatattgttccggttaaagctataaacgttataatttgatagatttactacttaatctttaatttttatgatattccatgttaatttgtagtaagaaatttcacggtaatattatatctttttaccacaccttcaatctttagtttgaacgaagtgtaatgttgtgaaatttaattttcttgaattcattgtttcttgaaggaaaaaaaatagtgcttacgaggaattaattcctcgcaaccgtgtcacccaacttgccgaaaggatcaattctacaacgaagccctgccatcctaatcgtggtttcgaccccaaaacatagtagtatcttttttccgtcaaaaaaatttgtagttattgctttcattcaaatgtactcgtcagtttcattttataagtcgtttgactttttttaatagtcaagtttaattaagtttatagaaaaatatattagtattttcaacgcaaaacaaatatattatcaatgataatatatttaatgttagatgttgctaaattgttttataaacctaatcaaacttataatatgaaacgggtaatatggaatttcatccgcaacatttactgggtaaaatagcacgtgcagtatcatacacttcaatgtggttggggcttgcttcatttactgggattcgattttccgtacaaattaagtactccttctgtcccaaaataagtgcagttttagcactattcatatccaacgacagcactgttcatatccaacgtttgaccgttcgtcttatttgaaaaaagattatgattattatttttattgttattagatgataaaacatgataatactttatgtgtgactaatttttttaatattttttataaattttttaaataaaacggatggtcaaaacgctgagcatgcatatctatgtctacacttattttgggacggagttagtaagataggagtagtagtagtagtagtacggtctatgcatggtgatggtcatggtagcatggtacacgaacaatcatcaaattaagtaagatcacaggacatcattaatcatgttccctacagtacaaatttatgccaaactcttcgcggctaaaagggtcacagtccgttcaatccgtctatttagccataaatttctcaccagcaacatgtttaaatacgacagctactcttgtctgcgaatacaactgtagatggagtaggaattataattacggccaagagaagattttcaagtctaaaatcatgaacatcgttcaggtagtcatctacttctcgtgatgctactgtaaggttcacaagattaatccccgcttgataaaacagacaaaaaaataggataggtgacacacgagtataacgctctcggtgaaaaaccggagcagagtagtagtagtaatacagcagccgtgattttatttagaagactaagtatatcaattaagagggtagttaaccttaaaccccgcaagaaacccgcgtcaccctcacttggccttgccgttgacggcggtctccttgccgttggccgctgctgcggcggcggggaccttgcccttgccatcgtcctccttggcgaaggcgtcgacggggtaggtcctcccgaggccggtgggggtcttgaaggtgatcttggaggcgtcgtccttgtcgatgaacatgtcggagagggagacccagatgaggagctccttggtcttggccccggtgacgcgcttcatccggcggtcctcgacgaaggcggtgacctcggcggcgaacgagacctgcctgctgatctgcttgaaggtgtgggtgatggccttcttctggcgcagccacacgaaccccgtggcgcggttgtagccgacctcctccatctccgccagcggcagcaggcccagcggcatgtggatctccgcgaggagctccaccgccttctccgcgcacagcgccgccccgtggtacacctccgccccctccctgtgcgcctctatcgcctgcgaccccatcgaacacgaactccaactcttggattcgacactcacaattcacaaatgcacaatgcggtggtgggatactgggaatctttgggttgcgttgtttgtggggaaaggtggggcgctggatttataggggaggagatcggattggtggactccgtgagcctccgagtaggagaggaggcggggacggttggggtgggggaattaaggcgcggggggtttatttattactactcctacgtgacatctctctcgcaactcgcgcgagtcagaggaggccttgatgcagattggggttgggggggggggggt

SEQ ID NO: 20012 - DNA, 7757 bp, Oryza sativa
ggggtgttacgcaggcgccgcgctgtgcgcgagccgttgcgtagcgcgcgagtcgcgacaccgcacgacgccacgcgatggtttgggcggtggtgtgtgcaggtgggggttgggcggggcacgggaggcgtcggacgcgcgcgatggtggattgattcattgattgggtccggcctttcgccgggtggttggacggtttgctctacttgtggatttcgtgttcacgtgtcgtgcaggcttgcggggtgtgtcgcgcgcgcggtagccgtttcgaataggaacggaaaacctccttcaacactacctggatttagactgtttctcgtgaaatcgtcacagaaattcgttactatattcttgcgtctcgaatcgaatggggactcaaagagtcggcatgcattggacacgcctgtgctgactgttgtagaaaccaaccgtaagatattttgagtttagatgacgccatagcggtcatgacccacattttaaatgcaacaattaatcatgcgaacccaaccacagcgctcgccgttttctgtcgtcaaatcgtggactgtgcgattgattaggccatatttggtcactggtacaactagttgtcaatatcttgccacgaaaaagacgagcagttgacagaaaacataaacataatctcgagttctttgcctccgaaaacaagagtttcacccggcagctgctgcagcacagctcagtccagctgctaatttaacgtacaactgtgctatggcaagcaggacacgctggatggaagcaatggaaagcgttagaatcttcagattgaagggtgatatacagctgcaccattcaatggcgtacatgtacaaggtgcaaggtgagcgtatcggagttaatgttctgacctctgaaatgtgtagctgatgttgcatgtggcatcgtcaattcgtcatgcgtctttgacgttgcaagctggttctcgggtacgtacaaccacctgatttaacgtgcaaatacggcaacaacataaaaccagtacagttcttcacactacttcctctgtcagaaaaaaatacaatctaaatatatcataattcatcgtacataatatctcattctatcgcaggttaatttatttttaacagacggaatacaaaataaaccaaagtataccttacaatcacacgcattctagcttctaagcagtatactcattgctcggctcgagtatggataagaagttgatttgaaaaagaaaggtactgataagaacaagtgctttaaaaggtgccacataagtttatacttgaggtggagaagagaatagaagccacccctcgtagaagggacaatctccacacaaaactccaataaaaataaaagaaaataaagagtcgattgaacaaacaaataaaataaaaatattaaggctagtgtgctatagttaatatagattagcttatatggataaaattaaatgtgacaattgtaccttctactatacaacttgcccaagaaagaatagtgaactagttgagctatgcaattgtacgtgtccgtatgagcatggtttaattatatgcacccataagcgagtgcatgctaatagagaccgttgatgtaatagtctcgacaacgccatagttccctatccataacatctttcaatgttgtatggtgaaactgaggatgctttgctctcattttacagctcataccttctagaagaaggatggaattagcatcagttgctgtcgatgtgtagcaagttgatgtattgtttgtctagctcggttttttctcttgctgtattcgatgaaattgtcatactcaatgctaaaaaagttgatgtactggagaatttcatttctctcctttgtattctaatcttaatttttaaataaaatataaaagtcttaagaaaaaaaaacttgtgagcctcttaaaatagttggtcctttgaagaggtttggactgcatggctttactaaagagggaactggggagggaaagaaaatgaattctaagggatcagatcagtaatgttacgcttgatcctacaaagttctaagcccaattgaaaattgagcatattgtatagttttgttacagaaaggccaccacagaaaccctcttgaaactgcgtttcaatagggaagttaatctggtttctatcaaaatcccggaaaatccctagtgaaattgacattgagaatatctttaagaacagctcagcaccctttacactaattctaaagtcgcctctcactgtctcacataagggcacccacaatggttatctataagctctctacaagagatccatgtcagcatattttcctacttggaagagattaaatgaagagagagagcaaagctatctactaacatgaagatagtctatagagaaaaacgaggcaatggattagagagctatagatacccatgtagacataccattgaagtggtttactattaatctagtctattgttgaggtgtacatgttttatagatagcaccttactttactattgcgggtgctctaaatctaagctccctgaaccttcttccatggctccaaactgtgtggttgaagattgtagcatacttgaattaatgaagttaaaggttgtcgcattaatgaagtgtaagatgcctgtaacacccaacgaccatctgctttacattcgcaactccgatccagtggctggatgctgcgcaccaacaaagtcgctgcaatccctggacccatatgcttcatgtcaccatggggatgactagagcaagttctatagaaagggtagttatccaattttgtacatgtaacataagaggttatatgtacaatatatatatatatatatatatatatatatatatatatatatatatatatatatatatatatatatatatcacatctgcactatcttttgctgaaattaaagtcaacagtgagcttttctagtacttcctccgttttatattataaggcattctagcattgtgtgtatatatatatatgtgaatgaatctagacatatatataacctgaaacgaaggtagtattaacgtatagaagccatggagccatgctcgtgccctcatgggagatgcaagctttggtgaaagagaacgtgagaatggtgacagaccaggaggcgtggagaagcagaggtatatcaatgcaggacgtggagggggtagtgacattgtggataacaagtggcaacatataagcaagataaaatcttgtaccggaaaaaaaagagtaagttcactatagatctcttaatttattgctgagtctgaaattcatcgctcaacaaaaaatacaaggtataatccatccctcaactcacaatattgtgttaattttagtctctcgacatatagtggctggttttagctgacgtggcgtgtgagacccatgtgggccccattagtcaatggctaactcctctctctcctttccttgtctctctcttccccgtctctctagggcacgcgatgaagtcatggtggcgcgtagcctgcatcgcgcggtggttgacgggaaaggaatagcacggcggctggcggaggtggcagcggaggcagctagctaaggcgatgacagaggagatggtggcacgcggtgctagcctgcggaggaggcgacatacgcgatggcggaggagattgtagtgcacggtggctggtggagtcgtcctctccttgcgaccatgatcggtaaagtcgtccttgtccttgcggccggggagtcgtcctcgtcctcacgatggcttcttgaatgccctcgactaccactacatccattcccttttcctcaaccttgagagatcctcgggatgccgtcgtctccttgtttgggactccgtgcatcggccgccgtgcgccaccatctccttcatcatcacctccgccggccgccgcatgccacatggcaccatgtccttgccgcgtgccctagagagatgtggcagagagggagagcgataagagagagagaggagtgagccgttgactccattagccaaaatcggtcatcatactgctaaaggactaaaattaacacggtattgtgagttgaaggatgggctatacctggtatttcggttgatgacgaatgttaaactcgacaacaaattaagggatctaaagtaaacttatttcctaaaaaaaagggcttttacgtaaaaatcgagtggatgacaacacaaagtcatctatacaatactacgagtattgatgctcaaattgatgctgaatgagagatcataaagctacttgtatcagtacaaattacgagttacactcaatgattaggttcgttgagttgaaacctactcatagaagagtattaagtactaaacttcacggctaattattttctcataggcctggtatagttctaaaaaattttgcccaaaaacatcacaacgaatcttgaatctttagactatatatgaagcattaaatatagataagaaaactaattacacagtttatataaaatcgcgagatgaaacttttgagcctaattagtctataattagccacatatactaatgacagattaattagacttaataaattcgtctcgtggtttacagacgatttatgaatttagttttttcattcgtgttcaaaaaccccttccgatatccggtcaaacatctgatatgacattcaaaaaaatttctttttacgatctaaacacacccatagtaaaaatgattgtagcaatttcacctatccctacgcgcctgtaatcagtacaattacgggtgcgtttagtttacgtcaaaattagaagtttggttgaaattggaatgatgtgacggaaaagttgaaagtttgtgtgtgtaggaaagttttgatgtgatgaaaaagttggaagtttgaagaaaacatttagaactaactcggcgtacatgagtatcttcgagaaaaagtaaatgtttacaaaccggagagatataaatgagtataggagaggataaattgtggccgtcagatctagcaccaagtggagatactacacggagtactctgtctccctctcgtcttcctcctcctctccttccgccggggcgcaccacgcacgacggcataccccctccccctccgatctcccgccgaaacctcccccgcgcgtcgtggagcagaccagatcccgactgcgccgcggtttgcgctagccgcagcagctcacccgtagattccccccccccccccccccccgcgcgccggccgcggcgcttgttcgccttccggcgatgccgacgccgaacggtacacctcggtggcagcgctactccgccgttctcgccgcaaggtgcaccgcattctccaccccccgcgtgattgaattttagtagttcgttccagcgtatttggccccatgtcaggctttatataaaacttcaaatggttactttgggatgaactgtatttctctcggacttacgatgtcaaattgatatagttttgatacgttcaagatgaactgttgttgtgatttcctagtgtagatgttaactaacctaaattcacccaatcctgaaaatccaaacaaattgttttgcatctgattttgattcaagtgttataactgggatttccgacccctttggagacaaaaaagtgacttctgtcaattgtgatatataatggttagcttttctagaatgcgcgctcatgtccagtactccagtctgcatgtctgtttcatcatttatttcaaaaaaaacttggagaaacactataaagtacctgtaaacgatattagtatctttcgttgcactatagctacattacaaactccacagatcatagagggctgccctctgccatgatccaacattttgaaagcggaatagagactacattgctccaaaattctacatttacattctaaagtaaaattagatgtaactacaggactgcaactcgaaacatccctaggtggcatgttcttgattatcatgccaagtcgcctcatgcctgattagtgatcactattatcttaatctggtaccttctgaaaggtatactacatacctatctgcagttctttgcatcgttgctgatttcaagcatccttattcaaatttccataaaaaacagatgatcaccatctcgaattactgtaatatcatcaatttcagcaaattctggattgacaagttttgtaagacgataattgttaaacttctgacctgcagaatcaaaattattgaataagaacacttgcactagatccaagttgtattacctaatacagacagtccctcatacttgtacctatgattaattatagcctaatgggacagctactgcttgcttttttttaatgaaatgtcaaccaaatgtaaactacaaaaatgccaagggacagttcaatctataaaatgaactaataccgtgccaactattaacaaattttggtgctagttatctgaggggttaatgcaatctcatggcccattaacccatcaactgatcaactcaacactgaatgcataaatatactgtttggtagggttaggatctggtggtttggtatacctgctgggctttactttcttgattaaatggcgttgtattcaatttaaacatttcaggtgaaggtgttatccatgaagaaacatatttcttgaactataagtaaatgttggagaccttaacctccagtctattgctctaccaagcaaatagagtagcatactgatgtaaaacagttatcatctaagaaagttctggtgtagtggtaggatagaataatagaactctgtttgattgttgcatgggatgtaaattaaaagtactcttcctgtaacctatgagaatcttaagttttccaaaacatgctgcagctggaaggatttttctcacttctcaggggagttttacctcccttgcactgagaatatgaggtcccttctgcttacatacctgagaagccagttcatggaagaaactaagccctcctatacagggccctaatcgtcctccctcatgtatttaaatcaaagaatacttacaagctatggcgaaaagtttatcaagagatcctggtagatttataacttttgcaagcggtgcctccggtcttttgttcctctgtgaatacatatgtattgtcactcttttccattctaaagccatagaatgaccattattagcttttaattcattcttctcattgtcttgattcaatgcagaacatctgttgtactctccaaagtgttgatgcatcatctgtaaagatttttccatcacctcggtagagaacctgtgatcttggttcatcttctgccgaatacgaaagaattctaatcatcattctgcataaaaaggtatattataaaacaagacaccatgatgataccaagacatgaactaacctgggaaagattgttcagaataactcgtctgtcatcgctgttttccttgataatgttctttagcactgctgtgttcagccttaatagttgtgaaactttgattgtatggaaagcacatggctgggggatgctgcagataactcctatttctccaaatatttcaccattgcacagtacttcctggacctggattttgtaattatacatgtcaaattctgcattacccttttaaccattgttctttagaacatatgaacttttgttaagtcaccttttctgttccatcgatctctacccgctcttcctgccaaacaaaataacaacagttacactagtatccatagttgtatgaactgcaaagggtgcag

SEQ ID NO: 20013 - DNA, 6575 bp, Oryza sativa
tgccaaatcagctaattcactatataaaatatgacagtacagctactagggaaaaaaagagagagagaaatatactaccaattataaagaataaaggaaaacactttaatttggttgtccctgatagaaacaaattctaaccatctgttacttgtggaaacaaattctaaccattcattaagagaactaccatcaagaacaaaaacagcgatatgctattgattaaataataaaggatatcttcagtctaccgttgtgcatgcatgcaaagtaaaagcagatcagtacattggctgcacaacagctatgccttggcacctgctgccgttgagggccacagatgctggcagtagcagcagccacagcagcaacaagccaacaacagcaaaggcagccgagcagaccctatgcctctgtcaaggagttgtggaccgtatattcgataattgatcaatccaagaacaataatgcaaaatatataagtgcgtgcatggttcctcaacatctgatacgttaggtttgggatttaggacatcaatactcaagaataggaagctgatggaacaaaacttcgagtgacaagtatagacaaaatgtcaaatttaactcaatcagaacagcatatactagctgtgaaattgaaatcttgtggggaatcaagcataatagaaatcccgcttatttattaaactgccaatggctctgtaacatatatcgttaccaggcgagtacaggctttggagttgtgttgtggttcttatgtttcaagactacagctggcatgtagcagctatagaagaaatgcaggccaacaaggatatctacaagcaattgagttgtttcctgcattcaccatccaccaactaagaaaccatgctctgtccaaccattcgagttgattttgtattttaagttagatatttggatcaattgcaaataaggaacacatcaaacataaaaaatggagcaatggaaaggataattatgacgatagacaggatagttatgatatgcaagctttcatcctgaattgaatataaataataggattaaccagaaaatagtatcgcccacttagcaagaattcaaacttatgaaataggataagtgaaatttgaccaatggttgagcttcaaagctcacctcaccacaaagttcttcaaagaaattctttacatctaattgagtaacctgcagggaaaggtgaaagatgtcatatgtttgaattctatagcttccgaagcttgaaaaaatataaataaccagaggatgaaacgaaaacaagtcaaaactatagcacactatgaagtaaaaaggagacatgtaccttcttatctatgtttgtacaataaacagttcttatgaccatttccttctcatcctccgtctatgggccagacacaacacagtatgagtactaaggttatgtggagaagaggaataattctggcatcaaaaggtgaaacaacgcatacaatacaagaacttaccctaggaaggaactttggattcacaggcaatatagctgtctttgaaggtaagactctaacagggtagaaaccaagcattgtgccaccaaggttaagtgcagttcttgcgccctctttagaacaaataaaacttacatacatcaaaaaatagattcactatgggagaaggcacttcagtagaaggtgaaactatattaccttcatcagcaaactcaatgaatgcaaaccttagaactgagtgtggatcaccacagattctgcagtcaacgaccttcaggagagagagggtattagtatggttttggaaattttcattccataatttcagtaataaaaacaataaccccagaaattgcagtacttgatattgtacacaatataagcaaaaaaaaaaccgaataaccaaaatagtttcatttcctttcttaataacaagaaaaaaattactaatagaagagatgttgggtttttattctaacatacaaatgcactcaccctttgtcactcatgtacttacagtttagagcataaaaaaccatcatgaaaaatttcgaaagaagttctagatgtacttctcaaggtcctgtacatatgtataaaacttcaaatatattctatagtcagcagggaaaaaagaaaaagggccaatactaccacccatagcaaacttgtttttcaaaaatgtttcttttagtccattttaaatgtaaaaatctttcaagggaggtagactgcatcatcaaatcctttctctggaattatttattacgatttggaaccctaaccgaaagttgagtgcacgagcgcaacaaaagggtgagtgcacatgttacctttatttccatcaactcgacggtcattaagtacagacttgctaataagtggaacaatatgatcaactagtagaaattctctagttcaatgcgagcattggaatagtgaaaaatcttatttgcagtatttcatacataataccagtacaacttgatacttcaggttgaaggaacttacttgcccacagttagcaaatatatcagcaagtctctcctccgtcacctaacagatgctcagctcatcagacataacagctcctctagaatacgtatgcatgcttagaaaaatcctcaactactcacagtatggtcaatatcagaaacataaacagttcgccgaatgctgtcttccctgtctgcatgccttgctctctcgttcatcctcctccttccttgactgaggtatccattcctcctctgacaaaaaaaaaaacaaccattacatcctattctgatcttatattaattttctttttccatggacttgccaactccaaacttaattcttacaagcagctgatcatcatctgttaaatcctagtcagcaaaataaacaaagaaaccaagtgggagaataatagaaaccctgaaaggggagtctaatctcaaactttccccatatttggggaaaatagtctcaatctttgtcgtctaatatctgaaccactaagaaaagttatgctaaaaaataaaaagaattctcagcatgggttgcctcattacaagacgatttgagcgcggatcaaagaactagcagtttcaaagaaaaaatagcgtttggtaatttggattgtctacctactataaataaataaaaaaagcaggaattctcagcatggattaccttaatgcaagacgatttgatttgagagtggatcaaagaactattccatgtccatggcagttttgaagaaacattacggtactgtacaactattcgaaatgaaatataatagaattgtgcatagtgcattgactggttttgcagtgtcataaaaaaaattaatcatcaaaaataaaataggtaaacctttcacgaaagaataccaactaccgcaccacgaaccaccaaccgataatgcaatccaacacaaggggaaaaaagaatccaatctttacctaccaaactaatggaaagaaataatcaaataaacaaccaaatcccccacacaggcacaatcacaaccaaccaattcagtttctcaagaacagcagagtttttaactcagatttttttttcttttacccgacgctgctggtaggcgtcggcgccggattccttgccgcccccgttccagcctccgatcgagttgtagtcgaacaccggcgcgtccgccgacagcgccttcctggacggcgacgagaccgccgccgacgaggggacgaactccttggcagccgggttcagcttggacagcaggtccaccagcttctgcacgcccttctggtattccgcctccttcgccaccgccgccacggcagcggaatccgccggtggagccgcgcgcgatccccccgccaccgccgccatcccccagagccgggctcctcagaccagacggcacggccgaccaatcttggtcaaatcaaatcaatcgccgccttccctcgcgctgggctctacgcctctactcctacagaagcgaggccatccggtggctctggggcgggcggaggaggaggaggtggaggttgggggaggctaccgcgtggtggtgttgcgcgctcgagctctcgccaatggcgtcgattagtggcgagtgggttttgctttttacaaggttttggccatttttttttaattcatcgcaacagctgcgaattggaagaaatggtattttggaaaggaaaggacagtgaggaaggagagggtatagagtctgcgtggacgcggtctatgcaccggcaggtgtgaagcacgtgcgctactgtgcacgtatactgtaccagcatggtccatgtccatcggtccatagccatgaggccgtattaaatgatggagtaattagtgtggttgatttgatggattaaagcctaccaaaatttccatgtggaaaattaaactattttctatgcatttttttttgttttcaaggaggctaaggttgaatagtaaatacacattcatccctttgtagtacttttttttctaagcctatttagaaaaaaaaagtaaagagtaattagggagccacagagtagttatttttctaattccaaggtgttgatatcactacatgtcaaactatatcagccctttaaagcagcaaaggcaaaatgtgggaaaactgcaatagcaatatatttgtcgttttctaatggaagacattgtgaaacagattttcctaataagaaaagtatgtaaaggaattagtaatatgcctcgccaagaaaggaagtgtactaatatgcctcgcaaagaaaaaggatttactatctaattaagatattacttatatgtaaagtacacgattttggtttctacacaatagtggaatccctgtaaaaacgtaatgtagggcaatgctcaatactaattattttcttccatttcgaacactaaaataatactagtagtactatctcggtggaataagaactcagactctgactctgttttggaaggaaggtcgttcgcgttaaacaagatgaagcacgaagaaggctgaactccatatcaagagtattcatcaaatcgccaagattctccattaagtttgtccatgctaatccaggtgtacgttacaactaattgcattaatgctcgtaccttccgtagaccataatcataggttattatcccctagccattgattaaattgcggggtattactcatttagtttagctattattactctctctattttcaaaatataaggcgcaatcttcactaatataaaggccaagaaataattattatcaattgtttgtttggattacttcaataaaacaatccattgcatactccacccctcaagatcttggaggtgttagttaacttgagggtggagaaatccaatgggggttaatatccaatgaaattaaacatctctaattttaaaaaaaagggttaatttcactagatcaccctaaagatctctaatttaacaaaaataaaagaatgatggtgttagttaattacatgcatgcatgcatgtgcatgtttatattatgaaacgttgaaaaagtggttgcgcatcttattttgagttggagggagtatttggattagcaggaataacttactgcttatcataattatgtagatgtactttcaaaatgtgtttactccttagaatttgagtcatccatcatcttctccccactccaatgccgcacgaagcgtagccacctccttcctaaaaaaataaataaataaatagttagttaacggaaaaccggttagatctaatgttttatgctcaattcacactcttagcctatccttagtttgtatggacaggtgtagctcatcccacatcgtatgggcccattgcgatatacaaaaatattagctaaagactgtctgtagctttcatctcttttgagtttgtgttgtaggtaagatatccttttttatgtttctcataatcaatatcttttctagacattagctcattacagaaaaatttactcaagtttttcaaaaagaaatgatgcatactactttaagctcagttcgtttgtctatgttctcaacctctccctctcgatttccgtgcgcgcgcttttcaaactattattttggtacgttttttttaaaaaaaagtttctatacaaaagttgtttaaaaaaattatattgttccatttttgaaaaaaattagctaatacttaattaatcacgcgctaatggatcgctctgtcttctgcgctggaggcaaacgttccgaacctgctctctccaacagagcctaactacagtttagatatatgttaatggtactaaataccgatgtaaaaaaacaaccaaatatattttatggataaatattttatatctatgttattaacggtgtgcaagtcaagaaaatagaccatgatgaaaaaaaattgtatgtttgtacagtaatgtaatttattgtatatttgtatactatatgtgatactaccaggggaaaaagaagcgcctgctggaatcaacaccgtcgaaatcgatgggtttcttacgtatcatttcttggatggaatcggaccacttctcgggcatcatttcccttgacaatcgcttttgttattgatgggctaatca

SEQ ID NO: 20014 - DNA, 3475 bp, Oryza sativa
taaatgcagcttagatatgcatacaaaaaaaaattgggaagcactctgagaagtataattaagctcagagcgatacaaaatatttatgcatatgtactattgaactaagttctataatggaagtgctcagaaataaggtgatagaaaggcaacaggatagtgcctactgcctagcacctggcaacaggcagcctaccaggttccatttgattggaaacattagagcagattactctatggttactgcaaatagtatcaagattaaaggaaccaaatactgcttaaagggaaactaggtgctaggcagggttgatacctagaaaataggcacccatggtttagaacagcatttgagcatctaagtgtaaccgtctccacaagcaaaaaaaaaaaaaaacatacaaacccattccctcagttgttcaatcataaatccatgacacatgcataaagggttagatggagtgaatattttccaggataccaatcaaactaatgctgttaaatttctagttgatcaggcacccttgccttacagcatggtttgcattaattgtatgtagagggggtttgcaccagacaccattgctctcccgacatccgtacaccacacaacacaacgaacaccaattaggcctttaatatttcatggtgtttaaagaaacaaaatacagtgtacttacacaagtggtcctaagcactaagtcctttactccacagcacgaagtacaatgccagaattcctccattgataactgtcggaacaacctgaaataaaacatgcaacctaaatgataaaacaaaaacaagaatctatagtggtagataacataatctcaataaaataaaaaatgtataaatcaacctgtgtgttgggcagaggccggcctttccaaggcttctgcaaagccaggaagatgactgaagcaggtacaaggcaactgaagatgaagccgaccattgaatccccactactagacaggtagttatacagggagtacacagaccaaattctagcaaagtttcccaaaatatgaataacttgcaacggtgttgacctgcccaatagaaaacattatagtttggttaacaaaaacgtgctattatactgaatgatatcacatatcttaagggtgctaagccaaatgaacatctgatatgagaaaaataattagggaaattgggtgttttcagatctgaaatgggtagaaaaaacaattgaattgagaagctagcaatcttgaaatatttgaccactctcattcatcaatgaaatttgaggaatttcatcatatgtcaatcacacacaattggcccaatttcaatatataacatcaggtaactcattatgtaccctttataccatttccattataaaacagttttgtgtgcttcattgaacaaggtaaaatgacacaactcagctacctcaaaactgacatttatctcaatggcatgtgttttcttatgaaactaaaattgaatgcagcaaaagtgccttcattcttttaatggcctccaaaaattatttcaaacatttgtattcaggtaaatatcggttttgtggtaatatatgagtaaattggacatttcaaccagcctaatgaaagatggctaacagttttgtaatggcaatggtacaaaaggaagaaaaaacaagtttctcgatggtatatagaagaatggggtgttcatctatgtatatcattggcttctttctctcataaaatttggcaaattttaaaagggagtatgattcactgttaaaaaggaatacaaagtatggtaaagtaaaggaagaacaagcaagagaaaccagcagatactatttttttaatagcaatgacaatttaaataagtgatacaaaataaaatgttacaataaatgtcaaaatatcaagtacaatgtccatagcaattctaatataaatcaaaaatattgttgttgtaaaatttgtatatactataatctacagcgtcactattagttaagtcgagctgccttctaaaatagaacattaactagtttaaattcagctatatctggataaagtgttcgatatctcattgctacattgtcttgctactaccaacctttacaagaaatacgcatgagaaatataactaatatatacagtttaagaacaaatatgttgaccatttttttcctacatactggacaatgttggagaaatctacacttgaactacatgctagtcagtttaaacctactgatttactacaaatcacaggctcattgtgcgtctccctaattatgcgtatgaagtagaatttcagctatcccagatcttacagagaaactcattagtggagcgtgcagaatcgagttactggaagtacgagaaatgtgcatactggaaacaaaacgccaataaacctctgaaatcgctcgctccaatcaattaatttcctaccaggacaacaatgccaatggaacactgatcgcgttgcggctaagctatttcacccagcggaatgacaatgacgagcagcgagatctcgcgccgaggagcaggagcgacgggcaggaagcggttagatgaaaagctcacctcgccgtgggcaccgagcgggaggtggaggcaccgccgccgccttccggtgcggcagaggcggagggcctcggcgacatcatcttcgaaggccccgcctcgccgctgccccctggtccgactccccggatcagctagctgctggcccctggtccgactcgccggatcagaccacggcgccgacgcccgacgcgtggagcggcggtaattaagccttcccgctgtgatgctgctcgactgcgcgaggcggcggcggcggcggcggcgggcggaggggcggcgctgggcttctccgatctggatcgatttttcttttcttttcttccccgctgttttgaagctcacgaaaaggaggcgatgcagaagactaggggggtgtttagatggggctaaaattttcttagtccatgtcacatcgaatgtttggacgctaatttaaagtattaaacatagactaatataaaacctaattttataaatgagagctaatccgcgagacgatttttttaagcctaattaattcataattatcaaaagtttactgtagcatcacattgtcaaaattatggcgtaattagactcaaaagattcgtctcgcaaattagtccaatgttatgaaatgggttttgtaattagtgtatgtttaatactctaaattagtgtccaaacatccgatgtgacagggacttggaataagtccctggaaaccaaacagcccctagaagaagaagaagaagagggtagctaccccacgggattccgttgcaaaacggcagtcacgggataaaattaatacagatcccttttccgaccaagccttgtctcctgcacacgattcccccaaccagaagtcgtgcgccgctccgagctccttcccccgatgagaacccggctcggtatcg

SEQ ID NO: 20015 - DNA, 5525 bp, Oryza sativa
catatgattggatcctaaaatctttgtagtcgaaaaaccacaacactcccctttttgcaaaccaacccttaactcatttaaacaactagaggaactagatagagaattacttgtatgcacgcggtcctctcgacaatacattttatcatgaaaatgaggtatagtcaaattcgaacaaatatatactcgatgcacattatattctcctttactatcataattaccaataatatgaaaaatcacatcagaagggcatggcaattcaactctatcaaataatttcttctctaagcagttgagtggacaaagatcatcaaattgaatataaccccaagtatttaaagaagattgcaatttaggctcttcattctcgctagcaatgtgaataacatgtttaaactcaacacatagtggctctactatagaactaacatgttcattcactagttgttgcatggatataagtgaagcatcgcacaactcttctttatcacaagaaacatcaagcaaattgttttgtgacaaaggtatttcaacaatcggttccactatgggttgctctaacgtagcataagttgtggacatagttggcacatcataaatatgcataccttgagtagctgtagcaccattatcattactttttttctcatcttcagaaattataggtgcttggtcaattgaacattcttcccgcatgcatgtagctatagatagatctttttcctctccatctttcttctcttcctccttactaacttggttgttctcagatgcctacaaaatattagtatccaaaacaataggcacaacattacgttcattttgtaacaactcagacttagttgaaggcatcacaatattagtattattcctggtatctctgaaaatctcatcgattctattcttcgtcctttcaatactatctttgaaaatttctttgattccattcttcatcctttcaagattatcttcgaaaatttcagaaaaactcattggttccaatttcatttttcaaccgttatgtctaaatgtgtatgtattagcaacaaaattatgcaaaccattattatcatatacccatggttgaccaaacaacaaagaatatgcttgcatagggacaagatcaaaactggcagtatcatggtaattttcaatcgaaaagtttattctcacaattctatttaccttgaacttaccacaagagttgaaccatttgatgtaatatggatgatgatgcggttgtgtaggcaactcaagtttctcaaccaaatctgaactcaccaagttattgcaactctcattatcgattatagtacgatatgctctatccttaaccacaaactttgtttcaaataattcgtgatactgccattgctccgctttttccatttgagaacttagcactcgttgcaccaaagtactgtcatcacgtgcaccttgttggtatcgctgattttgagcgccactcatatctgtcattgccaacacaaaaacaacaacaaataatgaaggttatccctaataatctgctacgcggtgtagtggtgcccctcaacaactcagccaaatggagcaccttaccaagctcttacaagtgtcttaccagcaatgctaaggacggtacaaccggtggctggttcgtgacaccttaaaggacgtgatgtggcaattgcaaggatcaaagcggtgctgaccagaagtatatatgtgtagcttgggaggcacaatatatagtagcaaaggaatgcaattgtgctaatcagaaaatgcaaagttgaataatagttcaaagtactagtcaatgtgctggcctagcctagactcaactctagctcaagcaaccacccgaccacactaaggactagatacgaatcaatgcacaactctgcactctgaaaacatactcaaaagatgaatgatttttttctttcttggtgcggcttttttttaagcacatttctgccttttttttacttttttttaggtgcggcttttttcttttttttctttgcacctttctgtcttttctttatttctttattcttttttttttacttttttttcaacaaaaactgaccactgaccttgaacagggactcaaatgtaaatatgaatatatagggactcaaacgcaaagtgcaaaactaaaattggatcatctcaaaaatggattgctcatatcatgtaggttccatttttatacaaatatctcaaatccgctacttaacaattctataaaggaaaatacggatagtcacagatagatctgatctgatccggagtctctccttagacgcacagagtactcccctcacgcgcgcgcacaatgcaacataggagctctagaaatcgagtaactcccaaaccgttggataaaaatttctccaaaatacaaaaacggaaacccgacgacgagatgattcaatttttcaaggtcccggcaacaactgacgagatgaaaaactggacccaaaactgacgtacaactcacacacttgagtgatgtaccctagacctaagtgatgaacagatgcaatactcaaaactaaaaattaaatctaaaactaaaccagcactcgacacgacgatgcaacctagaattcaacaaagtaaaatctaatagaacaatgcaacggctcaaattgtctaggtaaagaataaatatttttgtgtggcaattttctggttatgggaagataaattacctaacgggcaaccacgctctgataccaactgatgagggatattaggtcccgatcttccgataggtattgataaacaacgatttgggcggagtcgcgacacaactcgatccggcttctgaacaaacacgctactgagccccgcaatcgcagcaccacgtctcctctggttatcaatcgtgccgaaacccggttgacctcgccgagaaggctaatccctgcatgcgaatcgaagaacacaagcaagaacaagatagattgcaaccaaattgcatatgaatgattaagcactcgaatttggggttccacaaaccgatctagcagcgaaactgttcttgacagaataatctaagcaaaacccaactctaaacgatgacggctactgaattaatatgattagggacgtcctagggtttccctagggcgcacacccccttgggctaagcccacgatacaattaaaaggcccaaaacccgagtcagattcggactggatgagatacgtggcttgttttgcagattcccggcagctcggtaggaattttgatgtgggaccaaaaccatctgaaggtagactccataagctttccaacaagtactcatgggtcccgaaattccttctagatcagcggctaggtccatttgaagttgatgctatcaggaggcccgaattcgaatccaaaatatgtagaactttatctcttgtcttctatggaccaaaagtgacgtggtgaggtagaagtagacttggagaggtcttggtttggtccctaatcaacttcttcaatcatccatttattagttacgctcggtctcttttctttcgcccaagcaactacctctgcaaatgaaaacacacgaaactcattgtgtagcaacgtttgttcaaatatataacaagtaaatcttatgtagaacatatgcacctttatttgattaatacataaggtagtcatggttatatccgagctagttatgtccttatcaagtgggttgtgactatagtggatttagagcacaaccctcctccattgagcccctcttcactcaggttcctaagatctcatcgtaatgtatcggatgaagactatgagctgattgagttgctgcacaacaacaatattcccactcgcaggatcatgtctgttttgtctgacctgtatggaaacattcgcaacataccgttcacgaagaaagatgttagtaacataaggacatcaatgaggaaccggactacatgcaatggtgacatggctgaaaccatcaagtacttccaagaattgcaagcagaagacccgatgtttttctatagcatggatgtcacgaccggaaataacccaacgggcgttccttacgtgcgtgcattattccttgtcccaggaggcaaggtacaccaagagttgatacagttcagagttcaacaagcggaagcgtaaatagttaatttattacatgggcggcgaaggcccagcacacacaaagacaaacgggaaacagctgaagactagggcgacgaccacaggcgcttgacggcaggcacgagctagacaccaaagccttcatcttctagggactcctcttctgggtttgggaaaaattgagcaagactgagtacacccaccgtactcacaaaacacacccacaagtgcagaataaatgcagggaagtacaagggggttataatataaagggttagggtttgcagaaaatagcattaaaagacacttagttgcttgaagctattttgtaaacacgattctagagctatacaatattattaatcaaggccgtggacccacacgaacctgccttaacccaaggcctacgatgattcagaccgaactggcaacccgaccctgggtcccagctcgtcccaagccaacccaggccaaccattccacattttagttgttaagcaggttttaagaattaaaacactaacttgggtacattgctcggcttgcccataaccgagggcgcggctattcgaatagattatactctgatcagaggtgtacatctttacccacaagacacatctttgtcgcgtcccaaaacgactctaaaatacatcctcgaaattatgcaaagaataagtaaaatccatgtgaaagcctccaacaattaaaatgtgcaaatttaaaagtcaaataaggcttggaggatttttgtatatttcctaaaagcctaaaatgcgtaaataaattttagtggaattttcagagcacaaataataattgagaagaaataaacaaagttaaaaaggtttataaaaagaaaatccctaaaagtcttcttttccccccttcctctcttgggccggctcggcccaactctccctccctctctctctcctctccccgcggcccatcggctccctccccgcgcgcgcgccgctgacaggcgggcccgcccgccaccctcgctgacgggtggggcccacctgtcatccccttcctcccgccgctcccgccgctcgcccgtgccctagcgccgccgccgccgcgaatctcgccgcctcccgccgtccccgcgcgcaataaagaggggggaaatattccccacgattccctctctctttccccccgtttttccctctctctctccctcggattcgtccggattcactcccgcaaacctcgccggcgccatcaatggcggccggatcctccgcgccggtttccatctcctccggccgccttccctcactcccaaccctatttaagccacccccgtgctctcctccaccgtttacgccactcgccgcctctcctccccgtcggattcgtgcccgcgccgtcttcctctctctccgccgtcg

SEQ ID NO: 20016 - DNA, 3116 bp, Oryza sativa
tcctccgctccggtcgtcgtttccgccgtcctcgtcgacccggggtgagccgtggaccgctcctttcgcttcccccttccctcttctctctcgggcgccgctccgccgcgctgttggtcgccggcggcgaccatcggggcgcgggtgcgccgcctcccgtcggccgtgccggcgaggccgccttcgggcgcgccccgcggctgccaggtgggcccggccgtcagccgcccgcgcccgcgggtgcggctgacgcgtgggacccacggcgccggtcggcgtcagccgcgtgcacccggtccaccgtagaccgagaggctgacgcgtgggccccactcccgtggacccggtccgcgcgccctctctctcggctgacgcaataaacccgatttttaattaaaatttaaatgaagaaattcgcaaatatccatttaaagagcatataaacttcaaatggccataacttggccatttgaactcggaattggaccgttcaagtctctaatttttccttaagaagtcaagaacccatttttgtgctttgtttctgctgttatgtggagtttattagagtaaaagccttttcttttccgttggtcgtgtagacgctgcagcttcggaagatccgctcttcgtggaagttgaagccgacgtttgggaaagcgagcaaggcaagtcacatcatctttgaacatattgaatcccagtttgtaaaattatgttgatttaaattattgcattatcgctttatttaaattcccgcgttatcactgttttatttagccatgcctatttacctttgttatgaccttattattgctattgttattattattaccttgttcaccctagattaaacaaaacctcaactagtggacattctacttaagacaccactagtttaattttaggtagatgcttcgcaatttaattaggtaacattaggtggtttttcaactatagactttgggaattattcatatcacctggacactttggaatggtttggttattgtggaattggcttcacaccgccccctctattcaaaatccccaaaaaatggttttaggctgggcgcggggtgcatggttttgatggtagcacctcggccatataaggaccggtcttcgggcctctgttgcaaagcactaccgtacttccacatgtctaatgggtaaggcttagtttgtggctcaggctagtcataaacaaaagtacacggattggagatggatgaagtcgggggtcgatggacattctccagggcaaatgaaggctacacgagctgcggcccggtagtcgagatgtcatggcacagggccggtgtcctgctgctaggggctcagttctgcctgcctgtcccgggggttccggccgtaggtgggattgggtcggtactcttgtctatggctaggatgggttggaaactatgtcacgtctttcgtctgtataccgtggtggtatgtggcacgtggttacacgtgaggaagatgtgtcttgtgggtaaagatgtacacctctgatcagagtagaatctattcgaatagccgcgccctcggttatgggcaagccgagcaatgtacccaagttagtgttttaattcttaaaacttgcttaacaactaaaatatggaatggttggcctgggttggcttgggacgagctgggacccagggtcgggttgccagttcggtctgaatcatcgtaggccttgggttaaggcaggttcgtgtgggttcacggccttgataaataatcttgtatagttctagaaccgtgtttacaaaatagccctgagcaactaaatatctttaaatgctatttactgcaaccctaaccctttatattataattcccttgtactcccttgcatttattttgcatttgtgggtgtgtcttgttgagtacggtggttgtactcagtcttgctcaatttttcccaagcccagaagaggagctccttgaagatgaaggcttcggtgtctagctcgtgcctgccgtcaagtgcctgtggtcgtcgccctagtcttccgctgtttctcgtttgtctttgtgtgtgctgggccttcgctgcccatgtaataagttaactatttacgcttccgcttgttaaactctgaattgtatcaacttttggtgtaccttgcctcctgggacaaggattaatgcacgcacgtcaggaacgcccgttgggttatttccggtcgtgacaatcttcctcacgtgtaaccacgtgtcgcataccaccacggtatatggacggaagacgtgacatagtttccaacccatcctagccatagacaagagtaccgacccaaccccacctacggccggaacctccgggacaggtaggcaggactgaggccctagcagcaggacaccggccctgtgccatgacatctcgactactgggccgcagcttgtgtagccttcatttgtcctagagatgtccatcgacccctgacttcgtccatctccatccgtgtacttttgtttataaccagactgagccacaaactaagccttacccactagacatgtggaagtacggtagtgctttgcaacagaggcccgaagaccggtccttatatggccgaggtgctactatcaaaaccatgcaccccgagcccagcctaaaaccattttggggattttgaatagagggggaggtgtgaatccaattccacaataatccaacaattccctagtgtccaggtgataagagtattcccaaggtctagagttgtaaaaccacctaatgttgcctaattaaccagcgaagcatctaccatgcgtagagtgtccactagttggggttttgtttaatctagggtgaacaaggtaataataacaataacaataataataaggtcataacaaaggtaaataggcatggctaaataaaacagtgataacgcgggaatttaaataaagcggtaatgcaataatttaaatcaaaataattttataaactgggattcaatatgttcaaggatgatatgacttgccttgctcgctttcccaaacgtcggcttcaacctccgcgaagagcggatcttccgaagctgcagcgtctacacgaccaacggaaaagaaaaaggcttttactctaataaact

SEQ ID NO: 20017 - DNA, 3121 bp, Oryza sativa
atggggggaaagggggagggaatcacggggaataattccccccactttattgcgcgcggggacggcgggaggcggcgggattcgcggcggcggcggcgctagggcgcgggcgaggcggcgggagcggcgggatgaaggggatgacgggtgggccccacccgtcagcgagggtggcggacgggcccgcccgtcagcggcgcgcgcgcggggagaggccggatgggccgcggggagaggagagggaaggggaaggagatgggccgagccggcccaagagggagagggagggaaaggggactttttagagtttttcttttttataaaatcattttaactttgtttatttcttaataattattatttgtgctctgaaaattccactaaaatttatttacgcattttaggcttttaggaaatatacaaaaatcctccaagccttatttgacttttaactttgcacattttaattgttggaggctttcacatggattttaattattctaggcaccatttagaggatatattttagggtcgttttgggacgtgacaatggagttgcagttctgatggttcagttggtagcttattttgggtggatggagcctccaaagaagcctacaaaaaatttggtgattgtatcgtcttcgacacaacatactgcaccaataggtataaccttccttttgctccaatcattggtgtaagcaaccatggccaaactgtgttgtttgggtgtgtattcttaaaagatgaaaaagttcagacttttgaatgggtgttcgaaaccttcttgagagtaatggatggaaaagtgccacaatgcatcatgactgatcaggacaaagcaatggagactgcaattgcaaaaatactaccaaataccgttcataggcgctgtatgtggcacttgcacaggaatgctagctcaaaccttggtgtgctattgaaccagaaagaggggtttgaatttgatttgaagtcatgtattgagacctcgttgaatgaacaagaatttgatgaaagttgggatgctatgatcaatagatatgagttgcaggggaacaaatacatgcagcacctatatgagaacaggaagaagtgggccacatgttttttcatggattgcttcttccccttcatgtgcagctctcaaagaagtgagagcatgaacaatttgttcaaagattttgttcacccggtggattcaatcagaaacttcatcgtccagtatgagaaacttgcccaatcttgtctcgacagggatgaccaacagcgctacctcactgtccaaacagaccccgatatgtggtccggctacccaatggaagaacaagctgcaaagttctatacgcgtgcaatgttcagcaaatttcagcataggttgtacttgagtacaacttatcaaacaattgctggcccggaacctggatcatattttgtgcagctgattttaaaggatgacagtaaaaaattcttagttcattatgacctcactgaaagcttcagttgcgcctgcaacaaaattcagagggacaagatgttgtgtgggcatgctttgaaagtgatgtgaatgtgtatgtgctaccaaaaaagtacctttgtgatcgatggacgctcagagggtctcaacatgcttcaaatgctcttgtgcaagccaacatcgatgaggcatcaagcaagaaaatgaagtatgtccggctctgcaagaaatcagcctccgttgcagctgaagcctgcaaaacaaaagagggatatgagcttgcagtcaagacaattaatggattggcagaaaaactagtagtgattaacacaacaaaaaactccctctgtgagcagcactgcagtgttggatggtacccctgtagcagcaacactgaaagatcctaagaagaaggttccgaggggcaggcccaaaaactcaactaggttaaaatcttctgtgtttgatgataccagtggtgggtcaacaagccgtaaaaaaaggaagaaatcaacaagcaaccaaacctgctgatatgaggtgaaaagatggtctcttattttttttcccactcttttgtttcagctcagcgttatgaggaggaaattcattgatgagtcattccttttgcaggggtgaagaagaaaaagatagcactaagggatgtgggagagaaaagatagcaacatttcattttttttacatttgctgaatgagacttcttcatgtaataattcctcttttttggctgattggtgaaccatgttgcttgaaactgaattgaaaagcttccgaacaattgtgatgtatggtcagaaaaatgttaaaatgtggttgcacttgctgagaaaaaatgtaactgatacctgaattttatctgatacatgtactgtgagctggtccatgaatgaggtggtttgaattttatctaatacttgtactgtgagctggtcgatgaatgatgcatgtaccgtgtgctatcagacctgccaggtaccaggcctgggaccaggtctggtacctagtaccaggagtacatacttggtacctggtacctggggttactgctaggtaccaggcctggtacctgggttgctgctaggcaccagacactggtaccagtatttgtgagggctgataccccctatactgggtgataccatgcctggtgcctaggtttagacctgataccttggttttatgctaggtactaggtctgatacctagtagggactgccaggtaccaggcctggtacctgggtttagacctgatacctggtacctggggttactgccaggtaccaggcctggtacttgggttgctactaggcaccagacactggtaccaatatttgtgagggctgataccccctatactgggaggtaccatgtctggtgcctaggtttagacctgatacctgggttttatgctaggtaccaagtctgatacctagtagggactgctaggtaccaggcctggtacatgggtttagacctgatacctaggaccaggtctgatacctagtaccaggtactctaggtaccatacttggtacctggtacctggggttactgccaggtaccatgcctggtacctgcgttgctgcaaggcaccagacactggtaccaatatttgtgagg

SEQ ID NO: 20018 - DNA, 6772 bp, Oryza sativa
tggctgagcttatcagcaccacgtgaaacgaggcatgccattagcgcatcgttaagtatggactattataaattacagaagtgaatttatttgatttttaataaaatatataaagtttttgcacgaaattagtggttcagaaaacgtggctcatggcaaactggccctaagacatgacaatgacaatcagtctcatttattcataatgggatgtctcataaacatcccaaattaattatttgcagttgtttgtgttaaatatgtgatccgaattttggaccaacaatatatttggattagttatctaataggactgcattataggattagtttcctattaggactttgagtctttacctattaggactcctagatttctcctatatatatatcccttgtaagccgtacagggagggtgcgacagctcaatgtatcccctgcgtttgtatctaactcctctatagtgatcattgccggtcggcgtctatagttttttccctcaagggtttttcacgtaaaatttatctccgttgtacatttattttcataacagttcggcccttcataatagaactgcgagctgaaaatatgtgagatcttgtaacagttgccctgcatgctgtgttgcagatcgttgctaagggaatggcctttaccattcccatcggaggtggctgctgtgtgtcgcgtggccgatgaatccaccgaaaagagatattgacaggtctatctcctagtgttggaagctgtgggagtatttcaaatggtaatgtactaagttccttgggtgaaaacaaataaaaggtagctgataatttccacattcaaggaaaataattaaaatgatccaactttaattagtatcaactgaatgtttgtagacttggagttctttggaacatctgttactgtagaacattgcataatgtaattcatcattcatttatcctttttgattttttcaggagttttcaattgttcatcatttatcttttctatactaatattttccttttgagtttcagtttaaaagttttttttcttccgaattctacttatttagaaattttctatctttgtttttccttttttcttcaattatagatttttcccttctgttgttttttcccataaaatggtttttctttgtcgagtttggtttcaaaaggcagggagagtggtgcaccgatgccgcaacgatgagcttatttggtttgtaaccatggaaaaatatttgcaatatgggtaagtttatgtcaatgccaacattttgacaatatttatgtggtattggtaagtattgttagcaaatcttaattgcatccatgccattgtaactttcacaattttgatatataccattactgtccggggattcctaacgctggcccatcgttaacatgtgattagcactaatgatgattttgaagtcaaaatttgaaatctttcaactcaaactttaaaaaatttcaactggaaatttaaatttgcaagataaattttgaaaactttcaactcagatttaaaaactttcaactcgagatttgaaacctttcaactcgagatttgaaaactttcaactctgatttgaaaactttcaactcgagtttttaaatttgaattataaaaaatattttttattaaaaatatcttataatagaaattttgataactttcactacatcctaaattaattatgttgaaaacataaaaaaaaagaaggatcgtatagatgcatgcatgcatgcatgtgtgggaccaaggtgcatgcatgtgtgtgtaatgcatctgcacgggtggagaccgaggtacatgcatgcatgtgcagttggtttgctgcatgcgtgagagataagaatctggcgcatctgcgcgagatagcaattgcgttactgtccttctatctgaaggtatgccatcataatttgatatatactactacttacccttcactctatttctttcttttttaccaagttaccctttcttcttcattcattccctcctccctcctgttcatcttctcagcaccaatggcagcagtacaagcatgggtgaaagcgctggcatagaaggcgcttaacgacactgtcggcaacgggaacatcaccatcttcgagccaaggaacgaggacatggagcgcgacctcgacctagagttccgccgccaccacgtcctccccgcctgcctccacggtggtcaatgagggtgggcaccgctcgtccacggacttggatgaccttgttcgagcgtgtagcccgcgccgccgctgctgccatcgacccgaggagatactctcgtggggatccatcagccgatcgagaacgacacctccggcggcggtggagaagcccctacggctaaagtgcctcactcagatttgggctatgaagttgccatcagcctcgacacgccgctcacgttcctcccggatgagagcagcagcgaagaggagacagtggcgacttggcggctgttgacggtcgttatcgatcagtttcaaccgtcaatattaccaaaatagaggagaactagtggtgcttgcaatgcatatgtttgttagaataataatattccactagtattaggtctactaaccttttgcagagaatgacaataaagtggaggagaatcgacatcaacacaaacgataaatcaatcggacgatgtcgagaaccagacttgtgtatgaatgggccaagaactcagaattgacacgacaaactgggccaaaattcacaagtctgcggagaagaacaacagaggaggccgccagccaaaccatgggctggttgggccggccctaggttcgaccgaacctggtggttcggccgaacccccctcatcgccgctggatgcagggtttcttctgaacggtgtggattagctcccaatgacggttggagggtatttctaactattccaaccgtcacaaccgtcattaggaggctatataaacccctcatcttctcacttcactcacacacctcaaggaagagctctctcattcctctcaagtttagtttagtagtatctagctggtggaatagaattagaataggaatcaggagtccggaagccttcggaagagttcgggtatggctctagtagcttttctttcctcttttgtaagctttgtacttttattagaatactcttctaaatacatttctggtattgaaatactttccaagtatacgagtaccaactttgcattatgttcatgttatactgaatatactactagcttatctgggagatgctttggtgcgcgtatagtgtttgcttatgcaattactctatatcatgacatgatattagagtagtatctggtagtttagacgtggtgtctagattacgggatatcattatttggggttatatattgcggatgagaggtgggccgctgatagtgacaggtcagtatgggtattcctccgcgcctatatataatcctaagttaattttctggggagggtattcctccgtatttagccccggttggatggtcatgacgggttgtcgtaaggaactcggcagtcaggggtggcttctcgaaataccaggagggcatcggaaagagggtattagctagtatatcagttaactagaatgtatgtatactatgtatattagaagtataggaatagattctctttttcttttctttccacctaacttagattatttattatgaggatgagtagtaatgcttgtgtgtcactctacccttggattatcttaacccctgcttagaatatgattatcacaagaaatatataaattattagttgagttctctctacatgatcttttcacgagataaaataaatacgatacccttggaatactctcgggtgaaatgctacaatggtatatccatgcgcttgcgaatgaactctgtaaccataatataccagaagtgtttctgcgccattgctgggaattatatttctagtaatgtcgttaagaaataccaacagcagcaccgtgagatcttcgtgctatctcctcttctgattcccaattcgattatgtttgattttatttactggctcgtattgatctctgttcgatcccaattcgaatatatccaattcgaccaggtccgtatctatccaagtgagcagagcacccctctatatatccatctctagctctccctttcttcattgaatggatgaagaacttgttcttgagtgtttgatttcgagttggatgagcgaagagaggatgaacataactacatgtgatagagagggagatcgatgaaggaagaagaaatgggcaatctgatctaaaaattttagaaaatacagtcacgagttaagtagtgccatctatcgaataacagcaaaattatagtgacatttctccaaatagacgaatagtaataaaatatttcaaaatcataaaagttataatggcatggttccaattaatcctaaacattaccagcctataatgagctagtagcccatataagtgcaatttgttggctgaagagtttggtggttgagttgatatctacaagctagctaggaaatcatgaaattttatcgttctaaccaattttaaatgcaaatttctaattacgttatgtccgttttcatatttataaaaagttcatatttctcaaaattattggttggttatgaatctacttttgactaagacgttttatacttcttttagatatttaggctgtgttcggctggctaagttcccaactggaacagtgcgcataaaaaacagagcgatccatttgcacgtggttaattaaatattagttatttttttaaaaaaatggatcaatatgcaattttcgtatagaactttttacaagaaacacaccgtttagcagttcgaaaagcgtgcacgcggaaaaggaaggagaggtgttgggaacctggatgcccgaacacggccttagtgtatcaagaatttgaaattcttaattaagacaaattcaccatctaaggacaagaaaattgttatagtatgtgtagcagtgttcttaattgtatacttgctctccctaaagttaactgtctttttgggatgtgtgcagtaccatgtttaaactttgacaattaatataatatcactttgaatattttgaattcaacttttttaaaattgtatgaatagatttctcttccaaaaatggtttcaaaatattataactttgctacacttttccatacctttttattttatactagtagtaattactatcagaaaaattcttttggtgacttgatcaaaaacatgctgcaaatggcataggtatgggaattgaacatattatattggtcacgctttgattcatacccctgatcgtacattacatcttaaaaatattcttcatgttacccaagccaaaatgaatcttatttatgcttctcgtctagctgaagataatcatgcttttcttgagattcaccctaaatattttttgttaaggattgggtcacgaagaacacaattcttaaagggtggcatcaaaggggcctctgatgacgctctctctcgtggcccgatcttctggtgaggggataactctcgctttgatcgagtgcgacgtttgtgacgtggctaccaattagaacatgtccagaatgccgtgcaatcgctaaaccacaaacgatgttgtaccaaccgtggcgcgcggttgatgatccctgcaatgcaaatgagagaacactgcaagaacaagataagatgcaatctaaatattgcgaataggtaattaagcacaaagaaatggttgcgattgaagtggtagatccaatcgacccgtcaaatcaacacaccgaatattgggggctctgaatctatagtcgccgactagtagagcgaggactagagacaaggtgaatagcacttagcaaaattcaactaaacaaaaccccattgtttttcaggatgtacaaagctatttatagagaaaaataaagctagggttaagtactaattcgtggaggtggagggagaaacttccgagatgggcctagtctattacaaggtccaaggcccaagttcggtttcagcaacaacactgttttgttttggtgattcttgttgactcgagatgaatttggacatcagaccagatgcatttgaaaggtagcgagataagctttccatgaagtccaagatcacccaaatcggagttggcatgaaggcactaggtccgtttgaagtcagtgttgtctccggaggccgaactggacttggacttggaattataattggaaagtgtgaagttatgtgcgtatccgatgaaatgatgtcctcatcatcctccccttcttgaattggagtcgtcctcaactcaatcccatcttcttgaccgtgttcactctgtcgtccaggggtcatccttggaggtatctcatcgtgaaaaacaccctcatattcctgcaaaaagttagtaatagcgggtagcaaagaatataaagtactaggagtagtaaccaatgtgggtatatgatctttgcaaaaaagagcatagtaacaagaatctggctcatctagagcgaaaatattatatttagaagctagcaaaacacccttcaacttaatttcattctttgaggcacttggttctattttactaggtgaagcaagattcttagtaataatctgattttcactgttagatttcttttcacattcaagtcttgcaaggtcatctttcaaagcagcggctgtcagggttacggataaggtataccctctacccttggatatacgtcatatatcgat

SEQ ID NO: 20019 - DNA, 6165 bp, Oryza sativa
tcaaaactctggtcacactcagctgtccatttaaatttctcatctttcttaagcaactgagtcatgggtctggcgatcctatagaaattttcaatgaaccgacggtaataacccgcaagtccaagaaaacttcgaatctgtgacacggtcttaggtggggtccacttggtaactgactccacattcgacagatcgactgccacgccctgagctgtaatgacgtgacccagaaatttgacttccgacaaccagaagtcacacttgctgaacttggcatataattggtgctccttcaacttctcgagtaccagacggagatgttgctcatgttcttcttcagattttgaatagatgagtatgtcatcaatgaataccacaacaaacttatccagaaattccatgaacaccttgttcatcaggttcatgaagaatgcaggtgcgttggtatgtccaaaagacataaccgtgcactcatacaacccataccgagtggtgaaggctgtcttgggaatatcctcttcccgaattctcaactggtgatagcctgatcgcaggtctatcgtagaaaacactttagctcctttcagctgatcaaacaaatcatcgatccgcggtaaaggatatttgttcttgattgtgaccttattgagtgcgcggtaatcgacacacattctcttcgtcttgtccttcttctccacaaaaatgatcggagcgccccaaggtgaagtacttgttcgaatgtatcctttctgcagctgctcatccacctgcttcttgacctctgctagctcgttggctgccattcggtacggtctcttgtaaattggagcggttcctggtgccaaatcaatccggaattcaatctctctcttgggtggcatggtagtgaggtcttcggggaacacttctggatacttgcagactacggggatatcttccaatttccgcgaactcttctcgtcggtggccacagggttttccacctcatgctaatttaaggagattccttgcttcggtgagtgtcacatcctgatttttgtttcaggatttataaattatttaataaattattattagaatttatattaaatgttcattaatttacaagtgaagttaaatgtgggaaataaaatttcctaaatataaagcatggatggatttaatttttattaaattctccatgattaagtcaactctctgaaattttctcggatttttcagagctcaattcctaaatgatacaaagaacagttcagtaattatttgatcaataatgatctaattataattgttaagagcttttcttgtttaaaaatccttaaattataaattgttgtttaaaaggaataattagaaatgatcttaaaagagaagatctaattttaatttgctaaatctcaatataaaattgggttagataaaattttgttaaatactttacttgattctatagttcctagatttttctgggatttatttgagccaaggaagtatttttaatcaatggaatatcatttcatgaataatttaaatagaaaaatgtttttaaatcctccttttggctttgggccgaaagccggcccaaaacctctctctttctctctccctccctggcccaagtcggcccacaaccgagccgccgctctcttctctctctctcccgctgacaggtgggccccacctgtcgggcccgtcttcctcctcgcgccgctgccggccgaaaccctagccgccgccgcttttcaatccggtcgatcctttccgtttctggtgaaattgtttgaggggaaataatctcctcgatctcctcttccttttctcttatagaaacttcggtcaataacgtttggaaatcgacggatttgagctcgattcggatcgacttttctccctccaaccctagctttccatcttgccgccggtcgccgtgggcctccatcgccgctcgctagcccctttataagcacccccgagctctcctctatccgccgccacctttgccttagcccgccgtcgcgtctagcgccgcctccgcgtagccctagccgtcgctgtagttgccgtcggttcagccacgccgcgccgccgttgcagccgccgtcgtcggtcgccgtcgccaccatcgggatcgcgaggtcgtcaccgtccccgtccacctcttcgccgccgcagaagaccgccggagcaccgccgtcaccgtcgacccgaagaccgtcgccgcttcttcctcgtcgccggcgccgtccgttgctcttccgccgtggttttggtcaccggtgagttcgccgtgttgtcctctacccgttggtgtcctccgtttgcgtcgttgcgccgtcgttcgctggcgagcgcgcgaggccgagccgtcgccggtgatgacgtcatcgctgacgtcaccgctgacgtcatcgtcgccttgtcccgtgaaccgcggtagatcaagttgatctcggccgcccgttttggatagaatcgatcacggccgttcgtttccttagaccgccccgtgcacctggaccgcctttgatgacgcaataattcccttttccttttcaaaaataattctttattgcgtcataattcaattaaaatccacacaagtgttttaatccgatttaatctttgaaaattcataactaattcattgtaactcagtttaatgtggttcaagttgcaaaagttgtataaaataaagatctacatattaaaattatccataaattgaattaaatttatttaattctttttaaatgggctttaattagatttaatcttgtaaaattcataataaattcatatgaagtcagaatgaggccgttcaagtctcataattcatctaaaattatgatctacatgtttgtttactttttatgtattgtttatttggtttttattagtctttttcttcgttttgcgtgttagcttgtcgtttccgtcgttgcgaaggttcgtgagtacgccggaagtattcaagaagattaattgaagaccgattattgcaaggcaagtcacacagatcctaaacacaatcctttgagcatgttgatcctgtatttaaattctctatttatttcaactgtgcatttattttcgaatgtcactgggtggtgtgaatctattcctttgttatggcctgtttgcattgattactttattccttgataccttgggttattataacttgactagttgagctatatatattggttcagctagatattagatatgattgcttagccatgcttagaaacattagcacactattgggattacttatgactcattattatttaatgatggcttaatgatagttcacgatggtcaatcgtgattggttaattaattacttgccaactaaaacttgataatggtggcttgtgagcacatggttttgagagtcgtgctcatgacaatttaggaccggttcgcgagctactgttgtgaaacattaaccgtgccaaccacaagccagcgtgggcaacggctttaccttttgtatagcatgattcattgcggagcaccagactgagaagtggcggagataagcccacaggggtcgctggggagtccatgccttgtttataagggggtgattatgatccaggaaaggtgcgctgtggtggattgtgttgtgcaaggggtattgtcacaactcctttccgaggtaccgtggtggtattgaggcacatggtgacatgttgtgggactgtgtcttgtgggtacagtggtacacctctggccaaagtaaaactattcgaatagccgtgcccgcggttatgggcgggttgagcaatatttttcatgattagtctcacacctctcacaataattatggatgttatacctggtaataatttgcttagctcctggtttagagttagatctgtacagccgggtatggttgttcaggatggttgggcctgtgcagcatgggtgtgttgttcagtgttgattaaaatttctgattaattactccactgttttatttctcttaaatgttttgctaaatgctgcttttgcaaatgagcctatattatgccatcctttggtatccttgtgcacttgcatatttgctgtgtggcttgttgagtatgtcatatgctcattcttgcaataatcaatcaacctcagttgaagaaaaaggatctaggaggagaagacgtttggcttataccccagttgagctgcctgtgggagtggagccggagcttcgctagattttattttccgctgcagttttcttcatggtgaggactaagttcctcttaagtaagtatttatcgttttagttaatttgatgaatctgtatattaaattgtcagtttgtgtacctcggctgattcctggacgaggattttatgcacaaataagttcggaaattactagtgaattttcgggcgtgacagtgagactggtgacttgtacaccatggtttctcccttctcattggtcaaggtgactgtgcgattcacacaatcaatgacacccttaaacttggtcagccaatccattctaagaataacatctaggtccttggattcgagaagaatgaggttggctagaaatggtgatctttgaatttctattgttatagaggggctgaattgaaccgaagtggagctattccctggggtatgaacctgcattggtgtgctaagttcttctcttattaacccgtgtatcccaacaaacttccttgaaatgaacgaatgcgttgcaccagaatcaaaaagtactgttgcagggattgagttaacaggaaacgtacccagtacgacctctggtgctgcttgcgcctcctctgcggacgcgtggttgacacgagcctggacaaaccttggcccgggacgccttggcttcgggcatttgttagcaaagtggccatgctcgcctcagttgtagcaggaccctggctttgttccagtctccttcttggcttgggtggatggagctgactgtgctggtgccattggtgggcgcggagctgcattgcggttggggctgacctccctggtggttctggctgccactggcgccctggtggaaaccgcttgagttgaacgggcggtgctggcggacaatcatagtggtaggtccaccctgctgtccgggagtgaagcgcggtcgttggtggcttccttggttggactggaattgcgctgcctttctcttcctgtccattttgttgcgctgatcctcctgatggattgctttgtcaaccagcttctcaaagtcggcatagtctccagagattaactggttggttagctcgtcatccaggcctgctaggaacttctcctgcttctcggcgtcagtgcggacatcctccggtgcatatcgcgctagatgattgaactcatggagatactcagtcactgtcctgttgccctggtggagtgcccggaactccctcttcttctgtgccacaaccccgtctggcacctgcgccttcctgaagctgcgacagaactctgcccaagtgacttccgtgcctggcgggcgggtagccatgtgattgtcccaccaagctgacgcgggaccctggagctggtgtgtggcaaaggcgaccttctcctgatcattgcactgcaggagatttagcttcttctctatggcatggagccagtcattcgcctccatagggttggtggtgctagagaaggtgggtggcctgacgcgtagaaactccggcagtttggactgagggggagggggaccaaactgctgctgctgctgctcggcttgctgctgcatcctctggtgcatctgctgcatcatggctgccatcatcttgagtctgatgagccattacttgggccagagccggattctcggggagcggtagcggaccattgctggagtcgctgttgggatgcacaccgtcagtgcattcttcgccgttgctgccctcgcctgctgtacggctaccattcctggtgtagaccatctgaaggaagagcagacggaggggggggcaaagaagaaaaacagatgctccggaactaagctttattatataggaatgtaaactgcaattgttctgatttgacttaaaacacttaaaacgacaagcaaatccttattaagacagccatatcataggcacatgatatcgaccgtcgactgacccccaagcgaaaaacctaaacactcaaactaacagac

SEQ ID NO: 20020 - DNA, 3133 bp, Oryza sativa
cgcgggagctgacactggggcaggagctgggactggagctagagctgctcgagctgcgggaactgcgggcagaactggaggagctgcaggagctgcgggcggaggtgggttcctgggcgcaagctgaatgcgcacgggtgcagtcgttgacttgcggggcatgttgcggatccggactcctccgggaatggggaggcccttcaactgagcattctccttcttcaggcgtgcgatctcatccttcagagctatgatcctcatgagcttcccgtcatccgagtgcatcttgtccattcccctcatcacggcacacatatgacctaaggtggtgtcgttctcgccggctgtcggacagaaagtgctgatatcatcgccacttgctcgacgagggtggaaacggtacgctgtgttgcagaagatgtagttgtggcgctcacgtagtctagccatcatcaggtatgccgcctcctgacaggcgtgatctgcggtgcctccagatgcctcaaccaccatgttagcgaggcaggtacccacatagccatgaacctccagacgaacccggtgaggaaactcaccactgagcggcggaacagttgagtactctggcgcgttggggtagcccaccaccagtgtcatgcgagccaactctgccacaaaatcatccatgccttctccgcgatggttgggtgggtgatcggccatctagagaagacaaaggggtaggatcaatgcatgctcaaatccgacttaaatgaagcagtaaaagactccaattaaatacgcgaataagagcggaattttatgcatagatcatttttgcacgagggcgaataaataagatggacttacatactactaataataataagagcataaataccttgcaacccatattcctgagttaggacctaatgcattcctcccatcaaatcccgactgactgtcgaataaatctcaagtaattttactaaaaccctagactgacttgttttgacaaatctcacttaaacgagcgaccaagatttttcccttgaaccacaagaacaaatcccaatttttccaggaacaaatccaattgcaaagaacatatgcaatgaaaaggattcagagggctcttaggtttttccatttggcttgtcctacagtcaaggtcggctctgataccaacttgtcacgcccagaaattcccgaatagaattccaagcagaatgtgcattaaaatccccgtccaggaccatccggggtacacaaacgacaaagttgacatacagatccacgtcttacaaacattataaaagtcttacaaaaatgcagcggaaaacttaaaggataactggagctaagccttgacttggacttgcagcgggaacaccactccacaggcatcctcgacggcacgggcgaagcctactcctcggaaagaccaccatctgacgcatactcaaattctggggtttggggaaaatagagcaagactgagtactacccactgtactcagcaagtcataccggaataggggtatgatgcagggaattatcaagggatagctataatggttcatttgcataaagcgagcatttataaacagaagttgaaagcagtaaaacagctgtaataattaatcaatattaaccatccactgttcaacgctacaccacgttgcaacaggcccaaccatccacctgaactaatcagttccaacagactacactagggtgaagctaatcatggtgaatctggttgaccgcccataaccgcgggcacggctattcgaatagttttactctgatcagaggtgtacaactgtacccacaagacacagccccacaacacgttaccgtgcgccgacatgccaccacgacataccggaaagaggccgtgacaggatccttcgcataaccccctctaaccaagcacaccacacctcaggtttcacccccgtccccagtgggcaacgggcagtcccctctcgtgcctaggtgaatccggaagtgacagaggccgtcgcaggggacgccccactccatcacgcccacccttgcctggatgcgtcggctagaggaaagctacactacaagcccagccgttgcccacgctggcttgtggtaagtacaaggaattcttctagggtttcccgcgaaccggtccttaagtgccatgggcgcgaccatcaaaaccatgcacccacggcccaccatttattatattttaattaaccaacaccggagcggtgagcattaaccaacatcattcctagaatctgatatctctgcattaatgtagtcccccattgtgtgctagttgaactaagcaaagctaagcattccctagtccaatctctagtcatgttatatcccaagctaacaaaggaacatggtacaaaatagcatggctatgacagtaggtcaacatcccatagtattattgtaaaacaatgcaatatttgaagaaaaacaatagaacatttgcaatataggatcaacatgttcaagtgacaagcatgacttgccttgctctgcggttagagggacccggcgactatttcaaagtacaccggagcgtcggggaagcctgaatctaagcgacatacaaagcaaacaatacaaacaggctataagactactgaaacggagaacaaaaccatttttaatggattctacacatttttctttatttactgagacttgaatgggcttaaacggagctcggatgaattagatatgaattttagaagattaaatgtgcttttactataaacagaaaaatccttaattgatttattgcgcaataaataaatcccggggagagagagggggcggcgccgacatgcgggccccatatggcagtgactcgaggagggcggtccacggcggaccgggaaggagcggcgcaccacgtggtgcacacgtggcgccgacgcggcgcacacgcggcagccgaaccgacagccccgatctaccctacccaagggttgatcggacagcggcggggagctcgcggccggcgcgcgcgggcggctcaagctgacccggggccatggcgctgcagcgcggcaccggcggcgaccggcggacggcggcggcgattcggcagacggcggcggcgcgacgacggctaagcggcggtgctacc

SEQ ID NO: 20021 - DNA, 14583 bp, Oryza sativa
cggaaaaaggaaaagtgaggaggaggatgcggggatggattttataggggcggagaggtcgggaacggccgggagtggcccgattcgccggccgacgtggggaggtggaggtggagagagaggtgggatttgaatttcgaatcccggccgtctcgggtgcgggcacgggcgagagggatggggagtgggtgcgggagacgcggcgcatgcgcgggcgtggccgacgtggcccggaggaggcgggagcgtggatgcggcggcggttgcgggcgcggtggcggtggctggaggttgggggaggacccgacaggtaggccccacctgtcagtgaccccgggagagagagggaggccgccggctcagctgggcctcggcctgtcggccggcccagcgggagaaaggggtgggaagagagaatgggccggcgacctattccgaaaagaaaaaggagggaaaaagaaagaaaaaggaggaaaagaattttccagggaattaaatattgcatgtgctcaattttaattggttaaaattatttctagggctctgaaaattccactaaaaatcttgttagcaaatttcgacatgtagaactcaagaaaaattccacatgccaattccgattattaattgcattgatttattagggtttactcttgcttttacaccgatattttttctggtgaattataaattcaatttaggcttgggaaagaacttcagggtgtgacagcagggctcatcgtcgacaagcacaccacgcgatgtgtttgctatcggcgggaccagcacgtctgcgcgtgctgacgcggaagtggagaatcaagtggttacaccggcccagcacatcggggccatcaacgcaatactgagggaaaccccttatgatcccattctgaacgatgacctcacacggtggacagaatgactacgggaatcagtggccaatctcagtaatgcgttcgaggaggccactgccggagcaaaccagaacaaccgccagctagcggtgcaaatggtgaaccacctgagcagcggacatcacctcgacaagacacccctccacctcgcggcaccggcgatctttgtgaccatcttaatggccgccgagaagtacgacacgcgcgagacaatgaaaaccattcctgacatcgcgtctcatcacgacgtcgcgagaacgaggagcgaggaggacacccaagcgaaaaccgagaccgtgataaccgccacagccgccacgaacatgatgatcgcgaacagcggatgccaggcgatactggtcgaggacgccgccataacgatgatgacgatggagatcgtcgccgggacatcaacgggaggcgacgacaggattctcgagaacccggacgtcatcctcgtaatcgtacaccggaaccaagtgactcatcgtcatcgtcatcatcctcatcatcctcattgtcagacagaaatccacggaggacatacgatcatcgacaacccaccacccccagcggcagatgtaaagctttcaaccgtgctctacgtgatgtccggtggcctgagagattccgaccgggagcaatagagaagtatgattggagcaccgacctagaagaattccttcaggtctattccagagtactctacactgccggagcggacgacaacgcgttagcgaattatttgccagtggcgttgaaaggatctgcacgttcatggcttgttcacctccggccatactcgatttcttcatgggcagatctgtggcagcagttcgttgctaacttccaaggaacttacaagcgccatgcgatcgaagacgacctacacgcgttgacacagaatccgggcaaatcattgagggactacgttcgacgctttaatgagtgcagaaatactatccccgagatcaccaatgcttccgtgatctacgctttcaagactggtgtcagagatcgctataccacccaggagttggcgacaaggaggatcaggactgctcgaaaactattcgagattgtcgattgatgcgctcacgcggacgacgcactaagacgcaagaacaacaagccgaagacgggaggagagaagaaaccagccaaagacgcacctgaatcaagcaagaagaagagtcacaagagtgggaaaacgaaagctcaaacggaagtcctcgcggcagagtacgtggaccctcccaagcaccctgacccacaaggcaacgacacgaagaaaatatggtgccccatacacaagtcagacagacactctttggaagattgcttcgtcttcaaaaagtcgctcgcaaagcaactggcattggagaagggcaaacgagtacgtgtagtcgagaaggccgctgaggcagctactcaggacttggactcagcataacctgattccgatctccatgtctcgcaaatcttcggaggttccatggcgtactcctcaaagagagagtacaagaaaatggagcgtgaagtttgttcgacatggcagagggctgcgaccaagatgaagtggttagaacagaagatcgagttctcagatgaagaccaccccaagactgctgtcacgccaggacgatatccgattgtggtcgagcccactatttagaataccaaggtcgcacgggttcttatcgatgggggcagctccatcaaccttctcttcgcctgcaccttggacactatgggaatcccacgaagcgagttgacgcccattaatcaacccttccatgcaattactcctcaatcatcgtccaagccattgggcaagattatgttgcctgtgactttcggccaagcaaataacttccgaacagagcagatcacctttgatgttgctgaatttgatacagcatacaatgctatcatcggaagaactgctctcgcgaagttcatggccgcatctcactacacatatcaagtgctcttgatgcctgggccgaaggtgatgagtacacaactagctcggatataaccatgactaccttatatatgagtcaaccaaaggtgcatatgttctatattagatttacttgttatatatttgaacaaacgttgctacacattgtgtttcatgtgttttcgttcgcagaggtacttgcttgggggaaagaaaagagaccgagcgtaaggaatgcatggatgactgaagaagttgattggggaccaaaccaagaccttctccaagtatacttctacctcaccacgtcacttttggcctatagaagacaagagatcaagttgtacatgttttggattcagattcgggccttctgacagcatctatttcaaacggacctagccgctgatctagaaggagtttcggggcccatgagtacttgttggaaagcttatggagtctactttcagatggttttggtcccatgtcaaaattccaaccaagctgccggaaatctgcaaaacaagccacgtacctcatccagtccgaatctgatttgggttttgggccttgtaattgtcatgggcttagcccaatggggtgtgcgccttagggcaaccctaggacgtccctaatcacatttattcaatagccgtcatcgtttagagtcgggttttgcttagattattctgtcaagaacagtttcgccgctagattggtttgtggaaccccaaatctgagtgcttaatcattcatatgcaatttggttgcaatctatcttgttcttgcttgtgttcttcgattcgcatgcagggattagccttctcggtgaggtcaactgggtttcggcacggttgataaccagaggagacgtggtgctgcgattgcggggataagtagcgtgttcgtttagaagccggatcgagttgtgtcgtgactccacccaaatcgattgtttatcaatacctatcggaagatcgggacctaacatcccccatcagaagggaacaatcactgttcaagggaacgcaaagctggcagtgcaatgcgacaagcagagcctcgacatggtcgagcacacgcccagcccacccgccacagctgagccacccaggaaagtgagcaaaacgaacaagacgccgaaaccagacggcgcaatcaagatcgttccgctctccagtgccaaccccgacaaggccgtcaagatcggggcatcactgggcgagaaataggaactcgcgctcatcaccttcctccgtgacagtgcatatgtgttcacttggcagccgtccgacatgccgggggtccctagggaggtgattgagcacaaactcatggtgcgacccgatgccaagccagtaaaacaaaaactgcagagatttgcaccagatcgaaaacaggccatacgagaagagctcgacaagcttctcaaagctactccatccagagtggctagccaacctagtcatggtgcagaaggccaataggaagtggaggatgtgcgtcgacttcaccgacttcaacaaggcgtgtcccaaggatcacttccctcttcctcgaatagaccaactggtcgactcaacagctggttgtgagttgttaagttttcttgacgcttactccggttaccaccaaatcagcatggcgaaagaggatgaggagaagacagcatttatcacgccgttcggtgtattttgctacgttaagatgccgtttggactgataactgcaggaaacacttttcaacgcacggtccaaggggcacttaacgatcagcttgggaacaatgttgaggcctacgtcgatgacattgttgtcaagaccaagacaagcgactcattgattgacgatctacgggaaacattcgacaaccgccgatgatatcgcctcgtgctcaatccagaaaagtgcacgttcggagtaccatcgggcaagctgctcaggttcctcgtatttggcagaggaaccgaagaaaatcccgagaagatcaaggcaatcaagaacgtgaagtcgcccacaagactcaaggaagtacagaagctaactggatgcatggcggcactaagctggttcgtcgctaggatgggagaacgaggacaacctttcttcgctttgctgaagaaacaagacaaatttgtatggacacaagaagccgaagaggcattcatcgcactcaagcgctacctgtcaaacccccctgtacttgttactccccatcctaatgaagaattattcctttatattgccgccacgccatattccatgagtactgtcattgttgtcgagagagagaaggtgcaaagaccagtctactacgtcagcgaagctctccacgacgcgaagacaagatacccacagatccaaaaactgctctatgcagtaatcatgacgtcaagaaagctacgtcactacttccaagcccacagggtcacagttgtttcctccttccctcttggtgaagtcgtgagaaacaaagacgttgtcggcctcattgcgaaatgggtagtcgagctaagctagtttgatgtccactttgtgccacgaacagccatcaagtcccaggttctcgccgacttcgtagccgattggactatgcttgaaaacaggtcagacagtcaaaccgacaacgaaacatggacaatggcgttcgacggtgcactcaacagccaaggagcaggggcagggttcatcttgacatcaccttcgggagatcagttcaagcatgcaattcacctcaacttcagggcgaccaacaacactaccgaatactaaggactactcactgggataagagcagcagccgcacttggagtcaagcgactgatcgtaaaaggggattccgaactagtcgcaaaccaggtgcacaaagactacaagtggtctagccccgaggtagagttatccaagtacctcgcagaagtactcaggaagctggaaaaaagatttgatggaatcgaggtccgacacgtataccgcaaggacaacatcgaaccagatgatctagcacggcgtgcgtccagacgggagccactcaaacccggcacctctctggacgtcctgacaaagccatcggtgaaagaggcaaacgacgaagatagcacagttgcccccgacatcagctcgggggctacagaggcagagtgtgccattgccgacatcgagaccacagacggctagcggatcccactcattaaattcataagtagtgacaagttgcccgaggacgatgcagaagccgagaaaataacccgtcaagccaaaatctactgtatgatcggcaatgatctatacaagaaggcaccaaacggggtacttctcaaatgcgtctcgttcgacgatggcaaacatctcctcctcgacatacacgaagggatctgtgggtcacatgccgccgatcgcacattggtcggaaaagcttttcgacaagggtttttctggcctactgccctcaaagacatttgcgacatggtacagcggtgtgaagcttgtcaatttcatagtaaacacacaaagttaccagcgcaagcgttccaaactatccctctcacttggccgatctcatgctgggggctcgacatactcggaccattcccacgaggacaagggaagcgacctccacgggggaaatcaaggccgacagtgccatcaaattcattaaagagatattctacagatatggattgcctcaccgcatcataacggacaacggctcccagttcatcagtgccaacttccaggattactgcattaggctgggagtcaagatctgcttcgcttcggtttctcaccctcagagcaatggacaggtcaagagggcaaatggcatagtactacaaggaattaagacccgtgtctacgacagactgatgtcacatgacaagaagtgggttgaagaacttccctctgtactatgggccgtgcgtaccacaccgacaacgtccaacaaggagacacccttcttcctcatgtacggctcagaggctatgctccctactgagttacagcatcagagtacatgagtacataagtactccgacgaggatcaggaggaacagcgaaccgacgacgtgaatctactcgaggaacatcgagaaagagttgccgtcagagcagccagttaccaacaggcccttcgccgatatcacgagaagcgcatcagagcacgcacactttcgattagtgactacgtcctctgacgggttcaaagccaggcagggcgtaacaagctctcacccaaatgggaaggaccgtacacaatcacgcaagtcttgcggccgggtgcatttaagattgcagacggtgatggccgcgagttagcaaattcttaggaacattgatcaattacgtaaattctatgtataaatcaatagtatccatacttgtaagacatcttatagcttcaataagatttatttttaggtaaagattacaatcaaagtgttccttcccgacgatccctcaccacgataacacctagcattgaaacctaacctcatgtccctttacgccgtcttgacaaggcctccgaggaacctaagggaacttcggctggggacactcagagccgataaggccttgtcggatcatgaagggacaaaagaccatgtaagatcaggtcgtgtaagagttcttgccgcgcgtattaaccaagccgtgtaatcggaaattgggttttccaacttcactgctgggggctaggatcagtgcttgttcaaccaaggcaggtcaaaggttcaagagccttatcttcctagaaaaattctccgatgataaggctgggggctagggagagtgtatgactcaagtgactgatcgaagtcacgaagtgagaaaacactcatacacaacgcatctagagtaagaaaacttagttagatagatttcttttctatttcacaactacttcttacagttcgtaaatattccaaaatatattacatgtctccctgagatatttgtcacaggatataaagactaccaggaaggccaacgccagtccatggactggaagaccttctctgcaagcggcgcaatcgacttcgccagattatctatctctgcgggagtcctccgagaaggagaaaacccttcgtggaggaactcgaggtgcagctgcgggtggtgatactggatacaggccaacacgtgccctccagcatattggctcgatcgacgacactcctgcttaagggcctcatcgatacgcttgccgatgccttcaagctgagcacaggccccattcagccacgagatgtatccagccgctgactcctcggggtgcccgcgaggtactcggagttccctgcagactccggccatggccgtacaatagctcctgaggtacgagttgaaccacacctcgcgacctcggagtgcttctacggctcggtccttcttaacttctaccatagtcctctcgagttcagccacctcgaactttgtcctccaatattggatccgacgatctcggtcggccaacgcactctcgaggtctgctcaacagggaaatgactaagtcaagtcgtgcccctcttccgagaacacggcaaattaagtcgatccgaacaaaaagagcaaaggagatgaagaccaaagaacaaacctaaggaagtcgtcgccatgctcgcttccatggacaagttctgatctacgtagtcctgcagcacatatggctcgagcgcaagtgccgaaacgactaccggcgactcaggctgcccgcgctgctggacatcctcgacgtcgacatctctacgacgacaacaaagtactcaaaatcaacatgctaaagaaaacgaaggtgatgactgcatacacaaaagcagtttgaacctacgaaagttttacaagcgcaattgattaaggagtacaaggaggctgaaatcctactcttcaaaaagggggagacagactccccaagtcaccgtcttcttccatcacgcccttacgcgcgtagttagcagccccctgatctaagatcctctggaggtcgagttcagggtgcaccaaccttacgcacgtgaggtcgtggcacacctcggtgtagatcccgttggacgtctcctccccgatcctggccgcatgcttggaggggatctcctgtcacaccctaaaaatcctaaatatataaattgttgtttaattagaattattagaatttattttaaaagtctagaagagaagatctagttttaattaataaattccaatataaaatggggccagataaaatttcattaaatactttgcttaattctataattcctagatttttctgggatttatttgagctaaggaagtatttttaataaatggaattgcatttcatgaataatttaaattgaaaaatgtttttaaaagtctcttttggctttgggccgaaagtcggcccaaaatcctctctctctctctccccggcccaagtcggcccagtccgcagccgccgcgcgcgcgcgttcggtcgctgacaggtgggtcccacctgtcggacccgtcgtctacctccggccgccgccgcccgaaccctagccgagccgtgccgccgtctccttccaaattcggccgcgtctttccttctccggtgaaatcaatagaggggaattgatcttcgggatctcctctaccttttctcttttggaatcaccgtcttattcgctttggaagttcgtggattcgaggtcgaatcggatcggtctctttcctccgaaccctaacctttccttcgcgtcgccggtcgccgtgggccttcgccgccgccctccaacccctataaaaggatcgccggtgtcgccgctacccgtcgccaccctcgccttcgtctctcgtcgtcggaagcgccctagcgccgtgtaacctcgtgccgccgtcgtcgccgccgctccagccgtgcttcgccgtcgctccagccgtcgccgtcgctcgggaaggtcgccatcgtggtcgccgtcgcgtcgccgtcctcgtccgccccttcgccgtcgctgtagaccgccggagcatcgccgtcgtcgtcaagccgaaggactccgccgccttttcctcgacgccgccgtcgtccgttcatcttccgccgttgtttggtcaccggtgagttcgccgcgccgcgctctacgtcctggtgccctccgtttgtgccgtagcgccgtcgttcaccggcgagcttgcgctcccgagccgccgccggagatgacgttgccgctgacgtcatcgggaccgtccgtcgtggcccggccgttgatcggttgatctcggtcgtccgttttggataggatcgatctcggccgtccgtttccgtgaaccgctgccgtgcgcccggtccaccgcaaaccctagccactgacgcaataattccctttttccttttcaaaaataattcattattgcgtcataattcaattaaaatccatataagtgttttaatccgatttaatctttaaaaattcataactaattcatattagctcggatttagttggttcaagtctctaaatttttctaaaattgagatctacatgttaaaaatatccacatgtactgttcatgcttgtttatatgctgttttggtgattttgcccttttctgtttagattccgatgtttccggagagtctgttttcacaggagaagaatttgaagagttccaaggccagcaaggcaagtcacacagatcccaaacaatcctttgagcatgttgatcccgcttaaagctactgtttctattcaactattacatttattttcgaatgtcattgggtggaattaacctattgtttgttatagccctttttgttcttgattcctttattccttgataccttgggttattttaacttgactagttgggctatatatattggttaagctagatgttagacgtgattgcttagccatgcttagaaacattagcacactattgggataacttatgattcactattatttaatgatggcttattgttagttcacgatggtcaatcgtgattggttagttaattaatgtgccaactaaaacttgataatggtgggttgtgagcacatggttttgagagtcgtgctcatgacaattaaggaccggttcacgtgtttcggttgtgaaacattaaccgtgccaaccacaagccagcgtgggcaacggctttaccttttgtatagcatggttcattgcggagcaccagactgagaagtggcggagataagcccacgggggtcgctggggagtccatgccttgtttataagggggtgattatgatccaggaaaggtgcgctgtggtggattgtgttgtgcaaggggtattgtcacagctcctttccgaggtaccgtggtggtattgaggcacatggtgacatgttgtggggctgtgtcttgtgggtacagtggtacacctctggccagagtaaaactattcgaatagccgtgcccgcgtttatgggcgggtctaacaatgtctttcgtgattagtctcacacctctcatcataataaaagatgctataactggtaataatttgattagctcctggtttggaatggtatattcctggtttggagatagatctgtacagccgggtatggttgttcagaatggtagggcctatacaatagggtatgttgtatagcgttggattaatattgtttaattattacttaaccgttttattaaattctgaaatgtttattaaatgctgtttatgcaaatgaaaccctactatgccatcctttggtatcctgtgcacttgcatatttgctgcgtggcttgctgagtatgtcatatactcaccttgcaatcattcatcagaggaagagttctacaatgatgctgatggtgtggaggattaggtgtagccctggtcaagctgcctgtggagtggagccgtctgcgccgtttatcttattttccgctgcttagatctttattgattgagaggaactatctacctctgtaatgacattttattcacttattaattagagtaataattgtactctattatcaatttgttattgtgtgcctcggctgattcctggacgagggttcacacacatgtaagcgtttggaattttggatagaaatttcgggcgtgacatctcctccatcgccgtggccagttccgcgagcgaagacatcagcgagaactcattgggattcaccgggatggtggtcgtaacaccgcactgcccggcgagctggtacaggccggtgtatgtaacccgcagcgagccacggatctccgataggttgttctcgagctctgacatgtggtgctcgagcccctgccgctgccgctcgttgccggccaccagctccctcatcttctggaggtcctcgcggacctccgccaggtcacgcgtcagcttgtcagcgcgttcgttcgccgacgacgccgccgccgccgccttcacctcctcaatctcgcgccctatgccgtgagcatctgcctggaggatgcgctccatctcgatttggaactccccccaggtgaggacgtcagcgggcgggccgcaagtaggcacaaggctgccggcagggccgctgggcgtcgcctcacggctcctgggcacgaccacgacatctgtcgaagccgctgcaggagacgcgctggagtttcctccagacccgtcttgcaccgctttcgcccgcgccgtcctatgaaggatttccgtgatttccatgaaggcaggctaccaaagttttgtgaattaaaagacctcaaattcatctagttacttctcaccaagtgtcaccagcctttgccggcgctgaggcgggggagacgcgtctaaggcctaagtaaaatgagcatggtgtaaggtcaagatcttctgactacgcgataaaggaccagaaaagctcaccaatggggtaggcgccttccgacgattcccaagcacagaggagaacttcctccctctcttcggaatgttgctgccactcattgtagcagcagcagcagcagcaatgtcagatgcctccttggcaatgccctctttcaatgaggccgctgcctggtggtccacgagcggcccgatgacgtcagtcagagggagagcctgcacgcatgaagtctcagtacgatccagaaaagcagaagtaaaggagttctcaaatacactcacgatgatcgtagcctcgcgatcagccttccccttctcacaaagagggatggggacgttgcttgccgtcgtagggccgctgatcatcacctaaccgacgcggtgctccacggttttgctgtttaaacctgtaagatcgaggagtagaactcgataagtatggaggaacatgcaaataaagagtgtaatccgaaatacgagaaaaataccccgaggagaaacccaggtcgcgtcctccggcccagaatagtcaaaggctaggtgggctcgggcctagagcggctgaatccacctaccgatgaagtcggcagcgacttcataccccgataaccctcgtactcggaggtcatcgatgacatcgatgaaagactgaagggaaggggttagggcaggtttggcggcccattcggaaatcttatctggttgctcctcaggaacaacaaagactagatccgaattttctatctgaagataaaaccacctcgtccgccatttgctacgagaagaggggcactgaaaggggatgtatcgcgacttcaggccatctcgaagccggaaaccaacacaccggacacctttttaggttccatccagcgcaactcatagtagaagcgaaagagatcaagaaagggctctaccccaatgtaggcctcacaaagatgggagaaaatactgagaaaggcgatggaattggggttcaggtggagcaaagaaagaccatagatattcaagacgagaagaagaaactcggagggcggaggaagaaaaccacaaagaatatagtcctcaaccgcaaccatgcggcccaggacaggttcgggttcaatacctcctggttctctctccatggtcccgcgacaagggagagcgccgtcctcctgcagcttcttcatggacgcgctggtggaagtggacttgtcgagatcactgttagggttacggataaggtataccctctacccttggatatacatcatgtatcgatatggtatatctacgcatatacggacattctctgtacacgttaaggaaattcatcacggagtccacagatggaaggattcctactcggatagaacagggtcgtcactgtatcgtgtagggtccgatgtctccgagttctacttggagatcaacacgtggcctgggagatctgcttaactccagtgcaggtccaaagctcaccttcggatatgttagcgtgccagttgattcgatcctgtaatcaacaagaaatagaaacaaagaaatcgtggttaaatctataaatgatagccgatcggctagatgccaacggcatatcatttatctttgagccgatgtcatctgtgtatcgatcgacaatcatgaataagtaaagaagaactaaatctactcgatcggctatagatattaacgatatatactccttatatcgatgtatacttaaatcaagtgattgggatagatcggtcatcatgccgagacagtatgaatcacttagaccgaaatatatatcaataacaggactatatatgtttatagcatagccgatcagatagatctagcatgtatcggctaatactctgatactactctatatgggctgcagga

SEQ ID NO: 20022 - DNA, 4264 bp, Oryza sativa
ataatatatcaaacaaaggtctaacatacttagatgcagtagtattttgatataagggcagatttaacatgtcaatagagcatatagaacaaatatagttaaatcagatacgatcggctgaaactctgatgctattctaatcggcaactagaaggcaggctagagattgatattctaagcacgacttaatagatcaaactcaactgatgcagcattaagtatgaaaagaagaacaatatctagacaatcaaaccgctagaagtctcatagaatggtagatatctcatataatctagatcaacatcaagatctaacctaatcggctgccttctgcatatagatgttagccgataataggttaggtggcgatattgctaaagattatgtaagatatatgataactcgacgaattatataaacaagattagagtatcataaagatggaagcactaatcctaagaacacaatccgtcataacgaattttacctcttgttgaagatcgaaattgatgcagctcaacccgaaagcaagaactcgtcgaaacaaaactaaagcaaaagggtggcgatgcgccaaaattgtattgaacgtgtgttgttaattacatagggctcggggtctatttatacccgagaattacaagatatgcccataccggacacgactattatctctaacaaactctaagataccataagtctttgcggcagacttttgcccacatttatctataaggaatttacataagatatcctaattaatagatacaattgccttcccaggactctatctatgcgtggcaatcatcttgaagtacattaacttgaacccgatatcgcgtacaagtcatattgtcgggatcggctacatcggcttacctagcccgactcagacccagccgatcttatcgtagccgatctggactccagccgattcctgctctgttttcaaactcgatctccgcttccgactttgcttcgatctaatcttctttcccaacgctgatgttaccaagtccgcaatatttggtaatgtttcggatttgctgtaaatcgactccgagcaagtttcgcactttaccgttttctgaccgttactgccgtgctttaaatactaaccgtcaccctcgagaaacctcacaccgtgacttctgttttctctttcttctccggcgactcctccggcgcaaaggcgatttctaggcgacttcctcctcgacgagatctccgcccgcaacaatgtcgtcttccgccagcccatctggtgcgccatcagccgaatatgctgaggtaagttctcatcggctaaatccccttctttagcagcagatcgatcttctcttatctcatattgctctcttcctctgaatctctttggatttgtagcacctctccaacctagttgcaattcccaacctgtcgcatgaaaaccactactttctcggcccagtcggcaatccagaccccgccgagttcactattggtgaaaccaataggatccccttcagattaaccaacccagatctaggtcactagaagaataccttcaagtcctggccgtctctagagaaagttccaccagaaaagagctggactacatggttcaaacgtgtatcagccggcaagagggtccactgggatgaaatcggaatcggccaagcacttgaccttactatagcaaagtcggccaaagatgaacccctgatgacagctgcttcttacttctggtcgaacaccattaaagcctttttgttcaatgaagggccgatgactccaactctcatagatatcagcatgatcacaggtctggatgtcaccttatcggccaaccctatgagtttgaacacaaagaaccaatatgacttcaagaccaaaagcataggaggttggtcaggctacgtaatggcatatatgggccagggctcggtcacccctcgggaacatgtgccttttttgttaatgtggctagaaaaatttcttttctgtggatcaagttgtggccccacaaccaactggcaatttctagctgaaactctagaaacaaagagacaattccccttgggcaaaattctcctcggctatctataccagatgttgaacaatgcatcggctaagatagccgtcggctcagtagttggagcaggtggaccctggtggctgctacaaacctggtcaaacctgctagttatgaaggttgtcaatcggccatccgtatcagaagctgagttcccaagactagagctgattgtaggagatgatggagaagagcgtactcatcggagatgcacatcatacggagaatatgcttctacaccaactgacactggggcaaaactatcggctgaactactcaaagattggttctgtagcttctatgaaggctttcaaaaaaatactcgagtttggtttctttatgaaaattctgcagaacttgaacacccattggacttcagattcgaagacatcaaccatgaagtataccaatcatccagggaaattttctcggctgcaatcagcccatgcatccttcctgttggcattcatcaaggaagaaacatccaagcttcttatgaattctatcatccaatgagctcaactagacaacttggaatgggccaactcccaattggcttattctttgccgacaaaatccaatgccgaggagaaatttcatcaaccctgatgatggatcggctgctcaaacttcaaggaccccctttgggcagtattaacaacatagaactgtcaacattcagaagcaaaaactttgacaggtggtggggcgaatggaagctgcatctattccaacaaccagcttcaatatatatgacagacctctttccagatgttgttcctcaagtaagtctttaactttgcttgatttcatttacatagttgtttggccgattaagctcaactaatcctccttttgatttgcagacaacagaatcctcccctcctcatcaaagcaacagtggcaaggacatccaatatgccccaggtttaattcctaacggaggtgggctatctcctccggttattggctatgatgcccccaagacctcagctcttcttcaagggctcatcagggaaccaaccgatgccggcaaaaagaggaaaaccagatcgtcggctgtaagcatcgcagctccaactaagaagaagaagaagacaaagaaaaccaagccagccgatgacctgcctaccctagatccatccattgaacaagctctggatgaagagataattgaagacgaagttgatcaggccgcagccgaagtaagcgatactaaaagaacaccatcggcttcgcctaagcaaacccctccaactccttttgctccggtccacttttcaagagtaagcaactttctttaattcctctcataattatttgtcttatagccgatcactcccaagttttataactgcaaaaaaagaagactgcggtgaagaagaaatcggctgcaacaacatctaaaccaactccaccagtaagatagttttaactttcattagttaattttcagctgattctgtctgacacttgtttcctttcagccttcccctcctcctgtacaacaatcgtcaagtgaccagaatgtcttagccgattgtggggtgtcatcacgtcgagaaagaagaacaaccagctgctcctgctatcccagtaagtttctttttgtctcaacaagcattcagatcggctatgactgtttctaactgcttctaaattgtcactgcaggtattagccgatcttttctcttttgacatcagagactatcttgatgaaggagaagaagataccacaagcaaagccttagcccctttatctgatgatgtgaagaaaactctaggaagtatcttgggtcggctagaagcatcatcgctagatagcttggtggttgattgtggctcaatcagggctcggctacatgagattcaggctctaatcccacatgagctagccgatatccttaccccagccgtttaccttgagcaacaccaattcaaattggagaaagccaagttaagactggcggaatggcgagagcgtaaggacattgaggccactatccaagccaaccgacaacttgtgtatgaagaaaaatccaagctcgatcaactatctgaaggcccaatcaagtctaatattgatcggctcgaggctcgcaagattgaactcttagcacaacttgaagaatgcaacgctgagctggacatggaacacaaaaaactagccgatctcccaaagtctattga

SEQ ID NO: 20023 - DNA, 2287 bp, Oryza sativa
aggctatatcggccatccagcgatactaatcttaataatctttgtgtaataggacttagaatttttgtaatcggctaagacattctgatactttattgtcttaacaatcctttgtgccaattaatatgacttcaaaatttgctcaaaaattttgcactgcattttgatatatatgtgcccccctagttttacaatgtcaagagcattgataaaattataaaacaactaagggcgatataacaatatcggtcattgtacatcggcaaaccacaaccgattacaccatgaaaaacaactaagggcgatataacaatatcggccattatacatcggcaagccacaaccgatgacactatgaaaaacaactaagggcgatagaacaatgtcggccatcggaaggcgatgtaaacacatcggctgtcatgcatcggcaatataagtcgatcatgcattaatccaaacacttgggtaatatttcttcaaatatttgccattgagcgctcgcccataatcttcaccatcaagcccttgcaacatatatgctcccttagacacaaccttatgaatttggaatggtccttcccaattcagcgaccacttgccgaatttactatcacgagtaccaatcggcaaaatcagcttccatacaagttctccttccgaaaaatctttaggtaccactttcttattataatgccgagcaacacattccttatccttaataaccttcgcaagggctcgcaatcgtgactgaaccaaatcctccctcttatcagccataaggttgtaatactcatcggctgttaaatcgttttgcaactccgttcattgagagccatttctaacctcccatggcaaaacagcctcatgcccataaacaagtttgtaaggaggaacttgaatcgaaccatgacaagccatcctataagatcacaatgcttcggccaaccgagtatgccattgccgaggataatcaaaaattttctgcttaatcaatttgatcaaacttttattagacgcctcggcttgcccattagcttgtgcataataaggagaagaattcaacaacttgatacccacgctatcggcaaactgaacaaactcatcggacacgaagattcatccttgatccgtagtaataatttgaggaagaccaaatcagtagattatatgctcctgaacaaattaaatagcatccccataatcaactttcttcaaaggaatcgcctctacccacttggtgaaataatcagttgccaccaatataaatttatgtcctttactcgatgatgggtttatcataccgatcatatcaattccccaacctctgaacggccacggcttaataataggattcatagccgacgccggtgcttgctgaatagctgcgaacttctgacaatcctgacaccccttataatatctgaaacaatcttccagcattgtcggccaaaagtaccctgcacgccgaagcaaccacttcatcttgtgagccgattgatgagtaccacagatcccttcgtgaacttcgccaattgcaaccttagcctgatcggcactcaaccacttaagtaatactccatcaatcatccgataataaagctcatcatccaacagtgtatactttagtgccttatatcttaatttcctagaagccgattgagatggattactcaaatactgatgcacatcgtacctccaatcatcggctgacatcgctgcaatttcaactttaacatctttgatcattggcttataccccgatgccccttgagctaaatcattagcttcaagattttgttctcgagatacatgctttaaagtaaccagccgaaactctttcattagttccaggcacttctcgttataaaccatcaatgtatcgttcttgcattcatattctcctgccaattggctgattactagcaaagaatcgcccatgatttcaatggtatcggcttcaacttccttgagtaattgcaaccccttgagcactgcttcatactcagcttgattattggtcgcatatggtttaatagtataagcaaactcgaaacatgccctcctaggggaaattataactaagccgatgccacaaccatgagtacataccgatccgtcaaagaataaagtccatggcactatctcaaccgagccgattgaatcatcacgatgctctacattaaaatcggctatagcttgtccctaatcgctttcggtgattcataccgaagatcaaactcagtcaaggaaaatatccactttccaactcttccctttaatattg

SEQ ID NO: 20024 - DNA, 15331 bp, Oryza sativa
ccatttttgctaataaatgtcagccttggccgatcgcctggacctatgtctatttctcccaactcatcggccgacatgaaaccttgaccttgcttgtcatcgagatcatctactgtatccttagcatagacatttgaaccctccacgacgccctcaaagtaatagcttgggttctccatcttcgattggctgtatatcagaatcggacacttttagaaaatctccatcccagacttttccagataaacaatcaaggccatccatctcccaaagggctaaatcagcactggcaacattaactgacctgtcggctagcacgatctctatcttgtcgccttgccattgaatcaagcattgatgcatagtcgaagggatgcaacaattggcgtgaatccaatcccttccaagcaacaagctgtacgaacccttcccatcgatgacaaaaaacgtggtaggaatagtcttgctaccgactgtcagctccacattgagaacacctctggtttccgatggattaccaccaaagtcgttgagcaccatatttgtcttgatgagatcctcggcgttcctacccagcttcctgaacgtagcataaggcattaaattcaccgcggcccctccatcgaccatcatcttagacatcggcttcccattgacgtagccgtttatatacaacggtttaagatgccgattctctgtcccctcgggtttctcgaatactacatgttctggtgacagaaccaacttagtcgatccctcttccacttcatcgacatcggcctgatcgatcccgaattcggctggcaatgtaaagaccatgttaattggtgccgctacaacactcttcccttttgccaacctcttcgcctcatcggctgcagcatcatcggctataggaacctgattcttgacacgccactcctgtcttggctttggtttcctcagccgatgattgatttcctcttcaacctcctgaaaacgctccctattcctcaatctctggacccttcttttctgattcttcgtgaaaataccagaaggacaccattgattcttcttgatcacttcatcctcttggccacgatcttgattcaccggacccaaccattgataaacaggaagtcttgcctgtcttagccgattacccctattatacaatcggctcgagctctcgatgatatcactgcatctagggtagttttcgatagatggcaacctcatcccttcattccagcagaatctgaagaactcacaaccccaatggggatcaaaaccatcgtcgtattcttcataatgcccctcctgctgcttatcatacttcctttgatacttgttgataatcttagccgaatttacttgaaaaccctttgcacgggccctatcggctgcttgactagctgtatgcaccatattaacaggaaaatgattaccatcgaccttcatcggctttttggaatcaacaaacctaatctttcccccttcaatggcaacctggatttgttgtctaaaaaccttgcaatcgttagtagaatgagacccagaattatgccatttgcaatatctcttcttgcctaattcctcagccgatgggattgtatgaccagcaggaagcagaatctgcttttctcggtgtagtaaatcaaagatcttgtcagccttggtgatatcaaaatcatacttctcctcctttccaggactttttacccattggcatggtatgactttttttgctcctcacccattcggctgcagctatttcagaatcatcttcctcgtcatccgacccatacatgtatggacaaacatgattaactttcttagagcttttcctgacttccgccgacctatgctcatgcaaggttaccttctgtatcagatgcgataagctatcaaagtcttcggacgagaatttctcccttattggaggaatcataccctggaaggccaaatcggctaattgagcatcagtcaaactcaagctaaagcatttgttcctcatctccctgatcctctgaatatactcatgcacgggttcatcatgccgctgcttgatcgctgtcaagtcggacaacttcatctcatgaaccccactgtagaaatagctgtgaaattgcttatccaaatcggcccaactattaatcaacccatatggcaaagaagaaaccaagtaaaagttgatccagatagagataaccggaataacctaactttcaaagcgtctacagccgatgcttcaccgcactgagcaaggaatcggctgatgtgctcataagtcgacacgccctcttgtcccgaaaacttagagaaatctggaactttaaaccgattggggagagggactctttcaaaccactcaggataaggctgccgatacaagtttccattctcttttagtttaagcccaaattgttctctcattacatcagcaatcacatcggcccacggtcgttgctgagctgctccttgtggctgttgttgcataggctcgaactgaccatattgagatgcgaactggggctgagccaatccccctaattaatatggggcttgcggggaaggaggctgatattgatagctcaagttactgtcacaccctaaaaatcctaaatatataaattgttgtttaattggaattattagaatttattttaaaagtctagaagagaagatctaatttttaattaataaattccaatataaaatggggccagataaaatttcattaaatactttgcttaattctataattcctagatttttctgggatttatttgagctaaggaagtatttttaataaataaaattgcatttcatgaataatttaaattgaaaaaggtttttaaaaaagtctcttttggctttgggccgaaagtcggcccaaaaccttctctctctctttctcggcccaagccggcccagtccgcaaccgagccgctgctcttctctctctctcccgctgacaggtgggccccacctgtcagggtcgtcgtcaacctcgcgccgccgccgccgccgcccgaaccctagctgagccgtgccgccgtttccttccaaattcggccgcccctttccttctctggtgaaatccattgaggggaaatgtttcccgagatctcctctaccttttcctttttggaaacatcgtctaaatcgctttggaaattcgtggattcgagttcgattcggatcggcctctttcctccgaatcctaacctttccttcgcgtcgccggtcgtcgtgggccttcgccgccgccctctaacccctataaaaggacccccggtgtctccgctacccgtcgccacctttgcttttgtctctcgccgtcggtagcgctctagccccgtgtagcctcgcgccgccgtcgtcaccgttgctccagccgtgctccgccgtcgctccagtcgtcgctgtcgctcggggaggtcaccatcgtggtcgccgttgcatcgccgtcctcgtccgcccctccgccgttgctgtcgaccgccggaacaccgccgccgtcgtcaagccgaaggtcgccgccgcttcttcgtcgacgccgtcgccgtccgttgatcttccgccgccgttttggtcaccggtgagttcgccgcgtcgccctctacgtgctggtgccctccgttcgcatcgtcgctccgtcattcgccggcgagtttgcaagcccgagccgccgccggtggtgacgtcaccgctgacgtcatcgtcgtcgtctctcgtggtccggccgtggaccggtcgatctcggccgttcgttttggataagatcgatctcggccgtccgtttccgtgtaccgctgccgtgcgcccggtccaccgcaaaccctagccgctgacgcaataattcccttttccttttcaaaaataattcattattgcgtcataattcaattaaaattcatataagtgttttaatccgatttaatctttaaaaattcgtaactaattcatcttagctcggatttagttggttcaagtctctaaatttttctaaaattaagatctacatgttaaaaatatccacatgtactgttcatgcttgtttatgtgctgttttggtgattttgctcctttctgtttagattccgacgtttccggagagtctgttttcgcaggagaagattttgaagagttccaaggccagcaaggcaagtcacacagatcccaaacaaccctttgagcatgttgatcccgtttaaagctactgtttctattcaactattgcatttattttcgaatgtcattgggtggaattaacctattgtttgttatagccctttttgttcttgattactttattccttgataccttgggttattataatttgactagttaggctatatatattggttcagctagatattagatgtgattgcttagccatgcttagaaacattagcacactattgggataacttatgactcactattatttaatgatggctcaatgatagttcacgatggtcaatcgtgattggttaattaattacttgccaactaaaacttgataatcgtgggttgtgagcacatggttttgagagtcgtgctcatgacaattaaggaccggttcacgagtttcggttgtgaaacattaaccgtgccaaccacaagccagcgtgggcaacggctttaccttttgtatagcttggttcattgcggagcaccagactgagaagtggcagagataagcccacgggggtcgctggggagtccatgccttgtttataagggggtgattatgatccaggaaaggtgcgctgtggtggattgtgttgtgcaaggggtattgtcacagctcctttccgaggtaccgtggtggtattgaggcacatggtgacatgttgtggggctgtgtcttgtgggtacagtggtacacctctggccagagtaaaactattcgaatagccatgcccgcggttatgggcgggtctaacaatgtctttcgtgattagtctcacacctctcatcatgataaaagatgtataactggtaataatttgtttagctcctggtttggaatggtatattcctggtttggagatagatctgtacagccgggtatggttgttcagaaaggttgggcctatacaacagggtatgttgtatagcgttggattaatattgtttaattattacttaactgttttattaaattctgaaatgtttattaaatgctgtttatgcaaatgaaaccctattatgccatcctttggtatcctgtgcacttgcatatttgctgcgtgacttgctgagtatgtcatatactcaccttgcaatcattcatcagaggaagagttctacaatgatgctgatggtgtggaggattaggtgtagccctggtcaagctgcctgtggagtggagccgtctgcgccgtttatcttattttccgctgcttagatctttattgattgagaggaactatctacctctgtaatgacattttattcacttattaattagagtaataattgtactctattatcaatttgttattgtgtgcctcggctgattcctagacgagggttcacacacatgtaagcgtttggaattttggatagaaattccgggcgtgacaagttggtatcagagccaggttgaccctaggttatgccaaatggttacccatagaagccctctaaaaatattggaaaagtagaagtgttctcctccccttctcttctaattaaaccaaactaatagcacatgcacttcataatctcttttaatggttctcattcaaaatttattccagtgttattagtaccgtacatctattactgtactaatggcttatttactagcaaaagttttacaatattgttttatttaatcttgctgtaattaaataaatttagcatgttttcgtttatttcttttgaaaccggttgttcaaaagtacaaaatttgtgacctcgtttccaactgtttcaacttatcttgcaagcttggtttactttatttacttaccttttactttgattttctaactttattcaaattaaaaacttgtgctattaattagatagatgtcttaactccctcctttcacttgtctttagatgccgcgctacaagcctgagtacttgtttggtgttgagggatttgtccaggagttgcgtacgatgtcctttgccataggatttgggactgcccttttttatgcccagattcctcatgatcgtcacgaagagaagtgccgagtcaaagtcaccttgaacagtaatagtgaagatatcccctcagtgatgttcgaagctggaggaagaaactacatccatgcatgtcaggaggtggcaaggatcgccataggagagctccgcaatcgctacagtgatcggttggccgacactgagtatcactaccatcctcgtcaaccacagggaagtgaccgtggcagctaccttgagactgaaggaattgagaatgatgctaccacaaggcatttggttgagatgctgtgggctatgatgaaacccgtgcagagactgtgttagcagctcaagatcgtgaagaccggaatcgtggtaagatttgcaagctagaggacaaggtggatcgtttggagaaggaactagccatgttgaagggagaagcaccaccgcagaaggccagggttcgttttaccgcaaggaagagagctctatttgtccctcgctaccaattggcgccaaaggtccgtgtggtggagaaagaagttaccccagccctagcggatcctccggtcgtcaacgtaagtgatgatgaaggagaagaatccaagcgcacccattccaagatcgagtggggagccactcaagatgatgaagacgagccgaacgagccttcaatcaactccgatgctcggaagacctagaatgccttgtcaaaccgttgacttagatcgttgtgttagtttgcttgttttaagtttggttgtgtgtgtgggtcttgcgtgtgatttacatcagtggtgggatgtaagtgcatgcgtttgtttgctttcgagtgttaggtagttggtgagtttagtggtgtgagagtcttcagttttgtaataatgaaactcacttaagatcaataaaagtcaaattaatttgctgtcctaagtagttttccccggtttctcttcttgtgcttctgcccatgccagatggtgctcactcgcagcaacgggaatggccccaacaacaacaacaacaacaacaatggagagaatcccacacttgcccaagtcctggctcaacaggcacagcttatgaacatgatgatgcagcaactccagaaccagcagaaccagggaaataaccatgcacctccccagaacaagttagcagaatttcttcgtgtgaggccgcccactttctctagtaccactaatcctgttgaagctggtgattggctgcatgccatagaaaagaagttggatttgcttcagtgcaccgatcaggagaaggtctcatttgcatcacatcagttgcatggccctgcctctgaatggtgggatcacttccgccttaacaggacaactgctgaacctatcacttggcttgaattcaccgctgctttccggaagacgcatataccatcgggagtggtgtctctcaaaaagaaggaattcaggtcgctcactcaggggtctcgctctgttaccgagtatctgcacgagttcaatcgtctggctcgttatgctccggaagatgtgcgcactgatgaagagcgtcaggagaagttcttggaaggacttaatgatgagctttcttacccactcatgactggggaacagaagaaatgccggattgctcacttcaaggcacaacaggggaatagtcagaggccgcgtcttaccttaggaccctagaccatgccacagggaggttcttcgtctgttgttcgtccgcagcgtcagttcttcaacaacaatgctggcaacaacatccgcaatcaagctccacgccctattgcagcttcgacaccgcaacaacctgccaagagggagcaaggcagcaagcccggggtgtgcttcaattgtggagacccaggacattacgctgacaagtgtccgaagccccgacgtgtgaaggttgtccctgaccagagcaactctaccgtaccagcatcaaaggcccgtgtcaatcatgttgttgctgcagaagctcaagatgctccagatgtgattttgggtacgtttcttgttaacttagttcctgcaacagtgcttttcgattctggtgctacacattcattcttatctatgagttttgcgagaaatcatgggatggaagtagaagatcttagacgtcctttgatggttagtaccccaagtaatcaggcactctctttgcaacgtagcccctctgtcagaatagaaattcaaggagtaccatttctggccaatcttatcctgttagaatccaaagaccttgatgtcatcctagggatggactggttagccagacataaaggtgtgatagactgtgctaacagaaaagtaactctcaccagcaatgatggtcgagttgtaactgttcatgcattgtcttctgagtctttgagatcaaaactgaaccaaataactttggaagagattcctatagtccgggagtatcccgttgtgttcccagacgatttacctggtatgccgcctaaaagggatatagagttcagaatagatttggtaccaggaacaactccgatccataagagaccttatagaatggcagccaatgaattagcaaaagtcaagagacaagtagacgatttgcttcagaaaggatacatcagaccgagttcatctccgtggggagctccggttatttttgtagaaaagaaagatcatacccagaggatgtgtgtggactatcgtgcactaaatgatgtgactatcaagaataagtatccgctgcccagaattgatgatttgtttgatcagcttaaaggtgccaccgttttctccaagatagatcttcgatcagggtatcatcagttgagaatctgtcacgaccggaaataacccaacgggcgttccttacgtgcgtgcattattccttgtcccaggaggcaaggtacaccaagagttgatacagttcagagttcaacaagcggaagcgtaaatagttaatttactacatgggcggcgaaggcccagcacacacaaagacaaacgggaaacagcggaagactagggcgacgaccacaggcgcttgacggcaggcacgagctagacaccaaagccttcatcttctagggactcctcttctgggtttgggaaaaattgagcaagactgagtacaaccaccgtactcaacaagacacacccacaagtgcagaataaatgcagggaagtacaagggggttataatataaagggttagggtttgcagtaaacagcattaaaagacacttagttgctcgaagctattttgtaaacacaattctagagctatacaatattattaatcaaggccgtggacccacacgaacctgccttaacccaaggcctacgatgattcagaccgaactggcaacccgaccctgggtcccagctcgtcccaagccaacccaggccaaccattccacattttagttgttaagcaggttttaagaattaaaacactaacttgggtacattgctcggcttgcccataaccgagggtgcggctattcgaatagattatactctgatcagaggtgtatatctttacccacaagacacatcttcctcacgtgtaaccacgtgccgcataccaccacggtatacggacggaagacgtgacatagtttccaacccatcctagccatagacaagagtaccgacccaaccccacctacggccggaacctccgggacaggtaggcaggattgagcccctagcagcaggacaccggccctgtgccatgacatctcgactactgggccgcagctcgtgtagccttcaattgtcctagagatgtccatcgacccccgacttcgtccatctccatccgtgtacttttgtttataaccagactgagccacaaactaagccttacccactagacatgtggaagtacggtagtgctttgcaacagaggcccgaagaccggtccttatatggccgaggtgctactatcaaaaccatgcaccccgagcccagcctaaaaccattttggggattttgaatagagggggaggtgtgaatccaattccacaataatccaacaattccctagtgtccaggtgataagagtattcccaaggtctagagttgtaaaaccacctaatgttgcctaattaaccagcgaagcatctacctaaaatcatactagtggtaccatgagtagagtgtccactagttggggttttgtttaatctagggtgaacaaggtaataataacaataataataataataaggtcataacaaaggtaaataggcatggctaaataaaacagtgataacgcgggaatttaaataaagcggtaatgcaataatttaaatcaaaataattttataaactgggattcaatatgtttcaggatgatgtgacttgccttgctcgctttcccaagcgtcggcttcaacctccgcgaagagacttcccctcccctcggcttcaacaaaaatgggttcttgacttcttaaggaaaaattagagacttgaacggtccaattccgagttcaaatggccaagttatggtcatttgaagtttatatgctctttaaatgaatatttgcgaatttcttcatttaaattttaatttaaaaagggtttattgcatcagccgaggggagggggcgcgcggaccgggtccacgggagtggggcccacgcggcagcctcacggtccacggtggaccgggtgcacccggctcacaccggccggcgccgtgggccccacccgtcagccacacccgagggcgcgggcggctgacggccgagccccacgcggcagccactcggcgcgcccgagggcggccaagccggcgcagccggcgggaggcggcgcgcctgtgccccgatggtcgccgccggctaccaccagcgcgacggagcggcgcccgagagaggggagggaaagggggaaacgaagcggcggtccacggctcaccccgggtcgacggcgacgatggaaacggcgaccggagcggaggaaggcggtggcgcggctcgggtcgacggggtcgacggcgttccggcggtcggcgagcgaaacagaggggtggacgaggtcggtgaggatgcggcgaagccgaaggaggcggcgtcgaggtgggaggtggtccggggcgacaacggcggcggaccggagctcggcagcgacggcggagagagagagcgacggcgcgagctcgattccggcggggagagagggcggcgagtggcggaaacggtggtggggagctcggggagggtttatatagggttgggagtgagagagggtggccggaggagggggaaatgggcgcgggagacccggccgccattaatggcgccggcgaggttaggggaacggtttccaaacgaatccgagggagagagggagggaaaaatggggggaaagggggagggaatcacggggaataattccccccactttatttcgcgcggggacggcgggaggcggcgggattcgcggcggcggcggcggcgctagggcgcgggcgaggcggcgggagcggcgggaggaaggggatgacgggtgggccccacccgtcagcgagggtggcgggtgggcccgcccgtcagcggcgcgcgcgcggggagaggccggatgggccgcggggagaggagagggagggggaaggagatgggccgagccggcccaagagggagagggagggaaaggggactttttagagtttttcttttttataatatcattttaactttgtttatttcttaataattattatttgtgctctgaaaattccactaaaatttatttacgcattttaggcttttaactttgcacattttaattgttggaggctttcacatggattttaattattctaggcaccatttagaggatatattttagggtcgttttgggacgtgacagaatcaaagaggaagatatacctaagacagcttttaccactaggtatggattgttcgaatgtactgttatgtcttttggacttaccaatgcccccgctttcttcatgaacttgatgaataaggtgtttatggaatacctagacaacttcgtggtagtctttattgatgacattcttatctactcccgaaccaaagaagagcatgaagaacatcttcgccttgcactagagaagctacgagaacatcaattgtatgctaagtttagcaagtgtgaattttggttgtctgaagtgaagttccttggtcacgtcatctcagcaggaggagttgccgtcgatcctagtaatgtggaatccgtaaccaactggaaacaaccaaagacagtttcagagattcgccgtttcctaggcctcgcaggatattatcggaggtttatagagaatttttccaagattgctaagcccatgacacgactgcttcagaaagatgtgaagtacaagtggtcagaagaatgtgagcagagttttcaagagttgaagaatcgcttaatatcagctcctattttgattttacctgatccaaagaagggtttccaagtgtattgcgatgcatccaaacttgggttaggttgtgttctgatgcaagatgggaaggtggttgcctatgcatctcgtcagttacgtccgcatgagaagaactaccctactcatgatcttgagttagctgcagtggttcatgcgttgaaaatttgacgtcattatcttttcggtactcgtacagaggtgtacaccgatcacaagagtttaaagtatatctttactcagccggacctgaacatgagacaacggagatggttggaattaattaaggattatgacatgggaattcattatcacccgggaaaggctaatgctgtagcagacgctcttagcaggaaaggctattgcaatgctacgaaaggacgacagttgccattggaattatgtaaggactttgaaagattaaatttgggaattgtcagtagaggtttcgttgcagccttagaagcgaagcccactctaattgatcaagttagagaagcccaaattaatgatcctgatattcaagaaaccaagaagaatatgagaagaggaaaagctatcggtttcttggaagatgagcagggaactgtatggttgggcgaaagaatctgcatccccaacaacaaagatttaaaagatgtaattctgaaagaagcccatgatactttatactccattcaccctggtagtaccaagatgtaccaggatctcaaggaaagattttggtgggcaagtatgaagcgtgaaatcacagaatacgtagcagtatgtgatgtttgtcagcgagttaaggcagaacatcagaaacccgccggtttgttgcagcctttgaagattcctgaatggaagtgggaagaaatcggtacggatttcatcactggtctacccagaaggtcatcaggccatgactctatttgggtgatagtcgacagacttaccaaagtggctcatttcatcccagtaaagacaacctattccggaagtcggttggcggaattgtatatggcaaggattgtgtgtttgcatggcgtccctaagaaaatagtgtctgatcgaggcagtcagtttacttcaaatttttggaagaagcttcaggaagagatgggttctaagctgaactttagtactgcttatcatccgcagacagacggacaaaccgaaagggtgaatcagattttggaagatatgttgagagcttgtgctttagacttcggtggaagttgggataagaatctaccttatgcagaattttcatacaacaacagttatcaagctagtcttcagatggctccttacgaagcactgtatggtcggaagtgccgcactccgcttttgcgggatcaaacgggagaacgtcaggttttcgggacggatatcctaagggaagcaaaagagaaggtaaagatcattcaagaaaggttgcgtgtggctcagtctcgccataagagttatgccgacaatcgtcgcagagatttgagttttgacgaaggagattatgtgtaccttcgtgtcacgcctcttcgagaagttcatcgttttcacaccaaaggaaaattggcaccgcgttttgtgggaccttataagattgtcagtagaagaggagaggttgcttatcagttggaattacctcaatttttggcaggagtccataatgtgttccatgtgtcgcaattgaaaaagtgtttaagcgtacctaccgaagaagctaatcttgaacagatagaagtccaagaggatcttacctatgttgagaaaccaatccgtatcttggaaatagatgagagaagaaccagaaatcgagttatccgtttttgcaaagtccaatggagtaatcactcggaagaagaatcaacttgggaacgagaagatgaattgaagtcagctcatccgcatctgttcgccagttcttccgaatctcgaggacgagattctgtttaagggggctaggtttgtcacaccctaaaagtcctaaatatataaattgttgtttaattggaattattagaatttattttaaaagtctagaagagaagatctaatttttaattaataaattccaatataaaatggggccagataaaatttcattaaatactttgcttaattctataattcctagatttttctgggatttatttgagctaaggaagtatttttaataaataaaattgcatttcatgaataatttaaattgaaaaaggtttttaaaaaagtctcttttggctttgggccgaaagtcggcccaaaaccttctctctctctttctcggcccaagccggcccagtccgcaaccgagccgccgctcttctctctctctctcccgctgacaggtgggccccacctgtcagggtcgtcgtcaacctcgcgccgccgccgccgccgcccgaaccctagccgagccgtgccgccgtttccttccaaattcggccgcccctttccttctccggtgaaatcaattgaggggaaatgtttcccgagatctcctctaccttttcccttttggaaacatcgtctaaatcgctttggaaattcgtggattcgagttcgattcggatcggcctctttcctccgaatcctaacctatccttcgcgtcgccggtcaccgtgggccttcaccgccgccctccaacccctataaaaggacccccggtgtctccgctacccgtcgccacctttgctttcgtctctcgccgtcggtagcgctctagccccgtgtagcctcgcgac

SEQ ID NO: 20025 - DNA, 9950 bp, Oryza sativa
ccccctaaacctcgccggcgcatcaatggcggtcgatcttccgcgcccgtttccccctcatccggccgccctctctcactcccaaccctatataaaccctccccgtgcctccctccaccgtttccgccactcgccgctctctctccccgctggaatcgagctcgcgccgtcgccctctctctccgtcgtcgccgccgagctccggtccgccgccgttgtcgccccggaccacctctcccctcggcaccgcctccttcggcttcgccgcatccccggcgacctcgtccacccctccgtttcgctcgccgaccgccggagcaccgtcgaccccgtccacccgagctgcgccgccgccttcctccgctccggtcgccgtttccgtcgtcgccgtcgacccggggtgagctgtggaccgccgattcgtttcccctttccctcccctctctcgggcgccgctccgccgcgccggtggtcgccggcggcgaccatcggggcgcgggtgcgccgcctcccgtcggctgtgccggcgtggccgccttcgggcgcgccccgcggctgccatgtggggcccagccgtcagccgcccgcgccctcgggtgcggctgacgcgtgggacccacggcgccggccggtgtgagcccgggtgcgcccggtccaccgtggactgtggggctgccgcgtgggccccacccccgtggacccggtccgcgcgcccctcccctcggctgacgcaataaatccattttaaattaaaatttaaatgaagaaattcgcaaatattcatttaaagagcatataaacttcaaatggccataacttggccatttgaactcggaattggaccgttcaagtctctaatttttccttaagaagtcaagaacccatttttgtgctttgtttctgcttgttatatggagtttattagagtaaaagccttttcttttccgttggtcgtgcagacgctgcagcttcggaggatccgctcttcgtggaagttgaagccggcgtttgggaaagcgagcaaggcaagtcacatcatctttgaacatattgaatcccagtttataaaattatgatgatttaaattattgcattatcgctttatttaaattcccgcgttatcactgttttatctagccatgcctatctacctttgttatgaccttattattattgttattgttattattaccttgttcaccctagattaaacaaaaccccaactagtggacactctactcatagtaccactagtataattttaggtagatgcttcgctgattaattaggtaacattaggcggttttacaactctagactttgggatattcatatcacctggacactttggaattgttggtttattgtggaattggattcacaccgccccctctattcaaaatccccaaaatggttttaggctgggctcggggtgcatggttttgatagtagcacctcggccatataaggaccggtcttcgggcctctgttgcaaagcactaccgtacttccacatgtctagtgggtaaggcttagtttgtggctcagtctggttataaacaaaagtacacggatggagatggacgaagtcgggggtcgatggacatctctaggacaaatgaaggctacacgagctgcggcccggtagtcgagatgtcatggcacatggctagtgtcctgctgctaggggctcaatcctgcctacctgtcctggaggttccggccgtaggtgggattgggtcggtactcttgtctatggctaggatgggttgggaactatgtcacgtcttccgtccgtataccgtggtggtatgtggcacgtggttacacgtgaggaagatgtgtcttgtgggtaaagatgtacacctctgatcagagtataatctattcgaatagccgcgccctcggttatgggcaagccaagcaatgtacccaagttagtgttttaattcttaaaatttgctcaacaactaaaatgtggaatggttggcctgggttggcttgggacgagctgggacccagggtcgggttgccagttcggtctgaatcatcgtaggccttgggttaaggcaagttcgtgcgggttaacgaccttgattaataatactgtgtagctctaggatcgtctttttaaaatggctttgggcaactaagtgacttttaaatgctgttttctgcaaaacttaacccctatatcattaccccttgtaccccttgcattaatcgtgcatccgccggtgtggcttgctgagtactgtggttgtactcattcttgctctatctttctccccccttcagtaagagaagctttggagaagatgtcttaggtggagtcttggcttacaccccagttgagcgcctgtgaagatggagccgtaggcccgctagtccgctgctgtttatttttgattgtcaggccttaagtgcctttgtaataatgtaaatattatcgatataataaagatgtgtcttttatatcatgtttgtatggtgtacctcggcttttcctgggacggggattaatacactagcgttcgggaaaatgcaattttctcggtcgcgacaattaattacttgccaactaaaacttgataatggtgggttgtgagcacatggttttgagagtcgtgctcatgacaattaaggaccggttcacgagtttcggttgtgaaacattaaccgtgccaaccacaagccagcgtgggcaacggctttaccttttgtatagcttggttcattgcggagcaccagactgagaagtggcggagataagcccacgggggtcgctggggagtccatgccttgtttataagggggtgattatgatccaggaaaggtgcgctgtggtggattgtgttgtgcaaggggtattgtcacaactcctttccgaggtatcgtggtggtattgaggcacatggtgacatgttgtgaggctgtgtcttgtgggtacagtggtacacctctagccagagtaaaactattcgaatagccgtgcccgcggttatgggcgggtctaacaatgtctttcgtgattagtctcacacctctcataatgataaaagatgctataactggtaataatttgtttagctcctggtttggaatggtatattcctggtttggagatagatctgtacagccgggtatggttgttcagaatggttgggcctatacaacagggtatgttgtatagcgttggattaatattgtttaattattacttaactgttttattaaattctgaaatgtttattaaatgctatttatgcaaatgaaaccctattatgccatcctttggtatcctgtgcacttgcatatttgctgcgtgacttgctgagtatgtcatatactcaccttgcaatcattcatcagaggaagagttctacaatgatgctgatggtgtggaggattaggtgtagccctggtcaagctgcctgtggagtggagccgtctgcgccgtttatcttattttccgctgcttagatctttattgattgagaggaactatctacctctgtaatgacattttattcgcttaataattagagtaataattgtactctattatcaatttgttattgtgtgcctcggctgattcctggacgagggttcacacacatgtaagcgtttggaattttggatagaaattccgggcgtgacagttacccccttggtaattatgaagattcggctggatgttgcgcaccaagtgttcaggaaccatctgaggcatcactgtgccgtccggctgtgcatggtgaaccaaatgttctaggatgacctaatttacaaactgctgtataggctgaccaccaggtactgtgaacccggccgatgcattcactgaccccgggtgctgaatcggctgaacgatctgctgtctcaacggagtctgttggatcggctgctgaggctgctgccttggtggcgtctactgaatcggctgcagaggctgctgccttggtggtgtttgccgagccggttgtacgacctgttgttggattggttgtacaaccgcctggattggtggtgtctgctgaatcggctgctgctgcactggatcaacaatcggtggaggtggcagaaacaaggcagcaacttgatcttgggttagccgattcgtagcctgcccgccatgctgtggttgttcccttgttaacaaccaagggttcaccggctgttttggcgtcatagctagtgtaccaggcaaaggagtcgacgctggcgctgtcggctgggttgtgggtgcaacagagggaactgcttgaacagatggctgaacatcggtgatcaaagatcgataatttgggaagacacctccttgcaagtaaactgggcctgcagcctgatgctcagctatcaaaccatcggctattgtcttcatcatgtttgacaatgtattgactaataccccggactgattgatcaaagcatgatgcacagcgtaatcaacccgatcttggaagttattgaaaaaatcttgcgctagttcactattctggttaagatttcctccttgcggctcctgactaccatcaccttgaacgccatgaactccttgagaattgtcgccttgatcgctcggggagtcgtcggtagcacctttagtactcggctgagctgagccacctggagcttgtttcacttctccatctttggaagaaccagtcccaggactatcagcaaccacttttattttatacttctgaacaagtgtccccttgcgggtctgcatgaatgagttcagaaactgatcccgtgcctgctgcagcgttgcttcaaactcctccttctgctcaggtgtgaatttctctggatcgatcggcatgacgttgtcatcaatgatgtcagtcaatcccagcttcaacgccttgcctttaacggagcctgggctagatggtggtggtggctgtttctcggccatgaggaagaactgacgtctgacttcttagaggtcccaccaggcgtgccaaaagcgtgttgacagaaaacacgtggcctgggagatctgcttaactctagtgcaggtccaaagctcgccttcggatatgttagcgtgccagttgatttgatcctgtaatcaacaagaaatagaagcaaagaaaccgtggttaaatctataaatgatagctgatcagctagatgccgatgacatatcatttatctttgagccgatgtcatctgtgtatcgatcggccgccatgaataagtaaagaagaactaaatctattcgatcggctgtagatattaacgatatatactccttatatcgatgtatacttaaatcaagtgattgggatagatcggtcatcatgccgagacagtatgaatcacttagaccgaaatatatatcaataacaggactatatatgtttatagcatagccgatcagatagatctagcatgtatcggctaatactccgatactactctatatcaggatattaaagcaagaataatatatcaaacaaaggtctaacatacttagatgcagtagtattttgatataaagggcagatttaacatgtcaatagagcatatagaacaaatatagttaaatcagatacgatcggctgaaactccgatgctattctaatcggcaactagaaggcaggctagagattgatattctaagcacgacttaatagatcaaactcaattgatgcagcattaagtatgaaaagaagaacaatatctagacaatcaaactgctagaagtctcatagaatggtagatatctcatataatctagatcaacatcaagatctaacctaatcggctgccttctgcatacaaatgttagccgataataggttaggtggcgatattgctaaagattatgtaagatatatgataactcgacgaattatataaacaagattagagtatcataaagatggaagcactaatcctaaaaacacaatcttgttgaagatcgaaagcgatgcagctcaacccgaaagcaagaactcgtcgaaacaaaactaaagcaaaagggtggtgatgcgccgaaattgtattgaacgtgtgttgttaattacatagggctcggggtctatttatacccgagaattacaagatatgcccataccggacacgactattatctctaacaaactctaagataccataagtctttgcggcagacttttgcccacatttatctataaggaatttacataagatatcctaattaatagatacaattgccttcccaggactctatccgtgcgcggcaatcatcttgaagtacattaacttgaacccgatatcgcgtacaagtcatattgtcggtatcggctacatcagcttacctagcccgactcagacccagccgatcttatcgtagccgatctggactccagccgattcctgctctgttttcaaactcgatctccgcttccgactttgctttgacctaatcttctttcccaacgctgatgttaccaaattggttgttaacaaccccccgggaggacttaaggcatcgaatcttaccgccaacacatccatcacagcctacgaagccagagcctacaggagccgagtcaccgggtgatctagtcgaaccaactcaactacgatctcgtcggtattatcgagttccactattccctttgtaatctgtgatttccgtcatataatcccatatcaactggattagggctattacctattaagaggcctgaaccggtataatccctgtcttttgtttgcttgatgtcgtactacgtaaatcctcataccagcgtaccccaataccctctatatccggtctacgggtattccccgtcgacagcggcaggagtcatacaatgcaaaacaattcttttaccatcgaatataaatatatatatatattggtcctaccattgaaaacaacttctctatcatattgccatggtcggcccaaaagaataggaacaagcttgcatatgcacaacatcacattcaatttgatcatgataggagcccatagaaaaaggtattttaaccaaacgggttaccttcatcttaccatatgtattaaaccattgaatatgatacggatgtggatgtggatgggtagtcaagccaagcttcttgaccatctattcacttgctaaattgttgcagctcccgctatcaataatcactttgacagtatggcctttcacaagaactttgctttggaacaaattgtgatgttggttttgctcttcacacttctctttagcactaagtgctagcttgacaattaggctaggatactgatctagcgactctggatgcaaatggacttcctcgatgttatcgttatcttgtcctcctgcatggtcaatggcagctaaagcatattcatcatcacaatcactagcagaagtatactcaccatcaccattcacaaatagagctcgccgatttggacagtcgcgggcaatgtatccaatgccatgtcacctatgacatgtaatatcacgggtacatccagtggaagctactgaagttgcactcttggctagagtccgaactgaagcatttttgcttgtttcttgaacatgggatggcgtggaggtaggtggatgaatggcagtagtagattgacgtggtgttgactgtcgtgtggaagtagcacctgtaaaagaactcctatgcttgttgcatccctgcacttctcttttagctttgcaagcaaaatggaataatctattcatggtattgtattctttatattcaataatatcccgaatctctctattaagacctccatagaacctagaaattctagcatcctcagtttcttgcaaatcacatcgtgacaaagcaatcatcatctcttgacaaagcaaccttgtcttaaaagttgcagttgatttaacatgtcatgagcatagtaagaaggaacaaatctagacctcattgtacgtttcatatcatcccatgctctaggtctaagtcctctaccacatatatcattccaccatagagatgcaaaggaggtaaattcactactggcagctttaactttcttattatcaggaaaatcatagcaagagaattttttgctcaacagctagctcccagtctagataaacagaagactcgaacttaccatcaaaagaaggcatagtaaattttaccttagataaaagatcatctttggccctaactcgacatcgtcttctatttccaacactcttgtcttcctcctcatcgtcagcaacaaattgctcttcgttttcatcgtcatatctttggtgtcgatgagcagtggcacctgcaccttattcacctgcagtctcaagtaaaccaatgcgtcgcacaatattttcatgtccaatattcatattctgaatgttttcagttaattatttatgtgattgattcatttgctcaatttgatccactactttcaccaggctttcacttaaggtttttaaatgtttatatgtgctttccttgtatgatttactattacacattaactcttcataccaattttccatgcccttcaatttatgcgctagattctccagtgttggttcgtcggaacttgtacctgacatcattagcaagcaaaagaaactcacaagaaagtgttagttcttaacaatctataatatgtggagcttttgaaggcactcaatactcaagcatataccaaattcttatgatgttctcaaagaatgcaaacacaggtcaatcactgtggctggttcgtggcacaatgacacgcttgatgagtggagcgattgcaaagccggacctgtaaaggttagtagtatgtggatcttggtagacttaactatatcaaaaggaatagcaaaaatcaaatagatttgcgaaattgaataatagtccaaagtactgctcaacgttgctagccttgcctagactcaatcctagctcaagcaaacaaatgattaacactcggactagaaacaactggttttatcacacaactctctccaagaaagccaaagaaaatgccacactgttttctttttctgatatttttctttttgttccttttttctaatttttttctttcttttctattttttggtgcggcctttttttttctgtttttgcacctcgctggctttttccttttttttatctctctttttctttatcaaacagtggctaacggacggaaaaaaactgggtaaaaaaaaattaccgataccaactaactcaacggaacctgctaggctgcatgcgcacaggaaattttcacggaaattaaagtggcccgcgatccgcatgcacaaggaatcagcaagtcgtggatggaaattacaccggtacacatgcatgcatgcgcaataaagtaggagatcaatctttgacttaaacaggaaactcggatactttttttttcttttctcaaaccaatctacaaactctaccgggatgaccgcaacaaaactaaccgatgagacaaccagatgcatacccaaaccaagatgaaactagggctaagaccagatcttgacacgacagtagaccaaaactcaataaagcaaaattgaatgaaaattgcaaggttcaaaactaatgtttggtgaaggaaaaagtgatgcagcaatttgtagataatgggtagggaaaataaatctataaaactaaaatcctcaccaggcaaccgatgctctgataccaactgatgacgctctctctcgtggcccgatgttctggtgaggggataactctcactttgatcgagtgcgacgtttgcgacgtggctaccaaccagaacaagtccaggacgccgtgcaatcgctacaccacaaaagatgtcgcgcgcggttgatgatccctacaatgcaacgagagaacactgcaagacaagataagatgcaatctaaatattgcgaataggtaattaagcacaaagaaatagttgcgattgaagtggtagatctaatcgacccggcaaatcaacacaccaactattggggcctctg

SEQ ID NO: 20026 - DNA, 702 bp, Oryza sativa
tattcaaggtcatctagtgtgtctagtcatcctttggaactagtcttttctgatgtttggggtcctgcccctgattttgttggtaataagaagtattacgttagctttattgatgactacagcaaatttacttcggtttattttcttaagcacaagtcagaagtatttcagaagtttcatgaatatcaagctcttgttgaacgactcactggtcaaaaaatcattgctatgcaaaccaactggggtggagaatatgaaaaactccatccattatttgaaaaaattggcatatcttatcatgtgtcttgtccccatacacatcaacaaaatggatcaacagagcgtaagcatcaccatgtaatagaagttgggcttgcactcctagccaatgcttatatgcctcttaagttttgggataaggcattcctcactgccgcttatctcataaataggacacctagcaaggtgatcaaccttgaaatgccactagagctcctatttcaccaaacacccaattatcaattccttcgaatttttggatgtgcatgttggcccaatctttgtccttataataatcacaaacttcagtttcgatccaagcaatgtgtcttcctcgggtatagcaacttgcacaaagggttcaaatgtcttgatattcctacaggccgtgtttatatatctcgtgatgtcatctttgatgaa

SEQ ID NO: 20027 - DNA, 8820 bp, Oryza sativa
taatctcctatgaaaaatggagccaaaaacacaaaccgcacaacttagttaaattagttataacatgctttttgattttagtttgcaagccctagataaatttgtgcatcaaaacaattaatttataaatttatacgctaaattatacccacatagtaaattcgtatactgatgtactctatttaaatataaagcttgaaatttagtcctgctttactcgatagcagtcgtgttcaccactgttcatgcccttgtgactcgaatgtagctagccattagaatcttatctttttcaagatggcaactggcaacataagatcgagccaatagctagcccctcgctgtaataaggcagtagaattgcacctcgccgtaaggtgtaagctagcttgactgtatttggactcagagctatcaccgtttgttgtcctgcagcacctgtacctgttaccctctgtcatattctgcgattgtctcctatgacgcctgttagggctcctttaaatcgtaggaataaaaaaacagaggaatagaaaaaacataggactctgacaggaatacaattgtaaaacagaggattgcaaaacacaggaaaaatacaggaacgaccgtttgattggaccacaagaaaaacgcaggaattagatgagaaagatagactcagagaaaatgtttcaagaggttagacttcttgctaactttcctccaaaatgtgcataggattacccattccataggaattttaaaagattgaataggattcaatcatttgtttcaaatacctccataggatttttttttcataggattaaaatcctccaaaattcctacattttccctacaaatcaaaggggcccttaagattggggttcatttcattagcatgtgtgccttaaatcaatccattatcgaccaattttccccaatcagttcaagggcaaaagagtctaaatctaatttgcataataaagtaaaattcatatggacctaattaagtgacatcaacatcagtaaactttgcataataaaagctaaggaaaaccatatccatttcaaacgaaactaaaaagaatgttctagagtgttgtttgttcagttttgaacttttttttccatttgaaatgatcttcgagcacggtttaagaggcaatctaaataaatatatagttgtgtaattgtattgttaactagcatattgcctgtgcattgcaacgaggttttaattgattattaacctactattatcattgttttttaatacatcatcacttaaattttaaatacatttttttgatgggaaaattttattttattttttaaatatatttgtaactaatatgtggaccctatgatatcacaatatattttttcttcacacaaaagaaatagagatgatgggcagggatgaaaactgagcggattctttctatccgctctggaggaaaaacgaatatggatatctttcggagcaaataattcctcaaatagttcagatacgaatacgggtacatatattttctcccggatacaaatacaaatatggtatcggggttttcgacggatgcagataataatacgaatatccggcgaatagtttcggatatccgctgaagccatgagaccccatttctttacagctctatgaccttcaatatagctttttagattttaatagtagcgcacctcttaacactagtccacactattaatattatttaaacttttaaatattttgttaaattatactatattttatataaattgagctaattatatatgatgatgtttgtttctattagaagttgaggtggttttcgtgttccgagaaaaaaatatttccgtactcatgtccgatcatatttgatcctaattcgtattcgagataattcgtatttgtttcggtatctgagctattcatatttgttttccatctggcaaaaaaaaaaagaaaatgaaaatgaaaacaaacatggtatgagcattatccgtccgcatccactccgttttcatccttagtggtgagggtagttgatatctgggttctttggccccatatgtcttttattcaccattactattcctttttaaatgagtatagacatttctaaacaatgcaaatgtgcaggttaacaactagctatagacattccttggcaatatattaataatgaacacgcttttaaaacatttacttttagaattcggtataaattggagtagagaatagaggagaaaattgccccaaatattttgcgcttgtatagtatttttgttctggcttgttcttttgttttctgcttaaaggggcatgcgcttgagatcttaaggtgtgaaccaacatgttccacatcaaatagatttattttaaaaatgaacaactctgagattttcatttactaccattgatctgacatactattccctcaagttcttcatttcttatcattttggacatgatacccatattaattagggtgtatattatttattctacccatattaaataccttgaagtggtatatttagagatctgagagtgttatgtttaattggcttaggctttatttgttcgagatttttggtaggaactaaacaacagcacacaaaatatgaaatgccattatgatatgattaattaagtattaactatgataagtttttaaaatagatttatttgtttttttaaaaagttgtgtataaaaagtttttaaaaaacatatcgtttagcaattagaaaaatatgctcatcgaatatgagggaataactaagcccaaaaaactcagaagagcattactattggaatgaaaggcccagttccgatttaatgagaattttacaacttcgctgctaataggtttttttttttcactgcatggcgcatagttggaaataataacaccattaactacaaagggcaatctcgacctataccggccaccactaaaactcttcaacgacagtcgacgagaattctcatccaccgcaacaaagaaagcttattcaaccactaaattaagctgctattttttttttgtcttgtgtttatacttttcttttattcttaagtccaaagtcaaagtcataatcacttacagagcgtgcagaaaaaaaaagaggaaaataaggtggcctatcatgacttttgttgggaaaaattgacaggtgaaagagctgtgataaagaagcaagccgctgcagattgaattgctgggtaggatatttctaggctggggccataagacagttctgcaatcttcagctcgtgctgggtgctcttgcatctcggatttgctatcagcaaccaacaccatgtcctccagtacgttagtgctcctgcagctcctataccttattagccttatcctaccagccttctctgccaacgatgacaaccaattcgcctactctggcttctctggtgctaacctgaccatggatggtgcaactatcacatcaggtggcctcctagagctcaccaatggcacagtccagcagaagggccatgcattctacccggtcccgttgcgctttgtccgatcacccaatggatcagtgctctccttctcggcatccttcgtattcgccatcctatctgtctacactgatctaagtgctcatggcatggccttcgtcattgtgccaagcatgaacttctcagctgcgttgcctggccaattcctgggcctcgccaacatccagagcaacggcaatagcagcaaccatttcttcgctgtcgagctcgacaccatccaaaacaaggagtttggcgacatcaatgcaaaccatgccggcgtcaacatgaacggtctccgatcagagcagtcctactacgccggctactacgatgacaaggatggtaacttccataacttgagcctgattagccgtgaggccatgcaggtgtgggtggactacgatagcaacaacacgcagatcactgtggccatggctcccatcaaggttgcgagacccatgaagccattgttcacagccagctacaacctcacatctgtgattacagatgttgcgtatgttggtttctcctctgcaactggcacaatcaacgtgcggcattgtgtactcggctggagctttgcgataaatagtcctgcttcagccattaacttaggtaagctaccaaagctgccacgcatgggcccaaagccacgatcgaaggtattggagattgttctaccagtagcaacggcaagttttgtccttactgtgggcattattggtcttgtactcatacgaaggcatatgaggtatacagaactgcgcgaagattgggaggttgagtttggaccgcaccggttctcttataaggatctgtatcatgcaactgaaggattcaagaatgagaatctgctgggtgtaggaggatttgggagagtatataagggtacccttccagtgtcaaaattggagattgcagtaaagagggtgtgtcatgaatcaaggcaaggaatgaaggaatttgttgccgagattgttagtattggtcgtctccaacaccataatctcgtgcaattacttggctattgtagaagaagaggtgagctgttcttagtgtatgactacatgccaaatggaagtgttgacaaatacatacatagtatagagggaaaaaccattctaacttgggcccaaaggtggcatatcatcaaaggcattgcatcttgcttggtctatctccacgaagagtgggaaaaagctgttatccatcgggacataaaagctagtaatgttcttcttgatggcgatatgaacggacgacttggtgactttggccttgcaagattgtatgatcatgatgatgacccacaaaccacgcatgtggttggaacaataggatacctagctccagaactaggacacactagcaaggcgacccctcttactgatgtatttgcttttggcatgtttgttctcgaggttgcctgtgggcagagacccatcaatcaaagttcacttgatagccaaacgatgttagttgactgggtgcttgagcaatggaacaaaggatcactagtcagtacagtggatagcaggcttgaaggaaattataatgttagagaggcagttttagctataaatcttggacttttatgctctcacccttttgctaatgcaaggccttctatgcggcaggtcattcattaccttgatggtagcattccattaccagagatgtcaccaacagatttgagctatcatatgatgacaataatgcaaaatgaagggtttgacgagtacatcatgacaagttcatcgatggtaagcaatggcactgcatctgccatttcaaacggaagatgacatgaattatggtcatcagatatgaatgcactgttcttttcttactccttttgtaaaaactgctttccttgtatacagaaggatctttttgctaggtgagaattgtatgtgattgtaagtttttacaatatttgtgtaaaaacatgtaaacagtttgtttataatgaatttaactatttttatacataatagaagagttgctccaaacagcctctgtatgaatttaactcatagtagccaatataagctcttgtggttgcttaactgaagctcaagccatccgtgcatggagctgagatgtgaaagagaggtgattgtaaatcatctttagcaaaatgtctctgcataatacatatatagtttttctattgaatataaacatttatgcactattaattatagggtataggtaaacatttccattattgtttggacatcaccactataggtagattgtatatgcactagtccaatcacgtgatagaactgtcatggggcaaacgtgtcaagtatcgagagtgcccgtgctcacctcacacttgtacacttgtatcacgtgctctggacgtacttggactggctgtggaagttcaagcacgcaaaactagtagcatgtgcagtcgtaacttacaccactagactaccaaagggtgtgcacataggaatgacaataacgtcgccaaggctggtaggttcatataatgatgcatttagaacacaccattttggaattagctacctacaccaggcaggtatggggtaatgtccaccataagctgaagatttcgcatgctcctcctctggtgacctattattctggtggtttgattctcgtcgccttcttccaacaaagtccagttgcgctggctagctttgatgctgttcttattctgatttcgtggctggtgtggaaagagtgaaatgctcaggcattccagcagcacgtctgcaggtttgcgtcgcaagtggctcaagcgatctgggaggaatgggaatggtgcaactggcctgggaggatactgcagcagggctcctttctttgtgtagctagattgggtgcagtagtgcaggctttaccccttgttcttatgtaagtcaatcacaacaaccgtatttgttgtttaaacttcgtacatcctctacatttttttccctcactcttaatacaatctggcattccactggccggaccgacgaaaacaaaacattttggaatctgtacatttatttatacacacacatatataaaagcctaaagtaggtattaattaattataacttgtgaccgtacataatcgtaggtactatatatgattgtaatattttacagaacctcctcacatatataaaatatcatgtttggcccatatttacttaaatttcatgttagaaaagtgtccatgaaattcagttggtttcttggctaagatcattggttcaactcatattactttgaacaatatagctagtgattcagtatatgccaaattagttcagtacgccaaattcatattattccctccgtttagatcatatacccttcgtttatatcaataatctgaggatttaccctcctatgcaaatgacatatataggggggggggttactgacatgtgggtccggagggtaaatcattaattgcaatctaaagaggatatgtacaattaggcccctttgaatcgtagggtagaaaaaatagaggaatagaaaaaacacagagaattgcaaaacacaggaaaaatataggaatggtcgtttgattggagcgcaggaaaaaacgcaggaatcggatgagagagatagactcaaaggaaattttccaagaggttggagctcttgctaaatttcctccaaaatccacatgcaatgtgtgattccataggaatttcataggatctggaaagcttcaatcctttgaatcaaagggccaaataggaaaatttcctataggatttgaatcctatgaaattcctatataaatcctttgattcaaagggtccttacattttactttctacttctccagatatttgctgtccagtccttaaaagtttggtccctacatggaacagagttcctacaaaatatcaacttgaagctaagtcattgaagttacctcacgttaaggcaatatatctgaggtcaacatcgaagaaatcctgtcctactaactgaaaggaactcccgtgtattttttcccttttcgttgtcgtccatatacttattctgcaatattgacgtatcgaatacttttgatcaccgatgacatttcaacgccgtaagaaatatgttcaccttgggtgtgtttagttcacgccaaaattggaagtttgattgaaattggaacgatgtgacggaaaagttgaaagtttgtgtatgtagaaaagttttgatgtgatagaaaagttggaagtttgaagaaaaagttgggaactaaaccaggccccttttccatggaagaacacaactgagctgtccaaatcaagaaatcaatttccacaaagacaaaacctgtcacatggaattgaaggtgccaggtgaagtttcaaagttaggcagcaccttgtaagtcgcatggaatctgatggtccttttgtggtattccattctcgcaattaatttctatggaataatttgttatgtgatgtcaacatcttctacactagcacagattcttacatctgtaacgggtccaataaaaccgttatagattatgtcatctgtaacgggtgacattggcaactgttatagatgaccagaacattcttgagctgttactgaagccgccttatctataatggctcctaatcaagagccgttacagatgtaagctcctttatctgtaatggcttcctcattgccccggccgcacaacccttccccctcccgctcttccgtgccaccacagtccacatcatcattacattcctgcaacgcgacgtcgatgtgctgccgtgcagtggccatcggtagagcagggatggccggagtagcaggaggctagcagagatgaaaccagattggatgttttttgttctttctattataaatctccacatatgtaacagcttacgagtttagtttatattttttttaagctgaattttcacatatgtaacggctccacgttttgagccgttacagataactttcatctataacggctctctagcccttacatatgagtcttcacgtctgtaactgttggtctgtaatggttagtccaaccattatagatgtgatttttgagcccttacagatgtagtgttctgtactagtgtataattgtaccttaaaccactgtaatagtttgaataggtcaatgttttattaaatttgatttctctaaatagaaatttgattgtagatttttttagaagagatgcaatacattctaataattaagagtgttttttaagagttaccaccctttttagtacaaatttgtgcactaaggtggtgaccataaaaaacgtagtaattagatagtgtaaaccag

SEQ ID NO: 20028 - DNA, 6541 bp, Oryza sativa
gggaccatagtgttggcgcgtagagactcctgtgatgaatcctcaattacaacaacatcatgatagactggtgtgccaagtgctgcaaagaaaaaaacaaaaactctctaaatatatatggcagtgatctgcatgaaaataaataaataaatatatagataaaaacaaagatacttacaggtatcatccgtcacagaatccatcatggaagctcctgggtattgctcttcgcttggaattggttgttgtccttgttttgaatcaccgctgctgtcgtcagtgtcattgttctcatcagcaccaccttgggaacccgcactgtgacttccacccgcaccatcttcaccatactcatcatcaacactgtcctccactttttcatcacctttgtcttcatcgtcttcatcttgtttgccatcgtcttcctctgtttgagccccctcatccatagcacctttatgagcagccggtgggtgaactttgccatccatattgttatccctcacattctgaacatcaaattgagatacctcatgagcagcaacagccccaattgcaatgacttctgcaaaatcagttgcatctacattgccactgtgccgcccaatttcctcagccttgtaattgcttctagtttcagctctgtatgcttgtcaggaccatggttaaagttgggagtgccaagtacagcggcatcaccttcagaagtacttgccatgcctttcacccttgccaacttctttaattttgtgctaaactcagaaagtatgtcgttgtctgatttgtccaatataaattcaagctgttccatgcatgtggagatgatttcagtgcgcctaattttgagtttctctttcatcttcattaacaactcgctgattacaggtggctgtgaaaaacacagtattttttttaaaaaaatatctacatgaaaaatcagctataataaaaagtgatgagtgcctggcaataacccaggtaccaaagtctgatacctggcaaaatacaggtaccatgtctggtgcctggcaaaataacaaggtattgctatagttgcctatcataatgtattgttgggtttacctcatcacatgcattatttggatttgcatcacaccctgttgattttgggtcttgaccaacttggccatcttgcatattcatttgttcttcgtcaccagcagcagcaggagctccctgggggtctggcgtatgttgtcctatgttcatatgttcttcgtcaacaccagcagcgatatgtccctggggatcaggtgtgtgttgtccttcatcaacgcaagtagcatcatcatgtactccttcctccacatcctgtctatatccaatggagagcatgtgctgtggagattcgtgcagtggagattctccatcgcgataaacagtggattctatatcttttatctaaaaaaaatgatatataaattgctagtctacctacatgatacaaaaaaaaggaggtatcattgagagccttatacctggatagaatcatagtcagcatgcttggatctgctggtagcaatagtttttacttcatctatatgggcagtggttatatgcgctatgcgcggtgtgccttgtggaacattgatacctgcaacaaaatccaggaagataacctgcagaaaaaaaatggattcaagcatttaaaaaaatgacaggaacatgatacccaaaaaaaatcagaaggggaaaactaacattaagtatatgaacacaacctcggacatttagatttatgcttgtgtttattctgaaatcatggatggcctcgaaaagataatcagcaacatggttgcaacaattcaggttcttgatgttcttcacatcactaatagctgttagatattccctatgaactgtcaagttgctacctgggacaagatagacacccaaagcaaccatcatgaaggacacaataaattcatcctcattatgttccagtaacatccgagaaatggctttatttaaagattggcctctgccaccttctatgaacttctccttcaacctatggtcagtatcttctgtcaacttcaaacgcatatgtccttcaggaattccaatcaccttcttaatgagtggtcttatggggattgataatccatcgaactccaaggtaccaagctcagtattgacatggttcaaaagccacaatgtcatgtccttggggaaactgcaaccctgtatcaacaatagttcctcaaaattgatgttgtgcacatagcggatctaatctggtgacagttgagctgctatcgtgctcatgttgcttgggttgcacctcaatttaatgatctgcacctaaaaatattgtaccaaaacataagaaaaatttcatttaatctctttttaaaaaaacttaaagggaactagtataaaacaatgaaaagatgaacatgaaaaagaaacttaaacagaattatggcaaaatgaagcacgatacctcttttccattttccgctctcttccttttcttgtttccactggtcgatgcacatgacttcttcggcagtgatgaacatgtcttcttcaacagtccaatatcagattgcttgaacttattcaaccttggtgagcaccgcacaccctttccctcaacatggacaaaatctgaattatttgaagatgtagccattacggctctacaaaaaaaagggaaaacatagcagttagtccgcttttcaaacattgttgataccttgtgaaaaaatcaggggacgaaactactaccgtacatcatttacgctaataatgcagtaaaattgcagcccctataaaacacatgtattgcttgatacctagtaacatccctcaggaatcacgcgaacaaaccacgggacaggaaaaatctaaaactctagcattagattgcagccctacaaaaacaaaaaaaatgtattactcgatacctagtaaaaatgaagtaatgccccatgggaatcaccctagaaaaaaaatttctgagaaatataaacatgcatcatccacacatacaaacgcgcggccactaaaaactattgataaaaatcaccttcattagaaaagtaaccaacctattgattttcactgaccctcaggaaatcaacacgaatcccatacacttcctgccaccccctacctacaaaccctagaacagaaaatgcaaaaaaaaaattgacgcctaattagggagtgatttggaagttataaattgagaatatcctgataagacattgtacttttgcgcgaggtaatcttcaatcagagaaactgggagtgagaaaggagagaaaaacgcatataccgatggtgggagagcgccggcgcggggtatcgctgcgtgcacgatatcaccgctggtgcagcaacgccgatgtggggacgcgcggagaagttggccggagcgcaagggcgccagcgaaggggagcggaggaagacggcgcgcggcgagcgccgagcggagcgagagaggaatgcagtgtggagagggtggggaaaagggaaaggggatcagatggggtgagagggtaacggtttgggcacattaatttctcccgtgacaacggaaccgccacgggacaccgttcagtagtttttctgctagaagaagggtgcgtttgcaaatgttacagctggtaggcgtgtatttgaaaaggcggcattttagatgtgtggttgggttgtgtatccttgacgacaatctttaccctccaggcacaatccaacggctgacaaggaacatatctagattttcgcggtattgatgctttcaccgtaccaaacaaaaaagtagtacgggagaaatttaactatttttcactattacatttggcatttatccaaatgccccttataagtttgcacatattttttttctctcttaagagatgccttcttaactatttatcacttttgctcacgttgcatgcttcactagtcagcctctcctctctccttcctctctctctctctctccagtccggcgtgctccgccgctgctccacctacttcactgccgctccgcgctcctctatcgtgcaaggagctcgtccgccgctcgttgctctgccttctccactgttgccctcctcctcctccaccgccgccgttgccactctgcctcctccaccgcagcaaggagtccgtccgccgctgcttcatctcttccatcgccattctgcctcctccgccgctccgcctcgtctaccgctgcgaggagtccgttcgccgctgttccgcctcctccaccaccgctctatctcctccaccatcgtgaggagcctttccgctgccgcgtcggttgtaggccagctcggagatagaagctcttctctggttgttttccatgacaaccgccgtgacaacattgttcatttccccagctgcacaagttcttgctgtcatcgcatgctagaccgaaggaagagaggaagaggagaggagaggctgactagtgggtcccacattggtttctaccctgcattgctacgttggcatgccacgtgggcaaaagtggcaaatagttaagaaggcatctcttaaagcggcgaaaaaatatacaaacctaagaggggcatttgaataattaccgaacctaatagtggcaaatagttaaatttcccagctttcattgttgagtattcagtcactctaaacgatttatattaatcgtggtagttatttgtgttcttaattttattagattgtaagtagtcttcttcctacattttttttattgaagtgatctctgtaactaagttgctacgattggtaatagttaagtgcaaggacagatccagttcatcggtatcattggtgtcatcatatgccaatctcacttaatacatagttttatcttcattggcttagcaatttatcaatagatttctctagaggtcatcgaggtcatatgaccacgatgaatacactgtatctctgcccctgattatgtctaacatcctaccaaaacattatcatacaatggtgaaagtggaacacaatatgcataatcacattgcttttaatttgttctcagccatttaagaagaggaagtttcgtccatccgttcttcccacacccaccataaatctgtaaccccctctctcctaggaaaactaaaaaaacacacattaactccgtgcatgacaaattatcaaaactaactttctaaaaggaaaacaagtaaaaagcaatcaaaaaccctagcaaaacaagttacacatgttccacttttgtaccactcttggcccctagtgtaggcagccctttgacaagtcacgtgccacctcatcaccatcttctttttatgacttaacccttcttcttataactacatatgcatgaatgcatgataagcaaccaacatgatctattttgtggttatgtaggaatacaatataacaatatatgaatatatattaactagagtagtgactttagatgtgaagcattacaaaagcaatggcattcttcaagaatgacttaacccttcttctttttctcgcttaagaacgataagctctttcctcctgcttaaggtgtttgtaatataatttgttttacctttttaatataatttatttactttgggggcttcccctagaatgctttccctcaaaaaaaaaaagcaatggcaacaacagttgatcattctttcttccttaatattacaaatttccttgttacagtgttaaaacagatgatacaattttagattaacaaaaaggaaattctcctcaatgtttttaagtaagtataattatgccacttatgaagttcgtggttatcatttcgtctccataggaaaggtttctaaaatttaatctttcatgatatatttggttcagttaatgtagtggagtgaatgcaaaataattaaagaactcaaataatttacttcatttataaatatcttctatgggttcccatacagcaaatatcaattaaatgtgctgctccatatcagtacattcatttatacataaaagatatagtaatgaaaatcttatagtatgatattattctacataagatgtttcattctatttaagcatgtcgatgcttggcagaggaacaaaactaatatttcgtcctacttttgaaatggagaaaggtagtataaaaattgcgatgctttatgtttatcttgttagtgtgataataggcggttgtttcacctatattaatgaggtaaaatgatattgacttaatttgttaagctcaatgcgttaaattctatgataataatggaaattgagtgaaacatggcgtacaagcatgtctagtttatattggtgtgtagaaaatatagattggatgaacattagcgacggtttcgtgttaattaattagcgcaacaatgcgcgagagtacatatatatgcgtatagaaacagatcacccgggatcctaaatacaaggaataacaacttatctctaatctaccgggaatccataaccatatgcataagataagattacaattagttgtagtttctaacactccccctcaatctaaacttcggatgttgagattgt

SEQ ID NO: 20029 - DNA, 1861 bp, Oryza sativa
ttcctagctactctttctctcaaaaaatgataatcaacttcaatatgtttaataccaggcataaaccccagggttagcagacatatattgggctccaatattatcacaccaaacctttgcagctttaggtgcattaacacctaattcttgtagtagagtctatatccacatgatttcagctgtcacatttgctaacgccttgtattctgcttctgtactagaccgtgacacagttgcttgctttcttgaactccatgacacgagattacagcctaaaaatatagcaaaacctcccgttgatcttctgtcatctatacagcctgcccaatctgcatcagtgaatccactaaaaaacaaggatggagatttactaatcctcaatccataattaacagggcaacttatcatgtgcactcagcacatcccgtgcactcatgcactcctgcaatctggtccttccgatctcaatccgatgactaggatctgggtaaggtaattttacaaaaaaaccgctcgcctcctaccctgtattcttgctgaaatccccctaacccctggttgtccatctttatcctcctgactccgtcagaggctcagagcatgacgctgcgacaaatccaaaaattccctctgaaccaaacttttgtttccctcgattccttctgattaaagcaaaacggtgattttggaggtgcttaatgttgttcgtgtgagttgatccctcaacaggaccttatctcccattccatgtagcagagaggaattaaagatttaggttttggagaaaacaaataggaccaggaataattttaggaatgtaagagtggatatctagtgcttgattccttatttctatagcctaattcatcattttgtatcagtcttcttgctggtgggtgccgccatcgtcctcgtcgagcagcttcatgtcaccgtctttgtgggagagacgaagagatttgggggtggctaaggcgaaagaacagaaaatccaagccagggagatttttgtaaaggtacaaggtaagaggtgggcggtttttttgtaaaattaccctactggatcctagccatcagattgagatcggaaggacctgattgcaggagtacaggagtgcacggcatgtgctgagtgcacctgatacgttgccaattaacagtatgcttaatataccttaaaattcttttaaccaaagtctagtgagtcacagtaggagtatgtaaatactgacataccttattgacaggataagctatatctggtctagttaatgtcaagtattgcaaagctcctactatacttctgtattgagttgcatcattttgaccaagtggtgttccttcatgagctgataatttttttgaggttagcaaaggagtgcttacaggtttacaatcttgcatccaactcggcgcagaatgtcattggcatacttttcctgagttaaaattattccactgttcacttttgctcacttctattccaagaaagtaatgtaaatcacccaagtcctttaaagaaaaagctttggtaagatcctgcagaaaagcagaagttgcactagccatagaactagcaacaattatatcatcaacatagattagcacaaacatggtgacatttcccttattatagagaaacagtgaagtatctgccttggatgatttaaaacctagctcatgaaattttgtactcaaccttgaataccaagcccttggtgcctgtttcagaccatataatgctttatcaagtttgcacacataatttggtaccttttcactttcgtacccaggtggttgtctcatataaacctcctcttcaagaactccatgcaagagggcattctgtacatctagctat

SEQ ID NO: 20030 - DNA, 794 bp, Oryza sativa
cactaagcaatttgcactgaaacaaaagaacaatggtatatcattaaatttctggggaggcaactaccacttaaagaaatataatatttagattaggaacaaccaaatgttatacaactgacacagtatagtttgtgagaatttacatatcacatatgaatatataaaggatgagacctcaaaactcaccaaatcctaaaatcactgaacaaagcagaaagcccaaaagggagaaatccattttgtacagtatctccaaaacaatgatgcaacctgttgaaaccattagatgtcttggagaagagaagaccagatgcaatctgcccgagagaataataaaacaatcaacaaattagagacattatatcatgaacaaaatgggagttcgctaaacaagttgttatgtctttgtgtttagtaagaacgtcagatattaagagatattaagttttatgtggaacacatgaagaatttaagagatattaattaagttaaattcataatctgctcagattctgatcagttagattagtgataaacaaaataattaagcctggtcaattacattaacagaagacaactgatggaaggatttgagcaatttttacatttcccttttaatagaagttgagattacccatctgtaagaaaaatcttacttttcctcggcaacattgtcaacatagaatataagcaccattccaaacaaaacagtactcaagtacgcccagcttggaaactgcagtttaactatgctgtcagatgccgagccctgtgatcaacacaacatttat

SEQ ID NO: 20031 - DNA, 2924 bp, Oryza sativa
gccagcaaacgcccccgcgagctcgtccgcaccctcggccgcttgccctccgccaacaccgccatggtcgccaccaccacatcctcaggtacaccaccaattctcacccccacactgtcaataatggtgacactgacgctgacaccgccatggttgtgtgcaggcgagggagacgggaggttcccgccggagctgagcgtggaggcggtgttccggtgcgtgcggatcggggcggtggacgaggcggacgcggagctggcgtaccagacggcggtgagcatcggcgggcacacgttcaaggggatcctccgggaccacgggccggcggacgaggcggcggggcagctgccgccgtcgtcggcggagtaccaccagctgacgggtcaggggagggaggaatcgtcgccggcggggagcagcgagggcgtcggcggcggccacggggcggcgactgcggcgacgtccgcggcggtgctcatggacccctacccgacgcccatcggcgccttcgctgcaggcacccagttcttccctcataaccctagaacctagcaacctagctacctatcatcatctacttccttccatgatcaaatcatcatcaatttgctagtttcatttgcatcatcgtctcaacaaaacaagatcaatcgaacaacaagaagaacaagaagaagaagatgatgatgatgagattaagagattatttgttatttcagccgatgaacactaatgcacggtcgatcgagagcatgtcattagctagagcttagctagtactactgcttgtcgtcgatgagcttattaatttcgagtttattaattaatgacttaatttaatgcaatgcaaagagagagagagaggaaaaaaaaagaaccaagtgtagcttcaatgatgatatcgaacttgttctaattaattaatttgcttttcccccttgattaaaatcccttcttttccccagttgattttggcatgtgatgagttgattaattactactgcatgcttaaaatttcttgagtaattaattaagtactccagcttagcttaacttagctagtactagtacgtgtacgtatgtgttgtgtgtgtgtgcatgggagaagctttctctggctttggcatgggtaaagctggcccttcacctgatggtgtttttttatatgatttgttgcatgttttaacccggtagtacctgcggttgtttttctttctttttcttctaccagtagtttgcttctttttaagcagctattctgtacattcagctgctgcctcatgccttgggatggatgagcaatcagcttctcctaccttagcttctttctcttcttcctgatccagatcaagggaaagtacataaattccatgcatttttttttgctgggattgatgtaggttttttttttctctttggctaatctactcgacaatgctgctactgccttgtgctatgcatcatctttggactctctttcatctctctctcatggtcatggcctagctattggtctctctctctctcctctctctagggtacatagtgaccttgtcacaccactgttccttcttttcctaggctactgtttttaatattcttatgttgaagtgacgtagagccatgttgcaatccttcaaaaaaaattaaaaaaaaacaaatgtaaaataatgcattataccaaccaatacaagtcacatggaatgatggaatgtcaacaatgtgtatggttggtttttactaacaaattaatcttacctagttagccctaagcaaccattagtctctctctacattgtctgaactgaatctatacaagctctgctaattaatgctaggagtatgcatgtttcgtcttcattctcatctctctgttcttcgatctgtacgtatctactagctagctagcactgtcttcttacaagagtacaatttttatttaataaaaaatatatgaaaggataaaagaacagttactggtatgatctcttgtccttcagtacagcaactatgcaaatttgcttcactcccggccggcctatacgtagagtgtagagtggtacagtagtgatgtatagtactgtccatatgctgcatctagctgtagcctcatctctactttgtttcttttactccatctgaacacttattctctttttattatggagaaaatcatcactgaacttttcatatgggggtgtcgtagtagctcaagtacacaatatagctactagctagcttgctaggagattgtaatgcagtgcataattcacagttgttcagcatatgtttggattaacgatgtacatacacatcaagtgcatttctgcgtttcaaattgtccatcattatctgtttgcatttgcactgaaacactttggtattgtgttgctagttattcatactattgcccacatgattaattagtatatatatatacgatatgttctacattgtgaggggcttttcaggagttcagattaagatttaatttgcgtaacttcattaaatgtgcttggagtgtcacaactctgttgcaagatacacattaactctatatatcgataaaaaaaagaattatacatatcgatcaaagagaggtatattgtgcgtcgctaaactacatgcatgtgcatatatataatactgtaagaaatgcaacacatttcccaaaataatcaaagatgaagttattttggaatagatggagtagcatatatataactgaagaacatatatatatgcacgtaccttcgatctgggtctgtttctgatcactgatttgagttctattatagtacaattcgtagcattttagtatactaatgaattctaagctagctatatatatgatataatttcatctaatattttaattatatgcatatatatgtattgatcttgttgttagtcatggttcaatt

SEQ ID NO: 20032 - DNA, 540 bp, Oryza sativa
acaaagctctttttgctgatgctatgagcatctcatcatctacctgcctgatctgacaccttattcttgaaaattttaccataaaacttctcaaggtttctcccggcatctgcttcagtgcgtataggtcatctgctttttttggctcttcatatacaccaatgaaacctgctcgaaaagtatctctcatatgctcccacgagtagattgacataggtggaatggtggtataccacgacaatgccactccttctagcatggttggaagtatctttgctttcgttgtgtcatctcctccggccgcttctaccgccgtctcatacaccctcaaatactcatttggatctgtatcacctttgtactttgtgatgtttgataacttgagatgtattggccaaggtgccatttgcagattttggctcagggggctctaggtatcgattgctctcgccggttgaaaataggattgtgctgatgcgaactggcctatgcggttggggaattgggtggcaaactgggttatgtttggatggggcattt

SEQ ID NO: 20033 - DNA, 5768 bp, Oryza sativa
tggatcgattggtggcaatgggcatgcatgcacggggctcaagtagatgcagacacacgggagcttccaagagatgtgcacatgcatgtcgcatatatgcagggttcttcagctagctgtacatcagtggctgcaagctgctatagctgctgctgcacttgcatactactacagctgctacacctaagcactagcagagcgaggcatatgcggcgagtcagtctgctgcatactacaactctgatttctgatcgatctacctatatgtccttcttatattcagctcgaattattagtgtactgtacttcatatctttcataattgacgaactcgatcgatcgatcgagatcgaccgatccatcgtccatcgttcatctctgcaatagtctctgcaaagccgcatgcatgacctagctagctagcaggttaattagctaggtttggtacatttgtgctatgcatggtcctcctcctcctccatctgacagtgtacgtgaatgttgccagatcacaacacaagatccaattcagagttagaatccggacagtactgcacatatacgaaacatatcccgtcttccatgcgtgatcgatccattgattttgatcgtaaatttgaagttagttagtactcgtaaacgtgaaggcaaaggtattcaactaattagcaaaatggcttaattaagcatcacatcgatcgtatctatctctctcctttgctaattactgatatatcacgcgaagtgcacgaaaggaacgggagtgatctaaatgctgacaaaatcatggcattgcatcgacagtgtgatcatgatgtcagtgtatattatgcgtgtaattacttgattaattaattgcttgattgatttaatattccttgatgcttctttcgttttgtcggctagcttgtccctttctctttttagcgcaaattacggcctcttgctttgctagctgtttgcatttgtgagaagttctgtaattaatattgctcttactaattatgtactacgcgacactgccattaattcttcaaatgttcataccgagtatgattaattagactggattttatcccttatagaccgtatcctacgcacaatgcaaacagattaattattactcctaaattacatgaatggatcatgtgtagaggcttaacacagtaaacgaattgtcgcatctattcgaagagcattgagcgtgcattagtagtgcaatgatatgtaggtaatggtatctagctaggctttgaaagaaccatcaaaagataattataaattattagtaagagacactaaaccttccaaatccaaccatctattcgtccctaattaacctatacctacctacctagcttctagactctaattactgttgtaagatttcattcaccacacaaaatcttgtgcatgaatcatgatagcgacgaattctaattataattatatatcccagctaatacagtgcttaatctgcaaggaagatgcatgcacacgtcttactgaaatttggtgatagatgatgcatgtcatctatctcgtcgtcttctctgaacaataatccaactgctcctctcctcctttttttttcacgaagaaattattaacagtctgaagattttgcgtggttgatcaaccggacagtagtgtgttcagtttcgtcagacacactaaggggatgtttggatcctgccagattggatgtttgacactaattaaaagtattaaatatagactaatgtcaaaacctattccataacgcgttcgcgaaaaaaacctattccataactctagactaattcaagagacgaatctatttagcctaaataatccatgattagtatatgtgatgctacattaaacatgtgctagttataaattaattaagcttaaaaaaattatctcgcaaatttatgcaattagttttattagtagtctatgtttaatacttctaattagtgtcaaacatccgatgtgacatttagtccatgtatccaaacatcacctgagaaatcaagatgatgttaatttcaatcatctcatgatctcgagagagatatgatcgaatcgatggatggtatggatcaaggtgtccctgtcccaatgatcgattcatatatatattattacggttgcttctgatgatcatatgttgactatatgggctagtaaagatagcatccgaccaacttcaatggttgccaattcgtaacgacaagcttaggttgatccatagccatggtaggctcctgtgcaatgcaagagatgagcaagcaactttgtcccccagacatctgggccctaccaccaatatatacatatcagtcacattgacctatagctgcaaaaagaaactgaatatttattatatgtgttcacagtactctcatgagctaaccatatgcaactgctaaaacttaggtatttaataatacatatataatctgaagtagttaattactgccaatttgactgaaagaaaattagtaaagtggagagccccatacaagaagaagattagtgcgagatcaagtgattaacacttttaatttaaagggctttttttttattatcttggagaggcccaagcacctttgacgaggcccttttagctgaaagtccggtgcgtctgattgagcccagagcccagtcttagtctcagctggtgccggccgcctttaaatctttattatttaattaatcaccttgtgatgatgatgatcaccatgatgattatgattccttaatacgaccccatgattagcaatgccatatgcttagcacatgaacttgaaaagtaggcggccaaaagccgctgttaatttgtctcttctactttgcatttcttaatttccatgttgaacaggcgactgaaagtacgtacagaaaatttaataccttaatttagtcgaggataacattgttaattacagcaattatctccttggctgtgtagtgcactaacctgcggtgattacatttttaaacgaatatacattgaaaatgtgaaattttcgtgtaaattcaaggtgatgtttatatagaattttcgtccaaattctggtgatgcttatagctttccgtggtactgaaatcgaaaaaagaaatgcagtagctagcatggacgctgtccagcgattattaatgggccagagttaagcccaaataaggcccacacatggtttcaccgtggtatgggcccacgtgcaacgaaggaggcggagcgggccaccttggttgcgcgacaaatcggcccacggaagttaactctatcgggatgagcgggctttcacccagagtgggctactgagcagtaattgttgggctgtccagcccaaacaacagccaacaacggcgatctcctcgccctcaccggcgccggcgagggcgagcttgctgattggccacggaggtaatcttttttttttcctcaaaatcgcaaaagaattgtgcgccatttcattaagaagagaacataggaggtaaaaacctccccaaagagccaaagaaaaaacacacaaataaagagaaaaaaacaacaaaacacaccaagatgacacaagaccaacaacaaaatcccaacaaaacggactaagcgatataccacaggtgtaaataattactcggacagcagcagccagtagcccattaatgtatttgagctgtatacataataattaatcctttgagctaggtaactctctgatcagtagcttgatagtcaaagctaataaagcaagcgtggcaaataagtgtgaaattatccaagcacagttgcacaccacgcatacataatacaacatcatcagtaactggtacaaaatgtcaagagacaacacacggtttaaccgctggatcatagccacatcaagtggtttggtaaatgaaatgaagttcttgcgttgatcgataataatgcatgcgcatgcaggtaagtaacacgagcactgcaatttattcgtcggcttgttatctagatcgagcgatgatacggtgtccggcggccggccggccggcgacgagcaggccgccggcggcggcggcggcggcggcgatgatatatcaaccgaggcgcaggtcgtggttgccgccgtaggccatgccgtgcaggttgggctggctgggcaccacgcggaaggcgaacatgtccgccgccgcgccggcgccggcgccgccgtcccacccgccgccggtgttgtccacgaacccgaacgccggctcctcgcgcaacccctgaattaattcaaacattcatccaacagtagagttcaatcaaattagctagcctgcattggagaaactaattaacaaataattttctggctataactgaaaaaaaaatgcttgataggttaccagctcctgctgcagagtctcgtacgcctcgtaggagtgcttcacctgcattatatgcatgcacacaccggatcaattaatgtagaaaccaatctctattagctatagacagacaaattatatcatgtgcatgcatgtatagacacagggtccagcatatgtgtgcaagtaaaagtagagtgtcactgcaatgtgtatatatacatgtttgcatcttcggacagcatgctatagcacacaagaaacaatcgtcaagtttatttctatgaacagtcactcacataaaatttaagcaagttatcctctcccatatcacaatgacaaagatatatatacagattcaaagtcatcttctagctagctccatatcaaagtgcagttctttgttcagagtttatacactactctctgtcagctctctcacgtaacaagaccaaaggagtagctaatgcagcgaaattaaacacttgaaggtgattgtgaatttgtgatgtgctagcttatactatatgccaacatgcatgcttgaactggttaattttcacctcagccgacaacacagttagatatgcatgaatggttaacaatcccctcgatgcaatgaattacttattcagctacatatatatatatatatatatatatatatatatatatatatatatatatgtttaattctgaccagctaaccgcaggtaaaactacaaaacaatgaacaaagagtactccctattaaagtcgattgaatgtaaagtcaaaagtattcgcttttgctcggttgttcaagctgagtaattaattagtagtacaccccactaaagattcagtaagccagcggccgtaatggtttggtttccaaattcttgcaaatcataaagcctcaatgccgtcccttatctaccaaaaggtatcacgccgcgatgcaatctctcataaaaatccgtgtttgacatgctactctcctaaatagccgggggaccaaaataagcatgcatgcttcatcgtctctaggtacagctagtttatatagctaccgatcctggcttagttgtttgcttaacaggagatacatatacgcatatatatgcagatacatgcccaattcatactactgtcctttgctgtttgtcatgagttctagcttgcaaaaaagacagagaaaactgcatcgcagatcgcattatattgcgtgcgttgttcatcatgtaatgtataggaatgcacatgacaatgcatgctccaattaacatcgatgtacatctactgatggctatgtgtatagcttagactagatgtgtagatcaggtagcctcgatcaaatatattgatgtgtagatagtatggaaatgcacagacacgcatggtaatgcacactgtacattagcgatgcatgtttcggttgagaggcg

SEQ ID NO: 20034 - DNA, 1418 bp, Oryza sativa
tgcaagtgcgaacttattggccaaactaagcaaatttaagcagtgatggtggccacaaaagtgaagcaattaaagtaaggaattggggaagataaatatacacttatataggcttgtgcagatatctagatatacccttattactgcaccagaagaacatacatatatatactaatattgctgcattattaggcataatattggcagtattttttttaagataatggattgattaaatccggcctatatatccacaagagatgcacacatagtcaacagcttccaagggaaggaataaaatccacagtagatgtacacctatagccaacagtttcaagaggaaggaataaaattgtggtatatatatatatatatatatatatataaatttaaccagaaacaaatactgagaaaatgggcatggcttattcctgacctttttcttgtaggtttcagtctgtgtggtgatcacatgatactgcagaaattaaaaccgaattaatcatgagaaaactgaaacaaattaaaaggctaggatacatgaagcagaaagtttaatatgttacagtccaatagatcaatgagcatacatcctactagttgtaagataaaacaatagtacacataaattatgtttctataaagcataaaccttaaaattatcttgtttaatacgagcaagcaaccgaggccaaattaaaaaccatcaatataatttccacacatgcaagaagccaagaagggttcaagaaactcgtagatctgtagcgagaagcatgaaatatgcacggatctgatcatgaaccgtagatctagtgtgcacaaaatacaaggatctaccacccttgaattaaggaattgaacgacgttttagtattgagcaaattagggttcgtagtttaattagggcgtgcgtgcgtgcatgccttcctgtggcgaacctccttgagggcggcatcgacattttgctcaagaccgcgcagctcgtcgaactccagcccgtccagatcttctcccatcctttgcctgcacacacgtatggttgtttatattcagatccagcagtacatatcttgaaaaacgttgtaaatttggatctcttgttcaagctaaaatcccccagtaactatatactaagagggattaattaaggagaagagaggaaagtaattaaaggggtgaaatttgtgctggcctgatctcggtgcgcaggttgcggttgatgtccttgagatggctcagcgtgcgctgcatattctgatggatgaaaacaaaccaaaccaaccaattaacgagcagaaggagttgggacatagaattaaaggaaagaaactggagtgaaaattgagaagacgaatcgagcaaaagatgagaaaacaaatcataaggagagaatcgaagtgagcagcttggttgca

SEQ ID NO: 20035 - DNA, 18217 bp, Oryza sativa
  unsure (1)..(18217): unsure at all n locations
caacctcgcaggttcagaaatggctattctacatgcttgctgtaacagttactgatcgatcgacgtgatgggcgacctgtgaatctgtgatgcctttgctacggaggagaggggatgggcagctcagttccataaatgcaacggcgacgaggacgacacggtcaatcatgcgccattggacacaagtggaaacactcgctgcaactttctagtccaggcaccacttaatgcccacatactatcacttccagcactttgtatgtgacttgtcattgcacaaactacaggggtgagtgacaagagacctgtttccatctaggagtacctccttttcttttattaccagcagcaacgatacttttttttttctcttctctttcgtgtaggtttactccaatactcaatgggcattcatatgcttccattgactaaggtaggagtgcatacatatgtgatccaaaagaatacatattgttggaaattttgggctatatattttggtcaacgatgcttacatgcacaaaggtttctagcttgcattccttgattcatgccaagtatcatagcaattactacatcaagtaaaaaattctccagaaaagaaaaattccaatacatatagagaactttttacaatccttgaggggagacatagaccaaatcgtggccgtctattgagcatcatcaaatggctgagaatcatttcgtatctagtagcgtcggtgcctatcccaccgggtaccaagcctntcgacaccctataaaggttatgattaattttcttttcgcaccacccactccatgttcctccaatgcattcgtccttaacatccttccccgacgtatcgccgctgtcacctagcggccatagcgatgagcttagtgcggtggatgcagcaatggaccggctcgatgaccttttgatctcctccaacccggtactagcaccacagacacgacgaccataggggcgggtgacagaggccagcgtaaatctcttagagatattggatgccatggagaccgagcgaaaactagatagggaagatatatcaagccaaagttatgaccatatataatatcatgacataatagttcaacggttagatttgaatggtaactatactcaataccttaattacctggtggtacctccttaataatggtaaaaatcatcttatatatattgctatattgttacccgaacaactcatgtacaatcttataccaaactacccttgaagaagaaactagctactgccgtgcacaatattaccaagcaactccctaagaaacaacccatcccatagtgcaaaaactttataaaagtagcagtagccaagccacagtgcgccttaatttacactaggcaggagggcactatatgcacacccacctaccgtgcaatgctttcacctgctagccacatacatttcaggtatgacgctgatgtgcctttccaacggttgtacgagattgagacgttacagtacacatcctgcaattacactgtactcctacctgctgatgactttgtgttactgagtatatactttggttcagagatgactctttcaaaatggtttttttccctggtccttgaaagtacttattgagatgtcatcctcatattgtatatgtatttgtatcaaacatcaaagttattcagattccatcaccatcttgtctcatcagaattacatatgcatatacatttcctcaccaatctattgatgtggaggagatataatataagtgaaagagtaaaatataataaaaatattctagttgattagggttagagcattcgttatttaaatcattgcaaggcttaactgttgtatttatccttaaaaactcatcgaagtaatattgttactctgtctcttaaaagactataatttagtgtttagaatttatcccacaaagaaagtttttttagagtggagttttttttatgcaaaaggtggagagtttaccttgtaaccattggtggtcaagagttacaaggccaaatggccgaaacacagcggaaaacagaaaagagtgatatagaacacaaagaaagaaaaggaggcaaaaaaaaaaaaagggaaagaaagcgaaaaaggaaaacatggtgatcatcgtgtgggctaatccatctttatcgcccaacaacagatttgcgcatgaatatttggcttgacaagatgctaccagagctcaacacaatctttgatttgatgaggaggtgtacaatgttcgtatttccctccctgaatgtcatagcatttcgtgctttaatttcaaagattgtgtgagcatgctgcaaagcagagccaagttcactagacttctttgatattattttaatattatttaaaagttttcttctcattttagccgctgaaccagtgtgcatatccctcttattttatctccgcattttataaagagctagattactagtattttaactttgtgcttaatctatcttcgacgagctagaatgataatagttctttaaggatggagggagttgtaataaatttgttagcacaatataatactctcgattataagtcgtttttactctggacaaagtcaaactgctttaaatttgactaagtttgtagaaaaatagtaatattttcaggacaagcctaccgctcgggcgaccgatttacgtgcaaaactactctaaactgatttttctcctaaattaattatccaaatcatgatccgattgcaccattaaattcgttgcaattaaatcttcaaaacaagaccacacattgatatattccgacaaaaaaaattagcttattattgaattatttttaaatgttgcacgatgttccaccaggcatatcgggaatgtttcactaagtagatcgaaaatgtttcactcgtttaaatcgggtgttgtttcaccttatataaaaacaatgtttcagcaaatagcgaaagaatgtttcagttccctgcaacattagatctatatatagtgaaacattgtgagtacactatgcgaaacatttttggtggaacaaaaaataaactaaattcccttaatagagagtttccaaaatatgttgattttttgttgcaaaagaatattttaattcactgcaacattagatctataaatagtgaaacattgtaagtatactaagtgaaacatcttttgtggaaaaaagggagagagaagtaggtgggtccagcatatacggacgtgggggaggggcggtcgctcggagtagagtattatcgatattttcaactcaagacaaatatattatggaaatatattgaactatagatttaataaaactaacttggtgttataaacattattatatttatccacaaatttaattaaatttgaagtagtttaactttgaccaaagttaaaattaacgacttttaatttgaaacggattgagtagctagttaaacaaaaggaaatagtgaagagaagacgaaatggttgagaaaattagagaggaatgtcaaggagagacgacgacgcttctcctttgtccccccgattctcaagcaccccatgcaacgcaacccgccggcgagttgaggccccacgaccaccggccaggcgtggccccacatgtcatcctcacacccggacgcgcccccgcctcgccgggatcaccccacgctcccgggagctctgcgcatggcgcgccacgtcacccaccaacacaaagcctaaacccgcgccctcccgcactttactcgtccttgtccgatcaatggcggggcttggccggagctcgcgcggcgcctccgggaagcgcggcgccgcgtcctcctcctcctcctcgtcggtgtcctcctcctccgccgccgcctccgcgtgcgtctactacgccaccacggccgtgctcgtcacgctctgcgtcgccggcgcctacttcctcacgtccgcctcgtcggcgtcgcttgcgggctctgtcgtcgatggcgacggcggcggcggcggcggcggcggcggcaccgtcacgacgacgtaccggcacaccacgcgctcgtcgttcgcgtacgaggtcagtaggcccgagaggaaggcgcccccggcgccgccgcgcgatgtcgagcgggtcgatgacgcggcggcggcgcgggggagaatcgctgacgaggagggcgccgaggaggagcacggcgatggcgacgacgacccgcgtgggaagcccgatcttgatgaccatggcgccgacgaggaggagaccaagagcgccgtcgcggccatggacgacgcccagcgacgcgaggaggatggcagcgtgtcatccagcgaggccaacgccgaagaggaggaggcggcggcgacgactggagcgcgccgcgtccgcgtcggggaggacgaggaagaagccgcgcgagaagagagccaagagctgcacctgcagatgccgctaggagagtctcgccctcgcgccgccgccgccgtggaggagaagagcttggacggcggcgtcgaggaggagagcaacgccgggcagcggcagcgcgaggaggagcagatcgatcatggcgtcgacggcggcgcgagcttgcgccgtgaagcgcaggaggaagggcagatcggtgaagggtacgtgatggcggatcacggcgaaggcgaggagatgctgctcgagcagcagcagcagcaaccggaggaggagcgtggcggcgatgcagaggcggcgcgcacgtcggagtccgacgccggcggcgaggtcgacccggaggacaagccaaccgtgtcagagcggacggaggagatggtcgacacgctccccggcgaggaagaccgcgcggaggtgtccgccaccggcgtcgacgagcagaacgcgtgggcgacgcaagccgatcactcccaccaggagaaagaccggcgcgacgaggcggctggcgtcgacgacaacatcgccgacgccaccgccggcggcggcggcggcggcgaggagccggagtggcggctgtgcaacgtgaaggccgggccggactacatcccatgcctggacaacgacaaggccatcaagaagctgcggccggagaactaccggcggtacgagcaccgcgagcggcattgccccgacgagggcccgacgtgcctcgtccccctccccgccggctaccgccgccccatcgagtggcccaagagccgagacagggtatgcacgccacctgttcgatcgccatccattgcttaattacacattttgctgctgcttcgtgtcatgtcaatggcggcggcgtgcaggtttggtacagcaatgtgccgcacacgaagctggtggaggtgaaggggcaccagaactgggtgaaggtgagcgggcagtatctgacgttccccggcggcgggacgcagttcatccatggcgcgctgcactacatcgacttcctgcagcagtcggcgcgggggatcgcttgggggaagcggacgcgggtggtgctcgacgtcggctgcggcgtggcgagcttcggcggctacctgttcgaccgcgacgtggtggccatgtcgttcgcgcccaaggacgagcacgaggcgcaggtgcagatggcgctggagcgcggcatcccggccatctccgccgtcatggggtccaagcgcctccccttccccagcaaggtgttcgacctcgtccactgcgcgcggtgccgcgtcccgtggcacgccgacggcggcgccctcctcctcgagctcaaccgcgtcctccgacccggcggcttcttcgtctggtcggcgacgcccgtgtaccagaagctcaccgaggacgtccagatctggaaggccatgaccgcgctcaccaagtccatgtgctgggagctcgtcgccatcaagaaggaccgcctcaacggcatcggcgccgccttctaccgcaagccgacctccaacgagtgctacgagacgcggcggcggcagcagcctccgatgtgcagcgacgacgacgacgccgacgtcgcgtggtacatccgcctcaacgcctgcatgcaccgcgtccccgtcgccccgtccgaccgcggcgtcgcgtggccggcggagtggccgcggcggctgcgcgcgccgccgcactggctcaacgcctcccgcgccggcgtgtacggcaagccggcgccggaggacttcgccgtggactacgaccactggcgccgcgtcgtcgacaggtcgtacctcaacggcctcggcatcgactggtccagggtcaggaacgtcatggacatgagagccacctacggagggtaggtcacaccatcgccattgctgactttggtcaaactgttttatatttgactaaatttatagaaaaaaatattttcaatctaaaataaatttattataaaaatatatttaattattgatttaataaaactaacttaatattataaatattactatatttgactataaacttacttagaatagtttaattttaaccaaagttaaaacgtcttataacttataacttgaaatataacttgaaaggctcaaacggtggtagtacttaccacgaagaagaagactatgctgacctctccttgtcaggttcgcggcggccatgagagaccacaagatctgggtgatgaacgtcgtcaatgtcgacgcggcggacacgctgccgatcatcttcgagcgagggctgatcgggatgtaccatgactggtgcgagtcattcagcacctacccgaggacatacgacctcctgcacgccgaccgcctcttctccaagatcaaggagaggtcagccgccattgatgctcccttcgatcgatcttctcctatctttgctttcgccttcgccatggccggcgatcgatcgagaaatgttttttggtatctttgtgttcaggtgcgccgtgctgccggtggtggtggaggtggacaggatcgtgaggccggggggcagcatcgtcgtgcgcgacgactccggcgccgtcggcgaggtggagaggctgctgaggtcgctccactgggacgtgcggctcaccttctccaagaacggcgaggcgctgctctacgccgagaagtcggattggcggccggagttgctcgccgacccgttgtgatgatctccagcgaccggcgcgcggcgtggccatctcatctcaggatggcaaagcagcactccccaacacaagattagatagaactcttctcctcttttcttttcttctttttttttgtcttttttttgtctgcttctttgattggtagcacttgacatagttctgtagtggttattatcctacaaacacaaataatgcagccatcagcaacaacaatggtagtatatgcatggttttgtcactgttctagtatagtatgtgtaccttctgagcactaacacaaaagtacagaactgagatgtctgatggcttgggctctgttggtagtttcatcagttttatcccatattcttaatttgtatatttcaaacaattccacgtattagaatttatatgacatgatcaaacgaaactggtgtaaaaatgaacatgattgtagtggcaaccatagacaagatcacagatgacaatttcaagtaaaaatccagaacagaccaaatctgcaccagctcaaccagcaagcagctatcattctcataaaaaatcgaccgtatgcggaacattacaataatgcatgcaagtatagaattagttatacaccagttgttacagataataaggtgatcgtagtagttgctcaaaacatgctaactgagcaacaggtaaaaatgattactcaaaacttcctttcttatcaggaaatgtgatgttgcactacaacaatgatgtttcgatgtatactgatgtaagttaaaaccaagtgctttgttgctaaaatcttggttgataaattggtaagctatatgttgaatgatcaaaattggaaggtgatcatcaggcgttgcttgcagctagcccatttgatgtagtctgtaaagcattattgtttctgtaaagcggtattcctccaccaagatccttcagcctctttaccatatcatgcaaccactcgaaagtgagcttggactgagcattgagttcctccctcacttgaggatgcaccctaaaccagtcccctagcatcttgtgaacatgggatcgaaccattctccatggaacagggtactgctcgcacagtttcaaatactcaatgactagatcagcctggtctaagccactagcttcatcttcatcaccattttctttccattcctttgtccggaaaccagcaaacaatgctggattttctagaagagtttcagctgaaagcacaccatcagcaccagtatgttcaaggcaatccttcacatcatccaaatggcgaatgtttccatttgcaagtacaggtatcctaagagcatctttgacagctttaatggcatcccagtcagctcgaaatttcttcccatccttctcatctctagtccgcccatgcacagctaccagagaagcaccagcttcttcaagcatctttgcgtaggccagtgtgtcctccagtcgcgggaatatgcgaatcttgcatgatactggaacatggaggtttgctgatagattctgtacaagggattttacgagaggaaggttgttcatgagaaacgcaccatagtacccccttctagcaatgcgctgtgggcatctgcaagatttcagagaggtggtatcgccatttagaagagcatccagaacaaaacatggtatgaagtaatgcttatttatcgggggaactgacatttcaattaactgagcagaaaagggggagatctactaaacagtaaaatgccaaataagtcagagcagaggaaattttcagcatagagtagggaatacaacattacccaaaattgatatcgacatagtcgcagtacggttccacaatctttgctgcttgtaacaaaatgtcaggatcatttgcacaaaactgaacaaaaagtggacggtcctcctgtataacataccaccaattgtcacattctattttcagtatgttccataaccaatacaaagaacgattaatggattacagaggtaacaggacaataaaagctagtaattatcaaactactatctaaaataaaagctaattatcaaactactatctaatcctttgtgtagtgatatgacagatgtatcgctcggaattttctcggtaactacgaattatcaaagcatcatcaaaattattactccagtgaagaattagcttaaactactccgggcgctctaattgaaggatccaagaattgaatagaaaagaaatcgtataaaccaaccatcaaggagaatttaccttgcatgtggtgaactccatggccctgtgcttctcgttctcggagaagatgcgggagtggagcatgggcgtgtatgccccggtcgccccgtagcggcggcacagcatgcggaaggggagctccgagttgtccaccatgggcgccaccaccatcttcggggagcccagccgcctccagtgcgcccacgcgcgctccaccctctcctccgcggacaccggcggcggaggggcgggcaagggcggggcggtctcctccgcgggcgcgaccgattcggtggtgaagcagaggtcctcgtcgggatcggaggcggtggcgaggtgggcggcggccggcggcgacatggcggcgaggctagggtttacggagcggaggaggcggcggcggcgcgggttccggaggatgggagcgaatcgcatgctagtgatttgcctctgggctctggtcctggtgtgtgggccctacttgtcagtgggggagagacaagatggattccagttatatgggccttttcggcccatgaatatttatccggcccatgtagagagtagtaaaatttcatctgatctagtctgaactgaacaatttctgcaacacatgtctgaacaatttctgaaactgaactggtgtcatttcaaaatttctgcaacactttcaatttagagccatttcgaaaatgaaatttgcaattgagtaattattgaacccaacttggtgacagatgtcttgctgaattggagcttggaagcatcttgaagaaagaaaagttcatgaaaaattgacagtaattctgatgtgctcctttcatacccttgtggaaaatctatatggagtatatgtttagatgatctggattctaaagcttacagtttccaaagctttttaccagagacatttatggaaatgtttcctaacaaactggcaataaacagtacatctgtacatcctttctgatgatcagcattcactgttgatcaaactgaagttgcaacataatgttcagagctgtctggcgtcttcttaggtgggacattcagttattggttaggagatcaactttctctttaaaaaaagacaagatgtcctttccagatgggacaaccaattagtttgttttaatttatttacaagatatgttaaagaaagtactgcaatttgcaatgtgtagggacttaattcagctaccagaattagataggacaagcaacctgattattttgtgaaagtaatagccctaccaagatgcattagatgtagagagccaagatcacagctgtctgccaaattaacttgtcgatcttgtcggatctcacaatggtacatcaacacctgaaaaatatagttacatattcagaatggtggctcccgaggtaaaatgctttttttttttttgcttttcttaacatatataagtagcattttttttatctcaactggttgagatgatacatgcataatccctcacaattttagagtaaattagtcgtgaatatgatgtgttgcccaagttgctaccttgatttagattcagaggatcttgaacaatgacaacagcagctactacccataattattcctcggttactttttgtttgtgggagataaataagaatccttcagctcagctcctctttgcccaaatggccactagagctggctttgcacaaatctaatgagttttaaaacctactttgtgcttgagaataattctaaaaggcaacttggtgataaacatttttgctccatcggaacttgggagcatcttactgacattccaaaaggaaaatatgcatataattttccttttatgatgaaagcagtatggccaagttggtactatcaagtatattaattggaagttcttattcgaaaaagtatattaatggaagtgaataaacaaaaggttcagaaataactccagtatgcaacgctgcttttgcatgtgtagtttgtgcaattaattcaactttaaatcaaaccattgtcgtcagcatcggagagatcatttttacaccaataagtagcatcaattagtattatacgtggcacataataataatgttttattcaaggaatatgattacaaaaataaacagtgaactgttcagtctgaagattggaagaaggatccagaacaggtgcagatttttttagtagaagagaaactgaattagggtcctttgaatcgcagggtagaaaaaacggaggaatatgaaaaacacatgattctgacaggaattgaagtgtaaaacagaggattgcaaaacacaggaaaaacacaggaatggtcgtttgattggagcgcaggaaaaacgcaggaatcagatgagagagatagactcaaaggaaatttccaagaggttggagcttttgctaaatttcctccaaaatccacatgcaatgcgccattccataggaatttcatagaatttagaaagcttcaatcctttaaatcaaagggccaaataggaaaatttcctatagaatttgaattctatgaaattcctacataaattctttgatttaaaggggccttagcttttgaagtggcatgcatgtgcttagaaatgacatctaccaatctctgttgcatcacagaccattagtggtaattgagacagaaaatccaagaacatttctccacgaaaacaagtatctaccattctactccaggttagagccatcaggctatatgcacagtacagtcgagcttgacactagttgcaattaacaattgcatcacctcattaagacagtttggttccagaaaaaaataataattaagattcaacaaaaaaacaattaagagaaactccttttcgatcaatgcatgcatcattcttcagaaaatgattaatgatataatactatataatcttagtatgcatcaactgggtgtggtttgagctggaactaatcaattaaggatgagatagtactccctccgtattttaatatatgacgctgttgacttttcgactaacgtttaaatatttgttttattcaaaatttttgtgcaaatataaaaatattgatgtcatggttaaagaatatttgatgacgaatcaagtcataataaaataaatgataattatataatttttttaaataagacgaatagtcaaatgttgaaaaaaaagtcaatggtattatatattaaaatatggaaggagtagtagcttggctagctaagaaaagaaagagaagagcctaatcgtgaagccaatccatccctatctggcttaattaaaactggttgaaaaaaaaaagaagaaaaaaaacgctggagcgtgtgccgcgtggtgacagtgaccgcctgatcttgggcttgatcgccggcgatgagtggccgggaaagcgccggagatcacctcacgcttttgggttcgtgaccggcggtgagagcgatcgaaatgaggcggccgaaacgtaactgtgctactgcctggctaccaattaaggccgtgtttagttcacatcaaaattgaaagtgcggttgaaattgaaacgatgtgatgaaaaagttgtaaatttgtgtgtatagaaaagttttgatgtgatgaaaaagttgaaagtttaaagaataactttggaatgtaagctgcatttgggcatggaagtgagcaagcccggtgccacttccacctgccaaactgcatgcacattgcaaagagaagcttctggaattcggaaacagttgctactaccagcttcgaaatgcttggcacaacatgcagtttcttttaaaagagaataatggaatctatttcaggctttgctttaaaatgctacggcaaattatacagaggttctaggtcgtcgaacgactacgaaatacaaaatcaccgttttgttaaaaacaagaaaactaatataaatactcgagtaaagttatattgaacatctattgctaaacttttatctatggactattatatggttgatgagaatctgcattaattaccgttgatttgttcagcggtttgcaagttctatataatccttgcgttcctacaaaatatcttagtaatactagtctctgtgctagtatttcagtgattcatgatatattgaagatgatggttaccgagttaaaggcatcttttttgccaaaaggagactctcaagaaggtcaagaaataaagttaccatcagctgtgtactaaaagaaaattaaatctctttcaggttggcctgcatgtatatatatcttagaaacttgaacaaagctttggcgatatcagaaaccaaagttctctttggtgacagtggcgtctgtatctgtatcctatctaagatgacggtatgcagaggcgcctcccttaatagaacgacgcgcaagtcttttgcgtacctccaaagaaaaagacgacttgcattgtagaaatggtgcagatcactgaaaaaactgtgttggaattatgcttgcgtgcagcagctaagatattactacttccatttcatattattatataaatcgttttaacttttatataaattaaacatttttagatttaactaagtttataaaaaatatagtatttttaacacaaaataaagaaactatcagaatatgttcaaagttagatgtaacgaaactaaattggtactataagtgttattatatttttctacaaactttcgacttaaaaatgttaaaacgacttataatatgaaatagaaggagtagcacacattcctctccctttcactcgtgcccttttcattagctactaccaggaacatgcctggatcatgggatggcatctgccttggcattttgatcactagcagcttccgtttataaattcataatatctttggtcatatggtccccagaggccagattttcttcattcaggatgacacactaccctactttattagcatgcagaaagttagatgacaaaacaagggtaggaaacgaggagaattttactcaaggactccatatagcaactacagatatcaatctatttcgtgacagattttccttaccataattaactgtttgaggtttatctagccaaatttacgatcgtaatctataatttgattgatttttttttaaaaaatgatatgcaacatacacatggttgcttttaatccagacgaatttgccgaacgctcatccccatcttataaactagatgaaacttcgcgcctttctatgatagttttgtatgaaaatagtaaaaaaaaaaaacaaacatgtaacatagctagacgacataactttgtaatataggttgatcattcaaatacaaaactaatacgatgtggtgcaatgagagaaggaaaataagaaatataatacagattaatcgtccaaaggcaaaatcaaagtgatatgaatagataagagaagaaaatggcggaaataaattggatcatagatcaatcatcctaggactaaaaataattgagatgatgtggcttaatgagaaaagagaaaaatagcattaactatatttagtggtgatgaattttatagatatataggatttggctggggcaattctgcagccaccccattgaaaagagataaaattttcgccctagagtctaagttagcaaccttaacagtatattttaaattatctagatttgtttaatgaatattgtataattacatttttcattacatatgctttagtaatattgcaaatttactatgatgtcttaatgtaaagctatgaaaagcaattatcaaaatcactcattagaggcaataaaaaggttagaaataccaagtaaaaaaagaaaagagtactgcacttagatacttacaagttaggaaaaagtgcaaataccctcctaaactttagatagaagtccgtctagcaccctgaactttaaaaccggatatcaaacctcctaaacttcacaaaaccgttcatatattaccctctatggtgttttttacagtggtttttatctaattagtatataaattggatgaatttgatcacgtgacatacacatcgaacatatatattaaaatctccacctaaatctttctttttatcaacataataatagtacggtatcactgtataagtataaattgatggcttacagttgatgatatgcaaatatattatattagttatttaaagttgttcgtttaagcttttaaaacatgcaaaaccaccattcaaaaccactttagggggggtaatatgaacgtttttgcaaagtttaaggggttgaatatccggttttaaagtttaaggtgctagatggacttccatccaaagtttaggggggtatttgaactttttcctacaagttacaatgcttcaaggtgtgtgcaacatgtaaaaaaacaaactttggtgcataactggtctctcagaattataatgattttacagatggatgaatagaagactaacaatgcaaaatccaactagttaatgtggagggaataggagttgactgcttatgtatggagttgctgtacaaatccaaggcagcattaaccaatgagataggaaggggatgatgcgtttgattcagcttattgcctgagtcgcctcatttgttaatgctgcctctccgccgcctgcctcgcccgcctctccgccgccgaccgcgccatccgccgtcgtcccggcacagccgtacgtgcgcatgccgagagagagagaggaagaacgagagagagaagagagagaggaaaaggggaagaggagtatgataggtgggtcccatattttttaataaataaaatgctgactggattgccacgcgtacgccacgtatgataaaaccgctctggattgggtcgaggggggtaatttgtccagtattgaaagtttacgggggtaatttagttgaccacgatagttcgagggggagtaattcgtactttttccttataaaaacgattttgatgtttcacttgcgacaaatttttgaacctctatctttcagtttttcggttgtaaaatcttacattaagattcatatttatgtatatccaacctacatctacactaagtaacattagattttacaacaactttttatctctcttttaaaaaaaaattaagacgggctatatctattggttaaaatttctgcaagatttaaaactataaatatgttgaaagatgaataggtgcagtcccttgtaataaaaatgatgtaaaaaaagcttgtttccattttgttgggtaatggaacccaggtacaatgggaaaaaaataatgagaaaataataaaaaaaatctctcaccatcatcctcttcctctgttttattagcagtagccagtagctagctgagctgagcctgagcttattatatttccctccacttcgtcctcttcttcctcctccatccccatcctccatcggatgcactagtagctggccttgtaccctacctagcttagctacccacccatgtcctcctcctcgtctcctctcgctgtctgcctttgacttggagacctagctcgtcgatcgccggccatgcgggtgcagtgcgacgtctgcgccgccgagccggccgcggtgctctgctgcgccgacgaggccgcgctctgctccgcctgcgaccgccgcgtccaccgcgccaaccgcctcgccagcaagcaccgccgcctcccgctcgtccacccgtcctcctcctcctccggcgacggtggcgccgccgccgcgccgctgtgcgacgtgtgcagggagaagaggggcctcgtgttctgcgtcgaggaccgcgccatcctgtgcgccgactgcgacgagcccatccactccgccaacgacctcaccgccaagcacacccgcttcctcctcgtcggcgccaagctctcccccgccgcgctcgccgaacagccgctcccgtcctccgactgcagctccgacgacgacgccgccgccgccgccaccgaggaggagtaccactcctccgccgcatccaccggcgccgcagtgagcgcgcctcttgacgcctccagcaacggcgccggtggcggaggaggagtaggagggagcagcatctccgactacctcaccaccatctgccccggctggcgcgtcgaggacctcctccccgacgacgacgccttcgccgccgccgccgcggtgagtactaccaacccatcgctccgccgtgttcttgctacgtctccatcgatgaagccgagactaacctacgattccttggagcagcaggcggggaaagagaaggacgagcgcgtgccgttcctcgacgccgacctgttcgacgtggtcgccggccggccggagaagaagggcggcgcgtgggcgccgcacgtgccgcacctgccggcgtggtgcctcgacgaggtgccggtcgtcgtcgccgcgtcggcggcgccagcggcgacacctgtaaaggcgaagcagggacacgtgcgggacagccactggagcgacagcgacgcgttcgccgtgccggagttctcgccgccgccgccgccggccaagagggcgcggcccagctcgcagttctggtgcttctgaacgccgccgccgccgtacaatctggccgccggcgagctcgacgaacacctcgatggatcgatcgaacacctgtgtaatcactcagctggtcactactacaagtagcaatcagcaagcttgatgtgccactgttactagctgctgctgtttaattagtgagtactaagctactactagttaattttggtgaaaactatgctactttgttactatataatgaagtatgtgtatcaaactaaactgagatgttggtaattaattatcgtattttgtaatgtttcatcttctttagtttcttcatctaagatcaacaagctagctagtcttagtcaacccatactacaacatagatctgaagagaaaaagaaaatgatatataattaaccaggggagctaattaaattgtggtggttgtaagaaaatagtgctgtatacttgtttg

SEQ ID NO: 20036 - DNA, 8911 bp, Oryza sativa
caacctttccggattaattgtaccacctcgcctacgcacatgcgtccgcccccaatataatactgctcctgctaccgccgtgctcgctgaagcaactcgggttcctcctctgatatagtagtattgcgaccatgatggccgcggctaagcgcccctactgcaagccgccgccgccgacgacgaccacgacggcgatcacttcctcctccggccagaatcacaagcggctccgcccttcgctaccagctgctgctgccatggacggcggcatggaagaggaggcggtggcgccgccgccgccgacgacgatgacgaccaccacgccgccgcagccgctgctccccgggttgccggaccacctggcgcagctctgcctctcgccgctcccgccgcgactcctgcacgccgtttgccggccgtggagacggctcatgtacgcgccgtcgttcccgccgtttttgtctctgtacgcgctcctcgacgacgcggatgccgacgccggcgtctcgtttgccgcctacgaccccttggctggacgctgggacgcgcttccctcgccgccaatgccgtcgccgccgcccatgctctggcacccctccttcctcgctcgccgcctcccgctgcagtccgtcgccgccgccggccgcctcgtcctcgtctcgggctccacgcagtccctgcaccctgcgctctcccgcccgctcgtgttcgacccggccgcgcccacgccgcggtggcagctcggcccgcggatcccgctatccccgcgccgctggtgcgcggccggcgcggcgcgcggccgcgtgttcgtcgccgggggcgtcggcgccggctacgacccggccgtcgcccgctccggcgcgacgtgggaccccgcggcctcgccgccccccgccgccgcgtgggagccgatcccgccgctgcgcgacgggcggttcagccgcgacgccgcggaggccgtctgctccggcgggaaggtctgcatggtcaacctccgcacccccggcgccaaggagggcgccgtgttcgacctccgcgccggccgctgggaggacatgccgcccggcatgctcgccggctggaagggccccgcggcggcgtcgcccccggacgacggcgagaccatgtacgtcgttgacgaggagcgcggcgcgctcaccgcctacgattggggcgccgaccgctggaggacggtagccgagtccgaccgcctcaagggggcggcggagatgaccgtcgccggcgggaaggcctgcgtggtggcccccggcggtgggaaggtgttgatcgtggacgtcacgccaccgccgccgccgccaccagcagcgaggagggaatcgtgggcggcgccgccgccgccgccgcgcatgtgggaggtggcggcgccgggcgggaagcgggtggtgtcgctgcacgtgctgcccaggatgacacgccccgagtaggcgaagctcgtctccgcatggatatgcgattcggtacacgtaacacagcacagcactgtacaaaaacgagagctcttttgattttgccgcagattgaagctcgattatttttttatattgatttttggagtaaattccccccaaaagctttgaatcatgcatgcttctgttcatttcaatcaacaaaagaagaagaagagatggatcgatggagcgaagaatttgtttttgtcgatccacacacacacacacacaaaaaatctgaatgtgaatgttcgtagcgtttttggataccgtggtccattttatgttgttactgctttagctccaaaattaggttctattctattcgtcccaaaagccatgaccaaagtggtagggatccccgtgggcgatggcaacggcggcggcgaatgaccgatttgctgctttcgccgtcgatctccggccatgcgcgcgcgcgcgcgaaggaacctcgcatcttttcatctccctttttgtgtggatgctgtctgtgatcatcatatcgatccgctcgtgggccatgcgtcgatcgatcgatcgatccggcgaactttttttggttggtcgccaccggcggtggcaggtatgggcgaatctacagtattaacatcggtgtcaaacgataccgacgactttcgataaaagttatggttaaactgcttgttcatatattacaatactataattataatatcgatagacacgttatgataccaatgaattatttttctagatcggccactgcagatagggtgtggttgccgtggttccaacggaggaggacccggctgtccaccgaccagtcctattcgccgtcatggtgacggcgacattggctggctctggtgtcctctttgtcttgttgtcggttataaataacgccgcaacgatagctcgaaaagtaggcacctgtcgtccatgccaacttgctctcgcttgcatggtcacacacaacacaagagagagaaagaagaggagggggcaaaaaaaataaaaatctgggtgtgagaaagtttatagctcattcattgacgaaaggcgggagagcgacgcgcgcgcggtggccaacgagctatttgcgtgtttatagctcttccccgccgtcggtcaggatggaacaaagctagcggacggtggaaacgagccaaaaacgggcgacccttaattgcggcgagatgcgatgattccttgtgtgttactggtaactaattgcgatggccactcgtccggcaagtttcgctcacgcctgatgtcatttcttctttctggttatctttacatcgggaaagtgattttatccctccatgggatatctgctcgtttcgtgcatgccacctaaatagtcaataaaaaatatgaaaaaattggcaacatagattaatatgaaatatataacttctataagttgtaacaaaaataacaatataattgcgaatgtgcgataactattttcagttaatttgttatttttgttacaacttgtataagttgaatttggtcttgcatgtttgtggagtgatatatttcgtattaatctatgttgttaattgtttttaaaattttttgataactatttaaatttaaatgacatgtaaataatgaggggatatcccctcgagggatgaaaatccacatccctctacatccttcttcacttgccaaattcttcaagtcccagatgctctgaaagtgatggcttcaggacggcctgattctcacacactttcagacaagacttcttttttttttccctttcatttccttccaaaaaggagaaagcttttcagacaattgtgtgacagaaactaagcaatggtactactccaactatcatgaccggtttcttggccagttaagtgccaacttgatttcaatcagatttcaggcgtttctcagagaacaacttgagctgcttgctgtgtaggagtatgttggtagcttgcagagagtacagtgcttgcttagaccatgtgccatcaagtaaaataaacctagaaagtgaaatcttcattttgttagctatcacctagaaaaaggtgaacgcaagaactgtaacaagagagtgatatttctaacaggacactcaaaaaaagactaaactgttatagtagtgaagagtaagcaagacactaaagcctgaaaatgaaatcctcacctggctcaagtctcaactgtgactgaacagccaaccaatatatgctaaggcaaatcatttcccaacactgccgcacgatgctgctacctcaaccggcctaattagcgttcctgaattaccatcatccaaatcaaaattaaggttaggaacagtcactttcttacacggttacacccactggcttgcttgaccgatagcagtatactaccaacatatactccatatagcaatggcaaccgacaaaccgataatttctcttgctcagcaacttgttcgtgaccttgtctagatcaaccttaattgtagcaattagctacaattaaggcatcttctagactgtctggacaagtttgtagtctcgtccatccctagacagaccggcgttataattgggattcggacgtgcggcttattgcaagacatttggggcaccagcacaccactacagttaatgattatgctcatttggatacattgcaaaatcactatagttaatgattccgctcattttggatacacaacttctcgaatatgctatattctcacgacattacatccgagttggctttcttacagttacagtttccaagcaaattgttgataggttacaacttacaagcaaaagacagctggggaaacagacaacatgtccactctctaccagcagagtgtgcagagtttctaatctggcaaggcagtccccctttcaagattgttcttgatctcaagagtatacttgccaaatgccctctcaaccttcttgttgaagtgttcgttccggtcattgatcgagtcaatgtccttgtcttcatggaacttgcgcctcctgctgaatgctttccgtttctcatcccgttccttaagctcattaaccatcctgtctatgttttcttccgggaccttagacacctgttcaacgcacaagccatcgataaggactccatgacagaagggccttaaattcaattagtacaaagtttggtacgatggcaagtaccttcccatattggagacttgaagcgtcccgataaaattcaggatcggcttcctttgctttgttgtatgcctccatgtcaacctcaatgttcttggtcctctttttgtatgcatcatataaggtcttctggttgaaaactgcaagtgagaacacccccatttatatagaggtacgaggtttaaattaaaaagatcaaagggagttcatggccaaactcaaattgtttcaaacaacaagctataaccatgggcctatggcggctaccttgatgctttctgatttctgactataacataagcatcagggatttccagatataaagaatcatgtaagtagacatctcatggtgccagacattcaatgcactatgtaacaagaaatgctaaccagatgttgcattgctgaaggctagacgcaaaaattatagggagcatttgtcaagagcatatataacatataatcttgtttaagaacatcagtaatttacacttgcaggtttaatatttaaatgcaggaaaaacagaaacatatgttggtaaagtttgcaaagcacaggttaaacttataaaacaaagaaactgatatgacaacctagaccctgatgggaaaggaacaacatgccatatactactaggtaacaaactgacaaacaattattcaagtaacttcagaaaattcatttggaattagcttaaaacacgtataataaacaccacaacgacaaccggccatgagagacagcaatatgaatacggatgtgtcgaaattcaccaaagctacagaatatgcctctgaatataaattgaatgaagaaattcgagagatggaactcaccatcccaaccatatggtgcaggttccttttcccacttcttgtattttgcttcggccgactcctgtgtatcgagcatgtaagactttgtcatgtccaggccatttgagtcaagaagctttccgatcttcttttttctgtcttccagccacttttgtttagaaacacctctactctcagcgcgaggctccatctcttcttctctgccaccatcgcttgctgatttgccttcctagcttcattctgcagcacgagaaacagcaaagagatgaatacccaagactgcacagacaacagctatgacaaaacaatggaattgccgatgaccgcaccatcttcagccgcaactcaaatagcttcttctgcttctctgtcatctgcgggtaaccgtcgtctgagccggcgtcctcctgctccgcatcatcatcaccaccaccaccctcagcttgggcagcgtcggatttgccagcgtctgcagaaggcggttcttgctccgcacgctccaaccctaaatcgaagccaatgaatcactccataagcacccaatacaggctcaggacgaatcgaattactcctagcctcgaattagaattaccactatagtatggattcatggacatcacccatggcgcaaattgctccgatcagaaaatacgtacagaagcgagaggaggaggcggggctagcacctgatttggcgtcggcgatcctcttgaagcagtactcggagcagacgtggtaggggttggaggcgttgatgcagtcggggtggacggtgcggtccaccggcggccgctgctcgtcctcgatgcgctccttggcctcggcgatcttgcggaggcagtagtcggagcactcgtggaacgggttcgacgagttgatgcactccggccgcgacttccccgacgccgccgacgacgacgacgccatcggcctccgagctcgggattcgtcggaaccctagaagaggattagctccgcgtgcgaattggggattgagaaggcgatggcggcggcggcgaggtgaggtggtgtggtgggcttcaaaccgggccgaagagacattggcccacccatttcccaaggcccatgcattccgcatcgcagccagcccatgagacccaggagttagttcaaaggcctaagatactttcactttggtccaacgatcaactcctacagaaggaaaaaagtttatttcggatccctcaaccattggctgagtttgattttcgtctctaattggcaaaatcgagcacagcgaatcaatttacctccccacaccgttttgagagagattttgggactgcctatacatttgtcgataaatttttcctcaaaaatttgacaaatgtaattatagcacaatcgtagtgtaattacattgtaacttgcgtgtaactacagcgtaacttatatgtaagtttcacataattttgaatcgttagatctattacaagatttgttttggtgaggaagaaaacaaatcatagcacatacatatatgaaagaatttgttcccacgacctccattttaccgaaataacatgttacggagagatttttaaaaattacatacaagttacactatagttacagtgtaattacatgcaagttacagtgtaattacactacgattgtactgtaattatatctgtcaaattttaggggaaaaatttgtcgacaaatatatagcaaaatcgacgtggtgtctacgcgacaaaacaaacagtagagcccacgtgtcaccatctcccccccccccggattgcggagtagtcggatggcgttcagctcaaagtctagcaagaggagactctatggttggtgtaaaaaaacagtagactatatggttctgttcttttctctagcaaaagttgttcttttctctaacaaaagttgaatgaaaattaaaatttctgtggcacgtttttcaaactgctaaacagcgtttcgtgcgaaaactttctatatgaaagttgctctaaaatatcatattaatctaattttcaagtttgtaataattaaaacttaatcaatcatacgttaataccacctcgttttgtgtaaaaaacttagtcttcatcttcggaagaaaagaacaccacctatatatgcgaaaataaaggatccaggtccaaaactcccaaagaacttgagcaaaagttcaattcctctccgaaatcttgaaaattgcaaattctatgccaattcttcgacgaactgaatgtagaagtaccgtcactaccctatgcctaagaatttaagatcctgttgcgaaacataaataagaaaacatggataatgattccgttcgggccaccgggcgggggaggaaaattcgggcgctccccccccccccccgcgcgtgcgcgcatgcctgcgctccacctagcccaccacgtgtccacacacaaacagctctattgcaaaaaaaaaacccacatattttggaaatcctctattaaggaaatttggttttttttcaaaaaaaaatgtttcatctagtgcattcacaatgtttcactatgtatagatctaatgttgcagtgaactgaaatactccatcacggtcgtccgaattacccccctgaaccacaaaaaaagtacgaattacccccggaactatcacggtcgtccgaattacccccctgaaccataaaaccgggcattcttcaccctcaactatgcaaaccggacgaattacccccctcgacccaatccgcggtggttttggtctacgtggcgtacacgtggcagtccagtcagcattttatttattaaaaaaatgtgggacccacctgtcatagtctctcatctctctctcctctctctctcactcatcctctctctcgctggtggcggaggcaagcggcagcggcggtgcagacggcaggtggtcggcaggggcgcgcgggtcaagcggcagcggcggcgcgggacgggcggtgggcaggggtgggcatgcgagcggtcgacgcaaacggcgcggatgggcgctcatggcggcgcggggacgggcagacgggcggtcggcgctcatggctcttccgccccacatggacgccgcgatgcacgcgcacgcgcacgaggtgttcgtctcccgcgcccgaggcgagctcctcctcgtcggaacatgtgttcgcggtgaaggagcttgacgcggatgacgaggagaccggggagtgcaccggggagcgggaggccgccatggccagcatctcactctaccgctgcaacctcatcagcaccgtcggcattggctcctcgcccgctcgacgcccgcccgcagcccgcagccatccccgcagccggccgcccatcggtgtcggctcctcgctagcccgccgcccgcagccatctccgccgtcgtcgtcggcagtcgcgccgctcgctctgcctccactgccggccgtccgctccgcctctgcctcagtcgcccgcctcgccgcatgcgcc

SEQ ID NO: 20037 - DNA, 3304 bp, Oryza sativa
tctcttcccactctctttcaagtgctgctgctgcgcttgcaaaagtgtcggtgtagcggattggcactgacttttgcctttgggaacgtttcatttactattcaagcccactccaaggatactacacgtccccacggacggcgccactgtcgtgaccttgacccaaggtcacggacaagattagggatagacgggaaaacccccttttcccgcctatcctaagaaatgagcccaaataccaaataaacacatactaagtgacaagacttttagtattccaagatatcctgcctgctacaggctttttgtctgctttatatagttcacagctttacatgtgagattacacttgcaccctttgttgggcccacatgaaattacaattatgcccttgctatatcagctaaccctaagggcattttggtatattatggaggtcattatagtcttttggtgccagctagatgaagtggttgagtggtcctcaggaatattctcttggcatctttgttgtctaagtcgccttcttcatgatcaagagtcttttccaccaccatgggtcttctcctcgaccgagggtcttttccaccaccatgggtcttttccatggcaaatagtcttttccagttcgaccacccttttcgacttatccggtagctgacctgttactgacttaggaaacattcaaaatggataataagacttagtgacaagaatttactcgaacggtattttctgactcgaatagtgttttaccgtttccctgttcgaatggccatttccactcggatacttagaataatgactcaatctctctctacagtgttttgggccgaatatggagggacggtggtcaccccctgctacaaaaagcccctcacgggtaagggcgatgtgtgttttcgaccgaaaccgtgttcgaatcaaaagctaggggagaaccgccgtcctcctattcggttgaaaaaacactaggatataaaattttgaagttcgaagctggttattcttgataatcattatgcgtttatttgaaccgaaaagttgtggttcgccgtagcaagtatcattcaactcgaaacatgaagcacattgcattttgaacacatgagaagttgctcttttctcaagcaactaattgtgatgatgaagagaaggaaatacattacgatgacacttgtatttttttcttttaattttttttaaatggcaaagagaacatcgagatggcagtttgcgtgacttcgtcgtcgagtttagaaaacgacgttcgaataatgcttcgagcagcattaatttttggcaaacctttagaccatctgagcgtcaacttataatatggaaaatgcgctactcaattgtctcttacacgggaatgccttctcctctcaatgtcatttttccttcttcttttccttttttaacaagcaatcagatgtaaatttgtcgtgtggtctttaataaaacagtttccgaatacttttctgatacaaaatagctaaggtaaaaatttattcgaaaaatgtcatcaagttggcttttcttctccgaagcgtgcggagggttttctcgatttggtatcgagttggattttcctctcctctccgaagcgtgcggaggattttctcgatttgctatcgagttggattttcctctccgaagcgtgcggaggattttctcgatttgctatcgagttggattttcctctccgaagcgtgcggaggattttctcgatttgctatcgagttggattttcctctccgaagcgtgcggaggattttctcgatttgctatcgagttggattttcctctccgaagcgtgcggaggattttctcgatttgctatcgagttggattttcctctccgaagcgtgcggaggattttctcgatttgctatcgactttgattttcctctccgaagtgtgtagaggatttttctcgatttgctatcgagtttgattttcctctccgaagcgcgcggaggattttctcgatttgctatcgagtttgatttttctctctccgaagcatgcggaggattttctcgatttgctattgagtttgattttcctctccgaagcgtgcggaggattttcccgattcacaatcacacaagacaactttttatacaggttcgggccttcattatggataacaaccctacgtcctgtttatatgtgttaacatcgagaagaaaagagaatcttacaaaggtggtcggtattgtacacttcaagcagcatgtttccttttattttcttttattttctttttttctttctttctcttttttttcttttttttacacatagaatttcttcaaggaaatagcattccaagtgtgctttaactcttctccatcgaggtgtgccagcttgtatgctcctgtttctaacttcctttttactatgaatggtccttcccatttcgattccaactttccaatagccacttcattgagtgttttcttgaggaccaaatcaccttcttctatttgcctgattttcactcttttttcataatagcttttggttccttttgtgctttgtgccattttgtctaatgcttccactcttatctcgtctaacatttccaaggtgatttctcttccttcttctcttgttacacattttagcaaaggggcagtgactccactcttgtacaactacccttctatcactttgtatttccttgacattaaccgtattcttcttgtttcttcttccttttctggaagttgttcacgaaccaaatacttcagaattggctctctccaatctatctcgccttgtatgttttccacttctcttttctcataacttggttgaattaacatatcaaagaatgaattctccaatggttggcctgtggcggctgcttttgcaagctcatcagcttccccattttcttctcttgttatagcttttactgttatccctcaaggaagtgtttttcattcagccttgcttcttccaagtactttgccattgtctcttattttgcttcaaatgtttttggaaaagtgacctgccaccagctttgaatgagttttgattatcaatcgtcgagcccctagtgctcttgcctttctcatggctaataaaactccttcgtattctgctgtgttgtttgttgatgggaaaactagctttgcggaatatttgagtgtttgcttcatcggtgtttttacaacgctgctacccctgcaccagtggcattgcatgctccatcagagtatactatccatggttttccatcttcttcctttttgtccaccctcattgggagtccattctgccaaaa

SEQ ID NO: 20038 - DNA, 12264 bp, Oryza sativa
aaaccaagtcctactacaacattttcttcaacaacaatacaatttcaaagtttttgaataagacgaacggtcaaacacgtttaaaaaagtcaacggcgtcaaatatttagggacggagggagtatatctgtagaccaggtcccatattgattgcatataccaacagtgcgaatgtggaagacttacttcttttacccaagccatctccaccatataatttgagcagttcacctgcaaatgttaaacccagcctattagagatcaaattcatagatgatggaagacagcctaatggcagctatttgttaatatatatctatgcactatgcaacgttccattatatggaatccagcaaacacagtcaaaacaatggacatgaattcagcatgaagatcacactacgacattgccctttttacctttccatcttccactgctcgagccatgatcattgaatccccatatgaataagaggttggaataacattaagtgcatgtgccatagcatagctagtctgcaaaattcaatagttgtaataaagtactttgtccattacattggtatggaacgcaaaaatatgccaaatatgtaattattttgagtcaagaaggattacgttctctgcaaaatgaagggcattctcttgcttgatctcaggtgggtaaacaacagggaggtactctacctgtaaaaagtatggttcatgtaaggaccttattgtgtaagtagttattaccaaagacatgaagattttacattctaggctgaatggaatgagagtgtgcacctccatgaaattgtgaaactgggtaaacatcttgaacatgagctttcctaatgatatatttcccctgaagcagaaaatgaacataaataaagcattgaggcaacaaataaggatttatttctgtacagataacttaccatgattgatcaaagtgcacatgtggatagcgcacaataacaggttgaacagggtagccaggtatgaatgcaccatgttggaaagaaatcagaaatcttccatttgttgtcgtgccttccgggaataacaagacacgtgggaagctattgcaagccgcctttctctgaaatcacatcctagagagtatgtaccatatgaacaagataacaaaacagaaaatcatgctttgcactattctaggatgagttgcatggcattgcttcctgaaatcaactgtggtgtatttgcatattgtagatgaaagaggaagctacagaaatggtggctgcaagcacaagtttgtctttgttcttttctgcctattattctttctaccccagaagtccactgtgtgcagtaatgataatttgacagcctaacagctataggcaacagaaagcaacaggataacttgcatatcaccaattaaaagatgcctgacaccatgagaccatcactttattaaggaaaaagcacatgtaatttgatgcagttaattaaaagtatgcagagcaacagtggggtcaagaggaatcattctaacctttatttcatttacagcagacttccttgaagctggcgagaatctgtcaacatatataacctatgcatttgttgtaaatttgaaacttgaaagtaacttgcaaaatagtgtcaaagaaagtaactgggaaaaagggcttttaaaacataatggatatacctgcattgctcggataattgttccaacaaatggtatggaatcatgagaatctgaagaaacgattgtcgggaacagctcatagaagaagtatatgggttctatgtatgatacatgatttgagacaactataggtgcaagctctctaggcgcgggttttcctttcctccttatccaatggtatctgacagtagaaaacaagtggttagcaaagatcagacagtaaacagttgtattgcaagaagaaaaaatgacaaacagtaggcactcagtcaggatatcccagcatagacaaggagcaaaagtgagttgtttcaaaatttcccattaaaatccatatgtgagattaaaaaccaaaactccagatcatggcccaaaggaaaactttagtataaaacaaaatccacatccaagtggtcttcgtcccctgaagtttgaacaaaacgttcatttctgcaactgcttacagaacacgaccaccaacactgggcagttcccttctcaagttctcattttactgcatagaagaactattggcagagatgataagctatgtgtgtgctttctcagcattgaccactcaacattcgctcgcagttttcaccattcttttcacaacaattgaaacttcaaacgtctcaaaatttgtgtgcagagtgtccaattgagcaattcccaggtgaacagcaatccaatttgaactaagtagcagccacattttcgatccaaccacacaacagcccacctgattagtgcctcaacttaattaattatcagcgccaaaggccaacaattttcagaatactttcaggaaggctttcttactctttctcactatcttcccaaaccacctagtagacaaggcatcatcattcatcgctagtccatctcgtttcgatccacaattgtagtgaagctaaccaaaggcgccgtgcagagatcagtctctaacctcttctgaaccaccgtggtaccctcccctcgttgtcggtctcttcccagccgcaattagtgcagagaaaacgaaacaaacaacatatctcacacacggacccttcacttcaccttccatacgctacgttgcgcccacctaacaaatgattgcagcaaagccacgcccacacacacgtgccccaaaaatcaccaaaccccaaaattccgcgaaaccaatcgcgccaccgaatcaatccatccacagatttcgagtgcttcgtctcaccacccgaatctaatcacctcaatttcattctataaacttaacagcggctaatccatcatccgatgcagatcggattaaagtttttttgttctaatttctgatctgtcatcgatccagactcgattctgagtgcgcgtttggtgagagggatgctaatccgagcgacgaacagcggaaactagaactcacccgaaggagaagaggatgcagcgcgcggagatccgcgtgatccacatgaggcggcggcgccacgccggcatgggcccggcgccctcctgcgccgcccgctcccgcacgtcgacccacccgcggagcgccacccacgtggcggcgtaccccaccgcgatggagagcccgaacagcaccagcctcgccgccgccaccggcgcgcacacgagcgccctcacgagctcgtacgccccgcaccaccccggcgtcccgttgcggaacgggtcggccggggacaccccccgcggcgaccaccacgccggccgatcctccgataggaacgcgaacgggtccccccctcctccgccatcgccgccgcacaccgttggcgactcctcgtcgtcgtcgtcgtggttatggtgccccgcgtggccgttggtggtgggcgtgggcgagatggagtcggagaggagcggcgtggagagggaggcggggctagggtttcgagaagccatgggtggcggaggcgaggcgagaggaggcggaggcgggaggccagcaatggaggagagggagtaatggcttttatgaaagcgaaagcttatagcaagaggaggaaggagacgttccttttttgtggtcgtaaatctatttaatttatttctttaatcgtcttcaaataaatcctttatttatttttgcgttctatccctcgcatttctgggtttttttcttctcgcgttgcctatagtcaagggagtggtcggtggctgctagtactattttttaaaagaaaattattggtctcttttcttaactgatttataaaagttttttcttctcttcacatgtgtttataaataaataattgaggtccttattaagttgaattgagaggtttaaagaatgcttatatgtgaaggttgaattagctttgattgtgtggacgtggatgctctagtcttccctcttgtatgctaaaggattaatttagatgaaattagtctttcaacacgtaatcctaatagcctttgaaagctgacattatatgatagagcctgttgttttaccaattactgcaacgttgccgtttgtagatttttgtgcagtttataacatggagtaaatcaggaagttttcgatgtgacatgctagattaactctaaatgtgggaataatcaaatgtgacaaagggtggaatagtaagaatgctaacgtgcctggtaaaaaagagaataatacatatgctatacgtgcttctacggttcaaaaaatttcaaaattaaccactttatttttgtcactgagttccatattctagaggacaatatatttaatcttacgattgtatttcagattgcattttccgtattccaaattttacaagatatatacgtacacttaaaagaagacttataaagcacaagcaacagcatgcaaaaagaatatatgtgtaagtgtttattgtcattctaatgcgatgctctgatgggtttctctttattattccaaaagatcagtggagtcggctatgttcttttcagctgtactccaccagattttatcttctgcattgcttagcttagatctaaactatttgccaagtttacttcgcctacataatccactatgataatcaggtcaataatctttttcaaacttgtagtacttggaaggaaaatagagcaaggggtgttggtgctatttaccaccgggccgggcaccaaacagcaaaatcacaagacaacaagcagtccagtagtcggacactcggattgcggtacgtgggggctcctccaccgcacccgcgacctggcacccactcgctgacatgcggccccacaactcctgagcccacctggcgccactccgcaaaaacgcgtgtttcgtggaatttttttcatttttaattttttttaatatttacaaaaaatattataccgacaaaaatattttgaaaaaaaagaccctgttgtccaagtagagggcagcaaggtgacatggcacacggcgccgatgtcaaaatgcaattttcgccgcatgcaaaattcccatgcccgctcagcgacctctagcgcttgctcacacacgtcaccctgccgctctcgaggagcgcggatctatttctatgaatattttcacccgtataatatttttgtaaatattaaaaaaaataaaaatgaaaaaaaattatgtttcgtgcggtggcgtgacagacgacgtgggcctccggccttcgggtgggacgctcgctacgctacgagtgcaaggcccgccgcgacgagagacgacgacgacggcgacccgcgcgccgaagcgatgcaagtgcggccgtgtccaatcgtcgtctgccaccagcccaccactagcttcccttgtgcaccagcctgtctgattctgatctggtcgaccactatctatctcttctagctcctcgtcctgcactacagtccactgcactgcattgcgctggactcatggtctcatgctatgctgacgaggctcgggtaattggacgccttccttcttgattatttattttttttaattttaaaaataaatacttttgaaacttattttcaaaacattttgatcatgctaacccacctagcgtggcaaaataatactaacgccgcacatcgcggggcattacagttttgtattgctatgatggttagagtgacgtggccgaataacgttgtcatgccaaccagatcgacgtgatagttttgtcttgccacgtcatccaaggtggtatggccaaataacactgacaccagccagaccggtgtgaccaaataatgttgtcatgccagctagattggcgtggtagtgttattttaccataccaattctactggcgtgatcaatgctcatatcttagaaataacatttcaaatggtttatttttaaaatttaaaaataaaaaatctaccatctcttctaattaaaatacagattttatcttaacttctattagcatatcttttaaaccaccaaatgttatgtttcctgtacaagttgttttaaaatatcaaacaaatataatttttaaatttataataattaaaactcaactaatccatgtgctaacaaatttcttgttttgcgtgcgctcacttcatttccattttaatgtatcacaagcatcgccttaatcctccgatcacaacctaatacaacactcctatctcttatggagattttggaattgtcattagcggttttcttatataaaattcgcccatggttttcacgtgaattggtaatttgatataaaaccctccctgtcaactcacgcctaaatctcctgttcaccaatatttaaattgctaattaaatttttaagcaacggtcaaaatgttctctccctcccacttgttcggttctctagcttgcgtggtcgtatacatagaatgttgattatatggcacgcccttctaatattttgaaaacgattgtatatgacgcttttttgactatcaaatgggcagatcttgcgttatttcacactcaaactgaatctgataattattcttgttttaattacgagaggcgttgattctgcatgtgcctaaagctagctaccctcacatgaacgccgggggatattctactgtatttgtgtaagatcaggatctggctttgctgtgcacacgacggtatccttgctggatccactggagtactagtttgagtgatgtttaatcttttttaagtcgtactgtgtaattaagtaacaaaattctcgccgtttcggacaggtagtccactgaaattgcacgttccccttggctctctttggacgtggtcacgttggtttgagctgttgttcttgaggtctcaattggcaggatctcgatggcgtaatctcttcaaaatttttgcccggttatctggttttgagagccgtggttggctgaccggacagattctccattcttcttcagcgtatagaagaattgctagtgttcttggcgtgaacaggtcgcggaaaaggaagaggaattgaacccgatgaaggcaccgccaccgtaataatccgatgaataatcggtcgtattagtatcgtacagcgacttttttttattaataacccataacctttatttccatttcagaaacagtgtacatgtttttatcgtacagcgacttggctaacgcttggcttagcagttagcacctgttcatgacgtgttttgtttagccgaccaaaacgccgtgggcgggcggcgcgaccaccagatttcgcgcgagacggcgagcaaaacaaccgcccacgtcccactcgccgacacgatgatcgctgtcacgcgcaccgcgtcaggactcaggagccacgacacaagcaacgttgtcaacttctcgtagattcaatcaaccatgaaaggaggcatcagttcatcagcaagaaataacgttgggaaaaggttaaattgagaagagatggtaattctctttatattccaacacttctctttacgcgaggcctcttcaagcctttagtgtgatatagaagtggattagcctttagcgtgaaatagaaatggactataatttttatttagttgcacaccagccataattcgaactcgaaaccttttactttaccttttactttgatatcatattaaattgcatgcaccgaacagtttaatccaaaaatttaagctgacgaggaaagatggaccattcattttttattccaacaataacacacagtaatcaatctgtgaaacaatttggcaccatatttttgacagcagcaggagaggatcacaacacgaaaatgacaccgaatcgttggtcgacacgaacgaagttacagaattttgcaaggtaaaaattgccagccgagatgcatgtctgatgcttcctagtgcgcgctctggcgcgcgccctcctcggcgccggcgacatcctcctcgtcgttgtcgttgtcgtccacccacttccagtaatggcgcttcacggtgatggcggcggcggctccatcgacgacgacctcgtcctcgtgctccccgccctcctccgtgtcgaactcgccgtcctcggggacgccctcgaccacctccgcgtccaccgcgtggagaacgtacctggcgtggagccccgggtaggacgccgagtcccgctcctccacgcgggcctcctcgccgcccaggatccggacgcggacgcgctcgccgagctcctcccggacggcgcggacggccgcggcctcgggggtctcgccggggcgcatcttctccgacagcgggcggagcccgccgcgggagcggagcgtgccgtcggagaggagctgcccggtctccatcagcagcgcgccgcgcccgttgcggatccggacgctggcgacgtggacggcgcggacgacgggatgctgctgctgctgctgcgatggcggcgccgcggcggcggcggcggagatgaggacgcactccccctgtgagagctcgaggaagaggttgaggagggtcttggttcccggcgccgtgccccaggacgccagcgccgacgccggcaggcgcgagccgaggaacgccgccagcgagtccagcgtcgggaaggccagcggccgcggcggcgacggcggccgcatcgcgattggtcagcgcctccgcctctctcagtggtggtggtggtggtggtgggtggaatcgcgattcgctacgaacgcaaatggggaagagaagggatcgcgttgcgtcacgtggagaaatttccaccagccacccaaggccgcgtcctacggcccaagtgcgagtatgggccataggaaagtacaccgaaggtccctcaacttgtcatcgagttacaaaatcgtcctccaagcgcaaaaataggtatctaacgtcccttaactaaccaaaaccggacacaataagtactttaggacaagtactataatatctcatatgttgcccctaagaatgccacattggattgggtgatgaggtggaggagagaagtggagagagagaagatgagccacccctaaatcaagaggcaacctccacacaaatttcaagaagtgtgtgagagtattagagatattggtatttgtgtgttagaggtgatacattgtatgtgttgcctcttaattcatgagtgaataaaatagataaatttgaagatggtagtcacatctaccatagcacttggcctaagtggttttgaccccggttttatgctacgtggcggctgaattagcatggacccacgtaggccccacatgtcaggctgccacgttagcctcctctctctctcccttctctcccttcctcatccctctctctcccttctgagtcagctggcgggaggaggagggcgtcggtggccggcggccggtgacgggcgtcgcggcgacggtgatggcggcgacggccgacgcgacggcggtgggtggagcggcgggcgggcggcaggaaggggcggcgcgcgggcgggcggttgggaggagcggcgcgcgggctccccccccggccgccgcccacgaggcccacgaggcagcggaacggcggcgacgactcggcatcgtcctcgttggaggtgagcgcggcggccccaccctcgtcgaccgcgagtcgcgcgcagccgccggggcgctgaagaggtaccccgccgcggcgtcgtagtcgggattaggagatgccgctgagaagcatcgtgccgatggcgagcggcttacggccgaagcagtcgaggagcaacgcaaggagcacgtaggcgggcatctcggcgagcgagttcaccgaccgccttgcagacgaacggcggcgggcgtcggcggcgatggtggcgacgggcgacgcggcggcagtggggggaggagctgtcggcgggaggcggcaggtggtgctccggaggacgacccgggcatgccgatggcgacgcggcacctgagctgaatggcgagggcgagagtgaacctcatgccccacgtcgacgtcgacgagccggcgaccgtgagggcgctgctcgagcaggaagaggaggcaccggcgtggccttcctccgcctcccctcggcctcctccgcctcctcttggccacgagccaccgcctcgccgctccacgctgtcctcctcctccgtgccgccgccgttcgcgtcaccggccgccgcgcaacgtcttcctccgggtcggcctcctgctccagctcgacggccagcgacctcgcgaccgcacgcctacggcctctacaaccactgcggagggcgcgagcggcggggggaggagctacgcgtggacggcggccggcgggggagcccgtgtgccgcttcccccaccgccgccgcgtcgccgccatcaccgccgacgcccgccgcctaggcgctgccggccacagagaagggagagagagatgaggaagagagagaagagaggaaaagagagatgagggtgttgacgtggccagctgacatgtgggacccacgctgactcagccgttacgtcggataaaaccgggttcaaaactaccgaaggatgtcgggtgaccggttttatataattaagagaactcgcgtatctggttttgcggttcgaggatgttttttaccctgattacaagttgagggaccttcggtgtacttttcgctagaataattaggctcatgcgttgtgtccttattgggatgggccaatttggatcgtatttacaatgggcctatgctttctattttggtgggccaaatgagaaaaaagatttggaacgagagacgttcctccaaacatttttaaaaagaaattataagtgtgtttggattgaatacgggatcttagagttgaaaccgcacacctcttaccattaccactttcatttgtgctgaccaaatttcatccgatggttgctggtaactcaaagggattcggtgacatgtacagtactacagtgtacacagccagcaggcatattactgaacaaagtcggacagatgattaagcatgttttatttggacagtacagaattaaacaactctgattcaaccgaggaactgatcgaccggcgaagaacagcaatctacagaagaaagaattttgccaatacaatcctatgtacttcctcatcatatagtagtgaccaactagcaaacttgaaactgctcttctggatcttaattactactgcgccatgatcgtccaccagatgaagctgaagcctaccaaggacgatgcactgatcaagctcaggcgatgcgttgcgcctccgctcgccgttggcttggccgctgcaagattcagcaaacaaaagagaggctcagttacaaattacagctacatgtctgtgaatcactggaaatttctaagcaagcttgaaatgatctcatacagagaggttttaatttggctgccagttcatactgtggaaaactgaaacataatctgaattgtgatgttctgagttgacagcgaaaattgttgttctaattaagcacaggtacctgtagatgcagcgtttccagtggaagctgaagaagcagcagtgctacctgcagtgccggcacctgcaggaattgaagagagttcagatcagcatccctctgtaaatgatcatatcagttttttgtgatctgattaaaatgccagagatcatgaattggaggccatgattaaattgtgatccatgattaatttgcgatctctcaattatcaggtgcctcggattcttgtgagaccggagagacaactgcatgctttagctggcactagctagctagagttggtgcatcaaacgacaaactctccagcgaggagaggagcactgttagtgttaaactaagcaataattcagaccattattactctagctaggagaaacaaacaaacaaacaaacaaacaaaagcagtagcagtcaaaccgcatcaaccactgtacgtatgtccactgcaattagtagcagcaatctagccgcatggatcacgccgtgatcgtcgacgagaggaattaattaacgagatcaaaacattgaggaaattgatggaattatgtgtgttaccggcggcggcggcggcggcggtggcggaggaggaggcggacttggcgcaggcggaggcgtcggtggtgacgccgcagcgtttggcgaggaggaggccctgctctggcgcgacgccgaacgcctggagcgcggccttgttggtgaggatggcgcacaagcacgccgtctcgttggcggcggcctccctgagcgggccgcagcacgacgccggc

SEQ ID NO: 20039 - DNA, 2309 bp, Oryza sativa
aattttctgtttaggtcccattcttgtcacaaatgtaaccccttgccatgctctagttatgctcggccatgttttgtaataattctggttaggtcccatgttttgtaatttttttaaataaaatcataaatataaagttttaatagaaaatgtaccgtttaatagattgaaaaatgcatattcatgcatcatttctcactcttccagctaggatattgataacgtggatagctattcaacctgctgaatgttattgtacatgctcttaagagagaataaaagcctatcggtaaaaaagaagtaatgggggtaaagtagtttatcaaatttttttcacactgagctgatgcatgttgtggtccctttaacaaggtagattatctttatgcccaattgtctatctatagccaacatcagcatggagcaataaccgctctaggtcaaataatagccttgcaaattttaatactcactaaataactagacttttctagaaaaatctccaccatgtcatagtacaatgtctttatccatgcaaggtccaaactggaaaggaattttgtaaaaaatattaagtatttccaacagttttttccctctccttataaaagttggtgctggtcagtacaaaacaatcattcaagtgaccaagcaaacacacaaagcgccactgtgtagctcactgctcactcatcaaccaacttcctcaataatgtctcgctccagcctcgccatggcgctcctcctcgccgccttcgccgccgcggcgacggcgaacagcggcgcagcgccggcggctagcgacttcatccgcaagtcgtgccgcgcgacgcagtacccggcggtgtgcgtgcagagcctggcgtcgtacggcggggccggggcgccgccgccgcggagcccgcgcgagctggcgcgcgccgcgctgtcggtgagcgtggacaaggcgcggtcggcgtcgacgtacgtggggcacatatgcggccctggcggcggccgcggcggcgccggcggcgcgggccccgtgcgcgactgcctggagaacatggcggacagcgtggggcacctccgcgacgcggcgcaggagctcggcggcaacatggggcgcgccggctcgccggggttcaagtggcacctgagcaacgtccagacctggtgcagcgccgccctcaccgacgagaacacctgcctcgacggcctctcccgcggcgtcgacgccgccacccgctccgccatccgcggtaagatcgtcgaggtcgcccaggtcaccagcaacgccctcgccctcgtcaaccgcgtcgcccccgccaattaaacatctactcctcctataactaattaagcttttgttcttggaatcttggtcgagttcatcttcgtcatgggttaattagctcagttaatctcgatgcgtcgtcgttgctatggttgtaacatatactgtactgctagttaattatcaagacttaattaaaagagtcgatgtaatattgtaatggttgagtctttacaccgaagatggtgaggaaattaatccgtgttttgcttgctaggtacaattatcgattactgtttgattgattgttttgctgaatattattgtcacatgaggaggaacagaaacagatgagagaaaatcatcatcagcatcaccaaacagggaaatgaatggatcttgaatcgatggggacttagaacaggttaaggaaggcgacgtttctttcttcttgcgtggattcatcggagtttcttgttcctggttggatgaactgtaccaagattggatggagatggacaccaaccttgctgtcctggtatgctcgatcagtaaatgaacggagtgcatttgtctgctctgctccttacctatacgtgatgaattgatgatgatcatgtggtgtggacgttagggtttaattgcagagcagagccaaattgaatgtttgtcggattgaaccaaaaatctcgtgcaaagttcgcaaaaaccagttcgctgctgttcttctttggttgtttggctacaagaaaactgctggtcccatagacagaaatgcgagaaatttgcatgatttttttttgcctccagaaccaacagcaagatatgtatacagatcagaaaccattgtggcattgtacatctgtactgtagtgtactgatacgtggcatgggcgttggccgttggcctgccaattggcgacgcaattatgccagtcggattggtcggtgatgtccttatctaaattttagattaaatctctgaataatccctcgcagaagaacagtagtatgcccaaataaatgggacctt

SEQ ID NO: 20040 - DNA, 13911 bp, Oryza sativa
aatggtggtgatcatgtgctgtttagtagtagtgttttatgccctaattgcctctaatgctgctcccaagaataaccacgccatcattttgccactccttgcttgggagtgacctatgcatggttgaattgatggattctcatgtactactgtatagtaacagagatttcttcatttgtttatgtgatggcaatcatctaaagcttcaggtagtacaggaacatgtttatgccctgtgtaagacatgtagcagcacaagccaagaatgcgtacagaggatacagccggagtggagtctcctccagtgctggcatcaaatcatttcagaatgcaatgtactccgatcctacaacacaagcaggggtaatatcactgataagctcataatctttttaatttgcagcacagcataattaggttatgcactatatatatggttcaggaattggaaaggtggtagttgtacctcacagtgaagattttgtggttcagagaatttgaagcacccgcgttcccacacacattgcttgatgaacagcgtgtcacaaaccgcgattcattgatgcatgtgcaatgttccgcgagaccacatcaatcaggctatcaatgtttcgactccacaaaacacagagtcaatcaacagctgcgccagcatgaatgcgtgatgtaactccaagggaacaagttcatgcacacgtgcgcacggcgaaaacatctgtagctgcggcccccagaatgagcggaccatgtcttcactttccatagtttgaactttgaagcatacagttggtcacagtccctgaattatttgcagtgcatatatcggcagccgttttcatctgccaagaagagcaaccatccagtgagataattgtacatagtgggagatgcacagtcaggctgtcagcagaaggatttggcgagtaaaacagaacatgggagtgtctccatcaatctgaacataaaggaacctggtcgacacctaaaatatatagcatgccatgccacttactgattggatcatgtttaacaacactaggaattacagttctagattctaattagtggtgctcgaatccggtttctggaacctgttgaaactcacctctctcttccctgtcggcaagcagtcactacatctttttttttcttggaagaaacgtctttttttaaagtttaaaacaaagacggaagctctgccttatttcataacaacacgaacccaagaaggggggcacaccaatcacctgcgcaccctgaccaaaaatatgctgtgagctggttctgactaggttggttgaaaggacgacatctttaacatcccaagttcaaaatgtgtagcatagccacagaacatatccagaataaaaacttggaattgatattggaaagagtactgtgagcaggaaaaaatcaaaagaaagtgaccaaataaaaggaagttgagggaattagctagttcggaatatttgtgcaacgatgaaagtgccagagcagtacaagactctgaagtttgtggtacacagagcacagatatgttgtcaggattgtctaggttgttttggcatctatagtgcaatatgcacaataaaaatatagaacatttctagtagaattctagtgaaaacacaagatgtgacaatattataatgatactagtttcatgaagaacaataactatcaacacaagatatctggttttagtgtaaagactgatcttgacagtgtccttaacatagatttcttttattttagaaggtcaatagaagtaccaaatctcaacatatgcacagtagccaaacagttttcaatgaaggaagaagacatgctatgacaccatgatatcatgctcacgttcaactggaaaaaatacatgatcaggttgcattcgttttgcttcatggaacaaatataggagtctatatttccgataaaaaaaatataggaacctacatgtaatatgtttgcatcctgtctaaatggtgcatcgaacaaattggcatcattagctcctagtacaaagtgtatttgtagcgctttctggcgaaggaactagacgcacatacttccaaataaaaagctagagaactagacaaattcctgaaggagggatgatcaatgatgataaaaccaagtgacggggatttcattcttttggaaatttctggtttggttacccattcctaatatgctgaaccagtatgctgtttgaagcaagagaaatcacattttgggattcataaatcataaggaaacccagcttatccctagtgaacttcacttcacgttacgtatccaactattccattgtggccagctgtaaagtcatctcaagacttgcatcttgactatttagatacatgtacatcttttatgtttctgtctatcttgaaaaaaatttattggacctttttttatgggaattactgtcaggcatttgcccaacagtatagctttataaaagaataatatttacatcatacaaaaggacatgaaaaccgtaaaggaaaaaattacaaagattgtaaccaatcaaaaactaattgtttaaagggatccttcattctacacatatgcagaagaagcaaactcttgattggaccttgttcagtaaaactcttgattgctgaacagaaccaaaccatgagacaactttatgatgatcgaaccaggaaaataagcaacataaagagaatagtttatgcagtacacttatgtgacaagtagacaagtaaaaattaatcaatttctaagaccaacgattaagaaaatcaatgattaacggactaactagtatgttaataagttttgatcaactagagaggtcatcatactccataactcatttgtctggtagaaatcctgaacacctaattatttgcttgccctgttagagatatcatgattcttaaagcacgttttactttacaagtgatagtacttatgattaagagctggtttctattggtttgtaggccgtggccctgcttgaaaccagacacggaatatcacaatacataatctgttgatgcatgtctccgacggttacaatgtcaaaatctccatgtggtttagtaatcaaatcatacggacatgtgccctcatggtggtaacacgcaaatcgttcagcaatcaaatcatatggataaatgcaactcgtggtggcaatactaaatccatcaatccatcgtgtgtctccatgtgttactactgaaaagtgacaactacatcgtcttgagaaagctagtaaaatgaattagatttagtaaatagtaccatgcctaattgagaagttcagagatcaagcaaaagcataagcagttcagaattgcaacagacctgaaacgatccttgtgtgcgcctgattgaaacatcagcaaggtataatttccggcaagcaaactcttcaaaaatggatcaaatccctcgctcactctctccacagacatcagtaccggatcaaagccaacaaactgtcacaatggctgtaagggcactgcatgatcgatcgattcaaggcatattgcacgttaatccgagacaatgcaaaaacctattcagattggtatatcaacaaattgcatgttcctacttcagaagttcagacaggtattcaggctggcccgggggcggagtacgaggggagaaggtacctcagctgctgccgcgacgagcagggcgccgtcggatcctctatgaagaaccgctcgaaccatccggtgaggcggaggtggagggcgcgtgccgtcgaggagcgccgctgcggcggcggcggcggcgcctcgccgatgagggagcggagcccatgggcttttggactttggagacgacgaggctggcaaattgcaatgaggtccctccagttacctgtatttgcattttttgcgtggggaagcagcatctggtaatagatcctggccgttgatctacgaatgaaagggcaaggacaaaccacaaatcattagagagcgagagagagggggggggtacagatgtacggagtacaatagtggagtatcacttaaaatttacaattagctcttgtacacgtgttacaattagctgataatccatctattttaaaaacacaggcctaagaacaacattagctacacaaacttttcagaatttcatttatcaggtgagaacaatcacaaaaacatacaggcctaagaacagcattagccacacaaacttttgagacatttcatttatcaggtgagaacaatcacagggttcatcattcttttctgaagaaaagaaaagatggttacagataccacagagggctaatggaaaggggggctagaaaacgaatgtgggaggcaactacatacataagatacctatagcaagtagcaacacgaacaaagaacatctgaacatgcaatggaattactgttgttcctactatatcgaagtctaacaagggggcttggttccaagtcccactagctattcatcactgaaagaatgaaatcactccaggaaaaaaaaaagcctattgactgatcttgcacccacgaacataggtgtgctcgtagttgatgtactttgtccagtatggtcggtacttcgacattgcaatctccagccatggcttcatgttcccgttgtagtggatgacggcggcgttatctatttctgagcgctcgatggatgggttgtaccctaagccaagaacatgccatgatttgtccaggggatgtgttaacttgtagaatgttaggagacctggcggcagtgtcccaagcttccagagcagcctgttttcattctgtaaaaagaacaaagtgtgaagcacagtagtggaatttgtttagtactgtatgctactgtttgtgatatagaatgtgcatctcacaaagtgcatattatgcttttactagttttagaagctaagagggtgcatgaactgttgttagtgcagaactgcatatactacatttgctagtgaaaataataggaattgcagaaactgaaatattgcatgttatagcgaaagaaatttgccattgaaatttctacagaaaaatggaaacagtaatataaaccttatttcaacttaccatgttctgccatttgtgataaatgccagtaatgtccttcttcttccattcttccaaatcaaacatattcattccatacgcccagccacaagcattaggatcgaagttctgagcaatatttggatttgaaaaattgaggtacttgtcaaaacggtgaaaactctccccacatgtttccacagcaccatttacattcccatttagatcaacctcccagagtcctgtcaaatccttctgaacaactatgtcatcatccaggaaaaggatcttattcaacttaggatacacttgaggaaggtagaatcttaaatggttgagcatggaaagatatttggggttcctatatttcagattagaagaaccagcagagagagtttttggacggtctgccttaaaatagtactctttcatggccacagattcaagctgcttcagaacagggcaatatgaagagttcagccatttgaagtcatccacgttttcaacatggattgtcgcatctccaggtggattcaacaaaaaccacatgttcattgctccaaagttcagcttgtcagtaacaagatggaatacatgtttctcaggctcctgcatggtagaaaaatgagcagtttttaccgaatacatgtttctcagtcattgccaagaaattgcaattccaaattgaactctagattgcacttacctttgcattcatgatggttgagttcaccacaactgaagctgccaaaacattgtccgaaaaaagggcatagtgataaagatcaggattttctaagttctcactcttcggaaactttcttttctctggggagagaaggtaatagtctatcgttagccgcatggacaggcaatggatgccatttgggattgtcttcgccgctaactggcttaggaaggtgctctgcttctttaagctcctgacctgctcatcagctgactgaagcatcgctcttaaccgctgagtaattgccttgcaatcatataattgatctcttgcttttgctagtaactggcccattactttgactctctcagaagcacttcaaataagtaagaaaaattagtagtgcaaaaaaaggaaaaaaaaagacctaaagaagagtttaaacagaaattacctcttgggaagttcagcatcagcagtagcttccccaagggagcgctggctttccttaagcctggaaagtagatcctgatgaagatcgagcttgtccctggatttggcaagcacagaatatattctggccatgatcatttgatcacgcatcagacgaacctttgaatctgctttttcattttcattctcacgcctccatatgctatattttccaaggacagccgaatcaacggcttttgaacgttcaattccagcattctcaagcttaactagtgcttcatcatcctgctgtactggttcaatcttcttctttattctggttctctcccgcaatttctgtagtaaggaaatataaaaaaatgcttaagaaacataaggtctcatttggaaacaagtagtaatgctaaaagaaatggcataaaaaggatggacacttctgttcggaattgtaatacaagaaaagctagaatatccctagttaatttgcaagggctttaagtagaagaaagttaccctgtgagttacttcttctggtcttaccagcagctgaagtccatctgcattgagaaataaagcacccacattgaatggattgatcttagtagatgcaatcatatagaattatagatctgtcattgttcactaattatcaccttcttcagttaaggagaaattctgtagtttaatgttggcttgactactccagtccagtacctagtatcacaaaattgtggcagtaagaaaacatgcttcaataacaccaattaaagatgtagaaatgaaggataagtcttcaaacctgtttactagaataaagtgggtccacttgggctgcacaaagcaggaacacttattagaatgacttgatgggatatgctctaaaaccatcacgagtgtccagaaggtgattggatggcttaggtataatgaggaaacatttcatgagaaaattgttcctaacaagctaacacaagcgtataaattgtgaacagaaggggtaaagtttatttatcaatcacttccaagtccaaccccaaagtaagttaaactttaaacagagaacttaatagaatgatgaagggacattatcttcttaacaggtgagagcaatattcaaaaactgagagaattgattgcttccaaaactaaatggcaagcaatgccgtacagaaaaaatgtaatgataaggtaatgtggtcaggtcatacacgaatcctatatgtttgagtaaactgattaactttaactctgaacacaagaaaacgcgagcatatatataaaccctgaactttgtcagcatatgtcactgggatgcaacatgaagactataaattgcgtggagtataacaaacacttatgtctaggataaaattatatgcctgaaattccagcaaaatgttcctaggcattacgaagatgacaccagtagttattttccctataaatatcatgttctcgttggaaacagtgatggcctgacgggtatggaccctaaaacttgtcagagcatgctgttctagaaaaaggtctagtagacccatataatcaattggtaaggccaaatattcagtaggtgctttcactaaattatctaggcaatgccggatggctgggtaaaatgcaatccacctggtgaaacaacaatgtaggcaccatttggatacccaatttataaaggcttacttatgacacagccatgttgatggacacaaatggctcttcctagccattgtgcaaatgtcatcaaccgtcacttccagagcacagtaacgtatatctaaaatgttgcgtgtgaagtgtaaactactacagctagttcaatatgtactgtatcactttatacacaagataccgagtaaaaatacaattaataccaagtgtttcccatgcatgacagagagaatggtaatcacattatgtctatcaacagatattgcatgacaaaaattttccgctctccagtctccacttaaatttcaagatattctcaatatacggtcgcatttggcagctgttaaaaattagagtagctgagctgcggacagatcaacacatgcacataaaacgcgaattcaccctagcctgacaatcgaaagccaaaaatttccacattccacaaggagcaagataaaagtgcagcagcatcactgtaggtgttaatctgagcatctcatctagagaaacaaacgctggaaagaaagaaaaaaacgaaactcctcacctccggtgacggcgacagggaaggcggcgagggcgcagagcgcgacgaaagccatcgcgcgagcccccgccattcccggcccaatctagctcaaaatccacgagaccagccacgcactggccccaaaacgaaaacaaaatcgtaagtaaaaaaacacgcacgagattaaaacgagattgcccacacaatcggcggaaatcaagcacggccagggctgaaatcgacggaccggcgaggggagggcgcggcggcggaggtagatcggcggcggcggcggtggcggagggaggaggggtcgcgctccgcgatccgctccgggatgtcggtgaatcgcctcctcctcctccggcttttggagtggggactgcgagtgtgcctgccagccaggggtgaactgcattctgtttctgtgtgcgggtttcgttccatgggccattgggcctaaccatgctccaggcctgcttaaaagcccatttactcggtatgtgaccgacaattaggcccatttcaattgcaggggaaaggaataagttctcactttaggtcgctcactcaatttgtcgtcgactttcaaattcaaccttaaaccgcaatacctaaatgacgcgttactcaacttccaaaaccaaaataagatctcaagatggtttagatggttgtttcagctgatgtggcatctatgtaacatttgacgtgacatttaaactaaaaaaaactatgggacccatgtatcagtgacggtctggttaattttttttaaaaaaaaatacaatggacccatgtctccctgtccaatctcctcctcctccccaacatgccaccatatatgcaaagccgcagtcagcgtcgtcgtcgtcgtctgccagttctatcgcaacgaacctcgtctgtcggttctacctaaaacgaacctcattgtggcctctcaccggcaagtgccacactcgcacgaacagccaacctgcccatgttgatgctcgacagtggctgagcgagcatcgcctttgacatcacgaaatatagctcccccacccgaagcgactttgccgtgggccagcgccaacaggtggttttcaaagtagagcgcatcagagttgcgcatgaagaaggacgccgtgtcagcgccatcgttgtcactgagcacagctacacgggaggaaaccggggtacacattaagggcttgtgttaattactaacttaatttaacttatcagcgccacacaaaaaagatagatcattagcacatacataatttagtactgattattatatttttttaaaaataagtttatttaattatttaaagaaacttttataaaaaagtttttaaaatatactatatttaatagtttaaaaacatgctaacgaacaattagaaaattatagttttaaaaaaacgaagccttaagcttagctgaggtgtcgacttgaactttctgttacgagtgcgtgtgattaaatctttagcaacttgtttggagctaatctattaatcattccaagctgcctgctgcgattgtcggttcggtcatgtggttaggtgtgtgagtgtggcttaacttaattaccgttggagtggttgcttcatttctcccatcaaacaaaaaatggctggtttagtaatttgactgctcgtgttgccggtcaattcgacgataatttggttattttaatcacacacaaaaaggaaatttgattattttacttgctgctagaacgacgcatcgagatcgcgtggtggaaaagaaattgaaaaaggggtggtcacgtgctaagtgctgtactctttggctcgacggccggatcgtgtggtggccggccatcggacggctgagatgagagatccactggtacttttgcactatgctacctatgatctctcctatttacaactagagggcagaagcgtcggttaatacaaggagggaaaggaggtaattaattaacgcgctaatccaacgaaccactccaagtaaacgcgtgccgtgttacttccatgcgaagtattgagaatctatccgaaaacgaatgtgtgcgtgtgcgttgttcgacggttacgaagaaattgaacgcgacaacgagtgcatgtcatattcagctgttatatcatgtcatattatctatttttaagagggtatcatgtgttgtgtccatgtcctatgtggctatgtgtatatacatatgtacttatttaccaattcgagctatatgtctctatctacatttcattattgttatatctgcttaataaatatgcttttgacgtcgatagagtggttatgcgttatcagtttgcatatacaggattatgtaaggacactttcagaatgcgacaaaagttttcaaataagtagaaaccaaacgtctcccgttaattttatctatgttcatttaatgtttctgttggaaataattcataagttgccagaaaccggagattaaactatttccattattaagaaaaataattcctaaggttagtctggatcactttttaaattcgaacaaagaagttgacttttcgtaaagaaaatattcccacactactttgtttacatgtcaacgttgcaaattaacagttgagattcaactgccacaaattttatgtaaaaaaaaggattgcaaacagcaaccccatatcgttttcgaaatctttcgtctacttcaaaattcaaatgctcactagcacaaagtacaatcactagtatgctgtaagacaaagattaagaatgaaaaaaacacaattcgtgcaactacggggaccgaatcgggaaaaaaaaacaacgacataatctgcagtttacttgtacccacacccactgtctcgtattctattcctcattccttctctttttttctcgctttgtttctcccgtcgtctgatccaccaccgcaacgcacgcacgcacgcgcgcctcctcctccctccgcggcggcgaccaccgcgcgcgacgccatcgccgccacctagggttagggttccggcgacccccacccccggcgatcgcgcgagggatccatccgtcctctcctccatgtccaccgaccagcctcacctcccgccccccgcgcccccgcccggcgccgcggcggcggatccccccgagtccacccccgcgccgcctccgccgccgccgctcgagccacccgaggtgatgcacaagacgagggccgtcgacttcctcggccgccgcaccccaatcgtctaccagaacgacaacgggccgtgccctctcctcgccatctgtaagaatccccccaccttctagattcccttcgggtttcaattcgcccccgcgcgcgcggcgttgtgatgtgtggggttttgttttggttgctgcaggtaacgtgatgctgctgaagaatgtgatcagcttgaacccggacgcgggcgaggtgtcgcagcagaagctgctctcgctcgtcgccgagcgcctcatcgactccaacagcaatgtgcaggttcgatcggtccccgtggggttagagatgggggttgtttgttgtgttgccttgtgaattggttgtggggtgtgattcgcagggtaaggacgaggagtatgtgcgcaaccgggagcagaacatctcggatgcgattgaccttttgccgcgcctcgcgaccggcattgatgtgaatgtgatgttcaggaagtgagtccatggttcggtttgtcggttagcggtttgttgtttatggtgctctatatgttctgatatgattcgggctgtgggcgttgcaggatcgatgactttgagttcacccgagaacgtgccatatttgaccttctggatatcccgctgtaccatgggtggatagtagatccccaggtatgcatctccttatggcatgtttgtttggtttagccatgttgaacttctgtatctagacaactggatcggcgtgcgggttagagtttactgtacttctttcgacatggaatacaataattcttgtgcttggagataacttcatgtgtataccattcacagtttctgttatttagaacagagaccatgtgttcatgcttaccatcgcaacaacactcaataaaaagaagtgtaatatgtatgccagtgtacttgtccccccccccccgatatataccttatacgggcaatgtttaccattgttttgaaaactcgtttgaaagctctatcaagtagctacgtggtgattctatttgataactggtagcactcacagctattgcttggtttcgcaaatatgtatcacatttaattaagctagttttctacattgtttcccaactatgtactagttaagatcctccaatttgcaattcagacagtgcggaacttcctcgtcacaaatatatgttgttttctatgttgacgcggtcttcaaactacaacttctgatcactaatttcttttatgagtaaaagcaagacaatcactctacgttgttttccaactttttactagttaagatgctccaacctgcaatccagacagtgttgaacctcctcgtgtcacaaatatatgctgttttctatgttgacatggtcttcaaactacaacttctgatcagtagtttcttttaggagtaaaagcaagacagtcggactggctctatggttgcgttttgatttgagtattgtatgtgatgctccaacaaaaagcgtatacttgtgtctagacatgataagtttctgtagcaaccaaaacttaatataggatttatttatcttgtgcaatacaatttgttaagatagccagaaggatgctcgaacagcatagtcaatacctccctacatgctggatgcataagagatttcgcttgcctcttacgtctgcaattctcacctgcatgctaattctgattgtttcatatttttaggatactgacactgctacttccattggatcaaagtcttacaatgctcttgcatctgggcttgctgaatttaagtcgggggaatcaacaaaagagaatagacatgtacaggaggaagaaactgttgattttgctgctgcaactactgcagcactaggggttccttctcctagtgtttctcgaggtatatcatttgatgaaaatacactcactgacccagttgagttgcacataagacgaggcgatcgtgaggaagaagaggaactaaggagagtccttagtctatcaaaagctgaaaatgctaatgctgttgatggatctggttcctttgacacttcacagtctcattcatcctcaaatatggaggagacagcacacactgagagcttccaattagaggcagtcgaggcgatggattcaacaaataaggaggaacatggcaacagccatgctttgagcgatggccctatgttacaggacaccacaaatgctgctcctaatattaatgaagttgggatggaggaatcccaacaggttttgacgtctaatgaactagaagacgatgggaaaaggaatatcttgccagagcactctgatataaccattcaaccttcagagtctgtgcttgactgttcctctcat

SEQ ID NO: 20041 - DNA, 2529 bp, Oryza sativa
cgagagagagaatgagtgagagagagagagaggagagagagatgagagactatgataggtgggtcccacatttttttaataaataaaatgctgactggactgtcacgatcaaaaccaccgcggattggatcgagggggtaattcgtccggtttgcatagttgggggtgaagaatgttcggttttgtggttaaggggggtaattcggacgaccgcgatagttcggggggggggtaatttgtactttttccttttggaaatcccctattaaggaaatttggtttattttttgttccatcgaaaaatgtttcacctagtgtattcacaatgtttcactatatatagatttaatgttgcagtgaactgaaacattctttcgctatttgctgaaacattgtttttatataaggtgaaacaacgtccgatttaaacgagtgaaacattttcgatctatttagtgaaacaattccgatatacttggtggaacatcgtgcaacatttaaaaaaattcaataataagctaaaaattttttcgtcggaatatatccatgtgtggtcatgttttgaagatttaattgcaacgaatttaatggtgcaatcggatcatgatttggataagtaatttaagagaaaaatcagtagttttgcacataaatcggacgctgacgtcagcacccgatttcacccgctccctgtccggcgagcgacgcgtagtcgcgtccagaaaacattgtcgtgacccaaggtcacagacaagattggggatagacgggaaaacccccttttcccgcctatcctgagaaatgagcgcgaataccaaatgaacacacacactaagtgacaagacttttagtattccaagatatcctgcctgctacaggctttttgtctgctttatatagttcacagctttacatgtgagattacagttgcgccctttgttgggcccacatgaaattacaattatgcccttgctatatcagctaaacctaagggcattttggtacattatggaggtcattatagtcttttggtgccagctagatgaagtggttgagtggtcctcaggaatattctcttggcatctttgttgtctaagtcgccttcttcatgatcaagagtcttttccaccaccatgggtcttctcctcgaccgagggtcttttccaccaccatgggtcttttccatggcaaatagtcttttccagttcgaccacccttttcgacttatccggtagctgacctgttactgacttaggaaacattcaaaacggataataagacttagtgacaagaatttactcgaacggtattttccgactcgaatagtgttttatcgtttccttgttcgaatggtcatttccactcggatacttacaataatgactcaatctcacccaatctctctctacagtgttttgggccgaatatggagggacggtggtcaccccctgctacaacaaacatatctttaagaaatgctgataagaaaagtaaatttcatcctataccatacgtatcaaattatagtatcaaaattgtacaatagaccttgattcctattttccctcaattatatatgcttctctttgtctaatcaaatgagggcgtgagcaacgacaactagagatacgccgaggagatgaataaccaggagtgcacacacagcagctaccacaaaccgcagaatcgtcgatggccgcacccgaagctcaaatactagcttctgattctctgtcactgtcatcttcaggtaaccatcgtcgtcgtctgcggcagcgtcctcctcgtcgtcgtcgtcagtttgggcatcatcatcgtcgtcagcttgggcatgaacagcttcggacgcatgcggctcttgcaccggacgctccaaccctaaaacgaataacacccagtgagaaactacacaagcacacgatggatcgatcgatacaggctagctcaggacgacgatccgtggcgcaaaattgctcagatcagaaacaggatcagaagcagaagtaattgatcagaagcagacgatagatgatagatcgatacagggtcaggattactacctgaaggtgagggtttggcgtggatgatcctcctgaagcagaagttggagcaggcgtggtaggggttggaggcgttgatgcagtggggatggacgcgcgaccaccgatgattatcttccctggacttcacgatctgccggaggcagtagtcggagcactcgtggtacgggttcgacgagttgacgcaatccggccgcgacttccccggcggcggcggcgacggcttctccatcggacccacgattagctccgccttgccctagatgacgattagctccgcctcgccctcgtcggagaccgcaacgcgtgtgaattggggtttggattgagcgaggtggtgggtttctctatttgacttcattattagtattattctcctcctcgtttgcgagtaagattctaactgggccgagcaggtgatgggcttgcgggcgaggcccatttatttttctcgagccgttgggccaag

SEQ ID NO: 20042 - DNA, 7429 bp, Oryza sativa
actacggctccggccgcggcgtgtacgaggaggacttccccaacaagccggtgaatgccttcgtcaaccccaccggcgacaacggcggcaggcccttgctaacgaagcgcggcaccaaggtgaaggtggtggagtacggcacggtggtagaggtggtgttccaggacttgtccagcgagaaccatcctatgcatctgcacggcttcgccttctatgtcgtgggacgagggtccggaaccttcgacgagcgcagggacccggcgacctacaacctcgtcgacccgccgttccagaacacggtctccgtgcccaagtcaagctgggccgcaatccgcttccgcgcagacaatccaggtgagttattcggatttcgatcggattgtggtattttgatatagtactttcatgtgcagttttttttaaaaaaaaggttcgtgtttattttcattgttcaggtgtgtggttcatgcattgccattttgatcgccacgtggtatgggggatggacactgtgttcatcgtgaaggatggcaagacgccgcaggctcagatgttgcctcgtcctccaaacatgcctgagtgctaatgaccgtggttcaaggaaaataacaagagtgtgcaaacacaagcaagcggaaatttgtttgttttgttgattgatttagtggtttatttttttttccttctttcgctgaaaaggaagaacgtcctgccttgtaattgttagtcacttcgttctgtcatgtaagtttggaatttttgttattcaatttatttttttgaatttttgttattcaaattatgaatataactaaataatgtatttgcagtggatcgttattatgacatctttctttataaacacacacacccttgctatcttgactattaattcccagtgttaaattgtgttacactgttttagtttttcgcaactgtgatgaccttagagcaaatttaatagtatattaaactatagctccaaattatctataatcaatttaatagttaattcatacgatgggtacgtatgaacttatactatactattaatatattaatatatagtctcacacagtggcggaaagaggggtagggcagcatactcctaaacctaaatattcattaaaatttacatttgaaaacttcaaaaatatgaaaaataaaaggtaaattatgtaaattatgctggttgagccctagacttgagaaaattcttgctacgccacagatctcacatgtcatacacacattatattttagagccagtactataattggctacaaatctatagctcactactcttctctctactcttttatcttcttgacatgtgtctattgctaacttatactccctccgtcctataatataagggattttgactttttgcttgtattgtttgaccattcgtcttattcaaaaaaaatttagaattattatttattttatttgtgacttactttattatccaaagtactttaagcacaacttttcgttttttatatttgcacaaatttgttgaataagacgagtggtcaaacagtgcaagtaaaaagtcaaaatcccttatattatggaacggagggagtagtttattattgtacccactcttgcttaggccctgtttagatcccaccctaaaatttttcaccctgtcatgttcgaacgtttgaacacctacatgaagcattaaatatatgcttaaaaaataactaattgcacatattgtgactaatttacgagacgattcttttaagcctaattgctccataatttgacaatgtggtgttacagtaaacatttgctaatgacggattaattaggcttaataaattcgtctcgcagtttaatgacggattctatagttagtttttttagtagtgcccgaacatcctatatgacaccctatataaaacctaatgtaacacgccaaaactttacacctctggatctaaacaacacccccttagtctcacaatgtttttgtttgagtgaagtgcacatgcggtcattaaacttgtacggatatatcttctagttccttaaactcttaagatgaatttttcggtccccaaacttatcatgagtgtcgtatatgtttaaacgggttccaacccgctccgtgagatgacgtggagtttacttcctccgttccataaaaaaacaacctagtacgggatgtggcatatcttagtactacgaatctggacatacatgtgtccagatttatagtactagaatatgtcccatccaatcttgggttcgttttttatgggacgggggaagtacgtgtcagtggatccaacgtgtcagtcacgtagaaaaaaaataaatttaaaaagagaggagagagaagaaaatgatgtttttaattttgaaaaaagtaaatgataaaagagaggagaaaaatatgttcttaattttttccttactatccgtttgaatctatatacacacgagacaagttgagggaaaaaaattatgagagtttaggatctaattatacacccacatacatttagatatcagccgtgcactttactttttttttttttcgtgactactagtttctggagtaactaccaccaaagctgtgctgctgttgtgcttccagtggcaaacacagcagatagataatacagggcccgcgacgtgggcgagaaaaccgtgtgccccgcgcggcgtggcggctcggcgctggcgaaaccagggcggcgcgcgctcccggttcgccacttgcccccatctcccgacacgcacgaacgccatccccgcccccgcgccaccgatgttctcatccaaacacatcacctcctatctccaccggcacgcatgccgactcctattataaatgatccctgttctttttggcactgatcccaattcactagtcgtgccattccaatcacctcggcgagatcagtccaaactccaaagaaatcaagaattcgcagatgaaggtgcttgtggcggtggacgacagccgtggcagccaccgcgcgctgtcctgggtgctcgaccacctcttcttccccgccgccgccaccggcgacggcggcgaggaggagcaggtgccgcggccggcgccggagctggtgcttgtccatgccattgagccgctccaccacgtcatgttccccgtcggcccaggtcagtcagtcgtcgtccccgtcgggccgccgcaatgcgcagctgtctcgaggggtgattgcttacgggtgttcgcgcagggtcggcggtgtacggcgcggcgtcgatgatggaggcggtgcgggcggcgcaggcggagaacgcgcggaacctgctcgtcagggcgaggctgatctgcgagcggcgtggggtggccgcggcgacggtggcggtggagggggagccccgggaggcgctgtgccgcgccgctgaggacgccggcgccggcctgctcgtcgtcggcagccgcggcctcggcgccctcaagaggtacgcacacgcagtcacgcacacaccccctagctgttcgtgtcagtgtcagtgaccaggactccatggcgtcgcgcagggcgttcctgggcagcgtcagcgactactgcgcgcaccgcgcgagctgcccgatcatggtcgtcaagccgcctcccgacgccggcgacgaagacgacggcggccactgcacgagcaactgaactgatgatggatcgccattacatccggaagaccagctttcgagggggaaagagaatcaagagagagacacttgttttaccattgttgttcctgctcagtgctgaatttgtccttccaaagttcctaccctgaagcgccgtcaataaacatttttactgtgtgctgccctgcgtctcatctgtgcttttgctataccgttgcacatgtttcttaattttgcaaaaaagtttttgaaacacggtacaaacgacgcacaggcgcctcgctgcaacgactatcactgaaggaacaatgaaggaacaatgagccgtaaaggcatctcgttatcgatcggttgttgacggatacatgggctatcattgaaagaataatagcctatatcacaaataaccctaactaattaagctatactcacttcatacaaaactctaaaattaatcggtggtgaaatctctaataccgatttcagggctctatccctggttagagaagcttttcctccccaaaaatctgccacgtgtctctttgctccccaaaagttcgctgcgatggaccaacgaagcttgattttttctcgcaaaagcacttgacccctactccacccatccctcctcccgatgcacgcctcgccgcccaccggatcctccgccacccgcgcgccgcagcggaccacccgctcatgtcctccctcaaggcgcgggctcgtcttcttcaccaccgcccggccacctcgccctcccttgcgctccccaccgccatgctgctgtccttccttgacgcgcggggctgtcgtcatgctgcaggagtcaccacaagcacgcgatagtcgtcgccgatacaaacttcggcaagatccgttgagcccaatgaagagaagagcggcggtggtggccgtcgacccggaggccggatcaggagaagggagggggcgctagctagcagaggagaggaggcggcgtgcacgggtgagtggtggcgtcgcgccggatcctctgccacctgcgcgtcgtggctatgacgccgcggcgaaccacccgccaacggcccaaggagcaggagggattgcaggaggtggaggatagggagcgcatcgcagacttctcctcgctcatgttgacggcgctacttcgatcttgtagacgcaggcgccatcgaatttcctgcaaaggaggccatatactgtccgttgtcgcaacggcatcgcggcgaagatggagacgccgaggagcaaggagcagattgaggaatggagactggagagcagcggagtcgttgacaaataggagcggggactggggactggggactgggaaggacaaaaaaaaaatgactttatttagctgcaagcctacaactgaagacagcgtacgaacggctagatcaatgtacagacggacggctctgatttttttcatgacgttgccatctaaatgaaaaatcagtgagcattacattcagatagtgtagggcagaaaaactaaagatcttattatatcatttgattgtgctctcagttgacacttacaggctcctatcggatggcctaatcagctaaagaaaaagccaaattttaaatttttaagtataattttgagatattttcaaagtagtttctttttcaacattggcttttaagtcaccaagaacatatttataaaagttttatctacaaattcatttttattttctaacggcttattagaaaataagccaaacagtggggaccacagttcggctgcacatacaagttgcaatgggcagataaggcctctttgcaatcatttatccagggtataattttttgagggagtatccaggatataattaagtagtagaagagaataaggaggcactggtatcttttgctttagcttgagctcaacgcaattccaaattttcaaacaaataattaattccttactcttctttattgtgcaaatagaattttttaatgttatgcacttttagaagataaaattattttttaaaaagggattttcttgatttttatagacatgtggaggcaggggtgaagccacacctggctatcgcaggtggccgcgcaagttcaccaacaaaaactccattaaatttatatgttattgaatgaattgatgatgaaatttatataacaaatactagaagtatagtttgcttgggctcaaaaaatctttttagctccgccaggagataaaatgaaaatactccctccatccaaaagtccaagacctactccctccatcccaaaaggactcaattcttggattttcgtgcccaacgtttgaccgtccgtcttatatgaaattttttatgattactatttttattattgttagatgataaaacataaataatactttatgcatgacttatctttttaaatttttcattttatttcagataagattgatggtcaaacgttagacacaaaaacccaggaattaagtttttttgggacggagggattatttcttttggcaccaagaccaaggagtaattaatttatttacaatgtgacaaaaccaataaacatgcaaccaataagtaataaaatggtttattgggttctgatcaataatttaatttaacacataataactataaataggacttaaacttttggaaaaaccaaagaatggaataagttttagactttagaagaagggagtaagtagtttcattactttggtttcgttggaatttggaatttgtgcgcatatattcgacttccaacttatgtatatgaattcaatgtcttgctgctttaaattaatatatgaataaaagagcatagtttccttaattttaggcattaaatagataaagaaattaagtgtacttatcataacatatcatttactccctccattccatattgattaccatataactttttcaccaagaaaaaaaaagtattaactttcctatatttcatttaatgtgagtatgtggtagggaaaaatcaagaaacatgcacactttaactcctcttaggccccatacataagatcaggtctagttataaacacatttcgaggagataaaacagaaaagagaagagcaatgggctatagatttatagccagctgtagcacagactgcaagatacatgtgtgtatgacaggtgcgaccaagtataaattgtgtagtaatgtttataggagtatatgaatttcctactaaattgactatagatgatttggagtcagtgattggctatattattaaacttgctctaagaaacgatagctttactacctcgaattcctacatacatgcatgcatactcaattgtcatgcttaaatgcaataatattacacgtcaaacgaaggggctatgataatatgatgatcaatttgaaaatttcaatttatgttaaatgatcaatataaaacggatggagtatttcatactggctggcctattatgcggcaaagccgcgtttattttctagttgtaatcctaataaactatcaggtacggagtcagattctttaccgggaaaaaaaacagtgaccgtcaaaccaacgttttctttttttcttgaatgactacaacgtcgcgctcttttttatgttcttgttgttttgaagaacagtcaagatattttgccgtctgtattcaactattgatagagtagggagtttacagggcgctatctttcatgtttatgttgtggagccatctatctatcttatattatattattaaaacagttttgaaaggaggcaccacgttcactgtgggggttagaaatttacatg

SEQ ID NO: 20043 - DNA, 6082 bp, Oryza sativa
caatggcaaagccgctgacggtttggcaggacttttagaaagtaaaaaataacccaaacgataattatattcgattttcaaaatctcaataacaataaagagaaaagacagtggacgagccgtagaggagtataatagcaacgtttgacgggacttctaaaaattataaaaagaaacccaacaaggcaataaactctaaaaactataagatccattttttaaagtttccaagaagaataaatagaaatagtgttagatcaagcaagcaaataaaggagatgtaagggatagcaagtgtgacttttaaaaactatataattagaaacacgggaatgataatatttggtctttcaaagtcttaatacaatgagatagctacttaataaattttaagtaaaatcatactaaaaaatatatgattttgtttaagtgctagccgcataattgcgcgggccaccagcaattgtatatagagtagggagtttacatggcgctatctttcacgtttatgtttgtggagccattgaactgaaagtggtcgaggaagcgtaattgtgtcgtagtcatctctgctctttttcttcctcctaagagcaagtttaatagtatagcccactactagctctaattcatctatagtcaatctaatagctaatttatacaatagttgtttactatactattaatatatggtccaacatgtcatacacacattgcgtcttggagtccgcgctgcatctagctacagatctgtagcccactgctcttctctctcatcttttatctcattaaaatatgtttacagctagctaatatctgctctaaggtctttcacagtactcctacctgcagcgttatctcgtttgccagctagaccaaattctgacgtggatgaaaaaaggtagtgggaccatatctttacaaaggtttacatctcctagcaaggatctggtttcctcatgccaaaaaataatggacatgctatatttatggcgacacaaaattagcttgatcacagtcggttaatctgacccttcgatatcatgtagattcgtgttgcactttaatgcttgacttaacgaacgtttgatttgctaagtccgtagttatttgatctctctgtactacgaacatgttgctcctgttatatattagtttcccattaaatttgcactagcatctctcttatttatatttacttatatatgtaattttagtgtattaattagaacttacatggtctaaaattacatatgtaattttatgacctacatatgtaattttagaatttacattgtaaatacactaaaattacatatgtaattttatgacctacatatataattttagaatttacattgtaaatacactaaaattacatatgtaatttagacacttacatttaagtgcataccgactattttttttacacttactgtgagtggtcccctactccataaaacttccaaattcatctactctgtccgtctgtcgtcgccgaggttctgcgcgggcttggagctcgccgaccacgctgcctagtccgacgaggaaggggagtagccggagcacaggaagaaacggtgggggctggtcgggggcgcggcgacgccaaggaaggagtgggtggtgagggagagccaccaacggaagagaaaggcacgacgaccggtggcaaggagagccggggtcgccgccgtgccatctcctcgtcgccacgcttcttttccgtctccgcgctccgtctccttgttgccggctaagagaggaggggcccggcgccgctccagatccacgtcgccaccgccgtcctcctcgctccgtctcctcgtcgctgccgagagaggaggggcctgatgctgctccagatccgtgccgccgccgccgtcctcctcgctccgcctcctcgtcgccggccgagagaggaagggcccggcgccactccaggcccccgctgtcctcgctccgtctcctcatcgccggcgcgacgacggcaaccaccaccactgcgcgcaaggcgctgtcgagcaccccaccgttctactatgcgcatggcgtcatgtagactggagtccgccgtgtggaggtggtcgccggcccggcgccaagaaaggggaaagtgggagagagaatgggaaagtaacagagagaatgggttgggatggttggtttggggatcccgtgtagtaactgtgagaggtatggattcgttgtacatttatcttaaggtaattcaaataaaggacttgcactgctactgcctaaagcacagtgccttagagtttttttttagggaaacagtgccttagagttactcacacagtgcgacgaattctctcgacgttggcaagcagcgcgagcttggatatgttgacgtctgcagttcatcactcattcgttaatgcatgtttcccatatgaactttaattagcatgaatcatttcaacagaaaaatagagtagagtaatatgatcacatccgtttctttttttcggcttctggattttcgaaaggagcaatctcaatgaaactatggatgttgcattaaattcttcatcttgaaccttcatacgtgactatgtctagccgcaaattcatacagtaaacattaaagcaaatccgtctccaacttgactgccatcatgttgtagaggcgtgcattggttagcccctcttattcactactggcctaactccaattttactagcattctttaatcttgtcgatgaccatctgatctaactctccagctctatttatcaatgtcgatttcttactgatgaaattggtttatagcctctcgcttaatgttttctttacacatacgatgctttagattgactgcataatcttcttcattaaccttgacactagccaccaataaactctctcgatactagagttgttaagtacacatggctcaccttttttcagttacaattcatcactttacaagttgcataacataaaacaaaatttccatttgttggcaacagccaacatgacacttcaaactttcctttcaagctggagagcaaatctaacctaacctgaaatttgaatcgtagtagcccatccaatcagtttgcttctcaaatcaaagagaacaagaggaaaggcaaacagaagggaaagcagcccaggccaagaaaagggtagagaagcaaccccaggccggcaggcaaacacgcgccacacgttgccgctacaccttccacctcagcaccctcgatggcctcgtcgtctgctcgtggggtcctcgtcatcgctacccctgggctcgtggccagcggcaattggctcgcactgctgcgcaccaaaaaaaaagaaaaaaggaaagaaaaaacaagagatcaaatcgtggaactcaacgggagtctcctcgcgaggtcgagtggactccaccaccttctcctcctccactccaagcccacgaattcggatcagcgccgccgccgccgccgccgccgccgcgggaggagggctcgccgattccactacttcactccagtaggtggccaacgcgcggggtgggagcagcagcgacgacctccaatggcggcggcggccgtctcctccctcctcgccccttcgggatcctgctactcccccggatgccacagctgctggggtcccgggcccggaggcgggcggcgcctaccttccccgcgccggcgcccgattaccgccgcggctcgccctgtgagctcccccctctctcgtacacacactctctcacacacactcgcccactcactctcgaatcgcgtggatgttcgttgattgggaggtcgcgcagcctagatgagaaccggcacttgcgaaatagctactttagttggtgtattagagagagatatatatcctaattgttgatctaattgctttgtataattgtatttgcgccaaatgacttcaaactcgctctcgaatgcgcagtagaaaactagaaatcatggcctaaggctaagagcgcattaagctccaatgcacgtcagaaaactggaaatcatatggcctaaggttaagagcatattcggcaggtgcataatagtttttttttttcctaatctgaatgttgtacacttttttaacctgggcagacttgggcagtgccgaggaggagcaggttggagtgggggcgtgtggaggctcagaattcgggcgctcgcaccagctgccgagcagcactgcaatggctatcatccacggtgagccatcaggagtattattttgtttaccctgtacactcgtcctggaaattctaggtctgccacgtcgcaattcgatcgagtcaaaccagctgaatgcctgcagatttcagtttctgatgcaatgtattgtctcacctaggcaaggtcccatgtgaatgttggttatgggtcgccgctggtgttcccaggtttgaccaaaccggggtcaagcaggtgtctatgcgttgttggaatggtcggcaatgcagggaatcaagttggtgacgatagtgatgatggaatcaaggttaccaatgagaagcttcgtgctgttatccgcaagagcaaagaggtgttggagatccatcggaatctacttgagaaggtagctgttctataagttgttgctggaacaaatgtgtttctcaatcttaaaataagttgtctgtttaaagttatgatttagcaggttgtcacaagcccacaaaaatgatgaaactaaaaaggttgtagcattatttgtgtgacctttcatttatgtagacaatttttggttgcaggtacataaattgaaaatacaagattactatgaacttcccaaagtatgatatagttttagttgttggatcacctataaagctctcttatacaaacaagcggtagacattcatgttagtcagattcgttctatccacatacatgctgttagagcatttccttccactgttgaagtaataaacattgtagtctccattgttgaaagatataccttttagtcttggattttacattctataccatcacgagacagtttaagttctagcttctgaggaacaaggcggtgtaaaggtaatggaggctctgttaacatctaccagtgaggtcctttgcaccatgtttgatggaagcaattaggtattctactgaagggctgatgcactgagtttactgaaaatgtgtcctttttcatgttcttgctggaatgtgaaatgttactaaatgtagcatgctaatttcttaaatggttattatatagtggtgatgagaaaggcaccctgcgaacgaccttgaattacaacctttttttgggccattttgcagttacatttatgcatgttgctggctgttcacattaaaacattactatatgaaacagttctggtcctcctcttttattgtttactgaaaatggtggttttgagttatgatatgtggccaacttattcagatatcggcatcagaaaggaagaagatcacttcaattatagaggacagttccatttataatgagcaagatccatttggtcaaagagatagttctttttatcatcttgatgaagttccagacgatgatgaatttagctatgacctacagatgtaccttgatagacgtccagatcaatctgaagttgttgcaactcaggattatgaggcacaactaagtcaaataagtgaaatgggacagtcagttgctgagggcactagtgatgatccatctgcttcagctgctgtagatcttatcaatatcatattggtagcggcggagtgtgctccttggtccaaaacaggcaagatcataatagccacataccttctaattttttcagtttccatgaaaggacattgcgggtttaacctagtacctgtaagttggcggactggagggtgtgtgggctaacacccaaaattccaaatacaacattacatggttacatttcctgtgtgagctgatttaatttaaggacgtgttgtttgtgttcctatattaaccgttcttgttccgtcagcccgttatgtttctcgtgacaaatgttgatgtagtctgtcttcatgccttttttcatttcttgatagtttccatccagttactcacaattggcaactttat

SEQ ID NO: 20044 - DNA, 2738 bp, Oryza sativa
tcctgcagccctagtccttattttgtaatttggtgtcttgcttacgttttttatgctcaaagaaagatcagttgccttccttattgatctgttcaagcggcttttcaaggatagattttgaactaaagtattattaacatgattgacctttggttagccctgtttctctgtcttccttgatatgcttataaaacacaagattaccttgctttaggttccatggtatgttccttgtggtggctactgctacggtgatggaaatcttgtgttccttgcaaatgattggcatactgcactactgcctgtttatttgaaggcatactatcatgacaatggtttcatgatatatgcccgttctgttcttgtcatacacaatatagcacatcaggtatgttgatctttaactttcgcgtgtgatttgtgtttgccctaagtctcccaatgaatcacctactaaatgcacaatccatgtgttacttctggttcatggaaagttaacgaatcaaatctattaaatgtatctaccaagttgaacaatcatatagtccatttttagtccttgaggtcacagattgctcatgaacgaatattaatagatctttcagtgtttaacttgtcctttctagaaaggaaaacatttttagctttagatagcagatagattcaagcaacatcatgatggatatctgaaacattaaacagagactaccatgcagaaaattgagataatacagagaagaaagttttagagaagtctgaaaacatttcaaactttcaatgaatagattacagcttctgtttgttgtcttctgttttctgttgaacaatctacatagtggctgtactgaattatgtggtttttttgcttcagggtacctgttattctgttgataataagtttacttaatttcacttttcagggtcgtggcccattagatgacttcagttatctggatttgccagttgattacatggatcttttcaaactttatgacccatttgggggtgatcacctaaacatatttgcagctggtattaaagctgctgaccgtttgcttactgtaagccatggttatgcatgggagctcaaaacagctgaaggtggttggggtcttcatgggatcatcaatgaaagcgattggaaatttcagggcattgtaaatggcattgatacaactgattggaatcctaggtgtgatatccacctaaaatctgatgggtacaccaattattctctagaaacagttcaggcaggtaaacagcaatgtaaggcagcattgcagaaggaacttggtctcccagttcgtggcgatgttcctgtcattgctttcattggacggctagaccatcaaaaaggtgtagaccttatagcagaagcaatgccatggattgctggccaagatgtacagttaataatgttgggcactggacggcaagacctcgaagatacattgaggaggcttgagagccaacattacgatagagttagggggtgggttggtttttccatcaggttggctcatcgaatgacagcaggggctgatatactattgatgccatcaaggtttgagccatgtggattgaatcagctctatgccatgatgtatgggactgtcccagtagtccatgcggtcggtggtcttcgagacaccgttgagcactacaatccctacgaggagtccggacttggttggacttttgaaaaggcagaggcaaacagactgattgatgctctagggcactgcttgaacacgtacaggaactacaggactagttgggagggactccaaaagagagggatgatgcaagatctaagttgggataatgctgctaagctgtatgaggaagtcctcctagctgccaagtatcaatggtgatcagtccaagaagacctcgacggttgttcagtcattcatgaccgaaatgcctttttctcgtgtcagctgctcagatgcggccaccatctagttccatggcttacatcttcctgtgatttggatgaacagagtttttttgtcagatctgacatcattttcaagaaggcacatgatgaacctacttcccaggtgaatacagcagcggacgatgcctttgttggaaggtggcaaaacacatggaagattcagccgtctgccagcatgcacctctgtcctaaggagaggctccaagccccattgtgcgctctggagaggctccaaaccaccattgttcgcccctgggtaggttgttgagctcggttagatgcttttagtacagtagaatagcagatactagcggatagactagttgatatttcccctatgcaccgagtggttcggttgtaccttatttttttcttggctcttgttgtccagttcttcgatctttagacgattagcgtcccgggatttcccagatgacattgacattgatactagtgggaatttcccctgcaaatttactgtcagcttttccattggtctgcagctatgatcagttaaacccgtggatcccatggtggctttcccttctacttgtgacttggggaggtaggcaacactgccccttgatagttgatgcatacgcttcatgcagattcctcgactggtccattggcacatgaaagaaaaggagattgcaagtatgcaacgaccgtgtgggtatcagcgtgtgcaatgctcgcaagctcgcatgaggtggccgcaagcctgcgacgccggatgcttagccccaaggagagacggtgacatacaaggtaa

SEQ ID NO: 20045 - DNA, 7383 bp, Oryza sativa
cccatttttgatgagcagtcctattacatacatacatgctcttttgatttgttgctatgcatatttagctactttagggcatgtttagttcccaaacaaaatttttcgcgttgtcacattaaatatttggacacatgcatggagtattaaatatagacaaaaaaaaaaccagttacacaatttgccagaaaattgcgagacgaatcttttaagcctaagtgtgccatgatttgacaatatggtgctacagtaaatatttgataataacggattaattaggcataataattaaattcgtctcacggtttcctggcggaatctgcattttgtttttttattagactatgtttaataatttaaatatgtatccgtatatctgatgtgatgtgcaggggaaaactttttgccaactaaacatgcccttagactgagttcggccaactttgtctgacacggaaaacaaagcaaatgattagaaccagattaattaagtattagcttaaaaaacttgaaaatggattaataaaagcaactttcctatagaaaacttttgcaaaaattcacaccgtttaataatttgaaaagtgtgtgcgtgaaaaatgatggaggcgagttgagaaaaaaagggaagaacacaaccttaacataagaataaagtttcttttttctttcaaaatgcttttcgtgtgctctgtcccattttaaacgctgttgtatacgaaaatgcatagggagtacacattattagcacccgtacattctatacacctggaagatgcgtcctcgcagaaagaaaaaaaaaagttacttgtggtaatacacacgtcgtccctgacgattatttaaggaagaatggttctgttcttttcagttaattcaacagattatattattgccatcatatcatgaagtatttgttccacacgcaaaagaaatacgttttgttgaaaaatatttttgtactacattgctcgatcccttaacaaagctatttgtttttaaactgagatcattattatatttcaaatgatccggcttttggtagaaagccaagataacgaaatactacatgttaagtttatttatcaaaatatttaatttatatctacaattgtgtcgataatttgtttcaaattggacaaagtttatgactcgttccattttggtgatcgatggcgtgtcatatatgcagggtacaagaaggagcacatcaaggtgcagctggtccgcagccggcggcggctggtcgtgagcggcgagtgccccgtcgccggcgagaccaaccggtggagccgcttccggctgcagttcccggtgcccgacggctgcgacctcaaggccatccaggcgaggctccacgacggcgtcatccgcgtcaccctgcccggcgtcaagccgcagcagcagccgccgcccgccaagacggccgccgccgccgcggtagtaggaggggatcagcggggcggcggcgaacgatgccaattcctccgggagcggggaaagctcgcgaccaccctgctcggcgtggtgctcgtcttgtttagcttcgtcatctacatcaggtacagcgtgaagccatgaaccggggggacacacggtatttatttctgagatgacgagcactgatcgatcgcgatgatgcgatgggtttcgctgtaagaattaatgaaatccatctgaatggaaaaatgaaaatggaaatgtaaacaaagccttggctttttctgttcatatatatgatcatccatgtcgcatgaaagagatgtccccatgcaaatccttgtgcagtactatcatctgactttaagtggctaacatgtgggccttatacccatcggattcacgtgtcacaaaaagtcctccaactcctagacactaactttaggtggtgtttggttggagagactaaagtggggctaaactttagtccctctcacaaaaatagggacttatatttttgtgagagggactaaatttagtccctagttcccaaacacccccttaagccttgagataattttatagttattaagaaagtatcttaaggtatctaaattttacactaaaattttttataggtatttagtatttaaacgtatcaaattttacattagaaaatatgatatctctgtatatcttattaagaatgataaaattacccttaatctcaggccatgttttgaaacggatgattagctttagagcggcgaaggcacacgtaccgtcgcacgttagaccaagggaattgcgcgcgaaccattcgcgatgacgaaagctcggatttcatcttccgtcgcgatggcgctcccgccttttctcctcccctctcccacgagcggagaggagcggggtatcattgtggccgacggcgccgccgcgtccgcggcggcggtggcgccgcgcgtcgtcatcagccgcttggagatcctgcggaggtagcctccgaccgcgccgcccttctccgcctccggcgagcgcgacatgccgctgccgtcgtgcgcgcggcgcggcggcgacgccgtgaggccgagccggagccggtcgcggagcgaggagggaggtgaggacgtgggggaggagtatgaggctgacgagacggcgggcgcgtccgttgcaatggcgttcctggcgggcgccggtcggcgcccgctcttcctcggatggtgctccgccgtcgtcggctcgtcgttggccaccactgcctcgccgtttgtcgccgccgctgtctgccgacgcgtgcgggcgccgaagcacggcggcgaggcggagcggctgcgctgctgccgagacgacgacgtcccgagctggagccggtctccgatcggcggcggctcggccgccctgccgccctcgccatcgtccgccgccgcgggcgtcgtcatcgtcgtcgtcgcgcacaccgcgcatgggaacagccacgccgcgacgagatggaacagctgcatcgcgcgctcgccgccggctacagcacacaaaaccaactcctcgtcgtcgccgccgccgtcgccggcgtgatctgtgagcggtgtcgctgccaccgtgtgtatgcattgcatggggtggccgcgtcttatatcgtgcataggagaagcacgtagcgcgattgcaccggggttctcggcggcgcacggtgatattgccggaagaaacggcggcggcgtggggtatgcgagaatggaaagctctcccgccgatttctttgtaagcttccttctgcttgactgcttccatgtttaactagaaccgattgaattgagattaattgaacatatgccaaatgaaaaacagaattgctaaccatctgttgacagaaaatctatctctaaatattgcaaattttggtccactagatgtgcttcctgattcgtgatccagctgctctccaactccggcaaactcctctacttccccggcggagggccaacgaattagggtcccggggtggggaggggtgggagggaagggggaagtgttagtgatatgccctagaggcaatcatagagatgattgtatcacatactatgtttacatatttatctgacattgttcctcgaaatagataactcattatttgttaatgaatatgtgattcttttatgagactctttatgttgtttgttactatttctaaaggatccctgatcaaatatcatatgtggaacaaatatgtttaaatgatcagcacatgtattaattgatgatcatgtctcatggatcatagtatagagataccaaattaataatgtggacacatgttggtgaacatgttgttggatagacccaacatgaaacactgcaagagccatatgtgttgtgtcatcagtgatctcatttagtgttggtgttgaatccttagacctgagattatcatggtttccaacatgtgcaatagtttacttagggactgctaaacactactccgtaattgggtagttataaaaatagttttcgggtatgctatgaaacatgtagtggtatatgaataatcaagataggatttgcccctcctatggagagatatctttgggcccctcgatgttatagattatggaagtgcatggccatgccaaaggtgattgaggagtcaatcacaagttatataatctattaacaggttcgagtgaatgattgagctattagaggatggcacatatctagccttgagcttaatcgatatcgtgaggcaaaggggttcatacaagtatacactagaggttcagccaatatgatcttgatgtatgcccggtgggtcaatacgttctgctaggggccgctgttgacgcgtggaccgaaaaggagttttcgggttacagccgagtgtacatgaacatacagggtcgcacgcttaatggaccagaataagggattggatagggatcgaatataagcttaattcggatagggatccgaataggagtcctacgggccttggaggcccgagtaatggatcctatatattcgtgaggggtgtgaccggcggaggcattgcatcacgtgagaaaccctagccgtcacttccctccccgagcaaaaccctagccgcgcgcgggtgctagcacatctgcgcgtggcgttccgtccctgtacgtgtggataccggtagaggcgccgctggtttgccgtgctgatcggtgtgggagtacggcgaggagaacgcacgagtaggagaaggtcgagccgatgcgatcgactacttcctctacatggacgcgcgctactacgcgagagctccttcgacttctccgcgttttcttccactgcgcagcgcgtcgagtggtaacgatctatgatctaatacttgcatggttcctggtttacgcgatggaaaattttgatttatgctatcgtagcctacccgtatcccaacaggaagaaggggaagttcgccgagcttagaggaatggtcgtgggaggcggcggccctgcggtgagcggcggaacgggcgggcggcgaagcgccggcggcggcgccggagccatagggacggaggagggcggtgggccggcgttggtggaggggcatagcgagcttgtggtggccgatggtggcggatctagcaacgaggaagacggcgggccaggagcatctcgccttcgatggctcgaggagagaggtgaggggggaggaggctagtcggggtgtggaggtgggggctcaccggcgccgttgacgccttctgacaagccggcgaggccaggcagtggcggaggcggaggcgggcagaatgctctcgcactgaggagcggcggcgtgagggggaattgggagaggaaaggttttttagggtttggttgcctgcacgaatcttaaagcaattgggtggtccaaaatttgcaagatttctaagggggttttctgtcaagtgatctatagacggtcccaaaaaaaaggcgctaattgatcggcatgcttccatattgtatatatagaactggttcaacaaaaatggtagtggatccaaggcgtgtgctttgaaccggagtcttcatcaaagctccaaaaatgttgaatccgatgacccaatacggccttgttctgctaatcccaagagaaaggattggaggctaatctgaagagaaaggattggaggagattgagggctttgttcggttaagcccaaaaggaaggattggaggagaaaaagattgaagaggattaagagaaagggattggagggggttaattggggttaatttcatatcataatatgtgcggaataagtcccttcaaatccccatcaattctcttatgggagggactaaccgaacaatggcctataacatctgtcaggacgggcacaacttagagatatgaactgagccagcccattctaattttcttgtgagatcaccctatcatggtggaaatttgtcaactcccatgggcttttgacttcaggccctggggtatggcctacggtgtctatggtctagatccgctccatattccgtcttcattgagccaaatgatcagatccaatgcgaaggagatctaatgcgatgatgaacctattggaatgtttccaccaaataattaaggtccttctagaactagtaaattaaaggggaaaaaacaggacttcgatatgaatgcatatgcaaaaccgatgattatgaaataaaatacaaactcatgaatggcaatttgaataaacagtaagagcttgttcactttgctaccattttcaaccttatcaagttttggcattgccaaattttggtaaggttgccaaaattttgataatgttgctaaattttagcaagatttcatatgtacttactaaaatttgggaacaactaaatgtagccaatttttttggtaactttacttaaaaaaaagtaaggttgaaaatggtagcaaagtgaacaagccataagaaaagcatagtaattggataaggcagatagacatttccaagaggttaaacctcgtgctaactttccttcggaaatctccatgcattgaggcagaaatttccaataggattcaatggtgtccaatcttttgtttcaaggaccgttttgggcaaaacaatcatatagaattcaaatccgggaggggagctaaaactggtagtacccttttcagtttcccattgccctgcttagtttctttcaacatttcagtctgtagatgccctgaaaaggaggacatgcatcagcttcagcttcatgatcaagcaaaaaagatttgcaataataaataactgtaaaagaaaaggttgtaaaatggagttgcacaaaagcaaggaaatccatctactagctaggagttggccccattgatgaatacatgctggtcggcaaggtgaggtatcctcccctttccttcatcaccattaccagacttggcatgccttccatctcacgtcccaatattttactgctccatggattagccatttagcctatataacccagctgctgtgcacggcaaatttctcatccaagcagcaaccgagcaaggaagcaaagcacacagttcagcacaagtaaaatagcacaagcaaaatggatcaggcagcagcagcagcagcatctggctctcgctcccgtgtcctgtctgaaatcgacccccacagcgaatggattcacggtgacgagttcgacacgctcgtcctcgacgttacaggtatctcctcaattctgcgtctcaaattcaggttttgttcttagctaggtgttctacggaacattccccctgtagggagattcagttttcaaggcgatatgctagaaaccgaccgaaaccgaaaattcagactttctggactaagtcgaaaatacaaaatgttggatttttggtaagttagagaaaattaaactggattttaattgtttgataagatttatctggattacatcggtttttgttggtttatc

SEQ ID NO: 20046 - DNA, 9220 bp, Oryza sativa
tgttgcagggttcagcaaggaccatctcaaggtccaggtggaggcgtcggggagcctcaggatcagcggcgagcgcgccgtcaacggcggcggccgccattggctccacttcctcaagcgcttcgacctccctcccggcgccgccgacgacgcgtcggcgatcaaggtccagctcgacaagggcgtcctctacgtccaggtgcccggccccggcgctcccgccgccgccggcggcagcgacggcgagcagcagcagcagcaggagggagagatcgccggcggccgccgccgcgcggcggcggcgaggcgcggcgggcacccggcgtggcagctcgccggggcgctgagccggcaccggcaggtcgtcctcaacgtcgtgatcgccgtcgtcttgctctggctcgtcacgttcgccaacaaactgaccaagaacgagtgatacaaaccgcgtcaccctatgtgcaaacacaatcgctgcataacatggtatataccaacaagatatggatactttccagtgtggacgaggataaataatggaataaaatccctgtaataagcataattgggaagctcaggatattgattaactgtgctgataatttctgcgctgaactttcactgcttgctagccagagtgatgtcggaaatcactgagatgttctgagatgttagacaggaactcacgggggtgtggactgatgatatggagtattgtacaggattcagcaactactgtaaatctgtaattcagtgtttcttccaacaagcaacgcgcaaacaatgtcgacgaagatggacactcccctgttgtactatctgatagctccaagcagatttgcaccaccgagcttagcaccagttaattgctgctcaaaagaacacatggattaaattttagaaaacaatcttgaactactagaacctatgatgccacattcccacgttagatccatatcaagtaaattgcatcttgcagttgcatgatctaaacctaggggaagaaggtacacagaattattgaggttgtgcacttttatcctactagatgcgactttcctgtgcattcatatgtgaaacagaaatagataactggctgccatgaagtggagtgataggaagtagacatacagtttcacgtaaatcaacttcccgcaggtaagctcgctgaagatttgcaccttgcaagtttgaaccagacaatttagctccctgaaaaagtgaaaaggatactaatttagatttgtctcgtctaaatggcaattgttggaagagacaataaaaacttttagtatatcttcagtttccatgatgcacaacatgagagatagtatgcctgaattggtacagaggttattggacattgtcaaatcttactgaaggaaccattctagattagtaacacaaaagattatcagcttatcctgggaataaatgcatcacaaattcgcaatgtacaatttttaccttcagattggctccttcaaggttagctcctgtcaaattggcacctgtaaggtctgccctctgaaaatccatgtaaattgaagtattgaacaattggtgttaaaactgatcatgagaatcaaacagcattcaacttattataatatgtgtattgtaggtacaaataagttcacatacggtttctctgcaaagtgacgtacggggaaaaaggtatgtgcctatatggtgctacacataaaaaatgattggcatggatccagcatgcaagatgatatattagaatattagatgctacagaactagagaacaaaagaaagactatatatcgtaaatgttaatgttttttggcttcaggttcatcatcataaaaaaaaacagtttcctatattataagaaattggcagcagtgtccttgcacataataattaatggaacagaatttcagttagcatatagcagaaatacgcagcaatatggagtactgaacacaattttttatttccaaacctgcagatgtgctgaacgaagatctgtttcaatgaagctacattttaccaagcatgcatctgcagaataggctgaagaatttattgcaactactcatttgtttatattttgcagagaaaaggaaaactatgcaggttcaagcagaataatctgtgatcaagtaaaatgtgaaaagaatagaaggtcaagtaccttgcaggtttgcactttgtaggttggctctgtccaaagtagactcttggagatttgctcctacaaactcacacctgcaatttcatattttgtaattactaacagaacctccaaagtccaaaacatgaactagctaaaggagaagagaaactgaagggaaaggcgactctgaaatcttcttactcacgcaaattagcataattgaacgaagatcgagaagcttgaacctcctgcaaagaatacataggtgtttcacaaccgaattccacacattaccaattttcagtatttctcagttgaagcaaaaacacaataggaaattcatcaattaacactgagttgaaatatataaataaatgagatgtaaaaatccaaataggcaattcatcaattaacacatatgcaataagcagaatgatatcacactacaagttctgtacccgaaatttagctttgtaaagattggcaagggaaaattttgtctcctcaatacacccgcaactgaaatcaacttccgataagtcctgcagaacatagggaaaacaaggcacatacaaacaagttcaccgcaagtttacaagaagcatttcagtaacaatggatggcaaactacacaagtgagctttcccaagagcttacaagcttggacaggtcaaggccagaaaggttgacgcctcggaaccggactttatcagcctggatgcacttgatcacgtccttgcgagtcagctcggcctctgaagatcttccaatcttatcatcccaatcctcaatcctttcacttatgcaatcgatcaatccctagaggatcaaatcagaccaaaccaaaaaatcaatgtcaggttctcacacagcattggggtcaaaatccccccacacacacaaccagggtggcaggaggcattgctcatatacaggaagccggtagtactccgcctcccgcagcagctgccggtactcggcgtcggcgagcgcggggacggcgccgtccctgagccagttgagcacgtgccggaacagctccccgtcgcggtccacgaacacggccccatcctcctgcagcgacgaggtcagccgaggagattaggagaatcaaaccacaaccggcagcgaggggcgagcggcgtacggtggtggggaggccgtgggcggcggcgccggagagcgcggcggcgaggagcgacccgggatcccgctgcgtgagcgtgtccgccgtcgtctcgtacctgctgccccctgcatcggcggcgggctcgcgtgagggggtgagaccaatttttggatcgaatcgagcagaaacggatatgctacgggtggtggaagaggcggcggaccgatgttgaggaggatcggcggctgcatggcggcgagcggcgcgggctccggatctcgccgcgcttcgctcttgcggtttctatggcgcgcgccggcgctgggcccgcgtcccgccgcggcggcggcggcgggggaagccgagaagtgaggcgggtcgaggaggagaggtcgcgccggccgagccgagggcagagcacggtacgcgcagcagttgcagccactgcagcctatgatttcttgggatttttttcgaatggtttgaactttgaactttgaaacgataaggtgttttaggctgtgtttagttcacatcaaaaatataaattttgttgaaattgaaacgatgcgacggaaaagttaaaagtttatgtgtgtaagaaaatttcgatgtgatgaaaaagttgaaaatttgaagaaatattttggaactaaacacggcctcaattgtcttttcgttttgaaataattgttcatatcctctccaatataagttttagaaattcatttcaacgtaaaatagatatgtaataaactcggatctttagagattgtgagtgtgtgtttggcattaacaaattacgaagaaaacttcattgttttctatgtacgcgcttttctgaattgttaacggtatgtttttttaaaatatactctatagaaatgtttcaaaaatcatattaaccaacttttcaagtttaaaataattaatatttaattaatcatatgataatggttcacctcgttttaggtattcctcagtcttcttcgttccttccctctcaaacacaatcttgggtctatcgtactattgagagaaaaaaaatttggcttgtgaattcgacgtaataatcaatataactttatattattttgtattataggtctattatattataactaattgtgttttttataatgtcaatgcatatgcaagtcatatcctatattagcaaccatgattagggccactctatagcccaatgtctctttcgtttatctctgatgctcaaagatttaattcaaagggatttttgtctccgtacttaagtttctaatatttaataaagaagaatattgcttaaaaaaatttaggatcgatcaatgcttgaaacatatctataactctgaagaagatgtgcaaacgtagaaaaggaaaagagacgtcacgaaggtttatccaatccaatattaaagccttcgacaaacgaggtgtgactatacgtgactataggagaatgtaaagtattagccatacacccgtaccgtaattatgatataaaatagagtgatttatactttggatcacattcatatccaagttttagtttgaaccacccattatctcatatttttattccagattagatatttttacctttacaacgtttaggactatgtaactcttatgcttttattaaccacattaaacttctccttcgacaaagatgttagctgcacgtaaataaaggagattatcagcatgaaggtgtcgatatgttcgaggttattgatatgcgcatgaagagagtttgagtggtctaaaaaaagataaatatatagcgtagagtgaaaagatgaagtaaagagtggtgtagagtaaattttagataataaaagatagtacaaaatataattcactttataaaatataaatcttgttcttcaatctagtcaacatgtgaaagccaaagtgagatatatatgctgtacactacatcgaagatatacgtgagtgttattttgtggctagtccataagcaatagctattttaattttagtgtcatgttatatgatatctaaacttgaagctgaggttttgggagaatgctagctatcacgcgcctgatgggatcatgggataacaaaatattgggctcttttccaattgccggctcacacaagaggatggtagcccctcccaaccttcatcactatcaacaccgtttcgccgctgccagaaacccccaagtcatgtcaccactgctttagcgccaccgacgtggtttctccagcctgccaccggtgataacctcaagccctatcacccctgcttcgtcaccaccgatgccgtttctttggtctcatcctccgctagcagcaaagccgtattggagctctacagttcggtctactcctctctgttgccaccgaaggagaagaagaagccgtatctgactggtgtattttgtgattcttttttttatgtttcaaccaatgtattttgatgtttatttgtgttggatcaaaatgttgcagtgagaatttttatgatgttttaatttttgtcttcagttcttgtggatttgttgatgtttcagtaattgaagctttgatgttttgtgtatctagacaaagtgttttaatccataattcaaccgtgtttcatcacttaaatagtttgaaagctagtggtgaagcattcttctccaaatactgaaacaacgcctgattttgaagataaaatcagaagtccgatttgtagtttcctccatatttttatttcgaaaacactgaaattttagcatcacgaagttctcaccgagaccgacccgcgcgcttgtgcgtttgtggcactaaccaaaccagctcggtggtcggaatcggatcatgccgaagaatacccgactcaacccaaccccggtcggttcagttccgttccccttctccataaaacgcaacgaaacgaaacgaaaccccccaaatcccccaaacccccacgaagaagtagaagagagaaaaaagctctcatcaatcccacacccatggcctccacaaccgccgccgccgaggaccacaagggcaagcgccccctgccgccggaggaggcggacgaggcagcggctgcgccgccccccgccgccgcggaggaggagggcgagaagctggtgctggtgtcggacgacggcgtggaggtgctcgcgtcggtggcggcggcgcgggtgtcgaagacgctccgcggcatgatcgaggacgagtgcgccacgggcgccatccccatcgccggcgtccactccgacgtgctcgccctcctcgtcgagtactgcgagaggcacgcgccgcactacgacccggaggcctccgaccgcgaccgctacccgttcccgcccttccccgtcgagctcccccccaccgcctcctccatcaagcccgtcaccttcgtcgaccccgacgccgacccgcacggcctcaaggcgttcgacaagaagttcctcgacgtcgacaactccaccctcttcgagatcatcatggtataagcgcaaccacacccccgccaaaccttattctgtttttttctcccccaattggattgtgtggtctctcgattttaacaccgattgttgcaatttgggatgatttgggaggctgccaactacctgaacatcgaggagctgctcgacgacgcgtgcaccgcggtggcggacaagatgagggggaagaagccggaggagatccgcgacatcttcgagatcgagaacgactacacgccggagcaggaggcggaggtcaggagggagaacgcctgggccttcgaggactgaagggagaggaaggcttggcttgttctgactattagaagataggcctccacagattgagttctgaattactgaaaaaacttccatactggtagaatcaaattaggcatcgaatactgcaaaattttgctgtgagttgtggtggatgttcttctgatctggttcagatcagcacaaaacagttagatagagtaaatcggtatgcttattttatatcttgctcagcttcagtaattagtttatttttgcttggatggttctgcagctgtgagatgttctttacctgcctctctgctaggaattgtgaatctgttatgctcaattgctttgtcagggtatgatacgctggctaaatgcgtttgtgctatttctcgccgggcataaaaaaaatttcaccgggcgtgtttgtgttagtcgctgttgctgttcttggtgagttgagattgtcacctccagttttatgcctgctagataggctgcaggattgatgattaggtgtacatggaagattatggcagaaattaagttagcatcctgcaagttttagtgtgaagatgagtatttttagatttgttcatatcagtactaattgccttttttagccattcatctctgagaaatcttcgcttgctagtatcttgcttagtctggcagtgttatttctgtttgaatgcttgataccttctgcattctgttctcagctgtgaagtgtgcatttctgtgatgtttagtttgcttgatcagtatgttggtaccccggacacagattgatgattaggcgaatagagaagattatggcaggaagttaaccattctgcaagttttagtgttgaagatgtgtacatgtatttagattggtttatatccgtactaattgatttgtggattgcacatttgtgatcaagttagttttttgccgtttcgcaagttcatatctgagaaattttggattcctactaatcttgctaatttagtctggcaatgctttattttctgttggcatgcttgatgcctttgcattctgctctttgctgtgaattgcattttgtgatgtttagtttgattgatcagtgtgtttggtaccatgaaaacaactggtgtttgtttagtgcccaatcttgcttatagtgccttatctagttatctagccataccatcttgtgggcatgtatacatagaaattatacaatatgaatgttgcctgtacaaggctgtgaatgacattaggaaaactttgcgaattgatgcattcagagttcaggtggttcatacctggaaattatgaatacttgagaagtcacatgtcccatgagtgctataaaaggattgctttactcaaaatagtgcggatatagccatattacctgggcatttatgttctaagattttctggagtttgagtatatatatacttttgatatatattgtttttcaaaatgttggagtagcatgtttagttgacgccagttgcaacgcactgacactaccacctcagtcaagaataaaattcaagactattaaggaatggcaactttagctcaaatttctgagagctacagattacaattaacttgggcacttttggacaaaaaagttaaaggtgttatcaaatttactcaaattcgagttcccttttgctatctaaagcaagcgacgatcgatatgttggtggtagaaaaaaaaatccctcaaaaagcaaaagaaaaatgaaatctcactcaggtgtaaattgaaggagggcatttgtcacgtacgcttattatatctgcaacagatttcagagcaaaaaaccaaaacaccggcatgaaggggaagaacgggcaagtttgatcaccggcgtcacatgagccacgacgacctcagcaccagcgccggcgtccgcttgtcgccgtccatggcgatgacgaggcccggctgcaccctgccgcccttgccgaggtcgaagctgaggaacccttccacgtgcggccggtgcgcgttcctctccgccgtgccgccgatccgcaccccccacccgagctcgtgctccgggcagtcggacacgcagactccccaccgcgccaccggcccgcgccgcctcgccggagtcgccgccgccgccgtctccatctcgacccagccttctgctctcaaggtgtcgtacatgtcgcagtccaccatgacggccaccgtgtgcgacgac

SEQ ID NO: 20047 - DNA, 5343 bp, Oryza sativa
cgccgaggtcgctgaaccgggacgccggcgagcggacctgccacagccccgacaagctgagcttgatgtcgtcggccgtctcgtagctcaccttgccgaacgtcgtcaaccggttgggcacctcgtgatcgccattgccgccgccgccgccgccgccatgttcgcctggagaaccaaagatcagctcagctatggaggccctgaatcttgatcccttgatgctcacgccggcgccgcagtcatgacgctccgaatacgacggcggcccgccggacaacgctctgctctggatactctgcggcgaacagtttcatcgtcagacaaaagctcgccgccgcaaccgccaatactccagcgagctcagtggcaagttacctggatcaggctcgaaccgtgcaagaagttgttgcactgggcgccaaacgggacgagggtcatcgacagcaggtcgctgacgtgggcgcagtactgcagccgggtgagctccagtggcctcccgccggccgccgccgccgccgccgccccgagcccggtggcgagctccgcggcgacggtgtccttgccgccacgggtgctcgactcgaacacgaacctggagccgagccccgtcgtgttcctggccttggcgagcctgtccctcgcctgctcgagctcgtcgccgtcgacgaggagcagcgcgccggccgcgtcgagtgcgaccttcacccggacggggagctccgggaggtggaaccccttggcgctgctcgtgtacagcgcgacgaggcggtcgatctgctcgtgcccgtccatgtgcttgatcatgtcggcgaacttctcccgctgcagccgcttcatgatctcagcctgcaaacgcgagtgtctcagtgaagaaggtaatcgccatggttgctgatcgagtgtgttcgagctcacgatcgaggcgtacgcaccgggcggttgtggtggtggggatgctgctgctgcggcggcggccgaggcggaggcggatgccggtgagtcaattggccggagttgccgcggaaggcgaagcggaggagcgcctcgccggacctgagcaggctgcggaagttgtcggcgacggtggggatcggcttcggcgtaggcagcggcggcggcggcgacagaggcgcgggctcttgcggcggcggcggtggcagcagcagaggcgtggggttggaggaggaggcggccatggcgaggcggctgctcggaggcgacaggtggcgcggggtcaggtggatttcttctttgcttcgaaggggatttgagaggagtggagtactggagtgtcgctaggcgcttcgattcccgcctttttctttccttcacggctcccttgttcggttattcttgtgtgcctttgcctcttttggcttttgcttttgctttattacctttcatttttcgatgtttcgatgtattcggccttgtctaatctccatttttagtctcgacgtgctatttacgctatattaatttgtcttgacttgtatgtgtgtgtgagagagaaatgtagagggggtcgggggcgtggcatgtggatttcgattgaatttaaaggaaaaagtacgaattatcctctaaactatcgcggtcgaccgaattatccccctaaaccacaaaacctaatattttttatccccaactatgcaaaacggacaactaaccccccgcttcaatccacgttggttttggtcctacatggcaatacaatcagcaattcttttaattaaaaaatcggtggaccccacctgtcagctcccctcctatctctatcccaatctctctctcttctcactctcctcactagcacaggccacggcggcaccgaggatggcggcggacggcggaggcggaggcggaggtcacgcggcggccagcagcagaggcgaaggcagagctccccgggcagcggcgcgcggggacggccggcggtcggcgcgcacggcctgtgaggaggaacgcggtcgcgatggtgagtagcgcgaggaccgcggcagcgccggcggaggcgacctgagcggcgagcggcggaggtgaaggcggagctccccgggcagcgggtggcggaggcggaggcagagctccccgggtggcgggtggcggagacgaaggcggagcggtgcggccgacggcggaggcggagcttcccgggcggcgggcggcagaattggagctccttcggccgtgccccgcgcatcaccctcctactcctcgtcgttgtccatgcccggaccacgctgcggcgctccaggcctagcggcgccgcgcacgcacgaggggccactcggcggcggcgacagcgaccaacaacgccatggaagagggcgtcgacggcggcgacgcgggagcaagcgtgtgtggtcggtggcggcgaggtgacgacagtccggcaccgcatggagagggagaaggccgcgccggcgagcttgttcgcgcgggaccggcagccatcactactctcccttccatcctccctgagaccggtggccatcgcgcgtctcgtccccaacttccgctgcttttctccatccttcctgacctcggtggcctctggtggccgatgtcggcgagagacagagagagaggggacatggagaggctgagagaggatgagagagatctgacagtgggccccactaattttttttaaagaattgctgactaaactgccacgtaggactaaaaccaccgcagattaagctgggggggattatttgtccggtttcaatagttcgggtgtagaatgtctggtttttgagtccgagggtgtatttcggtcgacctcgatagttcaggggggtaattcgtactttttccaatttaaaacgtctgagttgacgatgagatttatgcatgatttctctttctttttttttaatgatcagctcgagacggcacgatgatttattgaatagaatatgaagaagttacaaggctagtacccctataaagcaatagttaggaaggaaaaaaaacactaccatgcaccgccagcacctacacataatcaaggagaaagctagcatcagactggacgccactaagcgtgatcgatcgccgctaaaccaacaaggccgtgagtagtagtagtttggctgttgctcttggtctgaggcatatatatgagaaccaacttttgtgagcatattgtgcatgcttgagcttatgtgaagcctcttctctcctctctagagtgcattacttacgaattgagagtggtagaggcattgtgcttgtgcatgcgattgagctttggcgcttggtaagagttaagtgggtcttgacttgttactcttagtgtttgctgacatctagagggcttggtggcggttgtgacccagtgacctctacaaaggagtttgtagaggaggcccggtggttgactgtgaaggtttggagctcacctatccagagatcggagaagagataccactagtgatcgaggcttgggagactaattcaggactggctcccgccttgcctatcccttgacgaaggggttcggaggctcggtggtttaagtggtgaagttgggctcacctcaacagtggcgtaggaagccagtaagcttccgaattccaaacatcgggtgaaaaaatcttctgtctctggtctcttttatttaatgccaatttactttgaacaagaagatatatgaaattgatgtatacatattgccccgaaaaaaaagatagtatatatatatatatattcaaaacaaaagcagtatgttatgatactacttttatcatggcaaaatagccattttcgtccctaaactatcgcccgaggctcagtttggtccctgaactatcaaattgtccaatttcgtccttcaacaattgatttcgaactcaatctcgtccgttccccttgatagcacgccacgtggccagctagacatgcgaaatgtccgtcctgcccctcgctcaattctttacatgttggatggctgacggcgtcgtcctcgtcttctctgttggtgcggcttctgttcgtcgtcgtcgccgccggggaggaagacccactagccgccggtccccagttctctttgcctcatctgcttcatccattctatctcgtccatctcccccatctactcgctcctcgtttcctccccgatctggtcgctccattgtggaggcggcatccgttgtgcctgtatccccatggagcatgggtccagggaggggagagtgagaaggtcgatgccaagaatgggagtagcgccgaatcccggagcatcgagttctggcgctcatggagctgcgcgcgcggtggaggtgagtacagagctgttggcgctggggctagggttgatttgaattggggattgatttgttttttgataaaaattcgtcgatttggtgcagcttgaaacattgcttgaagaacattcagaggggatgctggtgaggacagggcttacatgtcggcatggattcttcccaattttgtgttgttgttggtctggtccagacactggaagaaggttcctggcatgctcccaagttgagcagccctgtgatttcaagtattggatcgatgaacaatttgaaggtagagcaaaaagggtgattcaggacctagtttccatgaggcacagcatgtcggagctgtacgaacattcatctagacaatgggatgatatgtatgctgatcgacagagagtaaaacaacaaattcatgaactaaaatgtactattaaagaacaaagagagtgcattgtaatcttaatttgttttagcattgtaattgcttgtggtatatggctcattgtgtaaccactatttgaggcaatgtggaatgaattgaaaaacaattttaacatgtcttatgctcttgtccagaaacaaatttaacatgtcttatgctcatggttttgacataacaaatgcaagcgttcatgacatcatgactaactgatacaaaagcattattgctttgggactatatttggcaagctacatcatcttgttcttgaaattcagcagcccatttttctgtgatgagctgctttgggcagatactgatccacgaccaagtgaagttgaatggatttttgcagaggcatgcccaccttttacattgattgttgcctttgcaaatgagctagcagtcccagcattggtttcaatgacaacagaagcactccctccagcagatgccttcgccgatgcttgagcacttgacttcgcagatgcttgagaactctctccaaaagataccagtcttctcttatggccagactgtaaacaacaaagccaatttaggcaaatatacaaattacttaggctatagcatggacatgtcataattattacctaacctgtataa

SEQ ID NO: 20048 - DNA, 1480 bp, Oryza sativa
ttagcattgggcaaagatggactactaatcttggtgttgaaccattaatctgatataaattgtgttcaaaaaatattttctgcatgtaaattctattgaagtagccagagtcatgctggatatgcttaatgcttttaatccttcaataagcacataatgggacctgaaatccttaacttcactaatatgtcatatattatctttattaatatgcatatcttgatatgtttttgtccacttttggaacaaaaagtcactagttcttcccattttcctttggaaaagcctagaaaccagagcaaccctgactaacctcagatctgttaaaattgcagaatatggtggacaagataaaatcttcagtggcacttcctttccataatttctgtggcggtgcaaaatctccggccactagcattccattggaagaatcagtgcgtcctgaaccagaaagcatccagtatagtgatccagcttgtcagacggaagatgttatacagttgggcactgaaacagatggtccccaacccccagaaaatcacaataaagatggacaaggccaccttgtacctgatgacatggagatgtctaggtcccctcctgagcattcttctgctggtgccaagcaacgcttccagtcactcatcgaaagtagaaaccaacaacagaaccacaagccacaccaagaaccagaatttaaccaccagctgaagccttttgattacgctgaagccagaaagaacataacatttggagagcgtaagccgagagaatcaaagacaatgcagtggccagggcaataaacaaggattctggagataaaggtagaacctcaaaccaattcggtgctggagagaacgaggggaatcgccagaatcctcgggggcgacaggcattcccgccttctggcaacagaagtgctacataccattagttgttaagatgtataaccagagacattgtgttcttgtaagaggtattatgttcatcttagaggggaagtgtattgtctctggttttcatcgttagatacttagatcatggcaatcttttgggggacaatgtagcggctttcttagtgatctatcttgagagaagtaggaaagcccttctggctggtggtgctgggttttaactgaacatgattcagaacattgaggatacttataccagatattgaatcatttcagtaaagcacgcatataaaatatgcttgcttagaatgtggaaatttaagatgatttcattagtaaatactgctatcataatttccctcaaaaaaaaaatactgcaatcataattctagatttctagtgtagttcgtataaatatgtgccttagagcaggtacgatagcgctattaagaaaggctccaaaacttattaatcagcctaatacaaaattagggaaagaaaatcgctaggagagaaacaagcgggcgcttgtattagcgccggcttgcacagcgccccacgccgta

SEQ ID NO: 20049 - DNA, 3074 bp, Oryza sativa
aatccatgatattatcatcttgaaatagggcaaatacatcctcatctgcatactgtgttccagattcttcattcccacccatatcaactgattcggtgtatatatctactgttgtagcagttcccagctcatgaatcatgtccaaacatgacttgtcatctacaagtaacctcataccactattcaattctgcaccaatggcaaccagtacatcctaacagattgaggaaaagttgtgtgatccaataggtggccttcaagttcagggatagagatcttgtccttctctatgtgggacactccacaatccccattgcaatacgacatctttgactcatcaagaacaaattccccattaaaatgaaattgaacttccagtacctcaaatttagacattgcttcgtggccctatagatcaactatatggtcaaatttaaacattctacaatgaaatcaaactcaagtgcaaaactagtgaagtgccactctcttacctttgcagcacgtcctctcctcttcctgtgtcttggttgcctatgagcagtccgtctgcccaaggacaagggcacgcctccaccaggagaaggggtgcgcctccaccccttcgaacacgccgtcgtcctgtactgatctccgccccagcccccaagccaaaaccctaacctacctatgtagctgccatgacgaacagagaagacgaggatgagagggaggcaacggggagcctgaaacgccgttagccatccaacatgtaaagaattgagcgaggggcaggacggacatttcgcatgtctagctggccacgtggcgtgctatcaaggggaacggacgagattgagttcgaaatcaattgttgaaggacgaaattagacaatttgatagttcagggaccaaactgagcctcgggcgatagtttagggacgaaaatggctattttgccttttatcatcgatggaaaaggagtatagttgtttgaaaaaaaaagtggaaaaagtagtatctatcccagaaaatagtgcatcgtcggcttcgtcgccatcagcacggtgtggcaccgatagcaggaagggagtagcaattagcagctggcaccgtcgcctgaaatcgaccaagggacgaagcacgctgactagtgcaacggatcggctactcggctgcgcttggatgaagaaacgccacgatcattcatctctgcttcgatctgatgcatggttggttctgctagcacgccgccatgtcgtgccgtcgccgatcgatttaaaaaacggccgcagcagccgggggagcgcgagtctgtaagcaatagaaatagattaatggaagaactaaacagaagcttcgatctccatgcataaacaagaagcaaagaacaggaaagtacggaaggacatggcagcatagaatgttacggtgcccatcttcctggcttgatgagttcgattactccgttgcacgcccggcggaaggcaccactatcgcggcgcgcggacggcgccggtacaccgaggcacagcctagagtcacagcagagcagccgtccggcgagggtgactagcgatcgacgggatgaaagagacaccgcgccgattggcagctgggaacgcggtagatcgaactaccgccgccgacgaacttgctatttattaatgaaacggatcagtattgttgtgccttccgattaggccggccgggataattcagaattaatagaatttcttttcaaaaagaaaaggatcaaacgggtttaatataaagacccggtaggagggtgggatggattgatcggtgcttacctttgatggacggtggattagagtgggagtacatacacctgggtgtatagaaacattttccaatatatatatatatatatatatattctacatccctcccctaaaataactattttacacctccccttctatgggtcaaacccacctccctcactctccctagggcccaaaacccccctcccacctcggtcaaagccccctcccgccggtcaaacccgagtcaaaccgcccattgactctctaccccgcccaccactttgctgttcacgtctcgcaggacttccgcagtaacataacggttattgtgcagtaacatgacaactttctcgcagtaacaacatcgaaaaatagtcatgatggatctagttctcgcagtaacaacatcaaaaaatagtcatgatggatctagttttgttaagtatttttttacgaacatcatggtgcagacggattagaaaaatactatataacctgagagatattgctctctaaagattgagatttacttttttttaagttcttgtctcactgtaacggcgtagtaacgcgacgatcaatatgcagtaacatgactactttctgcattaccaacgttataaaagcatttttgtctcgatcatcgtgtagtaatatgactattgtctcgttgtaacatcgttttaaagtattatagtgaaaacggttctaaaaaataatttgcgatgtgagagatattattttttaaagatttcaattctaaaaattcacttatactaagcttgctactacgtatctttgtatggataaagagaagtacttttagcacttgtgttaacttgtgaccatgcacatacacttttttagcacttgtattttatataagattgagatttaaaaatttagctatgcgcaagcagtggtactgtagtagtactgttactaccatatgttctctgttactgcaatttcatcatgatgttactgtaaaaagtgcagtaacgacctataaattttgcagtaacggcctataaatttcacaataacgtatcgtgttactgcagttctgcgataatgttattgtcgaatcataataataaggtatgatttcctacagtaacataacgggtttgtgtttataaaatttgaacagatatacaggtgaattggttaggagagtttgttatgaaccatgagatcatgggttctagtcttgaattcagcaatttatttttattttttctcaaaaaagaaaagaataggtggaaaaataagagaaaggagggagaagaaaaaaaaagaggg

SEQ ID NO: 20050 - DNA, 1371 bp, Oryza sativa
tcccttctatacccctgaattttgctcaatcccttacatacctctgaattttagtttggatccctttcatgctctttccgctagttgaccgttagttgaccataaaattcttttaaaaaagtccattttgccctttgctatgaagaatcataataaattaatgaagtacattgttagaatgtaaaaatttattggatgagactattatatttatgagtctgtgatgcaccatattatttgtgacaaatttacttttacatatgatataaaaatttaatacttatttattagttattaaaagttttttatgtagcatatgtgttttcatagtaatacaacatatttgtttattactatcagaacacatatgctaaaaaaataaataagtattaattttttatgtcatatctaaaagtatatttatcgcaaataatatggtgcataactatctcataaacatattagtctcatataacaaatttctatgctccagcaatatactctattaatttatatgcttctttataccaaagggcaaaatggactttttcataagaatttaacggtaactaacggtcaactagcggaaagggcatggaagggatccaaactaaaattcaggggtatgtaagtgtcacgcccagaaatttagcctaaatttccagactattttgtgtattaaatccctgttcaggaatcagccaaggtatataaaacgacaagtaataaacagttccaaacgtaaataaagcgtaaatacttacagaagaggctcttagtcctcacaccaaaaagaaagcagcagcagcggaaaaaggcgatcctagcggggattcagctccactccacaggcaaaactcaactgggtctgagccttggttctctaactccatcttcagctcagaagcactacacttttgaaaagggggaaataatagcaaggctgagtacaaccaccgtactcagcaagccacaccaaagatgcagacgtgcaagggacacaaagatggcttgaggctatttgcataaaggcggttgtaaagcattttattgagcaaatcagtaaaacggttgagtcatttaaggtaatattaaatctccactgatcaacgctacaccacgttgaacaggcccaaccaacccacatgaactacagtgcattggggcgatttattaagtgtgagactaatcacggttgacggagctcgaggctcctcaccgggagaccgcgcaggcccccctttgccggttcggccgggggcttagggtgagatcccaagctctctctctctctctctgtatgtggaaggatcgtcagccagcaagaaacgcgagacacggacgatctatacaggttcgggccgctcggaa

SEQ ID NO: 20051 - DNA, 13574 bp, Oryza sativa
tgagcagcgcgcgaatctgggtgagcagatttgtctcacccggagatacggtaacgccgcttcggtcggcgagcgtaattaacgcgcgcacgatacaatccattttgattgccacaaccgcatatccacttcatgcgccataagcgggcgaatgggattagtggaagcgtgggcacgggaaacgagggagcgagatagcgagatacgagggagcgaggtagtgggcgcgagaaacgaggagccaggcccagcgatggcaagggtataaaagcatcgaggaaaggatttgcttccttcctttcgccattgttcctcttgccttcgccgcctgagctctaactctttctctgccacgccctactttcgccacacgcgctcgttctcaatcatctcttcctccaccgccatggcacggggctctgctctgctcgacggcagtgtattaccgccttcccgcatcgtgaacgagaggcacgccggactgccgcgccgcttcatgccggagtccgccaccggtcgggagatagtgatgctgggcgaagggcgcccggcaccagactacccggggcggtccattttcttcctccccttcgcaatggctgggctggtcccgccattttcctctttcttcatggatgtcctggagttctacgatctccagatggcgcacctcacccccaatgcggtgatgacattggccatcttcgcgcacctgtgcgagatgttcattggggtgcgcccctctcttcagctgttccggtggttcttcaccgtgcagtcggtgtcaccgccgtcggtggttggcggctgctacttccagccgcgggggccggtgttgaaccgctacatcccctgcgtcctccgcaagaagtgggacgactggaagagcgactggttctacacccccctcgccaacgaagcgcgcctccgacttccaagccagcccccggcgcaggtctccagctggcgggcgccggtagatctgggggaggactacgacgccgtcctcgaccgcctggcgggcctgcgatcccaggggctcaccggggccatggtgtacggcgattacctccgtcgccggattgcgccgctccaacggcgcgcccggagcgcctgggagtacactgggcctgaagactacatgcggacccaccagggagccagatgggattgggctcccgaggacttcaagatcgtggtccaaagggtgctgaatcttagctccgcggaggcgtctcgcattcctcaggagatcctccccctctgcagcgatcccgaccgcgcctccattctaaccattatgatgggggtcggggcctcagaggagagagcccctaagggccacgacggcgccggcgggggccgccaggaagaatcagcccccggagggggccgtgcttctgggccccgcgacgggggctcggggagcaaccgccctgccgacgcccgggggaagaggaaacaaggaggaacacctcccccatctcctccccgagggggcggggcggcgcgtgccagcagccggcgcccggagggggccgcgccgacgtcgcagcccgagggggagcgcaaaaagaaacggctccgcaagacgggggagacggaaccatgccggggaaatctgatttcccctccaaagtggtcattcaaccgaccccctcgcaggttcgtctcactctcattgcaaccatctttctcccaaaagtaagtttttttcttactcattttgttcgtcttctggttttttcttctgcttcagcaatgtcccgtcgcattcctcccgccaccccaagtccggccggtccgaggccgaagatccagcggccgcagaggagcggaggcgagaatctgaccggcgtgaagccgcagatcgccttcgggaagctgaagaggccgctcgggaggccgcccgggttcgccaagcggaggaagctgctcgggaggaggccgcccgggctcgccaagccgaagaagctgcccggaaggaggccgcccgggttcgccaggctgaggcgacagctgctgctggcgcgtcacttgggcccactccctcgggcggccctcaggcgacatcctccgaggcggctcgcgacgaggccgcgggcgcatcgcctgggcctacctcaccgggcgacgcccaggaccaaacgggcccgggggacatccccgagcccagcgcatcctccggggggccgagccgcatcgccttctctccaaggcggctcttctcctcatcttccgtcgccccgctgagcgccgagcccattctgcaggccttggccgccgcaaacaccgcggtgctagatgggttcagcgcccaagtggaggccctgcgcgcggaacgagcggagctcgaggccgcatgggcacgcgttgaggaggggcggcgctcggtggacgccatggtggaggtgggccgtaaagctcaccgccgtcacgtctcggagcttgaagcccggaaggcggcgctgacggagatcgctcgtgaggtggaggaggagcgagcggccgccctcattgctaccaccgcgatgatcgaggcgcaagacaccctccgccttcagcacgcaagctgggaggcggagctgaaggaaaagctcgacgccgcccaaggggtccttgactccgccgctgtccgagagcggcgggtaacggagactgaagcggcgtctcggcggcgcgaggaggcccttgaggcccgtgccatggcgctggaagaacacgccggcgccgtggagaggggcttgacggaccgcgaggccgccgctggtctccgagaggcgacgctggcggcgcatgaggccgcctgcgccgaggaggagtccgcgctccgcctccgcgaggatgcactcgctgagcgggagcgagctctcgaggaggccgaggccacgaccagacggcaggcggacagcctgtcccttcgcgaggcggcgcaggaggagcaggcgcgccgcaatcttgaatgcgtccgcaccgagagagccgcactggagcagcgggctgctgacctcgaggcgcgggaaaaggagctggacgcgagggcgcatatcggtggggcggccgcgggcgaaagcgacttagccgcccgcctcgcagctgccgaacacaccgtcgccgatatgcagcgagcgctggactcctccaccggggaggccgaggcccttcgcttggcgggcgagattgggcccgacatgctttgggatgcggtctcccgcctgaagcgcgccggtcggcaagcgggcctctggaaaggccagacgacggtgccccccaccaatctggaaggcctcgctccgcacctccacaggatggcctgggttctcgaacaactccccgaggagcttgagaagaccatcaagtcatcctcaagggacctcgcgcggggagcggtcgaactcgtgctggcgagttaccaggcccgggaccccaacttctctccatggatggcgctggaggagttccctcccgggaccgaggacgacgcgcgcgcgcgggtcggggatgctgccgaccacatcgtcaacggcttcgaggggtcggcccctcggcttgctttcgcccccagctccgacgaggagggcgacgccagcggtgaggacgacggtggcgacaaggccggcgacccgggcgcgttggaatgagcccccgagcccccgccaatctccaattttttcttttcctttcttctaaggccttcatgcctcttttgtgtacaaattaacttaatctgcaatcaaaaatgatgaaaaatttctatgttaacttcattttgctatacatatgagttgaggatgatttgtgccgtggtccttttgcgccttagcttgaaataagggctcgtgcccaagtcccagtcctcgaatggctcgggtcggggctagtgcctggggagatccacatgtcgagactggccaggccgggaacgtggtgaccgaggggtatgggtgacccgattgtgggtttttgccgattcccccccggagttcaccacgccccggggcacggctcggttctgggccccgtttggcgattttagctgtccgaaccgaacccccgagggcaaggttgaatacgagtgaccttattttaagttaagattcttcagaaggaaaaacggcacagacacaacctttaggaaattggaactgcttttattgaaatgctgaaataagaaaagtaagactgtgcatgtgtggtagcccccggctaaccctgcacacccgaggggggtgcggggttagcccgagcccaaaacctgacactcgaccccccccccctcctcaggggtagaagcgacgaaggtgttcgatgttccacgggtttggcagctcagtgccgtcgcccgtggccagccgtacggagcccggccgggggacgccgatcactcgatacggaccctcccacattggtgagagtttgctcaatccagcacgcgtttggacgcggcgtaggacgaggtcgtcgacgcagagtgatcgggcccggacgtggcgctgatggtagcgccgcaagctctgctggtagcgcgcggctcggagggccgcgcgccgccttcgttcttctaaatagtcgaggtcatctctgcgaagctgatcttgatcagcctcgcagtacatggtggcccgaggagacctcagggtgagctcggatgggagaaccgcttctgcgccgtagacgaggaagaaaggcgtttccccggtcgctcggcttggtgtggttcggtttgcccagagcaccgctggcaactcctcgatccatgaatcgccgtgcttcttgagaatattgaaggtcttggttttaaggcctttgaggatttctgcattggcgcgctccacttggccattgcttctggggtgggcaggtgaggcgaagcagagcttgatgcccatgtcttcgcagtagtcgccgaagagttcactagtgaattgggtgccattatccgtaataatacggttaggcactccaaaacgggccgtgatgcccttaatgaacttaagagcagagtgcttatcgatcttgacaaccggataagcctcgggccacttagtgaacttgtcgatcgcaacatacagatactcaaacccgcccggggcccgtttgaacggtcccaggatatcaagcccccagacagcaaatggccacgacagtggtatgatctgcagggcctgggccggctgatggatttgcttggcgtggaactgacacgctctgcatcgccggaccagatcgactgcgtcattgagagctgtcggccaataaaatccttgacgaaaggccttgccaaccagggtacgcgaggcggaatgggctccgcactcgccctcatggatgtcagcaagaagctcaacgccttgttcctgaggaatgcacttcaggaggattccgttagccgcgcgccgatagagggtcccttctaccagcacatagcgtttggaaatgcgttgtacgcgttcactcccttcgcggtcctcaggtagagtcttatctgtgaggtatgtttggatctcagagatccaagcaatcaatctaagggagcttggagcgctcccttcgggtcccgaggcctggactccgacgggcctcgggggccggtcaggcgcatccgtctcccctaagggatcgggtcgcgccgacggctgggtaagcctttcttcaaaggcgcccggtggggtctgggctcgcgaggacgcgagccgtgagagttcgtcggctatcatgttatcccgtctgggcacatgccgaagctctattccatcgaaatggcgctccatacgccgcacttggcgtacgtaggcgtccatctgtgggtcagagcaccggtactccttacagacctggttaacgactagctgggagtcgcctaataccaagaggcggcggatccccagtccgactgccactctgagtccggcaaggagtccctcgtactctgccatattgttagtcgctcgaaagtcgagacggaccaaatatctgaggacgtctccgttcggagaggtcaacgtgacccctgcaccggcgccctggagagacagagaaccgtcgaactgcatcacccagtgggcggtgtgaggcagctgagaggggttcgtgctggcctcgggtattgaaacggtctctggagccggggtccattctgccacaaaatcggcgagggcctggctcttgatagcgtggcgtggttcaaagtgcagatcgaactcagaaagctcgattgcccattttaccactcgtcctgtaccctctcgattatgcaagatttgaccgaggggataagacgtaaccacagtgacccgatgcgcctggaaataatggcgcagtttcctcgaggccatcagaatagcgtaaagcatcttctgggcctgagggtatcgggtcttggcgtcccggagggcctcactaacaaagtagacaggccgctgcacccttcggtggggccgatcctctctgctaggggccgtatccccggggcgttcttcgtccaagtggcctctcggggcacactcgtctcctgcgctgatgacctcggggttcgaagatgacaggtgcggccttcccacagtggcctcggggccgtcctgggggtcgggggctcctggcgtcgtcagacacgcgggcaaagggccagctccgatcgtcaggggcttcaggcctccgttcggctcgggggcctcttctccctgctctctcccgggtcgaatcagcacagggttagcctcggggtcaaagggtggtaggtgcggccttcccacagtggcctcggggccttcctgagggtcgggggcactcagcaccgtctgacaagcgggcagagggccgactccggtcgtcgggggccttaggccaccgttcgactcgggggcctctcctccctgcctgctcccgggccaagtcggcacagagtgggggtacgcagaatgaggattgtcctcatcgcgctccacaaccaacgctgcactaactacttggggggtcgccgctaagtaaagtagcaggggctcatttggctccggggcgactagaactggaggagagctgagatacgccttcaactgggcgagggcattttcagcttcctccgtccaagtaaacggccccgagcgcttgaggagcttaaataagggtagcgccttctctcccagcctcgatataaaacgacttagggcagccatgcaaccagtgacgcactgcacatccctaagtttgctgggggggcgcatccgctctatagctcgtatcttctcggggttggcctcaatgcctcgggcagagaccaagaacccgagaagcttgcccgcaggcacaccaaacacgcacttatcggggttcagtttcatgcgggcggagcggagattttcaaaagtttccgctagatctgagagtaaggtctcttggttgcgcgtttttacaaccaagtcatcgacatacgcctcaacattacgtcctatttggctacccaaagaaattcgagtagtacgctgaaaagtaggacctgcattctttaacccaaaaggcattgatgtataacaataggttcctacgggggtaatgaacgcagttttttcctcatcctccctagccatgcgaatctgatggtaaccagagtatgcatctagaaaacacaaaaggtcgcaccccgcagtggagtcgacaatctgatctatgcgaggcagggggtaaggatccttaggacatgccttgttaaggtcggtgtagtcgatgcacatccgaagcttgccgttcgccttgggaacgaccaccgggttcgccagccactccggatggatgacttcacggatgaatccggcctccagaagtctcgccacctcctcgcggatgaaggcttgacgttccggggcctgccgccgcactttctgccggaccggccttgcgcccggccgcacggcgagacggtgctcaatcacctccctggggaccccgggcatgtccgctggtctccatgcgaagacgtcagcgtttgcccgcaggaaggagacgagcgcgtcttcctatttgccatccagaagaccaccgatccgcgtggtcttggatgggccgtcgcccaaggcaacctccttgaccgggacctcgtcgcatgtgacgatccgttgcctcggggcggtgggggcagaagggccaagcctctcgtcaccaccctcgggcttggacgcagcagcgaggcggtccgcgcgctgctccatgcaagcgagcgcgactttaagatcgccatggacagagatggggccacccgggcccggcatcttcatctggaggtaggcgtagtggaccgccgccatgaacttcaccaacgcgggcctccctaggaccggttgtagggcagactgaggtccgccacatcgaagctcacccgctccgtgcggaagttggcgggtccaccgaaggtgaccggtaggtcgatgtgacctaatggccacgtgtgccccggcgtcacaccgataatcggctgggacggtcggagcaccatccccggggccttgatggcatcgaaagccgcgggggaaaggatgttgagggccgctcctccatctacgaggacacgtcccaacttcacgttgcagatggtgggggaaaccaccatcgcaacctgccctccccgggcaatgcacggtgggtggtcggtctggtcgaaagtgagagcaacctccgaccaccgcgcccgacgcatcgcctcatgagtaggggccatggccagaaactctcgcttcatagccttgaagctccggcgagagacgtgagcacacgctcctccatcgacggtggcaatggtggccccaggttcttggaaacctaggtcatcatcgccgtcatcgatgtcaacagcgggggccttctgcttggcctcacttcgccgtttgccggaaggatccgccggggacttgccctcacggcgttcctgcctcctgtcctcctcccacttcctcgttcgctcagctaggtttttgactgcacgacagtccgcgagatcgtggagggaggtgttgtggacggagcaccacctgccggcggggcgctccctgctgggagtaccagcctctttctttttgtcgctcgcaggcctcccctttcgagtggcccgcggagcgccctcgacggcgaggacatgaccctcgtcgccggaacggtctgacctcttcttcctcctcctgtcacgccgccctgtctgagcggcggatccgggggcggccgaagctgccactccggaaccggaggagttccatgtccacgcttcctccttacgagccactcggtccgcgagctgaaaaagctccgcggtagtctggggctctttggaagcgatcttttcgagcatgcggttgtgccgcacgccccccctgaacgcgtagatcaccgcgtgtgcagggatgcatggtatagtattgcggacttggcaaaaccgctgaatgtacgagcgaagcgactcatcatcgcctcgctgtactgcatgcaagtccgcttcttcgcctgggcgcggatatgtgccttggaagttcatagtgaactgttggcacaaatcttcccaggagtggaccgacgcgggtggcaggttcattagccaaccccgcgcctgtccttttagggccatgggaaagaagttcgccatgaccctgtcgtcacccccagcggcctcgatcccggtcgtatagacctggagaaactcggtggggttgacgctcccatcgtacttctcggtgatggtgggccggaaccttgggggccaacggacattccgaagactcgccacaaaggctctacagccaacaccaccggccgggggcacggagggctgatcctcacgtccatgtcgaggtgacaccctggacgaagaggcaccctccattgcgcggggagcacgccgatcactacgtcggcgctcaatgtcgaggcgggcatccggctccccatgctgatcctcccgagtcgaaggtgtcgacgagggagtggcagccgaatgacgtgcagccgccgccgctcgccgtgccctccgtcttgacgacgcggaaccggtagtggcggcgcctgaggtcctggtggtggcggaccgtccgccagcacccaggcgttgctgcgccgtcatgaccaagttggccacgtcgtccagccatcgctgggctggagactccgggtcatggacgacaggcgggtgtcgtaggagtgcgccagcagcctgaagcgcaccctgaggcgtgctgccgtcgccgtagacgaggaggcgacgctccccatctcgccgttctcctgcatcacctgcgactggtgatgccacggatttgtcgaccctctcaagcgcctccccctgcttagggctttggcgcggaggaggtggagtacgagctcgacggcgtgggtttggctccccgtcgtcgccgctcacactcggagagaggtcgtgcgcctttgcttgctcagccattaggttgaacaagggaagcttggtgcacacggaagagtatgagagctcagaaaaaacacgctgagccccctacctggcgcgccagatgacggagctcgaggctcctcaccgggagaccgcgcaggcccccctttgccggttcggccgggggcttagggtgagatcccaagctctctctctctctctctgtatgtggaaggatcgtcagccagcaagaaacgcgagacacggacgatctatacaggttcgggccgctcggaagcgtaataccctactcctgtgtttttgtggatttgtgtatggacaagttacaaagtgtgagcccacctctccctcgttctaggctctgaatctggaaagaatcaacccccttctctatgggcaaggtcctccttttatacttcaaggggataccacatgcacccttctctttccaaactggactgttctttttctctttaatgggcggagatcggtacggtttccatccgggagcccttctgatgggacagcccacacctacctccactcccggcggagacggagatgacgcgggatcgtggctgcccgttgctgatgcgaccagtgtcagaccggtcattcttgtcccccacgcgtcagtttaacaacgtgcatgtttgcccttcttcgagtaacaccttgcctgtaatggttaggatgaagcctggtataaatctaaccagggctaacgtgccatctcttaaggtataacacgctagctccggtttgagacgagtgcctagaggctttcgtcttgacgggatggggcaaggcgtgcgtcagaccgccagtcgccacctaacccttgatctgaccggtctgtgactggtcacagaccggataaaagagcgtgctgtactgcgctgcatgcagcgtgacacgcttgaccagactgcaataaatgctgttaggtgagcacagctgtgctcacttatcccatatatgtggcgcagacttccttaaggggtcggggtgccccggccctcggggccggggcaagcgcaacccgaccccccctcgggggaaatcaggaggagggcggacacctcaccctcgggcccgacgttcccgaaggtgccaggccacgtgggcgattgcgtctgcctcaagcctctggtcatgatactcccggtcccatatcaccgacaacggtgattctggtcgatcgcccataaccgcgggcacggctattcgaatagttttactctagccagaggtgcacaactgtacccacaagacacaatccaccggcatgtcaccgtgccaggccagacacgtcaccatgtcgagtgattgtgacaagacccttcatataaccccctctgaccaagcacacaacacctcaggtttcacccccgcccccggcaggcagcgggcagtcccctctcgtgcctaggtaaatcagaaagccgcataggctgtcgtagggcccatccgaacttcatcacgctcacccttgcctggatgcgtcagccagcggaaagctatacttcaagtcaggcagttacccattcccgcttgtggcaagcgttgtatgtcttccagtgcatcccgcgaaccggtccttaattgccatgggtgcgaccagcaacaccatgcacccatagcccaccattcagtcgcattttagttggataattacgaccatgaaacatggccaaatgtctcgagcacgcagctcgttctgatactaacaaggtctaatactacaattatcccatcaactgagttagtggcaattaagcatggctaagcatatagttatagctaggtcaacatagtaacacaagctagtcgatttattatgcaaggttgacaaaggacagatatcaagtaaatatggcacaagcgagcagataggtaaaccccgatcccatggaattagcaaaacatgcatatttatttgcaaacggtaaaacatttgtaaagtaggatcaaaatgctcaaggggaatgtgtgacttgccttgcttcttcgaacaatcttccgaactcttatcctcgcgaccgcggacttccgaaacgacggattctacacgctggcatacaaaacgaggaaaaactctaataaacaccaagcaaacagtatatcaaaagtaaacaaacatgtagagctcaattttagatgaattttgcaagttgaatggcccagtttggagttcatatgaattagatatgaattttagaagttttgggccatttaaatgaatttctagaattaaactcgatttattgcgaaattaataaataatttctcaaaggaaaaaaagatttgctgatgtcatcaagggggaggggtggcgccggcaagcaggccccaccggtcagcggcacaagggcaccagaccaccgtggaccgggaccaccgaggtggtccactggaaccgatgccccggatcggccctagccgatcgggcggccacgaggcggcgtagccgggacacaggcacggcttagactggcccgaccgagcgacggcgcgcggcaacgcggccaccggcgacgacggccggcgacggcgcggggagcggcggcgcatgcgggcggcgacggcgcacgctagggagcggcggcgcgacgcggcaaggtgaggcggcagccggctgcccgacattgctggcagtggcacggcgcggagcgcggcggcggcgacccggtcggacggccaccggcggcggcggcgcgtcacgggcaggcccgggaggctgccggcgaaggggaggaagagggagagggaggggagtgctcaccgataggtcaaacagtggaaggaggcggccggcggcgagcaaggcgacggtgggcgcctcgggatgacggtgggatggcactccggtgattcccggcgaagaccgcggcgcggcaagaaccggcaggacctggggaaggtatagaagggagctggagtgagggagatggcgcggaacgacggcaaaaggcggcggaacccgacgggaaaggccgaactcaccttgagcagaggggagggattttcggcggtgattcgcgaagacggaggggtggccaacgcgcagctcaacaccacggagacagagggggcgtcggcgcggccgaacgtggctccgaatgccagcggcgaccggctggtggctggggtgcag

SEQ ID NO: 20052 - DNA, 5115 bp, Oryza sativa
tgtcggggagggggagcgagacagttggaagggggaggaaaagcaaacttgagggagatgggcctatgacacgagagtgggagagagggggcgcgggccgcaggagggggaaagggacttgggtcgaaaatggcccaagggggatggagggagattttatttgttttctttttattttatttgattatatgaactttgtattgttataattatttcttgagctctgaaaattcacggaaaaatccggagagtatattagggcacaaagaatattacaaaatattcccggccaatgatttttaaaggaaattttaatttcctccataatttcaccaaattaaattgattaaatttttatttaatttatagaaaatgcattattaaatgatttttattcccgaacgaaaaccggggcgttacagtaagggattgagcaaaattcaggggtacataagggattaggtgaactttcagggatacacaggggattttctctaaataaaaacagagaaacataaaaagtaaaagctttcatgagagaaagagaatgtatagcacaagacacattgtaaggccccatttagttccccaaaagtttttcccaaaaacatcatatcgaatctttgaacgcatgcatagaacattaaatatagattaaaagaaaaactaattacacagttacgggggaaatcgcgagacgaatcttttgagcctaattagtccatgattagccataactgctacagtacctacatgtgctaatgacggattaattaggttcaaaagattcgtctcgcggtttccatgcgagttatgaaattagttttttcatttgtgttcgaaaaccccttccgacatttggtcaaacatccaatgtgacacaaaaaatttcatttcgcgaactaaacaggccaagtaaaaaaaaatcattataggaattcgattcgacatcctacgctctgccttgctcagactagctttgagaatggaaataagggggtgtttagattcaggggtgtaaagttttagcgtgttacatcagatattatatagggtgtcacatgaagtgttcagacactaataaaaaaactaattacagaatccgtcactaaaccgtgagacgaatttatgaagcctaattaattaatcattagcaaatgtttattgtagcaccacattgtcaaatcatggagcaattagccttaaaagattcagctcgcaaattagtcgcaatctgtgcagctagttattcttttagcctatatttaataattcatataggtgtttaaacgttcgatgtgacatgatgtaaacttttgaggtgggatttaaacatggcctaaggctctgtttctttcagcttgggattattataatccagattattgggagtaagctgaaagaaacaaataatttattgaagtagtttattataatctggagtctagcttattataatctgataagcttatttaggtgagcttttttcagattattgggtgaaaaattacccaccatgccaccccactccctctttagacttgcaaacccaacaatctaggctttaataatttaggaaagaaacaactaaccgcttattctactgtacttcctccgtttcacaatgtaagtcattctagcatttcctacattcatattgatgttaatgaatctagctagatatatatgtctagatttattaacatcaatatgaatgtggaaaatgctagaataacttatattgtaaaacagagagaatagattataacaatctagcttatagtaatctgacttaataatctagattataataatcttaaactgaaaaaaacaggagctaactctgctcaatttttctttcccttaatagtacccctatagttaactccggtgggtttagatttagacttttccagataatgagcgagcaaattctcaatcgtgccgactgccgaccgctgacacgcaaggccaggaaaagaaaagctagcaaccgttctataataattgacgttttagacaaggttaagatcaaacttttataattttgactattaataacttcaaaagtaaagtatttagtttaaaaaaactagaacaagatatataaatttgtctttcaaaacactataataaaagttaacatgcatttatttattgtgtatattacaatagaaaaataagatcaaaggtatatttcgtagaccgtgttattatccaaaatatcaattaaaatgaaactggagggagtagtacattgccatctgccaatgcccaatgggctagcaacaaaagaccacatagtcttggttgaagggatgctgcggtgcagattagagcaggtacaatagcaggctataagccggctataaccatatatcgaggagaaaagagaagagagagaagaaagcggactacagatttatagccggctgcaacacagactctaagatattatgtgtgtatgagaggtgggatcagatattaatgatgtagtatatttttatagttaactattatatgaatgggctattagattggctataaatattttggagacagtagttggctatattattggcgccttgctcttagagcggacggccgcccgtaccgactcccgcgttccgacggagcacggggaattcttgcttccaacaccccagacgccgcacgcaagaatcgccaacctctctctcacgcgcaccgcgcacacggcacacgcgggatttcctcccctcaccgacacaaacgcaaccgcgcgccgaggaaaaacccccggaaaagccgacgtactcatccaccacccgtccacccgccgtctacgcctacggcctactacgggccaccaccaccacccaaccgcgcgccgcgcctgtctccgcggtttccgcttcgccggcacgccgcaacgccccccaccaccaccacaatctcgcgctcgcggctcgggtcgggagcggcgcacacacaccgccaagccgagagccagagaccgtcaccaccgcgcccaccaaaactcaccaaccacgaacacgcgtactagtactgcacgcgcccactaccaccaacaccaccacctgaaaaagcgacacgacgagtccgtccagccgacgcgcacggcgctagccagcggaccccacctgtcagccacatccccccggtgactgcgccgtcgcccgccgtcagatccttccgcacgtacggccgcgcccgcgcaacgagggcgctgctgctgctgggccccactgcaggtgggcccgcccgtctcggaagtttggggggggggaacgcgagaggtggggccagcaatgaatcctggctcttcccggtggggcccaccacgcccgcgcgccgatggccccgaggcgagacgagagtgagtttggcgccaaaaccccgcgaaaaattttcggtttccctcctctttccccctctctctcatcccagtacaaaaccatctcctcgatactctctctctcttcccccactacctcctcaaccagcccactctgctattccatctgcgtgagagagagaaagaggggaggggagagagatttgtggcgtcgtgggtgctcggttgcggcggttaccgcggggaggaggagggagttgtgctgttgggggtttggatctagagcgagcataggatgggagctgctggctcctgagctgcgccgcgcgttgccctccggtaaatcccgcctcaccttcaaagagatgctgttctttcctcggttgatttctccttctcgcgctatcggttgttcgttgggttgctctccgcggctgggagaagattcttgttggtgagcttgttttgtgggggatggatagatggataggccggtggcgtgcgatttaggagtggacgtcttgggttcttgctacaggcgattttcctgatgcgtgggatgcatatgcgtgttcttcctgaatctgtggcatttactgtagaatggggataaatttgcacagtagaaagcaaatattgttagaccctattttgctgtagtacatttcggcagattgggaggattggtgttcgttgcatgcaattcctcccctggaatcaatccgtttggttgctttatgctgttaattacttgatctgttatacttcatgtaattgggtggtctattattgttcaacaataaattggagccttttccaggattacttagggagccatgcatttaatcgatgataatgattattgtgatcttgaggattcgcttcaactgttatctgatgctgttcattaagcaaagcgttttattgctacatccctagtaatactgaatgatttgctccttaaactcttggcataaatatgactgccttcaatgttcacgcgctaaataaaatgttcagtttttttgtcaagatgtcccgttaagcttcaagtgtgaatgatctgtactgttcagattcgaatttttggcactgatgttctgctctggttcattcaggtaccatgcatttaatttatcccctaatctggtaccgtggtacattaaactacacaaatgtccagatgtctttgaatggatctgatgaatcatcagtatgaacttgattgataccatgctttgtataactatgttatttaatcctgccaatttcttcaagaatgtgagatgtgccaccagccactacttaaggaaaacattcgaagtgcttgtaatatgaaaagggactgctttctttgttaaatatagtgtatatacacagagcatttgtcctctttttcagtgttttccagtttagtaaattctcagatggaattttacccaaactctctgattttgtaaagagcaaagctccccccttacctttcttccacctctatttagctaagagaactgtcctgattcctgacccaatcttgctagtttggctacaataggccattttttttgctttatattttgttcctcttacaaagaatgaatcttgctatagagaaggctctgcctgaatttatattatttccttaagacaagttatccgtgttaagtgttctttttttctactgattgattcagggagatgaaattcgataagaatcaaagcttcacaacatctactgcgaaattggataggaatca

SEQ ID NO: 20053 - DNA, 2127 bp, Oryza sativa
tccgttgataggctacccctgtcagtgagctgtacttcctcccatagaagacgtatatgatggcaccaaccgctagccacatcgaaacacgaatccacgtatgaatcctgcgaacgatgaatcaaagggtgtgagtacgtgtgatatcagatatgataatatccagatcgttttcagaagttgctaatctcacaactcacaagtataggtttagatagttcattctattttaatctatccagatcatctgtttacagtgtattgtgaattgaataatggtgattttggtttcatgattttgcaaatctactagataatataataggagacggtgcaagcttcaagatgcaaagtaaatcagagcaaaagctaatcttgaacccaagttgctcacccaaggttcataagcaggtatacgttgatgagaatgcaacatactggaagtataggaacaaatgggcacataaaacctgaggaacaaaggagacaatttgatgttatttgtaaactgtatagatcagaagttacataaattttgtcaatttcgtagtagtataatggccatagtctttgtacctccggtttgtcttaaagagctcttgtcttgcccaatgaaccagagtgcaatggtagcactaaccaaaagcaaactaccaaaggcacctgcaatggatcgcaaaaatctacagaaaggaaacagatcaaatgagtgggtgtcaagagcaagtcaaaaaaatttgcagtgggtggtttcattttcacttacaacggaaaaaaggagaaagaaactgaagaaacaatggtgacaaccccaagaaaaattagtataatgcatgctatggctttctgtcgccttatcttgttggcttcattggcagtaggtatgtcttgaactgaacgcattaagaagggggaaaaaatcagaaagttagtaactatgaggctgttatacaaagtattttgaaagtgatgaactaatgacaaacagataatacattaatatcatgcaaaggcaattgagaagtgggattacaaccataaaacaaaacaatactaaagaggagtcatcttttttatcaaagtatcaaaccccctatcccaaaaaaaaagtatcaaacacccaatttatgttagtagaggcaatctggtaaaggcaaacaggaagcataagaactaaatcaggcatgtgcagtacttttgatgtttaattagatacttcctccgtattttaatgtatgacgccattgactttttgaccaacgtttgaccattcatcttattttgttctgggaagattgttggctgcagggcacttcaatttggtcactggcgccggcagtatgggcggctgtcccaggccgcttgcggggcaagcgcacggtggctgaggcgctgcacgacaggagatggattcgcgatatctcttcggcattgggggtgcaagcgatccttgagtacttcaaattttgggcgctccttcgatcagtgcagctgtcagaggagccggacaggctttcttggcattgggagaactcggggcagtactcctcccgcttggcttatcgtgttctcttctttggaagaactcacttccaacacaagccaatctggaagtcttatgcccctcctcgatgtcattacttcctttggctggtcgctctcaaccgatgctggacggtggaccaccttcgaagttgaggcttgtcgcacccggatcgctgccccctctgcgatcaatgcgatgaaacgattgatcatctcttggtcgcatgcccagagtcccggcagctttggtggattgctcttagcgctattggtcattccgaatgtctaccactcaacgagcagtcctgccatacttggttgtgtgacagtcgcaaaaggatgattaaggatcatcgccgagggttcaacacaattgcgacactggtagcgtggacaatctggaaggaaagaaacaatcgggtcttcaaccagaagagcaggccttggatggagatagctagggctatgacaagggaagcggacctttggcggatgactagatcagccataccggccatggtagtccattcgtttgtacatgggtcgccaaatccttcgggagattaggctttttttttcttt

SEQ ID NO: 20054 - DNA, 2248 bp, Oryza sativa
gcaaatataaaagtatttatgtcatacttaaagaacatttgatgataaatcaagtcacactaaaataaatgataattatataaattttttaaataaaacaaatggtcaagcgttggtcaaaaagtcaacagcgtcatacattaaaatacagagggagtaattcatttgtcaataatgatttttatcttgccactagtgttaagtaaaatcaactcaaggtatacaaatcactagtattttcattaccgttgcccaaaagatcctccgaattttcctcatctggttctgaatacccagagtctgaagttagtgattcagatgaacctggaagagccactttcgttgctatctcatttggaggagcatatcgcactattaaaacagaaatggcaaccatagtaaatgccaatagtgtgcccacgcttacctgaacaaacaatcaagaaattattactacctggagtagctctccactcagcaaagctaccgtattacatggcaagtaacatattaccatccctgccaattctgagacgtccatgaaaagagccaggatagcagcacatatccctgacaatattgtgctcaaggttgggacttgggtcgttggatcaacagctgaaaagagtggtggaagcaatccatctcttgccatagccatcacaattcttggctagccaaaaggcattggaagtaattagtcagtttttttcctggtgtaatttggatgatcatctatcatatataaacatgagatggttttttaaaaaataagctaacgttaagaagcttaacttattacattttctagtcaagctatcagttatgtatcctgtaggatgagaaaggaattcaactgggaaggagatatacagatgctttagtttctcaattcacgtagacacatacctgagggagaatagcacctatcaaggatgctataagagcaaaaacagccccagtggaaataatgtacctacataataacagagataattacatggatgcttaacactaacatatatacagcatgagatgataatctccttaatagtcaagcaattcgatttaaatatatatatatctagtacttacactgcccattgcattccatatttagcaaaagcagatgaaataggagtgttaggatccaatgcataatatggcaccaagccaacaataacaatagaaaccatcatgtagaggaagcagcacaaggacaaggtcagacacattccccatggaagatcacgttggggattcttcacctgaaaagtaccttgacaaataaagataattgtgtaactgcagatttataatggccttccctgaagtaccagactctggatagagttaacaccaaataggaacataactaattgagtaattttcataaaatcgcaatatctttggtaaacaaaataaaacacatgtacgtattcaagcgaccattctagcagagcagttcttttacatacatttcacgaaaatagacttgcatggctattgtattgacaggtcggatccactggatagtctcacaagcttatccgttttagtaaatgaaataagtaagcttgtgagaccaccaagtggacccagacgtagtttagtgaaacattatgcaaaaggaagtatggttcttgtgatggttttaccacaaattttgcagttttgtgaaatttgctcaaaacaaattaattaataaatagcagaataaaagccaacctcttcagctgtgctagcaactgcatcaaagccaatataggcaaagaagagggttgctgatccagatagaacaccagccacacctttagggaagtaactacataccaaccaagcaaatatcagagctatatgcatatggaattctgtattgaaaatgtgaagcacaagtcttagctttacccttgttcatcattatagccactccagccattctggaatgctaagtatccaccagcacaaatgacgaacagcataactataacatttgcaatggtgatgatgccttccacaaatgaactctgagagggcatggttcatacttcagtactacagaattgtaagtagtaggtaattcatggacttcaagctatgcatagatatcgaacagcacaatttacctccttaattcccaggcaaagtaatgcagtaactatcaatacaagaatagcagcacaaggatcaagcggggtttcaaaccatttaacatgtatttgtgttaggaaaaagggaagcttctcat

SEQ ID NO: 20055 - DNA, 20002 bp, Oryza sativa
ctgcacccccaccgcgttcaatgctatctgtgaggtgattatgtttttgttttttattatttcacataagttaagattgctctgaaattaactaactgttggattttcagttttctgaacaattttcacttatgaaacaggagtgttgacatattacgtagctctcacaggaccaaaaagggtccctgtctttatccccatgcaatagttcctgctaagaagtactctggaaatgagtacacattatcatacttaaaatcctctccagctgaacaattgccagttgcagtttcctctgtgcaggtggtatgtatcggttctttcttagtagctaacatcttaaactacaatatgagtggtattctggatttatggaattttttggctcttctttttcctgctagtaattattatctccagatgatgtcatgatgagcttaatttcattaaaaaaatatccacagtattcagaaggtaaccacaattgccaattggtaatatgcccattcaaactattgtggttatgtacttatgtggaactgtaaattatgaaaaaccttcccttttaatacctctgtggtttagtaaacagcttttgccacttctctgcctgtttttatggtaaaaactcagttaaagattttctttaaataaatcacttggcactgatgaaggttcgcttctaataatctagcattctagccctatgtgttgattataatttttgacagaaacgtagcacagatgatccgcttgatactaagacattaccttgtgaagtgaagactggctgcactctatctcccatccaattaaagcacatccaagcaaatgctggtcatgttcctttgtgtattcatcaagacatgaaagcatcaatgaaaaggaaaactgaagtgccagaagtgacaggatctaagagcttgactgtcatcgtgtcaactgctggaaacatagaacatgattttgacatcatgaagcttgacctaactgccaacctcctgagcaaggtacatgtatcatcctgagtattaaacattggacttggctctagatggtgaactccccctaaattatgatatctgactgcttactaactcttttaaatattcttttttccggtgatgtttcttagaaattaaattttctttgataatattataccacttcctgtttagcattttctccctctctttgtgcttttatgccgtttatttttaagttatatcaaggtatcaagctatttggttaaggtgtggctttattccattacttgtgtttttttccctctctttcatgtataccattcgaccttgtttgatctgcaatgtttgctactttaagaaagaagataaggagctctttgtattataatgagctttagattcacattctcattttacaggttgaacaactgtttagagaaaagccaaacccagatgatttagagacagcaaaggcgatactcaaggtgagaaccctcttgacttggataactcagtatgtaagcattggatttcatccaatctccgcttgttctaagcattatgtacttcaatgccatttaaacttgaaccaggaacaagaaaaggtccttttagatgcagtccttaagctttctgaagtatcatatgttggtgagtcgctttttgtatacttttttgttttctatagcttagaatgttagttcttttaagaaaatattttagtatatcaactacactactttagggggttctgcagactctttcctttttttaaccaaaaaaaatattgcatcaccatcataatatattcctaccaatgaactactggatgagtcctcttagaagttaccaaaactcttagatatatatttagttattgtgatccgtatttggcataatagaatgtgctatgagactgcaaatataacaatatttttccacctgaaaatattgaatttgatgattgacccttatgaagaacggcatccatcaaatccctctgaaaacactggattcaccatttctattttttctatcttcatcaaatccctctgaaaacattgaatagcaccgatttagaactgacatccttctctttgtcccatctactccgtagaggagtgtttcagcaccaactgccagccagatgagttcaaccagcactatgagtatgagagcgacgacgagatgccgcagaagacagcgagcacaaacgacgccgagacgccaccaaaaccggtgagcccaagcgacaaggaggcgcctccgcagccagtgccaggacgtggtggtggcgccaccagcaagggtaaggcgaagccccgcgactccggccggagctccggcggtggcagcggatcaggcggccggctcgacgcagcggacgaccaacccacctccgcctccacgtgcacatcatcaagcacactgtcgccgcgatcagaacgagagggggaagccaaagcccagcgcgcgcgcgggagggtgtttgaaccaccggccaagcgggccggcgcccctccgtgaggctctcacggtcggaatggctctggtggtgaatgcgcgcgcgactgtgttcagctggaagcccccgcaatgtgaattcgcttgacaacaacatcatgactgaccatcaccaactctgctactgcaaaatttgacagttttttgctggagacctctcacctctgatcaggtaaagtatagctctcgcctctgtccggcctcttaagctttaagcacaaagtggtacatagaacatagttaatgtaactagctagtcctttcttccatgcacatataggtccatcggtagtcactttcaattatcaaaacacattttgagacagtttcatgttcccactaggttatacagtacctaaaaacatttcattactcactatctgctatgcacttgtggcatatttttttgtgctttgccatggattggaaacagtgataaaattgatggttttgatagtgtactgaattaggctgcattctcaggcagctttaagatgttgcctgctagtagcatagtactatccctgcactgcagttctggaaagtggtcgctggctgtgcccatgtgagtgaagatggtggtaatgcctgtgccttgtctatcccatgcaattctccctattcgagctgtagatatcatgccattaggtacagagactcgagtgaacagcattagatctgaaaaacttgcattggccttttataactgctcgcagctaccactggtcccggtcacaagtacttcatgttttttgttggtctgtccagctccagcatggttaaactgtacattcatcacggttttgtgatggctgagtggcttactcatgcaagatctagttatgcagagacagggattggtcttaactcttaaacaaagtgtatcatcatgatgtgatcgtcgtctaatcaataaaagcttccttcatactccctcagtttcgagcagtcgtttagtcattttcctagtcattttttaaaaaagtttgattaaatttatagaaaaatatagtagcatttctaacacaaaataaacacattattaaaatatactaaaagttaattaaactaatttggtgttgtaaatgttactaaatttttttataaacttagtcatatctatctattatatactgaaagtccattaaacttcttacaaacgctctcaagctgccacgtgactctcaaaacgcttttaagtcgtcacgtggcacaacaagagagttgagaaccccctagggcccgcacgtgcagtgcatgggttatttccataacgtgaactaacgaagatagttcacgaagattagttccatatataactgtgtatgggaggcaagagattcgaaattaatttcaaagcaaaatctaatcacatatggcaagattaggcacgtgcagcgcatggatttgtcatgaataaacgaagattagttccataattgtgtacacaaggcaatatttcaaatctatctcaaagcaaagcttgcttagtttcatgaggcaagactacatatatatacaccggcttgcatacatatatgtacacctcaccagcaacacctttcaatccgtctgcaacacacaattttggtggctccgtcctcctgtcctctgcaataagaggcctgcggcaatttggacgagtcacccttgcaataagaggtctgcggcaccagcccaatggctgacacccaatccattaattaagggaaatactttctcattccgtcccaaaatataagaatctaggattgaatatgatgtttcatagtacaacgcatctggatagactccctgtcatgatacattgtaatagaaaacatctcattcaattgtagattattatatttgagacggaggaagtagataggacatagttactgaacaggaatcttaggttattatatttgagacggagggagtagataggacatagccactggaaaggaaggagataaagagagcagggcaggcaggtcgacctaggagataactattttttcatgtacctattttttttcaaccataaattcataaattctttcaccaagagaccaagtcataatgtaaaaaatcataataacaacaaaaaaatgatattttaaataagatgcccgcgcaactgcgcaggctaccttcctagtttaaagaaaaaaaagtcaaacgacttataatataaaatgaaaggagtattaaaaaaattagttgtttgaattgagaagatatcttgaagtatataaattttacgctaagaatgttaaaattacccttccttttaacttaggaaaatctctagtttacatgatcggatcccctaaaatcttgcacaggttcaacttacaccataaactgttaacatcttctactagaagtctagaaaacatcatgtagctaccaaaaccctgcaaatcacacctcgagcaaggtttggggatgcttttagccttttaggtgatttattagcacctatgcgtgataactgctgaaagaatattgtctgtccttactccaaaggtgtgtttagttcacgccaaaattgaaagtttggttgaaattgaaacgatgtgacggaaaagttggaagtttatgtgtgtagaaaagttttgatgtgatggaaaagttgaaagtttaaagaaaaagtttgaaactgaactcggcccaagtggtgtgaatattgtgtaaaaaaaagggggaaaaaagaatgacgcggaggcagccacgagaccgctttaaatgcaatttacaccaaccaaatatccatggtgtaaattggaccagaccaataattgtgaaaccaaaaggaaaccgcttcgtgctgctctacgtttttttaagcaagtataggccctgtttagttcgtggggagtaatccattactctcttcccttttagtccctaggaatccaaataagagtgactaaaagtgactaaaagtgtatattggaactaaaatccattagtctttccatagggactaggcgtgtttggaggtgggtgttaggaacccatctcccatacacagaaaacggagcgatccattaacacgtgattaattaagtattagctaatttttttttcaaaaatggatcaatataaatttttttaacaacttttgtatagaaactttttgcaaaaaacgcatcatttagcagtttgaaaagcatgcacgcggaaaacgagagaggagtgttgaaaacttgctcttgcaaacacaccctaaagtggcagcctctctcttctctccccctcggtccacgtgcctttagtcctttttagttcctagatccaaatagtagggactaaaaagtttagtccaagaactaattttagtccagggaactaattttatctttttaatatactagaaaaagtgtacgtgtgttacaacggaaaaactaaatcgtgacatattttttatgcagtatttgagcattgtgaattgtgaaattgtctcacgtggctggttattgcattgcgatcgcttcatcctgattatgaaaatctcacaaaaaaaacataataggaatattctaaatacataaataatagaaataatatgaagatatgcctacatggttgtttatgcagcaacctttgaaaaatagccaagccatatcatctcatccatatcataatcggatcaggaagagcatgcagccggtgctagctgcgcttctttctaaactaataaagagagatttacgtatgcatagtattctagcacgaatcgatctgatgacctgttctcttcttctatacatgcaagcaaaaaattcgaaacagacatgtacatttgaacttagactaccgtattcatactcgaattggacgacgcaccaaacaatcagtaaaaacatcttcaatttttataatagtagagatgtttataaatagcttatagtttgctatctactgttttgtgatttgttcgaaattgtgctagttccaaccaaaatacacccaaaatatgttgacatcacacttcccaagttgatgctgtgccccccttaatcgcttgagctgtaacccccatatgatccaagcgtgatgcgtcgacgtcacgaaccaatctgcaagggacatccaaaggtgcaggctcacgtcctatcatgaattttgcctttgtcgtcctgcaaccatccaacccaatcttcatttttccttcacccaactcttcacttatccccgttctatcattttctttcatttcatatagtatatatcagtagagagaacagtaaaagttatcttcatggagtagtacacaccatttgacatcctgattatgtatagtaatttgaaacacggagatttcaagtggagttccgtagtcatttcatttgaaaatggttcggccaaaattcggtgaatgtttgttgggggcttggagtgacgtttgctactactgacggattttcagtaatagcggtgatccgttttgtcggctacggtctgtgatcttcagcacgccactcgcgctgcgcccaccattatgcatggcaaagccttctgccacgtcggcggcggcggcgccgccggcggcgagggtgctgatcggtgccagcgtcaacgtggccttcttgctcctgctcgccttcttcttcttcatctcgccacgcggcggctcgccgccggaggtggtttcgtcgtcgaaggaggtcgggatccgggggcgtcgcgatggcggcggcagcggcggcggcggcgtgttccgggttgagagctacggggagaggtgcgagcacgtcggcgaggaggatggccttgatcgccggcgattcccgcgtggctacgtcgactacctgtacctgttcgactgcgtgttcggcgaggagcggcgggttcttggctacgccgtgatggcggcgtggctcgccgtgctgttctacctgctcggcgacacggcggcggtgtacttctgctccagcctcgagggcctctcgcggctgctccgcctctccccggcgatcgccggcgtgacgctcctgtcgctcgggaacggcgcgcccgacgcgctctccaccatcgcgtcgttcgcctccggcgggggagagggggagaccaccgccgtggggctcaacggcgtgctggggagcgcgatgctcgtgtcctccgcggtgctcggcgtcatcggcgtccgcctcggcgcgcgcggggtcgccgtggacagggtggacttctaccgcgacgcgtctttcctcctcgccgccctcgccgccgtggccgtcgtcctcgccgccggcgaggtgacaatctggggcgccctcgccttcacctccctctacgtcgtctacgtcgtcgccgtcgccttcacccacggccgcgccccgagcaaaggccacggcgcggaggcggaccacacggcggacgccttctccgagctctgcaacgtcgcagagacgaagttctacggcgaccaagaaccactcctccccgacactgcaccgctactcagctactaccccggcgacggcgacggcgacggaggcggcggcggcggcggctccaagaagaagatcaggagcgcgttctggtcggtgttgcgcgcgctggagctcccactatggcttccacggcggctgaccatcccggacgcgagcaaggagcggtggagcaagccggcggcggtgaccgcggtcaccatggcgcccgtcctcctctcccacctctgcagccgcgccaccggcatcacctcgcccctcgctgtcctcctcggcgtcctcgccggcgcgtccctcggcgccgtcgccttcttcaccacctccccggacgcgcccccagccgacccctcgccgcctggctcgccgccgggttcgtcatgagcgtggcctgggcgtacgccgtggcgaccgagctcctcgcgctgctggtctccgcggcgcacgtcatgggcgtcgactcggcggcgctggggctcaccgtgctcgcgtgggggaactccctgggcgacctcgtcgccaacctcgccgtggcgtcgcgcggcggcggcggcgggggcgcgcaggtggccgtggccgggtgctacggcgggccggtgttcgacgtgctcgtgggcctcggcgtgtcgatgttgctgtcgtcgtgggcctcgcatccgcggcccgtggcaatgccggcggaggccggcccattccagacgctgggcttcgccgccgcggggatttgctgggccgtggtggtgatgtccaggagagggatgagggtggacaggacgctggggtttgggctcctggccatttacttgtgctttctttgcatcaacatttctcaggcacttggaccggtatgaactttttttattttttttattcttttcataaggggcccggttggccaccattttgtgttggcccctccgcgcattgcaacgaaaattttaagggaaatgttacaggacagtatacagaagagaaaagatatagtattattagtacacgagctttcaagaaaagatatagactttggaataatatcgagttcgataacaactatcagtgacaataataccataaacattgacaaaacaatgagaataaaagagagagagcatgtgtgtcagcaagcgactaaatagccacctcacatgcatcaattcccaaccaaccaacatcatacatttttgcaacatctgaaaaacatgttctgaataagcattgcaatgttatgatgattcaattaattttgtcccctccggaatccacaatgttcagacataccaggcccaccgttagctacttctccatcgacgcgtcggcttcgtcgatctcttgattttgtttcaggtttttattttccacgttcatctcgcgatcggataaatcgtgctcccaaaattttggtgaaccaccgttcatgttcagtcacctgtccatatcaaattattatcagtagttagctgtaccagcatcccttttatctctctgaattattgtctcgagtttaagccaaggaaaagaacacctagatcatcaggtggtcctacttaagtgcatacgtgcaaggcacctcatggtgggaattagcctggaatgtagatctgtaatctgaaggaatccatgtttcattgttcagaaaacactgtcggcgtgggtttaaggaaacaaaaatggacgttatagttctggaattgtctcttccaagaaaaaaaaattgtcggtgggctaattgcttgcaagatactactgtagcaatgctgattgtaacatccatggtaactcaaaattgacccaaaatttcactcccttgaatccgtcatcccttccggtcaaaaaaaaaagtcaaaccgcgacaaatctaccctgaacatcaacaatatgtacttaggttgtgttatatcttctactttctcatttttcacatgcacaattcttgaattgttaaaatagtgcgttctttaaaaaagttatctataggaagttatttttttaaaaaaatcatattaatctatttttcaaaatttatagccatacttaggccctctttgtttaggcttataagccaacttataagtcgaaaagtctaagcctaaacaaacaagcagcttttccgtttggcttttttgaagccataagccactctaacactattaagccaaaagctaggttggagaagcttttttggcttatgtgaggtagatgtatgactcaactactaaacttaggacattaaatccaccggcttataaatcatataagccaataagctgacttaaaagtctaggccaataagcctaagcctaaacaaagagggctttaatcatgcactaatgagctatctcgtttcacatgcagggacgagaagttcccaacttctccaaaacaaaggcttaggtgtgagttcggaagggagtttgggtttagaaatttcctcattcctgttaacacgctttctaaactgctaaacattgtgttttgtgtaaaagttttatatgtagaagtttcttaaaaaaatcaaacaaaccattttcaaatttttaagtaattaatacttaattatttatacgctaatgctcgcgtgccatcaaaagtcctatccgaacatcacatctgaactcatccttacatgcgttatattgtcattaattctatgaaatactcctccattgaaaaatctcaagcatgaccaaggaaactcatactcctccgattcatttagggcaatcccaacctaaaaaccatcaattattttccacatttatcatgtcatataaaaataagagtaaagtgcatagacggtccttaaacttatagagatgtatcatctagatccccaaactctcaaaacacatatccaaatcatcaaacttgttaaagtgtgttatctacatcccaaatcgccacaacccctctagcatcatacatggcgcggcgctgatatgatatgccacacgggcgtgacgtgacataatcttgactgacaaataagacccacttaaaaaacttacttttcctttttttttcttctttccatttcttttgcttgttctttttcttcttcttcctctcactgtaactgtaggtccgccgcacggggtgcttgggtcacatagaaaggtaaagaaaagaaaaaaaagagaaggagaagaaacaaagtaagtgggtctcacttttcattcaagataatgccacatcacatccgtgtggcataccacgtcagcaccacgtaggaccctggaaggactgtggcgctttggaacattacacattttgacaagttcttggactttgatatgtattttgagagtttagagacctaaatgacacaccctacacgtttaaggactgcatgtgcattttactctaaaaataaaaaaaacggttcgatgtagagactacataaaatatacccttctaaaaaaataaaaaaaatcatgtcatatagatgctatatagagaaactacttcttccgtttcacaatgtaagtcattctagcatttcccacattcatattattgttaatgaatctagataaatatatatgtatctagattcattaatatcaatatgaatatgggaaaaactagaatgacttacattgtgaaacggagggagtacatatacagtaagtaattttttattcaaaataaatctgcattcaatggcctctcttctccccccttttatcctcccatctccttattttcattattgatttttattataaggtggagggtagtgactgatccatttaatccagcatggccaactaacatccccttgttcattcaaagctttgtatgcattttgatttttaggaaaacctaagaaatataggcttgagatttttggatggaaagagtaaataacttttttttatagcgaaagtacctctatcttgtgggctttactccgtattttcaaaccatcatcttgctgatttaaacaagccaaaagtaattttgtttaactagaggctgtaccattcgtaattccacccaatgtttccttttcaatggagaaaatttctaaggattctggaaaaggaaaaaacaaatcatgtactataaaaatagtttgggacattgggtaaaaggtgcttttaaaaatacgcattttttgcccgctgctccgaaggtgaatgcaccaacccaaaaaaggccaaaaacagacagcatctggtgcgaaacgtcatcggccgcactcgacccccaacatctccaagtgatcagcaacgctgaataattaaattatcaggcactgctagaaatagaaaaatgtttaaatatgaacaaagttagtgcacgcatctgtcagtcaccttatcatcatgtgacgagagcatgtgaaaaagtgaaatccaatcgctgcatactcctatgctgctatgcacccgtgatggatgagagatccaaatccacccaaaggttacgaagaccaagactacattgacacgtccttctgctgcttttttctggcagtgtgtactgtaacgaaataaactgaaactgcatcatctcgaagtttcaagatagtgttggacactctaccggtttggacacatcgggtaaagtaagataagctgttataattaattgagtattaattatattaaaaatatttttttaaaaaaaacatatttcctccttcctaaaatataacaacttttacccctcaagatttgtcccaaaatataatacttctccaccaacattctcttcccaaccaatcacaatcctccaccgttcacttttcccacctacctacactactcaatcaatcacaaccctccatcattcacttctatctactttcttaataaccatgtacaacactaaaaatacttatattctgagacggaggtagtatcgtttaacccttggagaaatgtacgcgcaaaaaacgatatactccctccgtccaaaaaaactcaacctagtattggatgtaatgtttctagtacaacgaatctagatgtactcatgtccagattcgttgtactagaaaacgtcccatccaatactaggttaagtttttttttgggacggagggagtacctctttcctcattgttcttgagacgaacgtacattttgaccgtaagttgctgagtttttatcattaacattctctaaaaataatcaaattatatatgtggtctaaaattgtatcagttgatttataattaaaagtattctagtaatagtatcacatattttagttttagttgctttaaaactagctgttagaattcacctattcttagtcaaagctaacaaacttttagcaaacttttcatgacgttaagagtgtttgtaggtcttatttgagaagctcaatattgtgaaaaaaacatttgatgagtactccagtgtttgtaggtcttatttgagaagctcaatatagggctggataccacctagccagctcgattcatttgaactcgtttctttcaagggaattcgtttgaactcattatctaaaaagcatagctggtcttggcccataagctagctcattaacacacttatcgcaaatttataatttcaaatttatcttttcggaaagaaaagactaagcgctagttaatagcacaagaccagctaaatttcaagaatgcacataactgctcctctaaattttaggctgtattatggaatctctcgtgtaaaatggaactaatcattaacgtatgattaattatgtgtttactaatcttttgaaaatatagattaatacaacccgttttaagataagtgcagccgtggatatccgtgcccaacgtttgaccatccgtcttatttgaaaattttgtgaaaaaattaaaaatatttagtcacacataaagtaatattcatgttttatcatataatagcaataaaaatagtaatcataaaaaaatttaaataagataaaaatagtgtaaaactgtacttattttgagacagaaggatatatgattttttcaagcaattttctataaaaatatttaaaaggacatacggagtactagtagtctgagatatatgcgcacggaaaagtggtcggcgagttgaaatgggaggggaagaacgcagccgggttcccacttttgcgcgtgggtcccacctgtcagccgcccgaccaccggccgacagtgacctcactccaacccccacagctctttacttatctcaagcccaatcacaacccactcccacctagctcaacctcacgctcaagctgcatctctctctctctctctctctctctctctctctctcctccagctccggcgaccatcctgcccgccgccattcgccggaagagcccaccagctgcaccggcgtggcatcgtccacttggcgagagtggcggagctagatcggctatcgatatatacataggtggtggatgcgtgcgtgcgaggtggtgagggtgagatgaggtctccggtgggccgcagggaggtggtggtctccggcgtcttcaccgcgctcctcgtcctctccatcctctccctcccgtcgctcctcctcaccggcccggcgtacaagagctggccgttcttggcggcggcgagggacgactccaccaccgggagcggcggcggcgcgggttactacccggtgtcgttcgcgtacctcatctcggcgtcgacgggcgacgcggcgcgggcggcgcggctgctggcggcgctgtaccacccggccaactgctacctgctccacctggaccgggaggcgccggcggaggagcaccggcggctggcggagctggtgtccgggcagcccgtgtacgcgcgcgccgggaacgtgtggatcgtggggcgccccaacctcgtcacctaccgcggcccgacgatgctgtccacgacgctgcacgcggtggcgatgctgctccggctcggccgccggtgggactggttcgtcaacctcagcgcctccgactacccgctcgtcacccaggacggtaattaattgccaatccttaatcgtaattaccatcgctaataatcgctactagtaccattttagtgtttgtgggaaatgctaaattaattatctgctgataattgcagatttgatggatgtgttctccaggttgcctagggatctcaacttcatacagcataccagccaccttggctggaagatgtaagaactccaatcgtcactaacttgaattgtttcatcagttttcaagattagtttttgattgcttcttcttggtttcaattattcgcatcaattggaataacttagtggcaaattatcaagtgcaaacccccgatttcaaatctctcaaattttaaaagaaggccttgattttgatgaggggattgaaatatgctagctctgcagaaagaagagggcgcggccggtgatcctcgacacggcgctgtacgaggccgaccggtcggagctcatccgtccggcgaacctcaccaccaaccggcgaaatctccccaccgccttcaagctcttcacaggtacgcgcaaaaacatctcaactaaatcaacctcaattgcgctacgaaaacccctcacacatttccgagacgacacagaaaaaaaaacttgcatacttcctccgtcctaaaatgctacaatctaggatgaacaacaaatctggataagagattgtaacacaagtttatccaaattcattgttttgagacgaagatagtatcattgtattgtattaagaaggatgagaagatcgtgtacagagtacaaaccataaaacctctcgtgctggaaagaacatgccactatatgtagaaaaatggatgcgtgtcagcgaccgatttgggatgcgttttcgtcaactctttttctggtaggagagtgagtacggaccgtacattgcgccaccggttgatctgtcacaccaaagacaatgccattgacggtatggttgtacagattgatcgttggatttgtggctttgtttgttgttgaagtaatagtaagatgcgtcatttgataggcacgggcagtactcaccttggaatctggcatacaaaaagaaaatcttatctgaaaccgtatctagtcaatggagcaggtacaggttgtggagttgtgctaagccaagcccctgcattatcaatttatcactgcatgtactggagatggttaaattaatctgatagatctgaatcagtggagatcgaggaatggtttagtgttagtttatgctctggagttgccgaatccaggcaggccaaccaatgtgctgtgctgttgcattggcaaagcaaaagcagcttttgtttcgatctattgggacaaagcttgatggagtactactactcacttgcttccgtattcccaaaaactcacttgcttccaagaaacggcagggatatagaaaattttggaaactatgaacttttacaagagttagtttaatttatgcagcatctctatttcaaaggaggcccaatgtgttcaccttcgtccatgtccgaccatttttcatttttcagctagcaatatagagaaatttgtgaaaacaaattactagtaggttttgttatgagtgatggaactgggtcaaatcgagatgcatttgataggacagtggtaaggggtgtatgattttaagcttgaggttctgtattcaatccttaacacgttcacaaaatcttctaaaaatgttttagaggtgcgtctctccctctgaatcttgtttttttttttaattgggtcgaatctctgcctatcgaacaagcattttgactatagatgggagatgcaggttcagcgtggacgatgatgtcgcggcagttcgccgagtacttcaccgtcggctacgacgacaacctgccgcggacgctgctgctctactacaccaacttcgtctcctcgccggagttctacttccagacgctggcctgcaactcccggcggttcaggaacaccacggtgaaccacgacctgcacttcatccggtgggacagcccgcccaagcagcacccgctctacctcggccccagggactaccgccggatgctgctcagcgccgcgcccttcgccaggaagttcagggaggacgaccccgtcctggacaggatcgaccgggacatcctccgccgcgacggcgccgccccgggccgggctttcgcctacggcgggtggtgctccgaggggggcgtcaggctgtgctccaacccgcaggaggccgggaggaagggcatgataaaggccggtgcagggtccaggaggctcagggccatgctcaacaagatgatgaatgcgagaaatttcaggaggcagcagtgtaggtgaaactagaggcatttttatatacagtctaattctgatgatcagtgtgtgtgttcatgtatataatagaggagaaatcgaattacaggaagaatttgaggcagttttggttgtctggagggaggttaaaagtagagtgacagtgtaatctcacagaaataagaacatgggggtcattagtaaggttgtaaaaaaattgacaggattaacgtcagcttgtgccttggttggttcttcttccatagggctattgctgaggttggcgcattttttactgtgggaatgacatgatactactgttggattaaacctgtatgcttgaatttcgggagccagtttgtctgcattttgaaagagaaaagattgcatcatttgttctccaacaccatttatttgctcagttacaaaagcccttatagagttatactgctatactatgtgttgaaagtaatatgccaccatgtaaatcttttctagtgtggtactttctgttgttgcaaaattaacttttttgggggtgtttagatccaccggcaattttttttaccccgtcacatcgagcgtttgaacacatgtacgaagcattaaatattgacaaaaaaactaattatattgtttgcgtgtaaattacaagaagaatcttttaagcctaattatgcctaatctgacaatgtgatgctacagtaaacatttactaatgacggattaattaggcttaataaattcgtctcgcagtttacatgcggattatgtaatttgtttttttattagtctatgtttaatacttcaaatgtgtatccgtatatctgatgtgacccggcaattttttttgccggtggaactaaacacatcctttgtaagtttttcggatcggcattgaagtaaaaccctgaccaaattttattaagagcctgtttagatcccactctaaaattttacccctgtcatatcgaacgtttgaacacctgcataaaatattaaatataggctaaaaataactaattgcgtagagagtaggtgaaaattttaaagtgtgtgggagtgaatagcattttttgtgcagttcagttagaatgtccgcctgcgaaaataaactcttttttttgtgtgtggttcacttaagaggaccgcacggtcctcttaaatggaccgcacgggaaaatgagccaatttttctgttaccgtccgcacgcaatgtaaaagggtccctgtacaggaaaatcatttgcgtagcagcgtcgatgctgttgcctacaccaacgttgcccaatggatgatggcagggttaagaaaatgggagcccatattccagggtgacaaacttctagtatgatgcctgtaccatgtccataaactttgaaaggaccattttttttattttctagaaacaaaagttatttgtttgacggtctaaaattaccctgtatcaactgtgcattacttcttgattaaagctttgagaaagcaaaaatgatcatagctaggtgagatgaaactctgaagcttaagccaatattgtattccaaatgtgtgatggcacacttgtttttttagccaaaacattctcttaatcttgtgcattttgaaggaaattgaaatctacaagtaatgcgaggagatctacagatggtggtaccaaattaccaatcatgagcggacgcaatggatattacgtgtattcgtgggaatacccaaaaatttcagaaaaaaggatatttgatatatgtaggatatgcagtgatgaatctagaaaaaaaaactactgggattctacacatactatataattatctaattattaactaaaatatacaaattaatatgatataaaatagctcgaatcgaataatttacgtgtggtcttaggactagaatgaacgtaggaatgccgctggatatgcatatattcattgtgtctcaaacttcattttaccttttttttcccgagaatatagggtgtgtttggttaccggccacactttgccacaacgaaggttagataagttgtgacagacataaaagtgtggtgaacaaattagcagtcataaaatatgcaaagttgataagaaaaagttaagtctgacatgtgggaccagtggcggatccactgttggggctggttggtgggccagccccacctccaatccatgcatctagttagctactagaaaattaccgtgccggttggcacgctaataaatttatagccatgtgtgtatatattaccatgtgtattactataagatattgatttctaccaaagcaattgctgtcagttctttagaaatataagatatcaacatggtaatagtatttgtcttaactgtattttcaacattatatgaaaattcttggtggtacttgcttatgtacttgtaattttgcttatgttttctttatcttcaattaaacctgtagtagattgtatgtatttgaagatttttgatactaagattattgctactacttctttggtgcttttaatttcactatttactgttttattttctataaatataggatgttactatcatgaagttacttacctcgattttgatttaatatgaagtaattgcatttacgaaaaaaaaattatcatgggttagaaatcctaatattttttcccttttctttcccttcattttttatttattcagttttctattgctccatccagccataaatatttggccaaacatctgtaacttggccactaataacttctcgtagcttataggcttggttctttcccaactttctcaactctcctcactcgttttccgcg

SEQ ID NO: 20056 - DNA, 641 bp, Oryza sativa
ccatatcttgtccagaaacacccgacaagattcctaagctcttagtttctgcagggttttctagctgtacattaactgaagaagctccacttgtaacattcccagtacaatgagaagcagcgccaacattttcaacactggcaacagcaccatgttcatcactcgggccaacattatcatcatcgttattaccatcatcagcaggaaccatttcagtgtctccatcgttgctcttcatgtttgccactgccaactgcaccaaaaccatatgttaatacgaaaggaagttctgaagctttcagtaattctcagagaaaaagctcctgctacattcctaatataattcaaatcaaatgtaatcagcatagcacctcttccagacgtcccttctttaactgctcagctatactttcaaaagcatcacaatttgcaatggcactcctgatagtggaaataacatggccaagatggcgttcaagatacgaattttttgatttcactattctttttaacctcccagtggtcgcaggcatctgctttgctttagatccagaacagaaaggaaatggttagccaagtgaagccattcatataagcaatatatcgaaattagcaatacctatctcaagcagcgtcttatt

SEQ ID NO: 20057 - DNA, 6195 bp, Oryza sativa
cgccacctctttaaccattgcagcccgcactattttctcctctatcatcttgcccacctcttcctctccatcaccctgctcaatatcatccccaccttcaacctcccgctgtcctatttccccttcatgcatagccggctgcccttcctcatgcattactttatcacacacctcctccaagagacttacaacagccccatcaatgattttcgaagccatttctccgaaaaacttttcctgcaccccatccataccttggttcccattgtcaccactgaaatttccctccatcttcccctcctctttgtcatctaacaccatatcatcactcttcgacctcttggtctccttttcccttaattcatcctcctcttgacccccatcctccttatcatccccaccatccccaccttgctctatctccacctcatctccactttcgtcatatcccttcttttctaactcaaactcaagctcaaagtaatgatctccaatcactacatccaccctcctaggaaccaactttggacttaaaacagccatgaaaattcttccaaaggtattcttccttgtggttttcatatccaccatttgggtagcacccaacaaggaccctaccgcccaaagtgtgagatattcccttaatttcttcctcagcccgtacacctttacccaaactttgggcaaaaggtacccttcctcttcttcaaaccattcctcaaattgcaagcgcatcccggtggctaacccattgtccttcacatcagcccctccaaatgcaattgctcgttgaagttcaactttcgatggaaaaagaacaacaaaagagttatcatctttctccgttggctaccacttccacttgttagacacaattctttgttgttcctccaccacttgctcctttagtcaaaacacctcctacacatgataccaacgccatcttagtagtccccttcttactccttggcagcgggttgtgtggtatgtggtggaaaccaagtccctctaccgagtaacctaccacttgaaccgctggcttaggaagcttcaaaacagggcagcgatggttcacatggtccttgtaatcacatatgtcacaataaatctctgtgctgcaatttttgaagcatggcctttttgaaaacatctcgagcatactttccctttctctacccctagttgctgatcctcaaacaaagatggatcacactccatctccacaaagtccccattttcttctttcttctcaaccattggttgcttctcctttcttgccagcaccaggacctccacctcccccactttcacccggcctgcaccaccattcctctccgagctagcagctccccccttctcctctccctttcttcccatatcatccattttcctctcaaaagctggacgttgtgacccgaatcctcttgctgaccctctccctggtcttcctgcaaaaccgccgcaccttgggccaaagccacgagcccgtctcgggcggtaaccatgcctctgccacctttgaccgaagctaccctgctgcccaaaaccatagcccggatcaaaccccatgcgacttccctgaaagcctgttccaaaaccttcctcctcctccctgaagctacctctttgcccccaatctttgttgctgcacccatcgtaatcatctttcctccttgccatccctcccttccgaacctccttctcctcttcggctctaacctgcagctcgccacctacacacagacccccttcttcgctgcctctttgcctcccctctctattgcgaatgtttagccctagctgcgactgccgcctcggtcgctcaatctcccccttgttacgttccttccgagccaaagaatggcggcccgcgtgcgagaggagtcggcccaacactgaacaaaatttaacatttactcccctatatctcccttgccgatctgcaacgtgggaccatccatattagtgccgccgtggagaagactcgaacagacagacgcctcgtcttcttgcgctaattgtcgaccagaaaactgaagactacttgccttatcgaggttccccgagaaagtagatgcattaacatcctctctttttgagaacttcgccggcgttttttctaaccctgccgtcctcttcctctgccaatcctcaagcgctgctgagaggaaggtttcaagcttcctgggttgcgagatccgccgtgacggcagaggtcctttccagggtttacacatcgaaaccttcttcctgcaaaccgcagccaccaatctatctacaagatggttcttccccttcgtccttgtgctccctggaaacgaatgagcctttggagatgaatttgtacacaacaaatactctcccgctgaaagaatttcatcaagcgtgaaaccttctgccatagccttgcgtacgatgcttcctttttgaactgatcctaccacctcctcttctcggtgacaaacctgctcttcttcctcctcactatcttctccatcgagcacccaaaaacgtgaaccaatagccctaggcctagtttcacctctggtctcactagcgaagtgttttgttggtgcggaaaaactgtccttaggacacaattccaagtcacacgcgaggttcacctgtgacggcattattggcaggcatacttcttcttcctcctctaccttcttctccctttgcaactcatccctcaaaccaactagaggctccctcgtcatcaccggctgtggccaactcgccgagctggctgccggagccaaggtcagcctccgaccaccatagccaccgaccatcctagcactcatcaccacgactgctcctccaaaaaaccacatctgccgctccttcctccgagcagacagcgaacagcgcaagaaacgccgttcgccggcagccagcgccgccgctcgctgtcgaccgcttagcctgactgccgtcgcacaccgccggccaccggtcgccgaccactgagaagctgcctcttgcctagcccttgctagctaggtccagcttgccaggtactgaaattggacgaaaaaacgagaaggacgcttccgccgccgaccgccgcacgccgctctccggctgtcgcgtcgccggctgccctccgccgctcgtcgctggcagcaggcctccgagcctggcaaccaacgcacgccgccggctccccgtgccgccggacgacgccggtaaccgaccgccgaccaccgtgcagctgcctcttacctagctccagctagctaggtccagcttgcatggcactgttacacgaaggaaaacttacaatgccaaccgccgcttgccgtcgaccgtcggccaccgctcaccggtcgccgccgatcgccggccgccagccgccgctcaccgctgccccccggataccgaggttgcttagcgtgtggtaccaggacagttagtgtcaattgctattaattagacatctaatggcttgtaagccacaaaattaatttcactctacatgtatgaatataaagatggacgaagttggaacaaatattaccatatgtcccatacatatatattgcgcagttaatattctaattacatgtgttaagtcatttaaaattcatgaaaatgctctcaagctgcgacgtggtgctctaataaattagggcaaatattagaaattctaagaaaaaaaatcaaagtatctatttcttgattttcacttaaatcgttaggtccaatattataaaccattagattaaattgattctagaacaaactaaatactacgaggtcccacctctcctcccgcggcataggtacgcacctacgtacgcttcccctccctttttttcattttttctccttcttttttttcctatgcatatgcttccctccctttattcctatatcatacgcctttatgagacgatttaatcaaaagaattttgagtatcttgcactcgcatttttcatttacggtcatactacacggtatatatatagatggactatataataattaactagcaataccttttaataatataagtgcccgcacatacgcgcgggccaacttcctaatttataagtaaaacttttatatacatgttcttagcaatttaaaagtaaggctgaaaaataaacttcgatgaaaaaaaacgccaaaatgagttttaaatttaaggttgaagatttaaattttgtttgataagaggctttgcagcgggtggcaacggatgtggtttaccagtggatggtgatgtttttgttgccgttgttgtggacgttgacgatgacgaggtcgccctttcgcgcgtagatggtcgggccagggaactgcccgttcacggtgaggatgctcttcttgtggcacagcctcgtgtagttagtctccgtaatctgcagatctcatcacgcatggttaaaactcaaaactcatttcgtgcattcattaattcctgtacatcgacgacattgatccgcgaacacgctagaattcaagtagatcatcacttgcaaagaaatcgtagtggcgagtcttggcgccatgagcggggttaactactgcaagtgctaacaccatgcctgctagtaaccaaagcaataatgcaggtatcttgcctgttgatcccatcgccgaacgcacacagtattcaatctccaatccaagcgtataagaacacacagagctaattgagattcttgtacgcgcgaggtagttatttggttcttcgcagtagctaactagctagtgccgtaagctgctgctttgcctgagatggccatcatctgacgaatatgtatttatagggaacgcatgtatgcatcatgcatgaacgtgacgactgatgactattctcccacgaaattagcaatttattaatcgttctccagccgccacggcgtgaaaacgttaaaatggcgtgagttgattggcgacaaaactgacggcatcttgaagttcaaatggctcccgaacgagaaaattacatatctaccatcgcataagaattgcttcgctagaataccatcattaaaataggcttcactgaaataccactctcaaaccatgggtgttcactgcaatgctatttttgtgatttcttgcatttcgaaattatttttcctcaattacatattttcttggaccgttctacccctgggtcacatgttgaatcacatggtggctggtgtgaatctcgcgagcggagggtgaagcggcgatgccggtgctcgtgcggacgccgcgccgcggggcaactgacgggtgccgcgtctgccgcgctcgtcgtcgcctccgtcgcgcgaaggagggtggcggcggggaggaacgactccgacgccgcgccgggggagaacacggcgctgcgaacgcgcttctacggctgcatccgcgtgttcctcgtcctgtcctgctgctgctcgccgtcgaagaagtggtgtctctcctcgccacttgcttctgtcgggagaatgctctcgaattggaatttcagatagactgttcattcgcttgtcttgccacattcataatctgcctgaatcaaaatattcgaattttgagctgtaatagaaattcgatccctagttctagtttttctctgcgcgaattgaacaggaggattctgttcttttgggaattcggattttgtgtggactctgcattggattgggttggatctttgacctgtgttcctctttgacccgtaaatgtttctggatggtttctgaaattatgaagttgccgtgatcttgcttgctccatacggagtacactataacaagaacataatttggtgttttaaaggttgaatttcggcatctgcaccagcaccggcgtcgccgcttctccaagggtagaatggtccgagaaaatgtgtaattgaggaaaaataattttgagatgcaagaaaccaaaaaatggcattgcagcgaacacccacgctttgagaatggtattctagcgaagcccattttagtgatggtattctagcgaatccattcttatgcgatggtagatatgcaattttctcctcccggacatgcgcatcctctgtttcctgcttcttcaaccaaatcaacactagatgtacatgttggttaacttaattaattttgggcatatgggagcagtcgaggttgttaacgaaccgatgccctgtttagtttcaaagttttttttctaaactttaaacttttcatcacattaaacctttcata

SEQ ID NO: 20058 - DNA, 3279 bp, Oryza sativa
ggtggttttcgtgatttcgtcgtagcctagcggaggtaagtaggcacgcactcgatcaaagtctcaaagggcacctttgcatgcgtttggcggccacgaagcttcttcttttttaaaaaaaagaagggccgccaggaagattttgaaatcgactactcctatcaaacactgcactacagtgaacaaatcaaacgccctgaaaatcaactgtaatccaagacaattttactgtaatccactaaaaatatgtcaacgcaattttagtttttccccacaaataaacaccgaaattgctatgcatctattgcaagattttttttgttagagatcttgcaatttttctgaccattggatttttatattgagattcatgttagggacttcccataaaaaaaatgcaaatgcgtgagagaagggatccttaccacttgaccgagttgctgatttcgtagccaacaagatatttatagcataactagaaaggaaacccgcgtatatacacatgaaacttatttattattcataaaaaaatattaaaagaagtcatatctctccatatttattataacgaccgtaaattatcttataataataaaagaaagaaatttttataccgtgaattgactataaacattaatatcttaaatgataagaatatctcgagtgtcacaagtcatcccttaaccattttcatatctattacatccttcgacatcgttagtagcatcctcatatcctccgatgacttcgggcttgttcactttgctatcatttttagcattgctaaaacttggtaaagttgctaaaattttggtaaggttatcaaattttggcaagattttatatgtacttactaaaatttggcaacaaactaaacgtagccaaaattttaacaactttaccaaaaaaatggtatggttaaaaatgcatcaaattgaacatgcccttctttgccccttttgccaattatgcatttttagtctctctcttactcatctttgatgctttgagcatgcacaccctcctaagtcatgagaacttacccatcctccattttcaacgtctcgtactatcacctttccttttcttttagataacagagtatttcattaatcaatgagaacgtctgacatttgcactaactagaagtgcacatagtaaaaaagaaaataaatgtaaaaatgctagacaacatgaacatattatgttgctatatgctgcaatgtgacggctttgctctactaaaaaaagaagaagacatagtaacaatgtaacataaacacctttctaactatttacgcttttttaagctcttttccgttcacttctggactttttggctgtgtgcctacgagtagaggaggcagaggccggagatgtaatccatttccattattaaaaaaactatttacgctgagcgcttctctattgccaacattatgggtgtcattattgttgtctatcttgaaaaaagaaattacgatttgtcatcggagaagaggaattcattgtcaactaaaattcaagtgtttcttaggagattcatacctatataatagaaaattcaatccgttgaaaatattgaaaatatgcagttctcatgttctaaacttgtcattgattatttgttgtagcaccttaaatattggttttgattgcttacgtatggctatcaaaagtgtattaaactcgtttcacatctacactttctttatgttggttatttatactataaaagagaatggagggagtgctatattttgtagtataatcacatttgtgcaatctaaactagcaccaaaagagtggactgaaaacaacatacataataattggaaaaaaagaaaataacttcatcttttcatttatgtttatcagccaaaatttaaatttacaaccttaaattggagttgattttgagattttttttattgtattttattttccagcctttgtttttaattcgttaagaatacgtatataaaacttttattcacaaattatttttcatttgcaaatatattgtttcgcattttccttctatatgcttgacgaaggggccgaaaatttgtttgtattttgaggggccaaaagcccaaaattgggttcattttcaattcacacaaaaatcgcttcccacaccgacacaccgtagtagtagtagtagtagtagtggtggtagtagtagtagtagtaccgtacaagccgcccttgtccgccttcacttccctaaaccctaaaccacccactttccccaatccccacctcaatggaagaagcggacgacgccccgccgccgtggaggcccagcaagccggcggcggccatcgacggctcgtcggggcccctcgccgccgccgccgcgcgcctctccggccgctcccgcgcgctcccatcctcccgcgacttccacttctacaacaacttcccctccttcaggtcccccgtcggcgccgccgccgccagggcgggcgcctccctcgccgccctcggcgccgcccccttctacccgaagcggcacccgccgttccccggggacgacctcgacgacgcccaggactgggtcgtcggcgtcatcgacgacctggccgagcagttcggcgcctccatggacgagttcaaggcggcgcgggaggaggaggaggcgactggccggagggcgacggaggaggacgggttccaggttgtttacggcaagaagaagaagaaggtgatgggcggcggcggcggcgaggagggggttggtagaggtggtgaggcgtttggtggtggttctggctcggtgaagatggccaccagggataagtcggccgcgccgggggcgaaggcgaaggtgccattccacattcccaccatcccgcggccgcaggacgtgcaccgcatattggtggacaactcgagcaagccattcgagcattcatggcttgagaagagcgatgatggttcccgtgttgtccatccattggttagtgttctgctaaataccttacatttgtgctaacctcacatcacaatagttgtccttccttattgcccttgatttgattagtttgattataatgaaaagattccgccagtaaaaagcaatgattttttttatttagtgaagcatgtagagagattatgggattaagagatcagcaagtaatgtaacagctgattatgtgaaaaatagaatgtacagtgcaaatagaagttggtaagatggcacatgaatataaaagaatcatgtattctgctagtggagactatggtattactaatgggcaacatggctat

SEQ ID NO: 20059 - DNA, 6494 bp, Oryza sativa
cacatttgttcagcttggaacgtggaattggtactggagttattgtacactgctccttggttgtcattttattccgtgcaaaagttaagtggacaacaaatatcagagggactacaaagaattggaaagattttatcatagctcaagattaattgttcacttccgcgctaaaatggaattggattcaaaacttaagaagcgtggatccctcaaatttgccataattttattttgtcattttttttagagacatttcttcttccttttttttcttgaaaacattttttttcaaaatttttattgttcaccaaattttcggtaagcaaaaactcatacggggcttaagataaaattacacgatcataacaaaagagaagtatacttactgtgcaccttgaaaggtgatgtgttacttctttgcttgttgcaatttatcgattagtttcctgggccctgacttaccttcagtgtgaattgaacttgaggactcacccatgaatttgaaaaccttcctgcaggggttagtccacagaagatatatatccaatgtccatgaacatattaactctaaaagttcattaatcaaactcgactcagttctaattcaatgaattgtaatggtatatttcaaaatgggtaaatttataatggcatggatccaattaaccctaatatatatgtgtttgataggcataggatacctaacaatttttattttttccctcgcactggacacacacgtcacgcaacacacgcaaatagagccacacatttgcccacgacatgaggagtagcacatagtggttgttgatactggtcaatatttttgcgctagagatgtggagtggatcaagtgcgcttcatactgtactacagtggcataacatacgcctccataaatccataatatattggcatagaggatcgatttcttcaaagatttataggccagctggccagggaacatgattagtggaagaaaattatacaggactgaggtccttccctcacatgaaatactttgtcttcctgcacgacacctgtccagcacaaattacaaagcatgcagcatctttcttttctccaatccccattctgttcttcaatatgctcggcaagacggaactaccactgtaggcatggcagcggctgccggcttcgagctaccaccaggaacgtgcttggccagtagacaagtaggagtagatggttaaatgttagaatggttagatgttgctcttgttactttaatttcaatctccattacagataatcattggtggttattgaatttatccaatcctttgaggattctttccgataacaagctttgctcgattacaagctgacagcccttctcaacaagaggcttggtgctgcaaatgataattagattgtattatcactgttatgtgaactcttgaataagatgacacattgtgaccagatgacgaatggagtacccacgttgcggtaaggcatggcgcatgcccttgatgtcgcactctcccagcggccgtccataagcccgatttctgctcaccgccgtggccacgttggtcggctcaagctatgccttgttggttgtcgctgctgagcacgaaggacggaaggatgaagaatggggattgggaggggagcgcctgcttgcgttgagattcgtattggacagatgtcatgtagggagacgaagtctttcggatgaaggaaggacttgggtcctatgcaattttctgtggaatactttattccgtatgcttgcttatgggtctaggaggcactgggaatacatatattactggcaaattgttgatatttcttaatgaaattactagaaatataattcccaacaataacgtagaaatattcatgctatatttatggtcacagatatgacccgcaagcacacggatataccattgtagcatttcatccggagtattccaaggtatcgtatttatttaatcctaaggtaagatatgataagagagtactatgctaatagtttatatttcacccgggagtattccaaggtatcgtatttatttaattctaaggtaagatatgataagaaagtactatgctaatagtttatatattacttgcatatattaaggtctaagcaggggttaagtgattcaaagggtagatgacacacagaagaaagaactatgatactctcactaaatataatctaagctaagtggagaaagaataggaaaagaattcatttctatacttctagtatacatacatctttagtctaaacttgttagtatatagtcatgcacccaataccccctaacagtgccctcctggtgtttcgagagaccaccccggattgtcgagttctttacgacaacctatcatggccatccaaccggaactaaatacgcaggagtaccgtccccaggaaagtgtcttaggaatatatactaacgcggaggaatacctgtactgagctatcaccatcagcagcccacctctactctcccacatcatatacttaataatctagacaccacgtagtgatacttaataatctagacaccacgtccatattattaaatactactctatatcccccgagatgacatagagcaaccgagtattcggacactaaacccacacaattgcacctctctgataggctagctacacaactatattgatacaagtataaagtaaagtcggtactcagataatataaatggaataaaataccgaagatgtataaataagaatattctattaattcaataaatcttacaaaagaagagaggaatgctactagagccatacccgaattctcttgaagacccgaggactcataatacaattctaattcctactccactagcactaggatactactaaacttgagagagggagagatctcttcttcttgagtgtgttgttgaagtggagggagtgaagtccttatatagggcggttatggcggttataagtatgcggaatgtccattctgcccctgcaaccgccatcaggatatcatctggagcgtccacgccaaaacctggaatcaagggcgcaaatgggggttcggccgaaccaaccagaggctggcccaaacggcccaattttcagcaggccgtctccctgttggctcctcagtccagaaggcctagtggatcgcgtgaattctgtttattggcccatttatccataagtttggatctcgacaatgtccgattgattgatcatttattttctgtcaattctcctccatttatatgtgcttcttttgtatacatgatagtagcatagtacatagtggaagtagatattttatttgaaaattatgcattgcaagcatagctagttttcattaattaggtaatattgtcgaaattggtcgataatgaccttcaacacaaactcagaaggtttaggatccctagtattgtagaggattactgtatctgtgtcgcctataataaatgaatccatagagcaccagcattttaaagtagcaacagtgctcaaagcgacatggcagccaaaacttggctttcctgttttcactgtagcggtctaatctgagctgttggcccaatccaatcagtaaagaatgtgccctaatgcacccgaccctaatgttatctgtagcaatcctcttttatcttatttggtggtgtatgcacgtactgaaaggttgccgccaagacaaatagttctcacttcagcgtgtacttcttcactcttacaagtccattagctgtgaatcgaaactgcaaactcaagctacagaagttgcttcttatttcgtattaacaaattcattatccaaacccagagtttctgccctgttgttcttattgttttatatatgctattgttctataataaagtatagatatcactgtatcggagttatcgaactctatgaatttccctctaggatgttttgttttccgataccatcaatacaccagatgaatggttttccatgagttgttagtcacttttgtccaaagtccaattgagaaacaacaattcattgacattgttttctatagctctgttttattttgagctcctggtgacccttacttttcacaaataatttatgaatagtactacaagaaagaacattcattccactccaacccttttttatcgaacctacaacccatgcatttttactaagcctcgtcttaccaaatggtataagtattaaaatattaaaactgagtatgttaaaataaagacttgatggagtgatcaaacaatgcttggattatcaattccgcagcaagacattcttggtggtagttgcagttcatgcatgcttctatcaaacatgtcaatgacctcactcatggaaggccggtcttcaggtgtacattggatgcaccaaaaccctattgtcaccaacttgcgagcaacctctgatatgcaagtgtttctactatcaatgccttcggtagcagcaccacaaaattgattcaagttgtcatataaccattcagggaaatacttgcttacggtctgcatgcttgcattggtattttcccttgctccaaccatttgaagaattagcatcccatagctatatacatcagacttggtggtcacggctccatggtgtctccaaaacacttcgggtgccatatagccaattgttccccttgcaccaccaatagagattttgctctcttttggcttacacaactttgctaatccaaaatcggatatttttggacggaaatcttggtctagcaagatgttttgtggtttgatgtcaaggtggacaacacgatgattacaccaacggtggaggtaatcaagcccttgtgcaattccaaccaaaatctcgtataacttctcccagcttagggatttctctccttgcacggtgtcaactacaccaactgcgtatttatcgagggaaccattgggcatgtactcatagacgagagctctttttgatctatgcaagcacaatcctaacagagtgacaacattgatgtgtgatgttctgccaatgctgaccacctcattgatgaagtcctctgcatcatccttcgtgtcctccagcatcttcactgctatctcactgccatcagacaagctgcctttataaactgtaccatatccaccctttccgagggtgtgggcaaaagatttagtcatctttcgaacttcagagtaagtgtaactttttatttgtgtccgtaggagggactcaattcttggtgaatttgttgatctccattgccaaggggacaaatgcatgtgtttcttataaacttggaagaccgcaagaaccaatatgcttatccccagaagacttgacgtagaagctattatgtctgaaaaggaattggagcttcaaggcataagaacataacatatggcatgtttacaatgttggtattaagagtcctcttatgtagttgtaaccaatcaacaccaagaggtacgtttatcaatcaatatctcctaattaatgaacacttaacagataccatggcaaatttacctttctgtcccttttatttccaaatctacctctccacaattttaacttttcatagtaccatgcatagtataaataaatcttattcattggaatttgatcacatggacgatccataatatccaaaggtactttgcaaaatctattatgctgtttaatttcggactgactgagagtttcaggtagtagacagaaggtgtcgtaatttctttgcatccttgtccacaatgtaaattagaaaagcaagggtgtggaaattttcattattagtgtatctcttgcaaaatatttcataaagggtataataaaacttacagtatatttaaacttaaaatatataaataattgtagtttttgcattaagtagatcctatctaaatattgtaaaattcatgcattctgcagaagccgtgtatgaacttgagatggatgggccagtgtgtgttggtgaaagtctataccaccatgaagaaaaatataaatatttgacagaatcaggatatatgaattgtaactacttgaatggtactctcttcatcaacaaatataaacattctggttatttgaattttgtttagaaatatatgtaacaactcttacaatactacctgtactatcaaccactacatatttaaatttttgctcatcttatcccaacctttctcccaccaccaaccattcctcgtttattgagcggcatttaatatgtccaaaaaacttcttacatttaaggatgacaaaataaactttacatacacatgcaaaaagttttgtataacacacaaataaagaagttttgtgtcctacagttcaaaattatttaacaatataaccataaattataatttgagctgtatgatatcaaagcagcgaagcacgaagggttgggatgaatcattccttacatgtttttgtcctcttcttttttgattctggaacaacgggaggatctgatgaagagattgaaccatcagctgaaaaattccaagca

SEQ ID NO: 20060 - DNA, 20447 bp, Oryza sativa
ggaatatagttgcaaggtgtttcaaaaaggctataatcttattttggttggagcaagtgctatgtgttgagcaatatagataagttgtaatgacgtagtttttgagaaacaaatgttcattcacctatgaaagtaatcttcaggggcacccattgcactcggttttgggatttgcttaaaaggaggaacaacactgtcacaccccaatctgataccgccatacaacggcacctgacaggagcgtgtcgtagggaaaacggcgcgaaccgcttcctacgaaaccgcgatctcggtaccagtcccaggacatagtgctggtacccacggtgacaaatatgaatcatagcaatccttaaaataaatagaggacttatttaccttaacttaggttgcagctcagacagcccgagaatacaaccgacgacacggacgaggcgaacaccaacaacggcagcagcagcggaaccaacggtctaacacccaacaccacaggcgatggctgggaaccaggacgaaaccctaatcttcacttcactttatcttttcttcagggcggaggaactatatatatatatttatttagagcaagagtgagtactttcgtactcagcaagtcacgggaacttaggtgtttaatgcaagcttggaagagaggcaaggttgttttgcaaatcttttatttgaagactttttgaaatcactaggtgatttacttctttctaagtttgggccgaaaagagacttgcgtctcgattcgactttaagagatgtttttcaacagctcatttagtaatgtaccgacctcccgggtcagatcattacttttcggctcccagagccattccacttgattaatcggctcccagagcctttttcattttctcggactcccagagtccagctgcccagcagcaaagcaatccgcttccactcgggaaacctagtctatgatgcccacagacatcccgaatcacacagattcgtttctgaccactcaggtcatccatctgccacataggctgattctggttacgattcccacaccacaacaacttttcacaaagcacaggcaaacaaatctacgcaacgggaaccacctcacatccgcccatgaccgtgggcacggctgttcgaacagttagttaacctctgcagaggggtacactttacccacaagatacgaacttattccgaacacccgtcggtatcggaggttcgcaacaaagcctttcccaagccgacccagggttatctcatgccacatagaaggatcaaatcctcacataaacataggccattttaggcgttcacaaatcaaactccaaccacctcgatcggtaattcagcaagcttctcgttcttgcattaccaggaacccggtttggctccaaccgaccccgccccggcgttcccaactattggcatgcgaggtttccctgaaccgactagcttcttagccagggtgtcccattccaccttgtggttgcactttgattatgtgtcgaaactagatttcggcaataataaaagggggtggctatcaagctaggaaagtgtatgggtttggagacaaaggatttatacaggttcaggccttcttataaaagaagtaataccctactcctgtccggggatgaatccgccgagtgtattattgattgtatgattcaggagaaatcagcatatgcccctagaggcgcccggaccccccttatatatgggaaggagtccgggttacaaaagataatctatattcctaacggaatatgaagatacaggtaaaatacagtcgtaaccgactaagtctcagggtgtttccttgatacacaagttaagaaacaaacccgagatacagataagatattctatctacattaggtatcctgtacccagttcgaataccatcgccgtgtagatatgggatacccataatctccacagtagcccccgagtcctttgcagtcgaccatcgtagccctctcaaagatgataatccgagtacttcaaactcttcaagccaaaacctgccgagtggactgtaaagggcgaaaagataaagagtatggtgcatcgaatagatgcacctaattaggtgtagcccccaactatgtgattagttaacaaactaaacatatagttgaaagacaaaataacaacactattgtgcattatatgacaaaagcgtacgcggcgcctaaataggcatgctagccgactgctttttatccacaataaaagaaatccgagtggtttacactctaaaaggttcacgaatgaacacactggacaggcatccgaatataaaactctaaagattacccaccaagtattataaaaattatggtaatgaataagtctaaatagcctaggctatgactatttaccataacaaaaataggtatataacataccaaggaagtgactatgataaaaacaagtcatcccaaattaacccagacagcttttgtagcctaataaagctaacaaaaagcagtataacacctttctgtcgggcaccttttaatttgcattgcaataattccaaagaattatatgaccgcataaaaaggatttttatcagcattgggcaacactgttgtgcgcataatattgccaaagcaaaatatgcctaagtccctaaggaacacaatgggccacgctgttaaaagtattgggctgaagtactgttcaggcctaggcccattagcacctccgatacccttaactgaaaaaatccgatatccaagcgacgcttcgtcttccccgccggaactctcgccattttccccactccctgctacagtgtaaagctgccgccggcgaactagggttctcaactccggccaaatccacctccgaaaagtgcatcaaaatccctcccgtgatccaccgcctcaatccctcacctctcccaagccatccctcaaatcaaatcaacacatttgagtgaaaccaatggcggaagagagagaaagcttcgaaggtcaatgggcgccatccgacgtaacggaagagaacttgaaggagatggtggcgcacggcgttctccctgccaaggagatcatcgggtggcgaccagcgcacggtgaggctttcccgtctccggatactcatgagattgtggtcttctcgcatttcttctacggcggctttgctcttccgacctcaaaattcttccgcgggatcttgaatttctatggaatcagcttgcatcacctaaacccgaattccatagtgcatatcgccaatttcgtccatgcttgtgaagcctttttggggatcaaacctcactttgccctattccgccggatcttcttcctcaagccccaaccaaacaagaacaaaccgtgtgtagtcgggggggcaggattccaactaaggggaactctgagccaaaaatatttctcgatgcccttcaagacttcgaacaaaggatggcatgcaaactggttctatgttcagaatcccgagcctgctcttcccgggtactcttgtcttcctccagtgtaccaagatacttggaattctcttccgatcggagatgaagcagtacaagccttggagttgttggatcgtatgttaaatcttaaagaacaaggcttacagggagagcagatcactcggcacttcattaaatgccgactggcgccaatcaaggaaagatcccgcacagcattcgagttcgacggcaaacatgatcccaaccgtgaagaaccagactccctggatttcaaaatcatgaaggagaggatgtataaaatcttctcaaatgcaattgtagtcagctactctcatcaactgccagtcgtgccatataatgcattcaatctgcctccacaggtatgcatcggaaaccctcaaaccgtgatcagaacataattttatcttcaggctgagttgactaactatggaagcatcttgttcaggaatatgcattgatgaagtcagatccaccagtctctcagcgccggtctcctcgccaacacaccgctcagggaggtggagggccaacgatcagaccagatccgcaacctcagacctccaaattggctggtcaaacaggtcctcgcaagagaaaactggtacttgatgatgatgaaggcgacgatgataaatctggggataatggctcgccaaataaacccccaaagcgtaccatgcccaggaaaaaactggctggccgcgcaataccaaagatcagaacatcttccaggtattagacctctcggtatgattccgcttcggcatgttttccgatgaaaataatgctaaatactgaaagaacactctgcaggaaaccatctgatatagatccatctggaaaagaccctgatccggctatgacagagcaaaatatatccaaggaccccgagccgactactgaaaaccagccgactgctgaaagccagccgactggcgcccatgcttcgggaggtaaggccaatccgagtgacctgccgccgactggaaaccagtcggcaacgactgaaacggcaacaactcaagagcccccgactggaaaccagtcggacgcaggccctgatccagagattcccgaagtagaagcgcagacgacgacttcgcaaggaccagaggttggtaacgactcgatagctgggtcttcaggtaaagaacaaagatctcctcacgctcagctaggtacatcttcaggttagttgtcttctcaaacaatggcgacttaaataacctcagtttatccgtctaatatcttggaaacacaccaggaccatcagatgatgacggggaagaaattcctcgcataaaggcgaccgacgactctcgtcctcctatcttgatcaaatggtgggatgagaactcacaagccgccggtatagtcataaaccgtcaaaaagaagatgaagaagtgtgccagctaaagaaagcgcttggagaagccactcgtattgtaaatgtaagtcttccgggtgacagccttcaataactttgttctctttttagcagaaactaaaccatgatccatcatgcagagaatccatcttcgcaatgaggccaagactacaactctggaaaagctggttcctcatttgggaactctagaagcagtcagggaccagctgcatgaggccaagggtgcgccaaaaagacagagaaagagttaagggaccgaatcgcccagctccaggatgcaaacttcgaactaagtggttcttcaaaaggtaatcatcccgatctgttccattgatttatgctgtcataattgcatcctcaaccatctggatttcaaacagcgcaagccgccaggatggaacagatggcgaggcaaattgaagccctggagagagacaagacagaactggctgcgcaaagggactcagccttgaaggaagtcgaaggtagcgccagctaacagtctgagcttctctccttataatgcaacagatgctcatcatgaatgtgttttgtagatcgcaagatcaaatcccaagctcagtttgacgtcctggttggcaagatcaagaggcttgaaggagcaagggatggcgtcgccaacgccgctgcaccaattatccaagccatgttcctcaataatggtggtccgagtgcactcgacgcaaccgaaatatttgacaagctgagtgttgctccggaagtatatttcaagaatatcaagaaagctggaagtatgggagctggcatggccttggcgatgacaaaatccttgtacccgagaattgaagtcgacaccattgatggatttgcagacgggacaagtgaagaagctgcccttgatcttatcagcagtgcgcaaaatgcggctgacaaaattgcgagcgatgttgtagagcaatttcgcaacaacgacctccagccgagtaatgaagactctgatgatgaaagaactgattctgactgatcatgaatgtaatgtatggaggctcaatttgtacaatactggtgtatttatgctgtgcttgatgattcttgcaaagtttttgatttcttaaaagtttttgctaagctttgttgagcctaaaacccaaagaagctattaaaaaccttcagtcctcgcaaactaagtagaaaaaccaaacaaggcaatgataaaccaagtaagcaaactgaattgataaaaaatcacactccattattatgatgatagcccccgactgacaacttcaaggagaaaacttgacgtttgacagtcaaaatagggaaatacaatgataaggttaagcgtagaaacgacgaagatgttcaatgttccaagagttgtcgacgagagtgccgtcttcgcgcttgagtcgatatgaacctggccgggtaacttcagagataataaatggcccttcccatagaggagataacttgtgccgatctcgtgtggtttgaattttccgtaaaaccaggtcgccgactagaaaggcacgagatcgaacattgcgattatgataacgtcgcaacccttgtaagtaccgagctgactgaatcaaagctgcttcgcggacctcttccagtcgatgcaagtcgtccactcgatcttcttcatagcgttcttcacggaaattacggaagcgcaaagactcaaattcgacttcactcggcaacattgcttctgccccatagacaaggaaaaaaggtgactggcctgtggcccgactgggtgtagttcgcaaagaccaaagtactgatggcagctgttgcacccatttgccggcatagggttttagccggtcaaaaacacgcgctttaatcccttgaagtatcatgccattggctcgctccacctgtccattgctcatgggatgtgccactgaagcgtagcaaatcttaattccaaaatcttcacaaaagtctttaaaaactccgccagtgaattgtgtgccattatcggtgatgatccgattgggcactccaaatctatgcacaatgttgatgaagaagtctcgagcattgtccgctgtgattgtgacaaccggtttagcttcgatccacttggagaatttatcaatggccacaaagagatgcgtgtaaccaccgactgcctttttaaacgggccaaccatgtcgagcccccaaaccgcaaacggccaagacagcgggattgtttgcaactcttgagctggtagatgaatttgtctggcaaaaaattggcaaccttcacatgtgcgcacaattttgtcggcgtcggacactgcagtaggccagaaaaaaccctgccggtaagctttgccaacaatggtgcgcgcagcagcatggtttccgcatatcccagaatgtatgtctttcagcaattgtctcccttcctctaaagatatacagcgttgcagaattcctgaagggcttttcttgtataactcggattcgtgcataacataaagtttgctccgccttgaaatccgctcggcttcatctttatcttgagggagctcttgagaagttaaaaatcgcatgaagggctctcgccagtcggcttcaaccatagcgacatcatgagtgcccgcaacttgagtggtatctttgtgaggtacagtcggtgtataaaggtgttcgacgaaaacatctgagggcgccgcctcacgcttggatccaaaattggcaagtctgtcggcggcttcattgttgtgtcgaagaacgtgactgagttcgagtccatcaaatttgtcttccaacttgcgtacctcttgtcgatatgccatcatgttgtcgtcgaggcaggaccactgtttcataacttggttaacaaccagctgtgaatcgcctcgaactattaaacgctttatccctagggaaattgcaatccgtagcccatgaaggagggcttcatactcggcgacattgtgggacgccgaaaaatgtatccaaagcacatagctcaatctttctccagttggggaaatcaaaaccactcctgctccagtgcccgaaagtcgtttggatccgtcaaaatgcatggtccagtgctccatgttctccgcgggggtatcctcttggcactcggtccactcggcgacaaaatcagctaacgcttgagacttgattgaagtgcggggcttgaatgatatgtccaaagacatcaactccaaagcccacttagcaatccgcccatttgcttcgcggttgtgcagtacatcgccgagtggaaacgatgtgaccaccgttaccgggtgaccttgaaagtaatgagacagcttcctggtagtaattaaaataccatataacagcttctgaacctgagggtacctcgttttggagtcggccaggacctcgctgacgaagtagattggtcgctgaactttctggacatggccttcttcctcacgctcgacaaccaagactgtgctcacgacctgggaggtggctgatacatacagcaacaacggctcctgcgggtgtggtgaagctaagaccggtggcttggtgaggagttgtttgaaatcttcgaaggccttctgtgcttcgggtccccattggaaattatctgttttcttcagtagtttgaagaagggcatcccccgctcgccaagtcttgaaacgaatcggctgagcgccgccatgcatccagtcagcttctgaacatctttctgggtgcttggtggtttcatgttgaggatagcagtaactttctccgggttggcttggatgcccctatgagacaccataaaaccaagcagcttccctgacggtactccgaaggtgcacttttcagggttcaatttcatcctgaaagcacggatgctcgcaaaggtttcttctagatccgaaatcaaatcatccttttgtttggtcttgacaactacatcatctacataggcttcaacgttgcggccaatttgtgttgagaagcatctctgaatcatacgttgataagttgctcctgcattttttaatccaaacggcatggtgacgtagcagtatgcaccaaaaggcgtgatgaatgaagtcttcaagcagtcggattccttcagtcggatctgatgataccccgagtagcaatccaaaaaactgagaagctcacagccggcggttgagtcaactacctggtcaatgcgaggcaacccaaaaggatctttgggacaagacttgttgaggtcggtataatcaacacacatgcgccattgccctgttttcttccgaactagaaccgggtttgccagccagtcgggatgaaggacttctttgatgaagcctgctgctaacagcttggttaactcctccttgatcgcgtccttcctgtcttgtgcaaatcggcggagtcgttgtttaataggcttggcgtcttctttgacatgtaaggagtgctcaatcacctctctgggaataccgggcatatccgaaggtttccacgcaaagatatctttattattttgaagaaaggtgatgagcgcgctttcctatttacaatctaactcggcgcctattacagcagttttggtaggatcagaaggatctaagggaatctttttggtctcggcttcggtttccccactttttgaaattttggcagcgggcacttctccttcgctcaccgtggttgcagccagtcggatttcctctcgggcagacgccatctcgcgggtttgggccatgtcgcaactctccttgtcgcatgtgacagcttgcttgatgtcgctccgtagggttaggactcctcggggaccaggcatcttcatcatcatgtatgtgtagtgcggaacggccatgaacttggctaacgccgggcgtccgagtatggcatggtatgctgtctcgaaatcggcaacttcaaagctgatattctctgtgcggaagttttcccgagtgccaaaagtgaccgggagagtgatctggccgagtggagttgcggataatcctggaattactccatgaaaaggcgcattgcttggttttaactcggagcgagggatctgcatatcatccaaagtcttggcgaagaggatattgagtgcactgccgccatcaatgagggttctgcgaagcttgacgttacggaccactgggtctagtaccagggggtaccgccccgggtggaccactcggtcaggatgatccgagcggtcaaacctgattgcgatctctgaccatcgaagatattggggcgtgtcgggctgaacagcattgatctcccgttcggtcagcttttgcttccttttagactcataagccatggggccgccaaaaatatggttgagctccttgcggtggtcctgaaatccagccggggtgtcgccgtcgtccttcttccttgacgtgctttgttcctcgtcggagttcttccgagtagacttggtgtactgctccgcgaactgcttgtagatgaagcactctttggccacgtggttggaatttggatgatgcgggcattgggagttcatgatcttgtcgaaggtgttgacgcgcgaacgctgtcgagaagagtgagtagtggttgcaacaagttcctcaggcttacgcttgcggtccttatgattgttacttccacctcctcccgtagccggcgtatttttcggcttccaactggggcccgactgctttgatgcggtgacggcgtcttcagctttggcgtactcgttggctttttcaaacatgagcttgactgttctgggaggtttgcgcccaaatttgccgaccaattcttcgtggcgaatccctttggtgaatgcggcgatgatgacgtcgtcagtgatgtcggagatcttgttacgttgttcagaaaatcgtcggatatactctcgaagggattctccggatttctggataacgttgtaaagatcatattgtgtgccaggacgctcgaaggtgccttggaagttggcgatgaagtggtcgcgtaattcggcccaagatccgatcgtaccacggggcagtccatggagccaagatcgggcggaatctgctaaagccaccggtagatagttcgccatggccttgttgtctcctcctgctgcgcggattgcgagaccgtagacggtaagccacgattctggattagtggtaccgtcatacttctctattccagtcggtttgaagccggctggccaatccactcgacgcagatcgtcggtaaaggctgctactccgtcaaggtcgtcgtcgtggcggtccggcgagtgatggtagcctcgagctgctcggcgctgtatgattgtgtcgcgaagatcgatggggcggcgacgaggtggtgagcgaggccgttccactcggcgctccctatgaaggtcgggaggtgagtgaacagatcgctcgtcgtgacccctgctcctgcggttggatcctgcgccggtgatgctgaggcttggatgacggtagtcatgagatcggaagtgggggactcggctgccagtcggcgtgtggacgctttcggagttaactggaaccgaggccgcaatcatggtctttgtctgattcaagatgttgacgacgtggtcggaacgattgagctcgttttggttgagaagggtgtcgaggagggtgatcgcggcaaccgcattgtgttgaggggtgcggaaaaccggtgtcccttcgacgtcttgttgaccgatgagatcacgcgctcggcgccctgcttccaaagctcgctgacgtcggtcctcagcctccttcgcagtccgctcgcggtcctgctgctcgcgccgtagccgttcttgttcttgtgcttgatgctcctcctccagtcggcgacgttcttcggtctcccgggcttggcgttgctcctccgtctcattattggccatgaaaacgccaaagtagagaggggtatagttgtcatctaggcttccgtcgaagtcgtcgaagtcgttgaagtcgttgtagcgagagctaaattcgtcgtactccacgatgtcagtaggacgtgagtcgacggtgggagagctattgtagtcatccagctggtccgttgaaaccgtgccgagtggttggaggatgacgccgacttccctgaagctaggcgaaatcggtgttgaagccgacttccgcctaggcctacgggatgaagacgctgtcgtggtgaagacggccgctaaatcgtcggggagcttcatcaggaccgatgggtaagccccatcatcttgatctggtgacgttgaagaagatgcgatctcagccgagtggtttgaagccgactcgattgagatggtcttgaagtaggtttcagccgcgtttgggaatccaaacgggactgagatccggttctctcccgactggtccgattccgagtcaaggagagaaatcttgccgaagttgtcggtgatgaagtcgaggctgccgaaccgaaacgtctgcccgggagggaagacgaggtcgtcgatgccggagatgggacccattgcactgatcggcgaaaagcttgacgcaacccctacctggcgcgccaactgtcgaaactagatttcggcaataataaaagggggtggctatcaagctaggaaagtgtatgggtttggagacaaaggatttatacaggttcaggccttcttataaaagaagtaataccctactcctgtccggggatgaatccgccgagtgtattattgattgtatgattcaggagaaatcagcatatgcccctagaggcgcccggaccccccttatatatgggaaggagtccgggttacaaaagataatctatattcctaacggaatatgaagatacaggtaaaatacagtcgtaaccgactaagtctcagggtgtttccttgatacacaagttaagaaacaaacccgagatacagataagatattctatctacattaggtatcctgtacccagttcgaataccatcgccgtgtagatatgggatacccataatctccacattatgttcgatgagtttctcacaggaatcggtccttatatgcgaatacgggacagtgccacataggcacaaccccccgcatcgcgagttttcacaattcattttattttcaaacacaccgacaccacatgtcgggttttgaaggcttcacaaacccatttcccaagttttcgacaaacaacggtgtatgtgggatatttggtatacgcgctcagagagcacgaataccgaggtaccacaagggtggagcgacaaggaatcagggtagtatgacctacggaaattagtgcgactactggataggtccgtcggtttggcacgcaaaccgaggccaagcaagttaagtgtgagattctaataatgcaagttgcaaacaaaataataatgacttttcaattataggggcaattgatcaaagggtgacttgccttgctcaaggtcttcacgaagcttcacgaatcttcgagaaaacccgcgatcgacgaaaatccgataaccgcaactatacgcaaacaatcgaaaacctaaacaaaagaccaaaagaaagatcctatttagactaattagtagtgccattagatagatcttaattttacggaattactggaagttgaacggagtcaaacgaagctatggatcgagagatatgaattttggaagtttaaatggattttctggacgagaaatgatttatcggaatttatagaaataatattctcaagaatattattggcattcgttgatgtgcgggaccaacggaaatgatttatggaatcttggaatagagaattgatttatggaaaaagggaaaaaggatttatcaattcctttggaaaaggaaaggaaggaggggtgcgaattggacttcctcgggcgtcttaggcgcggcccaaggaaaggcgcgcggctcggccgagctactgggccggagcgggcccattagggttcgaggggggggggaaacggccgggtggacgcggtccacctcgcgggttctgggtggggcccatgtgtcggtcgacacggtgcatggtgcggagggtgcacgcggcgcgggggggctagggttagggtcggagtggcgcatggtttggtgcaccgggtggaccgaagggcggcggtgtcgcgaccgggaaaattgccttttcccgaacgctagtgtattaatccccgtcccaggaaaagccggggtacaccacacaaacatgatataaaagacacatctttattatatcgataatatttacattattacaaaggcgcttcaggcctgacaatcaaaaataaacagcagcggactagcgggcctacggctccatcttcacaggcgctcaattggggtataagccaggactccacctaagacatcttctccaaagcttctcttactggagggggaaaagacttcttttagggttttctttttataaaacctttttaactttgtttatttcttttcacttattatttgtgctctgaaaattccactaaaatttgagggctccttttagaccaaggagaatttaacaaaaattctccgggtcacatttgaatttttcttgtacgtattttagggtttgccaatttcttttcgaattttaattaattctattattccttttagaagatgatttttatttcgggataaatttatcaggacgtgacaggcgggccaacgcgcagccgctaggctctccgtggattgcgcgcaccgagagggaggagagagcggacccgccttgactcggtctttgccgaggtggcgctgacgtggcgcctccgttgcatgccacgcaggccggcgagaggaggaagaaggaggccggccgagatggacggcgggcggcgggggtctcaccggagcacggatcgacggtcttcggtcatgggggagcacaccgggacaaagaggcggacgagaggggacgatcccatggctcggatgcgacggaggaggtccgacggcggcggattgcggcggcgaccgttggcggcggcaaaagaggggaatcgccggtggtcatcgggggttcgattcgaggcggcgggagcatatccggggctcggtgaactcatttccggcgccggatggggcaatggacctccgagggaggccggcgacggtgagctacctctaggagcgggcggcaacggcggcaagcctatggcgggcggcggcgagacctggggcagcgtccatgcgtgttcggggggggctagccgagctaccacgcgaactagggagggagaggacgagcgagaagggagaacgggggggtggcactaccgagccgagacgggcgcagtgacgagcggccgacggctcgggagcgagctctccggcctcgggccggggaagggaagaagagggatggccggagtcctcgtctcgcgtccacgcacgcaccggcctccgacgcgtgcgaaggcaagaggtgggagcggcggcaaggcgtcaacaatggtgcggtgagtgtgtggcgagcgaaaacgagagaagaaggggggtttggggcggcttgggttttatagtggaggcgatgtcggtttggggagggagggaaaccgaccttggtggcggtcaaggagaggagctggcggtcgcacccgtggtccaggcggtggcaggcggtgacgccgatggtggtcgggcaaaaggaaaaaggagggggagaaagggagctctgcacttgccgaaacgggaaaggaggagggagaggggagcgaggccgagggctctgcctccatccctgggacgcatgcgcacaggcagcagcgggccgggaggcagcgcgggcacaggcggtgctagggcttgacgcggcgggatgccaggcggtcggccacgcgcgagcgcgcgcgcgggcgcgagggcgcggcgaaattcaaaaggcggcggcgggagatcaacgccgggagggcgagaacgagaggggagaggaagagaagaacgagagagagagagactctcggcttggcgtcggcgcacgcgcgtgcgccacacgtgcggagcgagggaggaggacggctgaggggggggtgggcagaggggaggggatccggcccatccaaaatatgaggaggcaaaatagactttcacagagaaattgaattgggagggatttggattttggatttcgaatttgatgcttggtctttgggacacaaggtggagtcaaggaagggaacaatattcggaggcgagtcaaagggagatggataatttagagaaagagagtgtaacttgggagtttgagtttgactactcaacgagatatgtgggtaaggattttggagagaagtctgaatagaagggttcggactttgagattatttcggaacggaaatcattttggggagaactcaaggcgaaagagattgaatcttggggtttagagttcaagggtggaagtgatctcgatttgcatattcagacttgggtcagaagttcgagaaataaaacaagggtagattgacgaaccgataaagagagaaagatagatgaatcaaaacctgagaggttgaattcgaatttgagaatcggtttgaacgaaccaaggagagagtttatgacgtgaaggtgaatccctggacggagttagggttcgggcattcgacaaagttcacggatggggttccaggagggtatttcgaatagaaggaatcgagcttcgggactatattgggatggaaattttgaggagacgatcgttgataacagggtatcgagacaagggagggatttaaattgagatctttggcacaacttagactcaacactcaaagaacgaaaattttcgcaattagaattttgccgaattagtttttaacgtctcacgaaaagcggagcgttacaaacaccatataaaagtggcgtgtcgtcttttggagaatactttgttggagatattcaccaagcatggatggaagttcactaataggatatgtgcttgattttccacatatttaagtttatttcctttatagtgtttactactttatggtgcagataacaagtagcacattattttaatagttaacggctgtgtgcatcacatgatgcagaggctgggatttttattccattatctaaaaaataccccaaattgtttttgtgctcaaaactataatgtttggaatctactcttcatgcaattattgatctgtttattgtgagggcacagttgttattctcaaacttatgataatgttggtttccgaatgtataaattggttttcaaatacaaatttaggctaatgagtatcactatcggttcgtcctggttatcactagcttggtgtgagaaccgatagtgatacccttgggtgtgtgggagtctaattcgtgcagttttgttcacggcgcacagttccagcccacaccatctcctcctgcactaacttgagtcgcggattcgagcgtcacatgttttgcatgcaccacgcgctctcacgatgatttccatgttagtatttttgtttctttttttaattcgttagcacttttttcaatgtaaagtgttgactgaaattaaaaaatcaacaaaaatataaacccttccaattacattttgagaacattcaattcaaatttgaaaaatttcaattgaaacttcaaacttccaattccaattttttttaaaaaaatattccccaaaatttgaaactttcaattaaaattttttaaaactctacccccaaaatttcaaactttgaattaaaacttttgaaccttcgtctcaaatctaaaagtaaaaatggaaactcatattttttaagacattcaatcaactatttagttattattttatttttgcgaatgtcaaaaaaggctaagcattgcccctatcattaattagttgtagaggtgaaaacggatcgaaaaatatctggtcttatccactccgaatcgattcgaaacaaggatatggtttgagcttatagaaatatggcagatatgaatacaaatgtggataatatggtgcaaattaggatatggatgtggtatctctaagatctatcgggtgtagattatatgaaattttgtatcatattatttgataagtcgtttaccagacaatccaaaattgttgaaccaatgttaccactttatttgttccatacaacataagatggcccatttatagactacttaatttgaggcactcaccgtcttatctcatacttatctagatgtattttcatattatggatgtcatgtatcaatgttgtttagcacttaagcatatagttattaccggtttgttaattgattgttatattgttttccattgtattgctaacttgatgttatattgatcacatatacacgtaacattcattaattttaacatgtttccgaatcaaatccacaccaactccttaccatttccgatatttgaaacaatccactcttcatccgcatcggcaccggctccaaatgcatttaaaaaatatggtatgcctactatccatccaaatttagtccgtttttcactgctagttaggtgagagatcagctttatcacgtcgatctataagctatgcgagatagcaatttcggggtatcatgttcagatccaagatttgaatttctatcatctcggagccccccccccccctcgcgcaagaacaaatctcctccaaatttttcagattttttttcaaatatttgtgtatttggttaaaatttattcaaattcagttaaatatattaaaattgcaaataatttcggtaaaacattgaaactcacgaatttttcaaaatttcgcaagaaatttcggtggttaccgaaattgcaaatactgcttcagataacctacgcggctatacgccggtttaagtgaccggtgtacaccctccggttttataataattgatgttttggataaggttgaggtcaaaattttataacttcgacgatcaataactttaaaaatattttgtttaaagaaactataacaacatatatagatttgtcttacaaaacactataataaaagtaaacatgtatttatttattgtatatattataatagaaaagtaagggtcaaaggtatatattttaaactgtgtcattattcaaaacgtcagttaaaatgaaaccggagtactagtgaaatacagtttgatagcacggaccgtatggcacgtgtccaagagaaaattttcgtcgcgtggaaaacatggtatactagtaaaatatgctgatgaaaagccacatacctgtacttgagttgaaggaccaagagaggagctggtgcgactcgacaagttccccggtggccgccgagaatcccacggccgcgtcctgcggcaagccggcggctctcaggtccaccgccgcctccacgccgtagttcgacccgttggccgtcaggttgacgaccatcttcctcgcggcggcgtcgtacctgatctccgcccgcatgacgccggcgagggtcaaggtcggcagagcggtgaagttctgggacacaatctggttgacgtcgacgccgatgtggtcgatgacgccgtcctgtggatcccaggggttcctgcaggtgtcgaactctacgccgacggtgcgcggcgaggcttcgccggtgttggggatgaggccgaggaaccctccggtcatgtccggcgcgagcgtgtccgccggtggcccgacgtagaacgccatgccgtccgcctggttcgtggagttgcggccgatggcgaaggagaaggcggtggtgaagctggtgaccgacccgccggcgccgtcgtcccagagccgcacgagctgccggtgcgccacgcgcccggtgctccacgtgcccagcctcgtgaggttgatccggtcgccggcgtaggaggcgttgcccatgaacacgaggtttgcggcggcgacgtcccgccccacggctgcgaagtcgtagtcgaaggagagcgccgccgcggcgcggagggtggtgcagcagaggaagaggtggaggaggacatggctggccatgttcatctgctttgctggccaccttacattgttattgctgcggctacttagcgtgggcgtcgtggtggcagaattgcagatagaataagctagtgtacatcattatcgttgttgactttgactacatgcgacgaccaaatcgcagccggcgggccagccggctgcgcctcgattagatgatgcttaattaaatattaattatttttaatttaaaaataaatttattttagttttttaaatattacatatgaaacttttttagaaaaacaaccgtttagcgactaagacttgagaagcatgctgcgcacccataataatcttagtagctggtagcctaaaagaactaagccagtccggtaacattttcgtcaaaaatgaaacggatttgctataattgtgtcgacagatttttttcgttgattatagtcggttctctggccgttggatctgtgtttaagatccgtgcttccatactgactttttcctctcgaagagaccttgttgagggaagatccacaatagcggggagtcgtgagaccccccatttgtgagttcggccgggggcggaggctcgtctctcggaaatcactcgctcgtccctaagattaccggcaagcttgcacgcagtcggattatacaggttcgggccgctatagagcgtaacacccta

SEQ ID NO: 20061 - DNA, 26036 bp, Oryza sativa
taacttgcagagtcacatggccggagggaaaataattcccctctacttcacatacccccgggtccatatctccgacgtagcccccggcgctatatcagatatcgatttcctgagatcgttctgacatggcgcctcacgactcctcgagctggggttgtgggcccggcaggaatccaaaaggatatcgccgcgtggccaggttggcgtgctaaccataacagcggtttgaccgccactgaccgcgctcatgatgaagatgcttgaggcgtgataaccgagagggggggtcagtcagaccacgcctcgattctctcgctcgctactcctgcggcggtagttgtgacggtttgctcaacttgcgctcatggccgttgcgcacttcaccttgagtgtgccactgacagacgcactaaaggcgggagcggatacaacgggcgacgtgatgagtgggcgcaggatgcgaagagacaaatgcgggcgcgaggatcgtgggagcaagtatgggagcgcgaaacgaggaggcgagcgcggatgaggggaggcggaggcggagactctgtccccttcctttcgccaaccgcccactcgtcctttcgcttctcgaaccctaacattctcgccacctcatactgtctcgcgctccacgctctccgccatttctccgccggttgccatggcccaagacaccggcgacacagtgttcccttcctcccgcatcacagcagacaggcaccttagccttccccgcaagatcatgccggacggtgccgtcgtgcgggcgggacagtcgcggccgtggccacgatatccggagcgatccgtgcacctcttgtccttcgccatggcgggcttgattccgccgttctccagattcttccatgaggttctggatttgtacgaaattcatgccttgcatctcgcacccaatgccgtgatgacgctggccatcttcgcgcatttgtgcgagatgttcattggggtgtgaccgacgatgtggttgttccaggccttcttcatcccacagctgctacaaagcgcggtggtggggggatgctacttccagccccggccaggcacagcgggtcagtacatcgagagccatctccgcaagaaatgggaggactggaagaaggactggttctacattgcgttgccggaccattcgcgacttcgagttcccgctggccctcctgaaaggtctgccgcatggctggcgacttcggagctgggcgaggaatacgacgcggtgtgggatcgcctcaggggcctgcggagccttggcctcacgggggcgatggtctttggcgattacttccgccgccgcatcgcacctcttcaggaacgatcccgtagagcgtgggaatacaccggtcccaacgaccccatgcagacgcatgtgggcgagcgctgggactggggtgaggaggacgcgaagagggtgattcgccgggtgcttggcctagactctgccaagccaacactaatcccagatgggattcttcccctctgctgcgaccgcgaccgggagagcatcctggccgtgatgtcagccgttggcgccggtaggagccggtccagcggaggcggcgccagctgtagcgccgtcggcacgggtggcggtggtgcgaccttgagcgggagccgggccggcagtccaggcggcggtggctcaagggcgcctggatcgagcagcggacccagagacgattccgccggcgacccaaaggggaagcgaaaggtggcctatccccggccgccctctcccccgcatggaggaggtgccgagcgcgcaacggatcattcgccagcgggccacaagcgacctgccgggcccgaggctggtcagaaaaagaagcggctccggaagatagggcaaacggagccatgccgggggggtttcatcgagcccccaaagtggaccttcaaccaccctccccgtaggtacgattgttggcgctcacttcggtgcccttacccaacccattctcttgtttcttctttttcttttgttaacatatctaggttctcttgtagcgagattccttcttagggaatctcagggtcagaccccttgcaagggacgaaatccgaacggtcggggcagtgtgggcccggccagtccaaggccgtggggttttcgcagcctcgcggcgggacccagaggacacgcaccgggcctgatcccgagcgaccctcaggcgggacccgtcttgctgcgggcgacaggggtggcgacgctcctcccgggggcggctccgggaccagggtccacgcggagcaccaccctggatcggggggtgagggaggtcgcggcctgggagccgaagccggaggtggtcccgagcctgaggccgaggccgaggccggggacggtcccgagcccgaggccgaggccgaggctgaatccactcgaggacccgaagcgggggggtgagagggacagccgttccctcttgggcgcttggggcgccctcgaggctggtctcgcagaaggggggccgagagcagctcccagtctcgcgagggatccagcagtaccccgtcgtcccggggacggaccacggccttttcctccccgactccgacgagtatggagccacttctgcaggtgctcgccgccgccgactccactgtacgagaggggctgaacacccaagttcaagccctggcggaagagcggacggccttggatgcagagtgggcacagctcgccgcggaccgcgcgcgagtcgacgaggggcgtcgcgccgtagacgacatggtaagggtggggcgcaaaatgcgtcaaacccaactaaccaaaatctaggcgcgcgaggaggcactggactccgtcatgcgggaggcggaggaggagcggcaggcggcgctgatcgcctcgagcgtcctggatgaagcgctgggcgatatccaccttcagtacgaggctcacgccgaggacttggcgaagaggatcagggacgcacgcggcatcctcgacgcagccgctgcccacgggcggcgggcatcggaggccgacgcctcgctgcgggcctggacgacggcactcgaggctgaacgcagggccttggatgatcgtgcccgctccgcacaggagttcgaagccacaatccgtcggcggatctaggtcctcgatcgaaaccagcgcgagcaaaatgcgcgcggtgaagaacaggcgcagcgggcccgggagctggaggagcgagtgcgcctgcaagatcagcgggagtccaccttggccacccatgagagaacggcggcagaggtggaggcttcccttcggctccgtgaagaggccgcggccgagcgtgatcggatcaccctcgccgcgaaagcttccgcggaccgccgcgcggaagagctacggctgcgggaagaggcatgccgggaactggatgccgcactcgccgagcgcgaagccaaggtgaatcgccgcgaggtagcctcgcgccagttaggcgagcaactcgcgaaacgcgaggaggccgttgtcgggcgcgaggctcgtcatctggagagcgcccgcgccgagcgtgcggcaatatcagcgaaggcctccgagctggaggcccgggagaaggacttggcagcgggcgggccgcccggcggcgcggggttggcgagccagctcaccatggctcagagtacccttgccgacctggaatgcctggtgcaggatcaggctaggaaaattgcggccctccacctcaccaacgagctcgggcccgggcaactctccgacgccgtcgaccagctggagcgcgcggggtgccgagtcggcatctctttgcgtcgggacagcaaactcctgcccacacagccagcactcgcgcttcggctggacgggctggcggtggacctggagaggctggaggaggaggtcggcgagaccataaagtctccgtcagtttctttggcacgggctacggtggagctggtcctcgcgagccaccaagcgcgtgaccccgaattcatgccatggcatgcgctcgaagattttcccccgggtaccgaggcaagggcccgggagcaagtccgggaggcggctgacacgatggtctcgagctttgaggggtcggccccccggttcacctccgggcttacctcagacgaggaaaacggaagcgggggtaatgacggtgacgacgactgggacgacatcgtctgtggtgccgacctcggggggccgggcactcgatgaccactcgcgcctttaattcccttttgctgtgtgcccatagcaggcacttgtatttaggccattgtgccatcctatcttgttctgcaactgaaacttctttaaccccttttactcttttgctttttccattggatgcctgtgacatagagagaagaaaaaactagggcaaaaggggataattagactgcctgcgattgatatgtcgttttgaccccatccccccctggggcttgttctagcgagaagataaatccgcgctcggtccatggaatctaagtggtgataggcaagaccatcaccccgagggagccgcccagcgggactggccagaccgaggctgcgacgacgggggtcggggacgactgtgtgtaggcccttcggatcccccggggttcggcacaacccgtgccgcggcctgcgttcgtgctccctttcggcggttttcaggccgccttatggcacttagggtttagagtaaacgcggacccatgtcgtcacagtaatcgccaaaaagctcactggtgaactgggtgccgttgtctgtaatgatacagttgggcactccgaatcgagacgtgatgcccctgatggacttaagagcagaatgcttgtcgattttgacaaccgggaaggcctcgggccacttggtgaatttgtcgatggcgacgtacgagtgctgatacccgcctcgagccgccttgaatggcccaaggatgtccagcccccaaactgcgaaaggccaagatagcgggatgacctgtaaggcttgggccggctggtgggtctgcttggcatggaactggcatgccttgcaccactggacccattcttgggcatcttgtaatgcagtcggccaataaaaaccttgccggaaggcttttccgaccaaagttcgtgaggccgaatgtgctccgcactcaccctgatgggcgtcggctatgagctcgatgccctgctctcgagaaatacactttaagagtatcccgttggcggcacgccggtatagggtcccttctacaaggacgtaccgtttggagatgcgcgtgagcttttcagcttctgcgcgatcctcaggatgagtattgccttcgacatacgcccggatgtcagtcatccacacgacctgatgaggggggtcggggttgaccccctcgggccccgaggggcgcgggtcgcccggagtcgggtcggagggcgtgtcattggggtccctcaaagggctcggtcgcgccgatggttgcgcgagcctttcctcgaaggtccctggggggagtggggctcgtgctgacgcaacacgcgacaactcgtcagcaattgtgttgtcgcgtcggggcacatgccggagctcaagtccgtcgaagtggcgttccatgcgccgtacctcgcggacgtacgcttccatttgcgattatgccgcacgccgttccggaatgcatatacaaccgcgtgtgttgggatgcacggaatggtgttgcggacctgacagaagcgctgtatgtacgaacggagggactcatcatcattccgccgtacagcgtgtaggtccgcctcttcccccgggcggggatatgtgccctggaagttcgtaatgaactgctggcacagatcctcccaggagtgaatggagccggggggctgggtcatcaaccagccacgcgcctaacccttgagggccatgggaaagtaattcgccatgacccggtcgtcaccccctgccgccacgataaccgtggtgtagatctggaggaactcggaggcattgatgctaccatcatacttctccgtaaggttggggcgaaacttcggaggccaccggacattccggagactcgccacaaaggccctacaacccgtccccccaggggtgagtgtggggggagggccgcctcgtgaagaggagcgtggcgctccagatgaggaggtgccttcccccatacgggcagctcggcgctcgtctcggcgtcgctcgatgttgattcgagtgtcctgcgtcccgtagaggccgtcatgacgcctccggcttcccgaggcccccgacgatgttggaaccgtggaccgcctcgagatcgtggctgatcgacgagcccttctcctcgccgacgaggagagggtgaccgaggtacgtgatgtaccagcggcagtggatcggccacccgtggccaactgccggccacccgtggccaactgccgctgggcagtagtaaccaagttggccacatcgtccaaccagcgctgaacaggagtctccggctccgggtttaccgggggatgccgcagaagggcgcctgctgcctgaagcgcgccttggggcgaaccgtcgtctccatagtcgagacggcggcatgccccgacgcgtcgtggcctccctccgccagggggtggagagagagccgaaccatccgaacgagtgggatcctccttccgcgaaggttcgcggtggggaggagttggagaaccattgtcacgcccggaatttctatccaaaattccaaacgcttacatgtgtgttaaaccctcgtccaagaatcaaccgaggcacccaatgacaaattgataatagagtacaaataaataactatttaatattcgcaaataataaaagattacagaggtagatagttcctctcaagaataacattttacgcagcggaaatataaaactataacaaactacggaacagctatggcgactccactccacaggcatcttaaccaagaacaagcctaatcctccagatcatcaccttcactgagatactcgtcttctgatgaatgaatattgcaagaatgagcatatgacatactcaacaagtcacacagcaaatatgcaagtgcacaggataacaaaggatggcataatatagctcatttgcagaaacaacatttaataaatattgaagagaatggtaaaaacagttgaataattaatcaatattaaataacaccatacaacacaaccatgttgcataggcccaaccacatttgaacaaccaaccccagttgaacaaattaaacctccaaaccaggaattatccattccaaaccaggagtcaaattaattatcacattattaacattgatgagtagtgtgagactaatcacgaaaaacattgctcaactcacccataaccgcgggtacggctattcgaatagattaaactctgatcagaggtgtaccactgtacccacaagacacaatcccacaacatgttaccatgcgccttagtaccaccacgatacctcggaaaggaactgtgacaataccccttgcacaacacaactcaccacagtgcaccgtacctggatcataatcaccccctctacaaccagaggcatggactccccagcgaccccacggacttctcgccgcttctcagtctggcactccgtaatgaatcatgctatacaaaaggtaaagccgttgcccacgctggcttgtggttggcacggtaaaagtttcacaacagtagctcgcgaaccggtccttaattgtcatgagcacaaccatcaaaaccatatgctcacaacccaccttaactaggttttaattatcaattaattatcatcacacgattaaccatcgtgagctaccatttaatgtaaccatagttaaaaataataatgtgacatagtttataattaatccctttagttagctaatgtttctaagcatggctaagcaaacttacatatagcatttagctgaaccaatccaacatataaggttcatgctatccaaattataacccataggaaaataagatcatcttcggccattaattaattgggaaaggttcaccacccgatgacattcgaaaacaatgcatagttgaaataaaataatagctttaaacgggttcaacatgctcaaagggttgtttgggatctgtgtgacttgccttgggcttccgcaaacgcttcggaaccttcctcaacggaaacgctctcctccggaacgtcggaaactaaagcaattaaacaaaaatcaacaaaacagtacaaaaacaagcataaacagtacatgtggatatttttaacatgtagatcttgattttagaaaaatttagcaacttgaaccacctgaaacggatctacggttatttagttatgattttccgaagatttaatctattagaaaatcgggaaaaagaaaaaccgatgacgtcatgatgacgtcatcaatggcggccggctcggatggcaagctcgccggagattgaatgatcggccgcgaatttggagagcatgtacacgtagaggacgacgaggcgaacccaacggtactcaccctcgtgccaaacgacaaacgacgacggccggcgacgaaggggcggtggcgacggctcggcttgaccgacgacggcgagctacggcggccgacgacgaagggggaggtgcggctgaggttcctcacctccgtgcgcacctaacggcggcgagaaaaggcggcggcgacgacgcaagtggcggcgcggcgcggctggtggttggccggcgacggcggcggctaaagcgacgcggcggcgactctacggcgcactagagagctcgggaaagggggcaaacgaaagaggaggactagagggtcctatttatagccttggattgaagagatcggactcctcccgcaagaaatcgattcgggaaaaatctaaactcggttttggagataaactcgaaaacaaattcgattcggataaaatacccaatgatttgctccgattcttgaggggaaagatagaggaggatgtggggataaaaacccctcaaacaatcggaagaaaaagggccggattgggtgcggatttgaggggagaaggcggcggctcgggcgggcagctcggccggcttgggctcggccggaggtaggagaaggctccgacaggtgggtcccacctgtcggtggctagaggaggaggggcgggcggcggctgggtgggccggttttgggccggctcggccgcgcgggaaagagggagtgttgggccgaattcggcccaacgacttaagggagggcttttggaactttttaaataaaataatttgtgaaatgttgtttcaattattaaaaatacttcccttgctcaaataattcccagaaaattctagaaaatagaagagcaagcatagtatttaataaaattttatctagctcatttttatgttgaaaattttcctagataattagggtttagcttgtaggcttttaaaatattttctaaaaatgatttaaaatatgcatttttaatttagtcgatttttagggcgtgacaaccatggcaacggtgacgaggacctcggctctcgccggaatccccactcccggacggggtgggagtaaacgccaccgcctcctcctctacttccaggacctcgaccatggtcagctaaggcctggagaaaattgggacggaagaaagcgacttcctctcggaatgcgcaaccgcccctacctggcgcgccagctgtcgagggaagatcctcaatagcggggagtcgtgagaccccccatttgtgagttctgccgggggcggaggctcgtctctcggaaatcactcgctcgtccctaagattaccggcaagcttgcacgtagtcggattatataggttcgggccgctatgaagcgtaacaccctactcctgtgtttgggattatggatgagttttacaaaggtttcttcactctagaaagcgcgctcgcttcctctcttctggagttcaggttttctgggcgtcgtccccttatctcagtgggcagggtcctccttttatagctcaaggggataccacatgcgccgcctccacctaccctctatcggagggggatcccactccacttttcctgggctttaaaccgtgccttctcccggaagctaggcaacaaccggttctcgagtggaacccggcgccgccccccgcctgacacgggggacagccctgtcattccctcataaatgaacgatgacttgcgacagcccttcctcgagtgacgctcggatgtgacgggtcatacccacccccactccgccgggtacaagggcgacgtgaggacatggttgccctatccatcggatgtgacggtgacaggccgttcacagaccggtcacatccgttggacagaggttagctaggcgcgccgcacgtctgcccttaccgcattaaatgcggtgagggacagttggggcgtcgcacatttatggctgttcagcctgtgctcccctctcgctctctccctccgccgcgtggcagccgggtgagggcctcggggcgaagccgcgggatagcccgagggggtgacgccatgccccgaggcccccccccctccccgccgcttccacgagtcgcgtgacgcgtgaatggggctaacttgcagagtcacatggccggaggaaaagtaattcccctctactccacatacccccgggtccatatctccgacagacctgaaagcatatgctattgctagctaatctctaaagtcatgcaaatccaagtgaaacgtcacctaatttcgttctatatgtatgcatccttttctttaacacaaatttacaccccacttacatcttacttacacatataattactatgtaattttgagacttacatatgtaattttaaaacttacattataaatacactaaatttacatatgtaatttagagacttacaatgtaaatacaagctgactatttttgggtgaaaaatatggcgccataaatatagctacacccaaatgaaaacatgaattcagtatttgttatacgggatttcggatacatgatattgttataatgatgtttgacatcccaacatctcatattattcagtgtcccaacagactttctcacgagtcgcgagaattgtgacccctcgacttcacgagtgccctaaggacaattattttgtgaccgtatgattgaaggcctgaagtatatatgagtgtaggacgccatgccatcaggttcgtggagttgcggccgatggcaaatgagaaggcggcggtgaagcgcccatcggtgccgcatcgtcccagatgttcaataatataggggagagagtaccgtgcctactcaacatgttttattgtattgacatatattggtagaaataagaaatgattacatataaggaagcataatcataccaagatataactctaactagcatatgtttttacatcctgacaaaatccaagcgtgagcaacgcgaatggagaaagctcaacaaatatgttgaatagcctttgtgcaatagccaatatagccgaagcaaagggtgtgagaaagcgtggttgaagaagccatacgtagaataagcgtggtcgatgtcgtgtgccgatgatgagcgaggatgctaagccgcgatgtgcaaggagcgccaaggaccaaggtgcacacatggtcgccagcgctgaacgtatggatgtgcgctatgagggggcatgttactgaatatttgcctatatgcatgtgtggttatatttgttagttggaccgactgggatgtcaggttctttgagggggtgtgtgacatactagcccaattaggatttggcatgtgtggtccatgagatctgtgtgcgcatgttaagtaccaccttactaatttagcaaggttggaaccaacttataagagtctatccctccaaccatatcactcatgggttaactcttttacacaaagcaagtacgaaagagtaagtgcgtatgcccgttcgatgggttggctacgtggttctggagggtaggctgttacaacgatgaggctattgccgcagtcgttgaggaagatgacgctgaagagctaatgctatcgaactgtcgagaacaagacgtcgtgccgggtttgccaggctcaaggacgactcaggttgaatgcacacagtggtgttgttaataccacgccggcggaagtagacaaagacgaatgcgaggtagcaggaccaacaacctggaacagtgatgtcggtagcttgagctacagcagctaaaccactggcctagagcggcgatagtggctgcatgaagacgtggtggtgcgcgtagtagtcaaagaaaatccagacagctgtgttaacaccaaaatttggtaagattctttagtggattcggttaaggaaagagcacaatcaaccattaaaaagcttatctagaagagtccgagttcaaaaaagaatcatggagaccatggcataacaatgtaatttatctattaattaggcaagttttgtatttagaaagtttgagtcatgtccgatgaggactttatgctttttcttttatctttaggaaagtttctttggtgtccaatcaagactagtatccgccgataggtataaatatgtacacccaggatccttgtaatgtatctctcggtcaacacaatttcggcacatcgccatcctttttattttcgtctttctcgactagttcttgtttcgagtttggctgcatcaacttcgatctccaacgaggggtaaggcttattatggctggttgtatcggcgaggctagggcctcgacactctaatcttgtcaatgtaaacacctagtatttatcttatatcttagttaatctaggtagattctcaatttacttgtatcggccaaatctattttaggttttgttagtatcatttaaattgttttaatgatctagattagctaagatatctgttggtatttcttaaccttacagataaaatccgcaagcacacggagaataccgatgtagcacttcacccgggagtattccaatgtatcaatttccacaaggaacatgtgttttcagctccttgtccggttcatccaaggacacgaagcaaatgtaggcaaagggtagagaggatttactagtgagaaacagtttctacggaaagcttaatttaatcctaacgcgatacttcaggcactagccagcttgctgctcccatatgtcgctctactgtgtacccgaaaagggaggactttagtgtaattgagggatgtcaccacctctacacccacctcaaacctactgtgggatatgaagtaatcaccggaaattaactacccagacaccacgtctacgcaattaataactactttagcgctagctaaacactaaagaagccactatactttactgggttatagtgatcaatgatcccgcacgctaattaggaactaaccgagaggtaattctcacttgaataaatcttaattactcagaatgataattctattaaagcagtgtaattaaaaaagtaaaagaaataagaagaggattaccggcaactcaggaattcctctgacttcttctactctactctctctctctctctacctaactctagtatacaataaagtataatagagcctcttataatttagcttaagtttggagtgtgtgaaagaagtgaaatgaagagctccttctataggcaggtatgatggatctaaagcatgtgaaatgtctgaaatgacccgcaaccgccatcaggacgtcatctggagcgtccatgccaaacccagcctgaacggctgagattgagcttcagccgaaccccttcggctgaaccctggcctaaccaaacaggcccaggatttggcctgcacctctccctcagcctgccttatccatttccaggagagttgggcctgctttctgatgtttcgatgtagtttaagacccactcttgtatggatagaattcttctttcacttaagtctggatttcatcccaactttggcggtttattgcctgcgtccaaatatacaccaacactcgtgaaatatgttagaactaagccttaccagtatgttagatgttttattagctgtcaacaaacccctcacacttagctctttactcgtccctgagtaaatgttaagatgatagtgtagaataaaattctctaagacataatacaagcacataaattattcaaaaccattcacgtacctgtgaacttcaatggtggctaacttaccatctttggcaattgataaatggagttgtgtgtgcatgtttagtaccaccttgctaattagcaaggttggaaccaacttataagggtatatccctccaatcatatcacttacaggttaactcttttacacgaagcgagtatgaaaaagtgggtatgtccgttagatgggctaggttgcgtgattctggagggtaggttgttatagcgatgaagacgaagacgataaggcgatcgtagtagtcgttgaggaagatgatgccgaagagccaatgctatcgaactcgggatgaatgcgcacagcagtgttgccaataccacgtgggcgaaagtagacgaatacgaatgcgaagtagtgggaccaacaacttggaacgacaacgttggtagcttgagctacgtcagctaaaccactggcctagagcggcgatagtggtagcctaaagacgtggtggtgcccgaagtagtcaaagaaaagttggacagctgtgttaacgctaaaatttggtaatattttttagtggattcggttaagaaaaaagcacaattagccgatggaaagcttatccaaaataatctgagttcaagaagaaatcatagagaccacggcatagtaacttaatttatctaataattaagcaagttttgtatttaggaaagtttgagtcatgtctgatgaggactttatgtttttccttttatctttaggaaagtttgtttaatgtccgatcaggactagtatccgcccatgggtataaatatgtacacctagggtcctagtaatctatctctcgaccaatacaacttcgggacatcgccatccttttcattttcgtcttctcgacgagttcttatttcaagttgggctgcatcggcttcgatctccaatgagggataaggcttgctctggctatttgtatcgggtggggatagggcctgcacactctaatcttgtcaatgtaaatacttatttatcatatatcttagttaatataggtcgatgtctcaatttagaagcaaatagaagtacgtgagtatgtctttaattagataaagaggtcatattactatataattgaaatagaaaatttattaaattaatatatctttataaattcatctttagtatacaagaaaaatattacttaaaagtttaaattaagatgctaaatatttttaataaagaaacccatgtagtataaataatagtttcatatgaaccaggtctattgttgcaacatatttttttcataaatttaagacgacatgattcaagtaattttagtttacaatttgtaacatcccatcctccagaacaccgtagtccaacccatccaactgacgcgcccatttacaaagatcaccttactcacacttacgttgtcgcttcgtgtaaaatagacaaatggttggagggacgatgccttaggacatgagcaatgtatattgcacaatcagtccttattgtgggccctaggtgggtcccactgagatatatttcatcttcacaatgtatattggagaaaggaggttttaaggtggaccccacaattattaccattccaaccatcctactctccctcagtcaccagaattttccccaccccactgaggcatcgatgaaaatagcggtagctcgcgcgagtggagccatggcgacggtggtggcactcgcttgtggcaacggcggcagtggtcgcgtgcagcggcccatagaattcgcagcagaggccgcggagctcgcgggtatacacggagtcgacaacggcgtttgcgggcacggatggatccggcggcggcaatgatgaagctcgcgggtagatctagctacgagactcatgggcgtggatggatccggcggcggcacacatgggcacaggtggatccgacggcggcggagctcgtgagaggacttcggctgcaacggtgctcgtgggtgggcgtgagtggatccggcgacgacgctcgcgggcgcgggtgtatccggcggcagcaggaattgggcacaggtggatccgacggcggcggagctcgtgagaggacttcggctgcaacggtgctcgtgggtgggcgtgagtggatccggcgacgacgctcgcgggcgcgggtgtatccggcggcagcaggaatactcgccaccatctcccggcggttcttcagcaaatctatccaggtgtattcttcccttctcccatggaggcaagcaactgaattagagagagatgggctagcagtaccatagcagagagaagaacgaatgttttattgcttatagccggtccttagccaataaacaatcccgaacaaattatttataaacgcagatttataagagtaaaaaatagttttcttgaaaaatccaatacataaatattcgtaacaaaatgtcaaacaccaaataaatttagttaccttcctactttacatagaatgagcgatcatattcgacgaccaaaatgcaaccggccggctgccggcacgcgcctagtctcgtgacgtacgttgtcgtcacacgtggtcatgtagaatttttattgttggatttattatggggtattttgagtttcttgccggcactcataacctctggtagacttactattggataatttgaatatccttgatacattgatgttgctacaaggatgtcgacgtctcaacatgatcttattatatactagcgcgccggtagtctctatgaccaacaaattaccccactcctcggccattgacctctccctagtcttcctctcgactcgcgagaattatgacgcctccacttcaccagcacagtatccgtgagttgaaagctcaatctgtgaccaagctcaatccgtgagttgatttcaatttttgtcaaaatgctgccgaaattttatcaaaattccgtcaaattcaaattttgtccaaattgtaatgtcaaaatctgtccaaatctgtcatttaattttaaacatattcaaaaaataaaaagtaaattgcatattggtcctggttttcttacctgtgttgcacaatggactggatgctatcccatgttttcattttaatacatatatgaagttaccaaaactttcatcttggactagtggcccacatgtcatgtagaaagtgttttcttccatctctccgtcttcaccgacgaatgcatcaatctcatcttgggcccgtggtcagtggccagcagtccagcacgagtgaagctttgctggtgtgatttgcttggcgttgattccaatcgaagtccgatcttgaggaacgcaggttggccaatggatggaccgagatcgatcgagcgccaagctgaacgcgaggagattaagctcctacccgaggatggatcgacggttgtacgtgccttcaccagtcaagctcgaggggcgcccgcactcgtctcccagtggcaacgccaatgacagagcccattccatcttgcacatcgcgtcagccggtggagcggtcgtcgacggtggcgccatttcatcccacgcagcgggcacagccaatggaacggacgagcggtcatcttcaagagagagggatgcggggaagagctgcagaggacatgccggcggccactcaatgttcgtgcagcctgccaggctgctactgctgcattactggggaagagatgagctctgcccgatcaggatagggactaataaaagaggaagatgaatggctgaggctgacatgtgggtcaactagtccaaattgcatagtttagtaacaaaacctggttcaaagtgaaaatggttgtacgttcctagtccagtatgcaacttaggtaattaaaactagtccaaagtgtaattcactcaataaaaaaaatttccaaagtcattgcataatggggaaaaacacaattgatgaatagttatgggagagggcataaatatcctatttaacaccgttaactcctccatccaaaacaggggcaaaagtatctttcggttcaaaaaaaagtgggggcaaaaacgaaaaccctaaaaagtaggggcaaaattaatattagaaatcaaagtgggggcaaaaacgaaattatcccaataatgccataaaaagttgctattgctttatatgtcactgctttatctttttctttccctatatgtcatccacattatcatctttgtaataggaatgcaaaagtacaacataatcctttaattcctcgagagatgtccactcgttttttttcatgtcctccaaataattattaaaaaatatttttaataagatagaataatatgtgatatattagtccccaaatatgcaagtttaaatttcaattttacaagttttctttcaaaaaaaatcaaatttagttgtaagcacacgtatactaatttcaaaattttgagagattgtcatgcggaagaagacaaagaacaagttggatgatgtggaatttttgagttacatcacttttagttatgagaaaatttatatatctctactattattataaaataacagtcgtccccctcctgtttccacccacaacatccagagaaatcgctcagtttatgcccattccacactctagaaaaaaaaccacatcgataacaaaaagctgaaagaaaaaacacgttccagatccaaaacattcatatgtactactccctccatctctaaatatttgacgccgttaacttttttaagcatgttcggctgttcgtcttattcaaaagatttaagcaattattaattcttttcctaccattaattcattgttaaatatacttttgtgtatacatatagttttacatatttcacaaatttttttaaataagatgaaggttcaaacatatttaaaaaagtcaacggcgtcaaacatttagaaaaggagggaggactgtaaaagacatcgtcctctagttcccactcatgacatcctagaaaaactgctcagttttccatatcctaggaaaaaccgcttagaaaaataaaggaaagaaaaaaacacgttctcatatctaaaccactaaaaaaacaaaagaaagaaaaaaaaaacacttcaccagatcccattacaatacatgcgcctgtgagtatatgactagtatccaggtatccttaaaattccagccaatccattctatgcctcctgctcattccctcgcatatagtccaaaatttttgtttggctcccttccttatcatttctactggttgatcatttaattccaatgataaggtctattttggctttagacatagaagaaatgtagaaaagctctatgttgaaagggtacaactttgttgtacttgtacgagaccatatatcatataaaatctattgtttttgcctacaacttttgccctggtactgtattactgttttcttaccagttgattgatgctatctgcaacgtccgatctagtttatggaaaattttactgcaggacactgctactgtgtggttttagccttaggacaccgcaaaaactaacttttgagggaaaacacttcataatcgtggtattttgccagtggataccacgccgactagaataataattttcgtttgaacaggagagagaaatcgtgtgaaatgtcaaaaacgtccttgggcccacatgttagctctcctatcttgtatgtggggtccacatgacagtgactagggcgagcggcggtggcctgcagccgagcagcgaggtcgggcagccatggtggacgagatgtggcgtgggcgatgcggccaatgcctgcggtggcgcgacctggcggaggagggtggcccgcacagcgcagcctctggtggtgcgatgtggaggaggagggcggcccttgcggaggccgagcggagcagcagcttggtgcagtgcggcggcgctgccccgcggcctgattggcagagctgcagccggcaagatcggcggcgaggtggccagccagcgccggcatacggtcgccggcgtggtcggcttgcggcaagcggcgacggcgctgcaaatgttgttgtccacttcccctccccctttttcattttgttttctttggtttcttctttctttgcatctacctttcctgccattgccatgtggaccccacatttcctgccattgccatgtggaccccacatatacaagatagaagagctaacatgttggcctaagggaatttttgacatttcatacgatttctctcttctcttcaaacgaaaattattattatagtctgcttggtgtccactggcaaaataacacaattatagagtgctttctcccaaaaaagttagttttgcggtgtcatagggaaacgactacgcgtcgggcgtctgattggggtgggaaaaatcgggtgcccacgttagcatgacgttagcaagcatacatgcatgcaaaactactttaaactattttttctcttaaattatttatccaaatcatgatctgaatacaccgttaaattcgttacaattaaatctttaaaacaagaccacatatggatatattccaatgaaaaaaattagcttattattaaattatttttaaatgttttacaatattccaccaagtagatcggaattgtttcactaattagatcgaaaatatttcaatcgtttaaatcgagtgttgttttactttatataaaaacaatgtttcatcaaataggaaagaatgtttcaagtcgctgcaattgatccatacatagtgaaacattataagtaccctggatgaaactttttagtggaacaaaaaataaaatgaattcctttaattgagagtttccataatatgtgggtgatttgttacaaaagaattttctgtcgacgtttgatgtcgcaattctggtatttgcatggtatggggatcgtcggtgctaggatatacgcaagactgaggtaaaagagatggagacaaggatttttatacaggttcgggcccctgagttatcaggtaataaccctacaacctgttggccgaagccggtattgctcttattcaccataatcacacaagtacaatatttggggtagccaatctaactgttgtcgacatggcggtttgacgatctgactcgtagtcgacaacggagtagcctttctcctcgaatccgtgcccggcgagatcagagatagcgctttcgtttctcctgacagtatccggagacaccgtagggttttagccgtgcttatccatgaagtcgatatccggcggtgtgtcttggcgtatgtaggcttctatgttgattgtgttgggtgttgatcctatcgtgtcggtgacatgggaccgggagtatcatgactagaggcttgaggcagacacaatcgcccacgtggcctggcaccctcgggggacgtcgggcccgagggtgatgtgttcgccctcctcttagtctccccgagggggtcggaccactccagcctcggccccgagggccgaggcgccccgacccctcgtgggttttgctccgcgtgtatgggttaggagagcacagtggggctcacctaaccacatttattgcggtttggttgagcgtgtcacgccgcatgtaacgcagtgcagtgcactcttttatccggtctgtgatcagtcacagaccggtcaaatcacgggttaggtggcgacaggcgatctgacgcacgcctcgccccatcccgtcaggacgagggcttctaggcgcttgtccccagctggagctagcgtgttacctcccagagatggcacgttagtcctggttagatatatgccaggcttcatcctaaccattacaggcgagatgttgtgtgaagaagggccaacatgtagattgctaaactgacacgtggtggacaagaatgaccgatttgtgaccagtctggcactggtcatgtcttcagcagacagccatcctcccacgtcacacctgtttccagcggaagtggaggtaggtatgggctatcccatcagaaggtcatttcggacagcaaccatacaaatctccgtccgtttatgaagagaagaaaagtccagtttggaaagagagaggagaagtctccacacaaaagagagagaggggtgcatgtggtatccccttgagatataaaaggaggaccttgcccacttagagaagggactggatttttccagattcgaaacccagaacaagggagaagctggctcatactttgtagctccttcatacacagatccaccaaaacacaggagtagggtattacgcttctcagcggcccgaacctgtatacatcgcccgtgtcttgtgctctttcgattgtcgcgatccttccatatacagagagcttagaatttcacccttagtccccggccgaaccggcaaaggggggcctgcgcggtctcccggtgaggagccacaagctccgtcatatcgggtgttgatcccgttgggtgttgattgtcttgtccccctctcctcctagggggccctatatttatacccataggtgtccccttgtccaagtagaactagggaaaccaatatggatacaatccgagtagtacttgtcgtttccatgtagaactctggttgtctttctttatccggaactcccccgaggtcagtttccgtataagacatggtatgtagtggatcctgccgagatttagtcaactactattaggtatgtggtattcataaccctgacagtagcccccgacttcgatgcaaatgaacgagttcatattctcaaccgtagactttggaggaactgttatcgagctcacgtgaccgttctcggtgagtttagagataacgttagagttcctttatcagcctcgtgcgagcaccgaaagggtttgtctaagccaatctctgatgtcgaccgagaaagtacagagcgtacgactaagtctcccgtcttgctgtaatcgagaatttggattgaagtcaagaaattttatctcggcgagtacaccatttcttcattccgtattccttgtcgagatccagcaaccgttctccagtgatcgagaaggcgtagagtctgcgatggagccttgtcgacatttgtcgtactcgccttagttgatcttggtgtagaaccatagagacatggagtcttcgataatgtcgaatagaattttcctgaaatcaatactcagaaaagaatattagatagaaatagcccccgagcgaatgctcaaagggtgaaatgttataatatgacagactggtgaattgaatgtacagactagtgctttgtatatgagcgtcttctctcttatcgactctgatcagtcagtttgtagagtcatacactctccctagcccccagccttgtcgtcggagaatcgttctcagaagataaggctcttggacctttgacctgcctcggttgaacaagcactgatcctagcccccagccgtgaagctggaaaatccattttcgattacacggcttggttaatacgcacggcgagaactcttacacgaccagatcttacatggtctttcgtctctgaaggatccgacaaggccttatcggctctgggcgtccccagccgaagttccctcaggttcctcggaggccttgtcaagacggcattaagggatagtaggataggtttcaacgctaggtgtcatctgggtaagggatctctgggtaaaacacttggcgatcttgtgcacctgatatcagctttgttgaagcaagggtaataggagaatcgctacatcactggtcgaggactaggcagtagtcgtaactcgaccacttgaagtggaaatagtgggagaaacgctacatcgctggtcgcagaccaggcagtagtcgtaactcgaccacttgaagtggaagtagtgggagaaacgctacatcgctagtcgaggaccaggcagtagtcgtaactcgaccacttaaagtggaaatagtgggagaaacgctacatcgctggtcgaggaccaggcagtagtcgtgactcgaccacttaaagtttggcgagagagatcactgcgttttactagttcgagaaccagaagtaggagtcttttaatcacctataggggtgctgaagttggtttattacatgtgcatatcatgtggccagcatgactcacatacccaacttatagcatatccggatgtccgctcgcaatcatgtcgggtgatcaaaccgacgccgtttgcgaggaatcatccgttaacaaccttttcttgagtagtccagcaatggccggtgctataagataggtcgtcggtcttcgttggtaagttgggtgcgacgactccgcatttgtcgagaatgttctcgatagtggggtgtactcaaccacaacctactcgagtgctcaaatgttctcgaaaaatattttctagaaggcaagacatgcagtagagaatatcgagtatgtactcaaaaactgcatggatcttctagtattatcaggacataacgagcagatgtaaatgtcagggcattatgtaaaccgtaaacaagaatgatttatacagaagaagacagaacgagcccccagcgttagatcgtagtcgatttaacatcggggacacccgcgcaacagatattattgtataaagaacatgctctgggtaaatataataaattatagatctaacaatactgtgtgatctgaatatgtacgataaattgcagataaaatattgcgtacctttgtagatacatgccggatgtatttacgaaattagtagatcaatttaaaaaaccaatctaccaattaccttgttgcgtactcgttcgatatcatgcgatctgacatcttttggtacgccacggagcttgaggcttggatgatctcgatagaccaagttgtcgatgacgatgatggttccgatctggttaggttggatctccccctcagctgaagtcatcgagtagctcgttgtcggagaatccatcttttgaacccatctcgtcgaaatcctgaagcaccaaaatccccctacctggcgcgccactgtcgacgtttgatgtcgtaattctggtatttgtatggtatggggatcgtcggtgctaggatatacgcaagactgaggtaaaagagatggagacatggatttttatacaggttcgggcccctgagttgtcaggtaataaccctacatcctgttggccgaagccggtattgctcttattcactataatcacacaagtacaatatttggggtagccaatttaactgttgtcgtcttggcggtcagacgatctgactcgtagtcgacaacaggggagccttcctcctcgaatccgtgcccggcgagatcagagattttctcctgacagtatccggagacaccgtagggtattagccgtgcttttccctgaagtcgatatccggcggcgtgtcttggcgtatgtaggcttctatgttgattatgttgggtgttgatcccgttgggtgttgattgtcttgtccccctctcctcctagggggccctgtatttatacccataggtatccctttgtccaagttgaactagggaaacaaatatggatacaatccgagtagtacttgtcgtttccatgtagaactctggttgtctttccttatccggaactcccccaaggtcagtttccgtgtaagacatggtatgtagtggatcctgtcgagatttagtcaactactattaggtatgtggtatccataactctgacagtttcaattcactgcaacactagatctatacatagtgaaatattgcgagtacattaggtgaaacatttttggtggaacaaaaaatgaaacgaattcccttaatagtgggttttcaaaatatatgggtgattcgaattccgttaataatggattttcaaaatatatgggtgatttgttgcaatggagtatgtggtggagatacgtggcaggtggggacagggacatgtggtggggcccagggggcagcgcgcgtcgtgggggga

SEQ ID NO: 20062 - DNA, 14222 bp, Oryza sativa
  unsure (1)..(14222): unsure at all n locations
cccccccccaaagagactgattctgagaattcccggtgtcttagggctaaaaccagacaatagtagtgtcctgtagcaaaatttccgtatatttattgggttgttgtgctaaggtgcttggtgatacctgcgcgttacggctgaaatttgtagaaattgatgtattcagatatgttgttgaacaacagctaaagagagcaggagactatgcacttcgatcattttgtcagacaacgttaatttagagcaaagtggtaaaattataaaatgcactaattgtgtcctgagagtacgagactaaccggaccaaacagctcattcccttcttcagttggtgtgttctgaacattgagatatcatgcatcggctctagatcaaattgttctttcttttgcaggagaactcatatagaatcaagcatatttagtgccaacaatcaggggcggattcaatgtatccctctagacccaccagacccatggataccccctaagtccccccttcaacttttttgttatagttaataagataggaggtgctaaagatctcttaatagtattttatcatagtttaatactgagacgatgtgttcataccggtgtacttggtatgttgagtccctccaaccttttgttcctggatccgcccctgccaacaatatggataaattgagaatatcaatagaaaaatagaagcaccagtgtatcactacctcactttaccttgcagtacaaagttgcaaatggaaatctcctaaagaaaagaaggttatgaaaacaattaagaaaatcgaaagaatagttttcatggtcggagctttttgccacagcttttgcgaaaattcttccaaccgggcaaccggcgggggagcaaaaatcgagcactccccctggcccaccacgtgtccatacacacaactttattgcaacaaattatccacatattttaaaaaacctttgttaagggaattcgtttcattattggttccaccaaaaatgtttcacctaatgtactcataatgtttcagtatgtatagatctaatgttgcagtgaacggaacattcttttgcaacaaatcacccacatattttggaaaccctctattaagagaatttgttttattttttgttccacaaaaaatgtttcacctggtgtactcagaatcagaatgtttcactatgtatagatataatgttgtagtggactgaaacattctttcgctatttgctgaaaagctaaaaatttttttgtcggaatatatctatgtatggtcttgttttgaagatttaattgcagcgaatttaatggtgcaatcgaatcatgatttggataaataacttaagagaaaaattaatttaaagtggttttgcatgcatacgtggtgctgacgtcagcgcccgatttttgccaatccggatcgggcgcccgatggatagtccatttccggcttttgccaatcctttagcaataagtcaccaaattttagagtccgattaggcccaacaaattacacatcacatgggctcaatgttgtcgtcacatgggcccaactgtctaaaacaacagccaacttgtttagcatacacaaaggactgtggactgaggtgcccaagagaaatactcctatatgcagagatatgattgcttgtattacctacacccaaaaacaaatgtgacacacaaaacaagagcccattacaatataactgtattttgctaaaccgcatagctaaaaagagctactaggcaagctctgcccaaaatagaaatgtacatacatatattactaaacttaattacatatgtaactgcaatgtaactcacatataactaccatatagctgctgttcaatcatgacgtaagtgcattttaaccctgactttatgatttatcaccacctcgtgcattgaccaaagaaaagaacaggagaaagaaacagagtggcagccagttactgttcaaatacgagtatctcccgcacttaacaggtcgcagccacgccattcaacaagagagcaggttcgaaacgagctcataggcgtgtgacagcactgaaccacagatctgactgtaaccagcaaaaaaaaattgtgacgacataaatctagcaattccgttgttatatttatcatttttaaaatgctgcacatacattttgaatatatattaaattttctacctataatacttatttatacaataaacttatgaatattacagtcacacaataaataactatatctcgataaaaaatccatcaattgatactacctttgtttcaaaatataagagtaggttgttttggagatgacaaggagaaaggaaaaagaatatgtaatatgttgccccattaaatgagttgtttgtgggtagtggaaaggtatgtaaggtcaaggtggggagaaaaaattgaatgaagggttaggaaaagtagtactactcaatcccttacattttggtacaaatttgaattcttaaatctcttatattatgatatgaatgtagtgaatttgttccatgttcaagggtaaacccacatattttttacagccattaaacggtcgactaatgtaaaggatattgaatgaataaaatcaaaacttgggtgtataaaaaaagtaagagaaaattagaacggactgatgatttcaacagctggccaggacctattccctacaaagctgcacccatgcggctaaggccctgcttgattcaacttaggattattataatctgaattattagaaataagttggaacaaacagatagcttattatgatagattattataatctataaaccagattactataataatctagtaatccacctctaaaggtgcttactttagattgttaggtgactaaccgctaacaaacagcttataatatagagaaacaaacatctcacaacttattatatatcggtttattataattcaggttacagtaatctggctcaataatttaaattacaataattttaaactgaaacaaaccgggtctaagccgcttgcatatacagcctgtccgatcgatgctctcaagcatcgccatcggagcagtgcccgcacaaggcgaggttttgatgggcgcttgggcatgctatgctgctgaaaggatcgtggtggggggaacctaaacacgaaagcgtgaagcatgagctgttggatatttcgatattggttacagtccaatgcctaacgaaatgtccgagctaatatcggatatttcaatgcactaagtgtaacagctcatctttctgttgtccataaaaatgttttccagatgcaatacaaatgcatttcatgttgcgctcaagaaaattcccatccaaatgtattaaagttcataccatcactatataaacagttcccgccgcccaaaccaaccctcaattttcaacctcccccaaaaatcgtgattaaattattcctacagattctacacattgctggcagcctcgccttcaagtttcatttgattttgaccaagtttgcggaaattagaaattcaaggtactgttcacccggaggagctctccctctgctcatcacgttttctcttgtttccttgacctatctatccgatctattgactaggcaagctaagtaatctcgtgggacacagttttaatgttaggctccacctccaactcagaccccactgcctagtcaagcctaggctaagttgggtaggccctattctacaccgcccatgtgaaagtgagggtttcgcgtgtgcgatgtgttgggatacgcgcaggctacgatagcataaattaaaattttctaccatgtaaatcaggaaccaagcaagtattagatcatagatcgttaccgctcgacgcactgtgcagtggaagtaggcactaagtagccgaagaaacgtcgagggcgtagcacgcgtcagtgtagaggaagtagttgatcgcagcaactcgacgttctccttctcgtgcgttctcatcgccgtactctcaaactgatcagcaccgcaaactagcagcacctctaccaatatccacatgtacagggacagaacaccatgcgcagacgtgctagcatccgcacgcggctagggttttgctcggggaggggagtggcggctagggtttctcacgtgatacgatcacaccgtcagtcacacccctcacgaatatataggatccatgactcggcctccaaggtccataggactcctattcagatccctatccgaattaagctcatattcgatctccatccaatccttttattctggcccattaagcgtgcgaccctgtaggttcatgtacactcggatgtaatccgaaaactccttttcagtccacgtgtcaacagcggcccctagcagaacgtattgacccaccggacatacataaagatcatatcggttgaacctctagtgtatacttgtatgaacccctttgcctcacgatatcaattaagctcaaggctagatatgtgtcatcatctaatagctcaatcattcactcgaacttgtgatagattatataacttgtgtttgactcctcaatcaccttaggtatagccatgcacttccataatctataatatcgaggggcccagatatatctctccatatgaggggcgaatcttatcttgattattcatttcccactacatgtttcatagcatacccaaaaattatttttataactacctaattacggagtagtgtttagcagtccctaagtaagctactacatatgttgggaaccatgataatcttaggtctaagaattcaataccaacattaaatgagatcaccgatgacacaacacatattgctcttgcagtgtctcatgttgggtatatacaacaacatataccccaacatgtgtcaacattattaatttagtatgtctatatcatgatccataagacatgatcatcaattaatacatgtgctgatcatttaaacatatttgttccacatataatatttgatcagggatcctttagaaatagcaacatataacataaagagtctcatgaaagaatcacatattcattaaccaataataagttatctatttcaaggaataatgtcggataaatatgtaaatatagtttgtgatacaattatctctatgattgcctcttggccatatcaccaatacgatgcaccagtaccgccctaggcacactagctgcgtcagcaccttgcaccatcctagccaaggttgttaggatcgggatactaggtagtatcgttttgctcaaagtaatatcgtatcgtaggaccatatcgtagtatctatgatattttctattttaagtttaattaatatttatattaattatatttatattaattgtttctatttgcacnacatatatcattcctatattttttatatagaatggctatatataattattataaatattaattaaacttaaaaaagaaaatttgtatcctgancnatantacctagtatcccgatcctagcaaccttggagagtgccttcctcacgtcacagccatttgtctttagcgcttggccttaccagacctcgaaaccgcacgcgacgattcaccaacgagtgcgcctggctctttgcacctccggtctgtctcaactccctgttccggaccactatgtcccatttctgtatatactaatttgttgtgtacagctttgcagtgggtggcctgcctcaaccctgaggagtttcattcacagtgtatgattttgcttccttggaggttcctttctatttgcaccaaatcaagcggtcaaggcaaattctagttcatttaagagtaacggtgaagtctaaccctatatcggttatctggccatgatagtagctcacaggaggtctaccatcactccatcaggcagcttctatctctgtactcaacagttagtttccctttgctttcgtccgatacacggcatcaaaccaatctcatcttgggctccgagagccatctacaactattccccactgctttcactcaaagaacctaatttatacaccattcaacatcccatctgcataggtctatctcaaactatgttggatcatcatgaccaagtatgtccggtacccaagatctcacgagtacattatcacgatgtcacattattttcatctcgacaacaccacaaccatgaatccgtctcggatagaggtttccttggtgaatacaaagcttcacactttgcaccgcgagtttttacaattgcatctattttagaaacattgctaacacccagtgtcatttccctggtgatatgacaatcaggtataggcatacaaccaagcatgataaatataaaatattgccaaagaatacatcagctaaatggaggatctacaacatattcaaatccaacgagttttgtaatccagttcggtctctggagacagcactaacttcaaacggacccagcactttcatgtcaactccgatttgggcgatcttggattgttggaaagaatatatcgtcacctttcaaatgcatctggtctcatattaaaattcatcccgagtcaatgggaatcatcaaaataagcctgtgttgtttctgaaaccaaacatggaccctgtgccttgtaatagactaggcctatcttggaagtgtctccctagctctatttttctctataaatgtctatgtacaccctctaaaacaattgtgcgtcatcacctggaagatcaaaaacccatttcccctacacaaaaattatatgagaagtgtctttggaactcatgcttggagatcgtggttattgaggtaccgtaaaagtggaggaacaagactacataggttctcaacatcctacggacataactcaactaataggtaggtccgccagttcgtcacacaaactggggcttgtcaaatttaacgtgcacacttaaatgtagttttgcaaacaaaacattttataagttaggagcaatatcatgaaaaggtgacatgccttgggtcttcttcttcaaaacctctgaaattccacgccgaactaatttccgttatcgtcaactacacacaaaaaatactactattattaactaattgtgctattaggtatatctcaattttaatagaatttagaaacttgaaaggggtcaataggtgttacggattgggatttatgaatttttttaagtttaaagggttttatgaatttatttgaattgggaagtgtaaaattattcctccgctgacaagtggggcccattggtcagagagagaaagagaggaagggcttgtgtcttttggctaaggaggggattctaatttggctcgtatgcgctattaagcgaagtaacgcataccttatccaatctattttctcttccctcattggaatcttccaagttaatattcaaacattttcaactcagaattaaaaactttcaagtcaagatttcaaaacctccaagttaatatttgagactttcaactcagatttgaaaactttcaagcaaagattttaaacttttaactcaagacttgaaattttttactcagattttaactcggatttgaaaaaaaagtcaactcaaattttaataaattgaagtcaagatatgaaaacttaactaatgtttgaaaattttcaacaaaaatttaaaaactttcatctcaaaattcaaaacattcaatttaaatttgaaaactttcatctcaaaatacaaaacttgcaacttacattttaatctgttaactcaaattattggtgaaatattcaatttataaaatacaacaaaaaagttttcacaaaaaaaaaagaatttgttaaatttgggatgtcagattttgttgcacattatgattttaagtcatactagttatcgtgcacgtctaaggttcgttttggcattatatacacaacagtagaataataaatgcgaccttttttttatgcagtactccatataaattcttcacgtaaaaattgagtttcatgggatgatattttgaatgatctctacaaaaagttgcacagtctattcctagattgacaacataagatgcaatgcaccatccacctttattaatagatattccaaagctacatatgagtgcccctgaggaaaggatatctacacagattttatttcatttgtaaaaaaaaaagaatcaactctgaagtagagtcactatgcacattgtttctgtgagattgctacatctccagctagtaaagaaaatgccaacagctagcatctcatttttctcatttgtagaattgcattacagagagtaatattatggttagcaatcccatggcagtggacctcaaacagataaaaaataaccggggaactttaatgactcacattagtcggtggtttatctatgaagagcactttttggaatatatcacagataatgtatataatatctattgtgatgtacataatgacgccgattattagtccatttgagcctgtaaataaagaaaggcataccttatcaattgtagccaacagttcactttcatggtctctcagcgcccctcctcttactattaagccacagagctctccaaccagaacctcgacaagatgaaaaaaaaggataattatccctaatttaaattcaataaactaggaaggtagcccgcacattcgcgcaggtatgtattataaattatgtttgaaaaactgatataggtgaaatattaattaaatgacacctgtcatatttcaacagtattgtttgtccataatttttttaacggcattgcttagataattttttcaaactatttcttagcttctaaaatatatagcatttaatacatccatataaacaattatctaatatatagcatttaatacatccatataataaacaattatcttttattctggagttagatttaatttgttggaaaaacatgtctaacaaattaagtgtaaattaaaagtaaggtgttttgtcctgtttaattgaaagtttagtggctttttcaaccaatcctaaagaactattattgttaataaatatgttctatttggaccatcatggttggttcaaattgccgcaagttgctacatacttacatataaattatgaaagacatatcatagaactcacttcctcgtgacatgcacggtctatactatattttctaaaagaaaatactgtgttaacatgactccaaaaaattaaacttaatattaataaatataacttttcaaacaactatatactatattcttagcgtggcttatatatgctacgaacttattacattttctccaaatagttcaatttattgacattttctttttcttgctttattttctaccagttcaaaatataggcgttatggatcttcaaatcgttggttcaattgtgaatacaacaatagctagattagaaatcagtatgtatattttattttttttaaacatttctagctataaagaacatggagagtagagtgcagagctcaaatcgagagaagagcggactggtagtattgtgttgtttgcatgtgtgggggaggccaaagtgtagtggtggtttattttttttaatatgatttaagtgaaaaccgatgatccaatacttttcttagatttctaatttcttttttttcctaacttttaagatgtaacacatggcgcggtttaagattttcttttaaaaagtatatctattggttaaaaaaagagtttcttataatttctaagattttatttttatttaagacgtaacatgtgatgccttaagtgcactacggaggatgtacttgtgatattatacatatgtcatttttttgtaatgttttttgctatttggttaccacacaaaggattggtgtctatgatcaaatggcatacttttatttttatgtagtaaaatatggctaatatggatcttatatattttatttaactataaataaaacaaataaatatagttatatatttatttagtttaattaaaataaactaaaaatcatatataacttaagaattataatcattttacttttcaattattgatcatttttattaattagataaaattagaagatggaggaattgaatgatagaggatatgaagagagagggcatgcgcgcatataattataatatttttttacatgttacagtgaatgaaatattagttgtatgatttaaatgtcatagttgcttactttttagcataatttttgctttctaactaatatattttgggaacattactcatagttttcattttacttttaggactttatatctaatttgatcattatgaagttatgtacggtgataaaatctagaatattattattattattttattattttataattgcttgaacgatacgcaaaaaaaaaatataacccaaaattacattatagtgaaatttggtcttcaactctaaatttagtcatacataatttaaagatataagcagataaaaattagttgtatgatttagatgttatagttgcttaattcttcaacacattttttttttcttttctaacttataaagcataaaaataggaggtgaaataggtggaaaagaggagaaaccgaggaaatagttgagggggcgtacgtgagtaaagtacgtgcagtaacgcacgtattacctacgtgcccatgaggcccgaatttaggagatgaatttttctaaggtaagtctaatgatggtaaataatgggtcaccaaatttcatgaaaatcaattattacatgattggttttttatcagaatttttaggactgcctctattttactatagtgccacgtgacagcttagaagtgtttgtaggatgccacactatggttaggagtgttcgtagaaagtttggagaaatcttagtctaaaattgtgttataaataatccagctaatttaccactcttacaaacaaagcgtaactcatgttgccatgcattgcaattactataagggtgtttctggttgttaaacaaagcgtaactcaggctgtgtttcagacactataaatagaagaacattcatcacacttcaaaagtacaattactccatatttttttcattagcattgcaatttaattaatctccgcatcagttatttatagtcttcttcatcatccaaaaatagacttgttttacaagaaaaataaggtagacttatttttttagaacacgtctctagcaaattaatctattttttatgtagtggcttggactactcacattgagctgattttttcttattcactgagcggaatgtctatttttggtgttgcatgtttatagtttgtgttgttgaattattttatagtcttttgtggtgattcaggtgccatacaaaatggcaagttgtgccgtccattgataaaaacatgaatttatattattttattattgttataattttgatatctgcttatatgtttgtagactgatgtataatgacaaaaatagatattgataatatttcttaaatgccaaaatataggcatatgaaacggtttaattataaatagtgcttaaaattattatcttttcagtatctatagttattggttgtttcacttttagtgtaataccccgtatattaaaagatatttaagtttttttaagtttgggttgacttgttaaaataaagatgttaacagaaataaaaaaaaagaaaaatacttttagaagtgggccaacatgagaaggcccataaacccagcccactagttctcccctagaacctagagagaggggaaccgaatctcacctcccctcttggtgccgccacccctctccctggccggcctccaatggcgcctccttccttccctcctcccgtgtttatatctctcccctctacagcaaattgccctcatagatctccaccccaagaacctggatcaagaagcaaagtggaaaaacggaacgaggagacggagaggcgtaggaggggttagattagactcttccctgttgtctcctcacaagttctctaaagaaaccctagttttgctccataggtgtggagagatctggtgtggagggtggtttgtcgggttgccgtcgaggttaaaaggcaagtgcatgacgaactaattgtgtgattcatggattgtttgctctatctatctatttccgttatatttctatgtaatatgtgatctcttatgtttagattgttgttcatgtcatttagattttaagtttatcttaagtttacgacgttattcttgtttcaatattttggattctggttctggttaaataattcaagttccatgcttgacattgatgtgcaatatggtttgaatttggttttttgtttccagtttcaattattcatgttccatgcaagccatggatgtgctatctgattttctattcatgttcctgtgggtaagcgcagatcacgcttactcggctttgccggcaaatgctaggatgtattcactattgtccgggatggaaactactgtttcaattcatgcctgcccgggataggaactactatcttctttgacttggtgtttgaaaatgtgtttcctatcaaagaaagaaagacttctgttcatgctttattgccaatgatgtgtatatgtattttctagttccatattgtacttgttgagtatttttgtactcacttttatgttttatttggttttaggtgtgcattgagaccgacatgcatgggcgggacgtttatctgcacactatcaaactgtattgcctaggtccataatgacacttcaactatatcatggtccggccttgtaataatattttagatattttttagtttttttccatggattatatggatagatagtgctatgggaatgatgttattattagtttaatctataattgcatgtcgtggatgtccgtatttacaggggagactcttacgaaattttttaatgaatttaggatttagtggtttctgtatcgtagtgtgtagcattataggtaagaaaatacctggggtgttatatttagtttatagctgataatagggagaggaggctggagaggaatgaatagcgtagagctcgagcgagagatggaaataggtgagcattattgtactcatgtgatgggaggagaattaggtggagggattttgtatttctaatatttctaaacgatctaagtggaaactgatgattttttttattttctcgaatgtcattttttttatctttaagacctgactttttgcagcttcaagatataatgattgaaaacattgggtgtaccgatttaactgaaaaaacatagctacatgttttatattttgtttgaatgtctaaacttaaaacgtgagacatggtgacttaagagcgctatagaggacgtttaatcaatctttatcatgtaaaatgattcaagatggcataattaatagatattgttaaattttgtttatgtttccttcttctttggtagccatgcaaataataacgatctacgttcaaaattgggcaggtttattttattaaatatatatttaatggatccacttgtttgaattatctacatcattaaatctaatgtttaaaatagtaggtttctgaaaatggacagtaagatgttctatttcttttatattttttctatattaaaattggtataacttccaaaattattagctatagaatagaataggattatataggaaggagagagggagtattagacgaggaggagacgtacatactacgtgtatgtacgtacgtagttgtagtgtggcccggtgggagaggggattagagggaggtgggtcatggtttttttcttttttaaagataatctaataattaaaaatagtgggtccaccaatttattagaatgccacgtggcgattgaggagtgacggagcgtggggctcctcaccgggagaccgcgcaggcccccctttgccggttcggccgggggccctgggtgagattctaagctcctagtctgtggaaagttcgcgagaatggaaaaagcacaagacacgggcgatgtatacaggttcgggccgctgagaagcgtaataccctactcctgtgttctggtggatctgtgtatgaagaagctccaaagagttggagagccagagagctcttactctagaaaccctcttctccctttttttcctctcctgggatctactctccaaatcctctctcctttccttccctttctttttttctcctcagtggccaaggtcctccttttatatctcaaggggataccacatgca

SEQ ID NO: 20063 - DNA, 16705 bp, Oryza sativa
tcacagaccggataaacgagcgcgctgcactggttacatgcggcgtgacgcgctcgtccaaaccgcaataaatgcggttaggtgagccccgttgtgctcacctaacccatacacgcggcgcaaaacccacaaggggtcggggcgcctcagccctcggggccgaaacgagagcggtccgactcctcggggagacaaagaggggggcggccacatcaccctcgggcccgacccccccgagggggtcaggccacgtgggtgattgctcctgccccaagcctctagtcatgatactcccggtcccatgtcaccgacagtagcccccggcgttatgccagggcgatcgccctcctcgagggaagcggtcgggcgtgacgccacttacttaggcctggtgacaagtggggctggtctctacagttgggcagaaacccaacggtcgcaaatcacacacatcggcaatggtaactcggctgtcaataatgggcggtctcttcaagactgccacattactcgagtagcacgcgaatcgggacgagccagttcgttttgcctggagatatggtgatggcgcttcggtcggcgagcgtaattaacgcgcgcacgatatgttccatctcgactgccacagccgcatatccacctcatgcgccgcaagcgggcgaatgggattagtggaagcgtgggcgcgagaaacgagggagcgagatagtgggcgcgagaagcgaggagccgggcacagcgttggcaagggtataaagacaccgaggaaaagatttgcttccttcctctcgccattattccccttgtctacgccgcttgcgccctaactccttgtttcctgtgccctaccctcgccacacgcgctcgctctcaaacatctcttcttccggcgtcatggcacggggctccgttccgctcgatggtagcgtgctgctgccttcccgcatcgtgagcgagaggcaggctgggctgccgcgccgcttcatggcggaatctgccaccggccgggagatagtcacgctgggcgagggacgcccggcgccacgctacccggggcggttcgtcttcttcctcccttttgcaatggcagggctggttccgccattttcttctttcttcatggatgttctggagttttacgatctccagatggcgcacctcacccccaacgcggtaatgacattggccatcttcgcgcacctgtgcgagatgttcatcggggtgcgcctatcccttcggctgttccggtggttcttcaccgtacagccggtgtcgccgccgtcggtggttggtggctgctacttccagccgcgggggccggtgctgaaccgctacattccctgcgtcctccgcaagaagtgggatgactggaagagcgactggttctacacccccctcgccgacgaagcgcgcctccgacttccgagccagccccctgcgcaggcctccaactggcgggcgccggtagatctgggggatggctacgacgccgtcctcgaccgcctggcgggcctgcgatcccaggggctcacaggggccatggtgtacggcgactaccttcgtcgccggatcgcgccactccagcggcgcgcccggggcgcctgggagtacaccgggtccgaggactgtatgaggacccaccggggggtcaaatgggactgggtccctgaagacttcaaggtaatgatccaacgggtgctgaatctcagctccgtggaggcatccctcatcccccaaggagtcctccccctctgcagcgatccagatcgcgccaacatcctgaccatcatgatggcggtcggggcctcagaggagcgagctcctaagggccatgacggtgcgagcgggagccgcaagggagatcaatctatctcaggagggggtcgtgcttccgggccccgtgatgggggctcggggggtagccgccctgccgacgcccgagggaagaggaagcaagagggtacctcctccccatctcctccccgagggggcggggcggcgcgggtcagcagcaggcgcccggagggggccgcgccgacgccgcagcccgagggggagcgaaagaagaaacggctccacaagatgggggggacagaaccatcccggggaaaccttatttcccctccaaggtggtcgtttaaccgaccccctcgcaggttcgtcccacgcccattgtggctgtattcattctcccaacacgagttttcattcacccatcttgtttgtcttatggcttttcttctgcttcagcgagatcccgtcgcgtccttcttgccaatccaagtccggccaatctgaggccgagaatgcggcgtccacggaggcccggaggcgggaatctgaccggcgagaagccgcggatcgcctatgggaagccgaggaggccgcccgggaggccgcccgggctcgccaggctgaggaagccgctcgggaggaggccagactccgccaggctgaggcgacgacatcctccgaggcaacccgcgaaactgaccggcaagaagccgcggatcgccttcaggaagccgaggaagctgcccaggtggccgtccgagctcgccaagctgaagaagccgctcgggaggaggccagacttcgccaggccgaggcgacgacgacttccgaggcagctcacgacaaggccgcgggcgcatcgcttgggcccactccctcgggcgacgctcaggacaagtcaggtccgggggatgtccccgagtccggcacgtccatcggcgggccgagccgcgcggcatcctcaccgaggcggctctcccccacgccttccgccgccccactgagcgcagagccccttctgcaggccttggccgtcgcaaacaccacggtgttggacgggttaagtgcccagatggaggccctgcaagcagagcgggcggagctcgacgccgcatgggcgcgtgtcgaagaggggcgacgctcagtggaggctatggtggaggtgggccgcaaggcacaccgccggcacaactcagagctcgaagcccgtcggaaggtgctgggggagatcgccagggaggtggaggaggagcggggggctgccctcatcgccactaccgtgatgaacgaggcgcaggacgacctccgccttcaatacgggagctgggaggcggagctagggaagaagctcgacgccgcccggggggtccttgacgctgccgctgcccgagaacggcgggcggcggagaccgaggtggcatcccggcggcgcgaagaagccctcgaggcccgtgccatggcgctggaagagcgtgcctgcgtcgtggagagggacctggcggaccgcgaggccgctgttgccattcgggaggtcacactggcggcgcacgaagccgcctgtgccgaagaagagtccgcactccgccttcgcgaggatgcgctcaccgagcgggagcgagccctcgaggaggccgaggccgcagcgcaaaggctggtggagagcgcgtccttccgcgaggctgcgcaagaggaacaagcgcgtcgtaatctggaaagtgcccgcgccgagagggccacactgaaccagcgggccgctgaactcgaggcgcaggcaagggagctggatgcaagggcgcgtagcggcggggcggccacgggcgacagcgacctagccgcccgcctcgcagctgccgaacacaccatcgcggatctgcagggcgcgctggattcgtccaccggggaggtcgaggcccttcgtctggcaggcgagatagggcccaacatgcttcgcgacgccgtgtcccgtttagaccgcgccgggcggtaggcgggtctctggggcgggcggactgtgaagtacgccgccaaccagggaggcctcgcccagcgcctctcggagatggccgggactctccagcggctccccgaggagctcgaggggacgattaagtcatcctcgagggacctcgcccgaggagcggtggagctcgtactggcgagttaccaggccagggaccccgacttctccccctggacagcgctggacgagttccctcccgggaccgaggacggcgcgcgcgcgcaggtctaggatgccgccgaccatatcgtccacagcttcgagggttcggcccctcggctcgcgttcaccctcaactccgacgaggagggcgatgacggcggtgtgggcgacagtggcgacgaggctggcgacccgggtgcatctgagtgagcccccaggcccccgccaatcttcagttttttcttcttttctttcttccaaggccttcgggcctcctttttgtatagattaacttaatctgcaatcaaaataaagaaatttctgtgtcaatttcattttgctatgtgtatgagatgaggatgatctgtgccgtggtccttttgtgtcttagcttgactaagggctcgtgcccaggtcccagtcctcaaaaggcgcgggtcggggctagtgcctggggagatccacgtgtcgagactggccaggccgggagcatggtgaccgagggttatgggtgacccgattgtgggtttttgccgattcccccccggagttcaccacgccccggggcacggctcggttctgggccccttttggcgattttagccggcccgagcccccgagggcaggatcgagcacgagtgacctatttcaagtcaagattcttcaaaagaaaacaacagcacagacacagccttttaggaaatcgaaaatgcttttattgaaatatagatagaagaaaaaatatgcatatgtggtagcccccggccaaccctacacgcccgaggggggtgcggggttggcccgagcccaaaacctgacacccgaactccattaggggtagaagcgacgaaggtgttcgatgttccacgggttaggcagctctgtgccgtcgcccgtggccagccgaacggagcccggccgggggacgccgatcactcgatacggaccctcccacattggtgagagcttgctcaatccagcacgcgtttggacgcggcgtaggacgaggtcgtcgacgcagagtgatcgggcccggacgtggcgctgatggtagcgccgtaggctctgctggtagcgcgcggctcggagggccgcgcgtcgccttcgctcctccaagtagtcgaggtcatctctgcgaagctgatcttgatcagcctcgcagtacatggtggcccgaggggacctcagggtgagctcggatgggagaaccgcttccgcgccgtagacgaggaagaaaggcgtttccccggttgctcggcttggtgtggttcggtttgcccagagcaccgctggcaactcctcgatccacgaatcgccgtgcttcttgaggatgttgaaggtcttggttttaaggcctttgaggatttccgcattggcgcgctccacttggctattgcttctggggtgggcgggtgaggcgaagcagagcttgatgcccatgtcttcgcagtagtcatcgaaaagctcactagtgaattgggtgccgttatccgtaataatacggttaggcaccccaaaccgggctgtgatgcccttaatgaatttaagtgcggagtgcttatcgatcttgacgaccggataagcctcgggccacttagtgaacttgtcgatcgcgacatacagatactcaaatggccatgaaagtggtatgatctgcagggcctgggccggctgatggatttgcttggcgtggaattgacacgctctgcaccgccggaccaggtcaaccgcatcattgagagccgtcggccaatagaaaccctggcgaaaggccttgccaaccaaggtgcgcgaggcggagtgggctccgcattcgccttcatggatatcggcgagaagctcgacgccttgttcccgaggaatgcactttaggaggattccgttagccgcgcgccgatagagggtcccttctatcagcacgtagcgtttggagatgcgctggacgcgttcactcccttcgcggtcctcgggtagagtcttatctatgaggtatgcttggatctcagcgatccaagcaatcaatctaagggagctgggagcgctcccctcgggtcccgaggcctggactccgacgggcctcgggggccggtcaggcgcgtccgtctcccctaaggggtcgggtcgcgccgacggctgggcaagcctttcttcaaaggcgcccggtggggtctgggctcgcgaggaagcgagccgtgagagttcgtcagcaatcgtgttatcccgtctgggcacgtgccgaagctctatcccgtcgaaatggcgctccatacgccgcacttggcgtacataagcatccatctgcgggtcagagcaccggtactccttacagacctggttaacgaccagctgggagtcgcctaacaccaggaggcggcggatccccagtccagctgccaacctgagtcccgcaaggagtccctcgtactctgccatattattggtcgcccgaaagtcaaggcgaaccaggtatctgaggacgtctccgctcggcgaggtcaacgtgacccccgcaccggcgccctgaagagacagggagccgtcgaactgcatcacccagtgggcggtgtgaggcagctgcgaggggcccgagctggcctcggggactgagacgggctcggaagccggggtccactctgccacaaaatcggcgagggcctagctcttgatagcgtaacgtggttcaaagtgcaaatcgaactcagaaagttcaattgcccatttcaccacctgtcctgtaccctctcgattatgcaagatttgggcgagggggtaagacgtaaccaccgtgacccgatacgcctagaaataatgtcgcagtttcctcgaagccatcagaatagcgtaaagcatcttctgggcctgagggtatcgggtcttggcgtcccggagggcctcactaacaaagtagacgggccgctgcacctttcggtggggccgatcctcttcgccaagggccgcatctctggggcgctcttcgtccaagcggcctcgcggggcgcacttgtcttctgtgccgacgacctcggggtcggaggacgacaggtgcggccttcccacagtggcctcaaggccgtcctaggggtcgggggctcctggcgtcgtcggacaagcgggcaaagggccaactccggtcgtcgggagccttaggccaccgttcggctcgggggcctcttctccctgctctctcctgggtcgagtcggcacaggattaacctcggggtcagagggcgataggtgcggccttcccgcagtggcccccgggccatcctgggggtcgggggcacctggcaccgtctgacaagcgggcagagggccaactccggtcgtcgggagccttgggccaccgttcggctcgggggcctctcctccctgctctctcccgggccaagccaacacagggtggggatgcgcggaatgagggttatcctcatcgcgctccacaaccaacgccgcactcactacctgcggggtcaccgctaagtagagtagcaagggttcacctggctccggggcgaccagaaccgggggagagctgagatacgccttcaactgagtgagggcacgttcagcttcctccgtccaggtaaacggctcggagcgtttgaggagcttaaataagggtagcgccttctctcccagtctcgatatgaaccgacttagggcggccatgcaaccggtgacgcattgcacatccctaagtttgctgggggggcgcatccgctctatagctcgtatcttctcggggttggcctcaatgcctcgggcagagaccaagaacccgagaagcttgcccgcaggtacaccaaacacgcacttatcggggttcagctttatgcgggcggagcggagactctcgaaagtttccgccagatctgaaagtaaagtttctcggtcgcgcgtcttcacaaccaagtcatcgacataagcctcaacattacgtcctatttggctacccaaagaaattcgagtagtacgttgaaaagtaggacctgtattctttaacccgaagggcattgtcgtataacaataagttcctatgggggtaatgaacgcagttttttcctcatcctccctagccatgcgaatctgatggtaaccagagtatgcatctagaaaacacaaaaggtcgcaccccgctgtggagtcgacaatctgatctatgcgaggcagggggtaagggtccttaggacatgccttgttaaggtcggtgtagtcgatgcacatccgaagcttgtcgttcgccttgggaacgaccaccgggttcgctagccactccggatggatgacctcacggatgaatccggcctccagaagtcgcgcaacctcctcgcggatgaaagcttgacgttccggggcctgccgccgcactttctgccggaccggctttgcgcccggccgcacggcgagacggtgctcaatcacctccctggggaccccgggcatatccgccggtctccatgcgaagacatcagcgtttgcccgcaggaaggagacgagcgcgtcttcctatttgccatccagaagaccaccgattcgtgtggtcttggacgggccgtcgcccagggcaacctccttgaccgggacctcgtcgcatgtgactatccgctgcctcggggcggcggagacggaggtgccaagcctctcgtcgccaccctcaggcttggacgcagcggcgaggtggtccacgcgctgctccatacaagcaagcgcgactttgaggtcgccatggacagagatggggccaccggggcccggcatcttcatctggaggtaggcgtaatggaccgccgccatgaacttcaccaacgcgggcctccctaggaccgcgttgtagggcagactgaggtccgccacatcaaagttcaatcgttccgtgcggaagttggcggatccaccgaaggtgaccgggaggtcgatatgacctagcggccaagtgtgccccggcgtcacaccgataatcggctgggacggccggagcaccatccccggggccttgatggcgtcaaaggctgcgggggaaaggatgttgagggctgctcccccatcaatgaggacacgccccagcttcacgttgcaaacagtgggggaaaccaccattgcgatctgtcctccccgggcaacgcacggtgggtggtcggtctggtcgaaggtgagggcaacctccgaccaccgcgcccggcgcgtcgcctcatgagtaggggccgcgaccagaagctctcgcttcatggccttgaggctccggcgagaaacgtgagcacatgctcccccatcgacagtggcaatggtggccccaggctcttggaaacctaggtcatcatcgccgtcatcgatgtcctcggcgggggccttctgcttggcctcacttcgccgattgccggaaggaaccgccggggacttgccctctcggcgctcctgcctcctctcctcctcccacttcctcgtccgctcagccaaacttttgactgcgcggcagtccgcgaggtcgtgaagggaggtgttgtggacggtgcaccacttgccggttgggcgctccctgctgggagcgctggcctccttctttttgtcgctcgcaggcctcccctttcgggtggcccgcgaagcaccctcgacggcgaggacatgaccctcgtcgtcggaatgggctgaccttttcttcctcctcctgtcacgccgccctgtccgagcagcggatccgggggcggccgaagctgccacaccggaaccggaggggttccaggtccatgactcctccttacgagccactcggtccgcgagctgaaaaagctccacggtagtctggggctccttggaggcgatcttttcgagcatgcggttgtgccgcacaccccccctgaacgcgtagatcaccgcgtgtgcagggatgcatggtatggtgttgcggacttgacagaaccgctgaatgtatgagcgaagtgactcatcatcccttcgctgtactgcgtgcaagtccgcttcctcacctgggcgcggatatgtgccttgaaagttcatggtgaactgttggcacaaatcctcccaagagtggacggacgcgggtggcaagttcattagccaaccccgcgcctgtcccttcagggccatgggaaagaaattcgccatgaccctgtcgtcacccccggcggcctcgatcccggtcgtgtagacctggagaaactcggcggggttgacgctcccgtcatatttttcggcgatggtgggccggaaccttgggggccaacggacgttccgaaggctcgccacaaaggctctacagccgacaccaccaaccgggggcacggagggctgatccccgcgtccgtgttgaggtgacactccggacgaggaggcgccctccgttgcgtggggagcacgtcggccattacgccggcgctcgatactgatgcgggcatccggccccccacgcagatcttcccgggtcggaggcgctgacgaaggagtggcggccgaatggcgaacagcggccgccgctcgccgcgccctccgtcttgacgacgcggagccggtggtagcagtaccagaggtcttggtggcggaggaccgcccaccagcatctaggcgctgccgcgccgtcatgaccaagttggccacgtcgtccagccaacgttgggctggagactccgggtcagggacgacgggcgggtgacgtaggagcgcgcccgcagcttggagcgcgccctggggcgtgctaccgtcgccgtagacgaggaggcgacgctccccatctcggcgcccttctccatcacccgtggatgtcgaagtcgcggatctttcgaccctctcgagcacctcctcccgcctaggactttggcgtggagggggcggtggagtacgagctcgacggcgtgggttcggctccccgtcgtcaccgctaacactcggagagaggttgtgcgcctttgcttgttcggccattgggctgaacaggaaaagcttggcgcacacgaaagaatgcgagagcttagaaaaacacacgcagagccccctacctggcgcgccagatgacggagcgtggggctcctcaccgggagaccgcgcaggcccccctttgccggttcggccgggggccctgggtgagattctaagctcctagtctgtggaaagttcgcgagaatggaaaaagcacaagacacgggcgatgtatacaggttcgggccgctgagaagcgtaataccctactcctgtgttctggtggatctgtgtatgaaaaagctccaaagagctggagagccagagagctcttactctagaaaccctcttctccctttttttcctctcctgggatctactctccaaatcctctctcctttccttccctttctttttttctcctcagtgggcaaggtcctccttttatatctcaaggggataccacatgcaccacctctacctatctctctttttggtggggactttatcctatctttactcaaacttggcttgccttctctagaaagctaaaaacactgcttgtttttgagtgtggccacgcgtcctcactcgtctaacctcggggatcaccctgtcatctcttcataaatgggcggagacttgcaatggctgctgtccgaatgaccttctgatgggatggcccatacctacctccactccgccagaagcaggtgcaacgtgggtacatggttgtctgccgacgacatgaccagtgtcagaccggtcacaaatcggtcattcttgtccaccacgtgtcagtctagcaatctgcatgttcgcccttcttcatacaatatcttgcttgtaatggttgggatgaagcctggcatatatctgaccgggaccaacgtgccatctccaggagctaacacgccggctccggctagggacgagtgctcggaggctctcatcctgacgggatggggcgaggcgtgcgtcagaccgcctgtcgccacctaacccacgatctgatcggtctgtgaccagtcacagaccggataaacgagcacgctgcactgcgttacatgcggcgtgacgcgctcgtccaaaccgcaataaatgcggttaggtgagccccgttgtgctcacctaacccatacacgcggcgcaaaacccacaaggggtcggggcgcctcagccctcggggccgaaacgagagcggtccgactcctcggggagacaaagaggggggcggccacatcaccctcgggcccgacccccccgagggggtcaggccacgtgggtgattgctcctgccccaagcctctagtcatgatactcccggtcccatgtcaccgacaaggagtatttataggaataacacgtggtggtttaggagtgtttgtagaaagtttaatagacttttagtagataatagatagatagatagatagatagattatccatgtaaggattagataaaaaaatataccatatactgctctgtatttgttatcagttggcatgaattttacaagtggcttgagacatctgtacatttatagagatcaaacaaagcagaatactgaaaatattaaccatatacttattgtataccagggcaccaccccatagaaaagctcacattttagatctagctaactaaccttctattatttaacataaaaatgaacgtatatgttcacacgtatattctgggtacagccgtatagggagcatcagtgtcctgctaatcctaataaggatatggactcatcctaagtaattgatgagtaactcaggccacgccctaagttccccaagaagcaaggcttccattcttgttaaagccactgctgcattttataaacaactttgtggctaattcaattgcataaggctacacatatgaaaggactgctggctagatgtgctagaagcataatctcaagctgtgaaggagtagtagatcagttcattcagtatttcagttgcatagttgcatgccataggttctttcaagctcacacatgtgagccacaaagtggtgctcttctccattggtatctccagttttagaggtaactaatctatcttctctccacttttaacataggcatttatcacaataaatatatcaacacctcaaattttaagaataatatcgacaataatgatatggcctatttttgtaactccttgttacacatttgccatgaaaatagtgcaacgttagagaaaaattgcttgacggacacttgaaaagctgaaagcaagagatttgtctttcagtgggattgaaggtgggattgaagataactccactgtctaaaaaaagaactatgatatctgttgataagcagatgaactccactatctatacaatggttttcctacagccactgagccacagggacttcatatgtgttcttctcacattgaaatcgaaataacatttacatgatcacaagaggaaaaataatcctgggaatgaaacttcagagagttctcgtcgacgaacaaaagaccgtgcagatcgattactttactttagatctttgaataatcacgcacctttttgtcccactggacatattatatacataaaaaaccttatttatgagaaaccagttcaagtatgaactaaattaatttttttcaacttcagtagacagtgagttacctcatgaacatatgcttgtcttgtgagctattatagcagaataagtaccataagtatgaactaaattaatttttcaactttagtagacaatgagttacctcagaatatatgcttgtcttgagggctattatagctaaataagtaccatgaactgcaaaaaatactaaaactttcttcaaaaccaacaactgcaaccattgcaccatggagcccattctccaacgaaaggagagatagcagcgaataactaacctacagtgggcataaaagatcatcaacagtacaacctttgcagctaccaatttgaccccttttatcaactttgcttatttgacccttcttttcaaaattgaagatacggtatgaccctattctgttaagggtatctaacggtgttaactgaagcacaaaatatcccttctgcccttactcatttgaccctataacatgtgggacccacccgtcagttctctcttctcctctcctcctctcttctctcttctctctccacagcgagtggcaagagggcgagcccgtgccagccggcagctgtggagcaccgccgccactcctcgtcgctgccgacccatccacttctcatcgtcaccgagccgtccactcctcatcgccggaaagccgtcgtcgtacactcgggatccaaccgtcactgctccatcgccgggctcgccgccttccttcatccccgtatgtcggcggcgcctcctctaccctccgcgtaccggccaccaccgccgcccctccctcgctagatccaagaactcgagctccaccaccgggcccgcctgcttccttcctccgcgcgccagcagcgccacctcttccctccgcgcgccggccaccgccgccccagacggcgcgcaccctcccaccgtgcacaggcgctgccgccgcagccgctagggatccgccgtcacgaccgggcgccagtgcggatcccctccacgagtgggcactggcgtgggtccgcttcacccgacgccgccccctcagagcgtcaccaccttgcactcccatgccatcgccgcgccgccgctgcaccctcagatgtcatcgccgccgcaactcgcacgagagacagaagcgtggatagggttgagtgaataggggtttctaagggtattctaggcattatgaatattaattacatttttttttgaaaaaaaaacaaacctgaacggagtagtggaaacagggtcaaacgggagcttcgttttttaaaaggagggttaaataaacaaactgcaaaaagtagagtcaatttggcagttagagttcaaaatagggtcaaataaacaattgtccctttattttatagaaaaagaaacccaacatgtcttcctaggcactctgacattttgtctaaactatgcatatttcttcatagctagctgagggaggtccatatcttctctcagaattcatgaaagtgcatacctgaaaacatttgtttctttaatgctcaaacacatgtatttattggaagaactcacagttgcccaaattgagacacaaagaagtacctacaatacacaacattagctcaggaggcccttggcttcctcttaattcctgaagcccgtttgtagatgtcatggtatacataggattgtaaagggtctttcccacctcaaaagcaagccaatgaggtgaggggcttccccacttatattttagttcctttgcccttctacaactaatgtgagactattcaacaatctccccccttcacaagttggtgtccctcagccctccatcgccccttcaccgtttccccacggtcccttaggtatacgggccctgcaggcaccacgattcatcaggccttcacacactatgtctctcgagctagagatattgaactagccagggtttgataccaattgtaggattctaaagggcctttcccaccctaaaagctagccaatgtggtgaggggctcccccacttatatcttagatcatttgcccttccacaaccaatgcgggactattcaacagtatattcaattttcctgcacccatggaacttgctgcatatttcacccaagaatccacgtggtcacatcaagcccaaaatgcattttcagatacaaaatatatgtcagtccataggggcagaactatagaggaaaaataatttgtaaatttgcaaagtagaacgtgatgccatgaagattccatcaaccatgtaattaacctacttataggaaatcaacctacaacatgtatacagaaaatgaaacatgtatccagcagcatcgcctttagtccaaaggcattgcgagggatggtacgatgttgccactgcaccctgctatgagatcaccttctcctgcctacaacctgagaccaccgaccagtggagcaagagaggatggatctaaaaaaactaaatattgtttccattagcagactaatgaacgaaagcttatatcttcggcggaagcggggaaccaccttggcttcggcggctggagatgacctcggctcaggcaggggaagcggcggctggggacgaccttggctccggcaggggcagcagcggctggggacggcctcgactccggcgggggcagcagtacgtagcactacaacaaaaaccttatgtagaggctcttttatagagacaattctcaaaatgcctctaagttttgaagctctgtagtctagagacactttctagaggcactttcaaaatcgcctaaaatatgtttactctagagacactttagagacatttttagcatactttgttaaatttatcttatagagacatcttttcggcacttaaaatttgccatatatctaaaggcattttcttaagacatttaaaacgatgtaaagacatttttccaaatattaatatatatcaagtaattagatataagtaacacaaatcacatatttgcatgtaattatatgaggttgagatggttagtgcattgaatataaaaatggtcaactcaagagatcatgagttcaaggattggtaagagataatatttttcttttttttcatattgatttgctatagttgccgcaacatattaatgcctctacaaagtgcctctatttgcatagagatatcttataaaatatctcttagttcgtagagac

SEQ ID NO: 20064 - DNA, 2430 bp, Oryza sativa
ttggtgaattgtctctacgaactaagacatattttataagatgtctctatgcaaatcatctcacgggagcagagtaaacacgcggtggaggaagtgcgggcagaaatcgtgatggagagggtggaattggtgggtggtagccggttgggacgggtgtgatgcgtgcgacgtggatggacggtagggatttaacctgttgatttcacctgtaggattgctagggtgaactcctttttatattactagaaaagatgcccgtgcattgcaatgggtaaagccaatttattttgtacatatatgtctgtggataaataatcacagtacattattttgcttattcatgtgcttatctgaatcacttattacaaaataaaaagattatttgtgtgcaaatattttatatatatgttcttagcgactcaaaagcaaatgatataaaacaaagtacgataaaaaaaccaagaactcgaattcaaattaagttctaaaatttaaaattcaggttataggaataagcataagccaaataataaggccttcaaacacaagttcgatttatcgtccagttttatcctaagttgggtaggaattgatgacaaacggaatcagcaacttcgatcatcctttatttcaattggcatgtttttttcgaaagtaaaattgattcttatggattatggtaacggtatccttgttagtatgtacgggcatgtgtggagactgacttaaaatcatgctaacatatttcaggaatcgcgtcgtgtaatacgaatagaattggatgatctgggcaatgtacgtaatatccacactgacacacggactctgcaagtttcgttcgcttggtatccacattgcacaaactctctttcgcagttcgcttatgagtcatgacttcgcaatgaatgttccgcgtgacaggaatcggatacgaatgacgtaccataattttgacaaaaaaaaggcatcttcaatttttaaattgcaggcgagacgacgcagtcccaatcagacatgcggcaagggaaaatcacgcgcgtgagggcattgcaggcccaattagtcacgcggaaaatagcgagcacgagggtgttgcggtcccaatcacgacggtgcacaaaggcgcgtgtgaaaaacagacttaggtgcgggcctgaccactgcgtgcgataaagggcgtgtgaaaaggtgcgggcccatttaattcacacatgtctcgaataagagggatactctagcgacgtaagaaaaaagggaaggatttgacataaacataaaattaaaatcgatctaaatacggatgacataccaaaaattctggtgaacgcaccacaatgaacaatttttataatagtagtgactatatatacgcttcgctaagattcgtgtagtaagtacgtaatcgactgtccctggtcaagctacgtaaggtgattagttgtcgtaggaaccacctaattaaatagtagaatctgtttttcttctcgtcctgattgcatccttttgctttttgttttcccaacgtaaaatttaaatttataatgaaaatacattaaaattacatatgtaattttagaacttatattgtaaatatattaaaattatatatgtaatctttaggacttataatgtaaatagttgactattttttcatgaaaaatgaaaaatatgacggcgtagttagtaaaaaaaaagtcgcccgtgcgacgagaaaaaacgtaattaatcacggagaaataaagggagcgctttcccttggaaaaaaagagccatttccctgaaaaaaagaagaaaaagaaaggaactagcgcatgtgtgggcccttggctgctaaatcgcgtttccgcacgttcaaatgggcctgttcagtacgccgagggaaagaaaggagaaagtaaagcccgatgtgggatggagggtcttaggtagtttttggtttgtgggataggatgggatgggatgggacgaacccattttgagaggtgtttggttgaggagcgagtgggatgggttggcccctataaaggaatattcctcccagatccgggacaaacccatccggcaaaatcggtcggacgagctcgtcccacttggacggagcacacggcgtctcctcggcgaccgccggcgctcgtccgcgcccacgcccgccgccttctacgtgaccgccggcggtcgtggcacggcgtctcctcggcgatcgccggcgctcgtccgcgcccgcgcccgccgcctcctctatgaccgccggcgctccgccacgaccgcctgccaccacctccacgaccgccgacgctcctccacgaccccctgcctcaacaccggtcgccgccacgagcgagatgctctgcgccatcccgccgctcatcgcgatgctcgacgagagcggctgcggtgatgtcgatgcggcgggctcgaatggcggcgaag

SEQ ID NO: 20065 - DNA, 7032 bp, Oryza sativa
accgatcattcatcattcttgcgttttttctatcatctcctttacaatggcatttctattaaaattctgtacttttccaatagggatacgcaaaatggacagactatatatgtataaactgtagaaacaaatatgctagtttatttgctataaaagcagaatcaatatatagaaagaaacagaggaggagaacaatatacaatgctgcaacagtagaagtgaaagcagaaccgttgccgtggccattcctgccaatagaaccgtcgccgttacttttcttgccaccaaccatattatcgccaccagccatgacgtagaggaagtagtcaatgtggttgttagggtgaggggccccgatagcggggatccgtatggaccctcttttatgagttcgactagtgagtaagtcgcacctgagagtatgccctgggccctgcttattcccctaataggatgaacacaaggaaatatatagaccgggttttggccacccgaaggaataccctactcccactcctatgagatggatttctctcctccgcgttaaaggatcttacaagttcatcgatccacggtatatagttcctctttccttccgttgtgtgtacgctaacaacttggctaaatgtgctgaagtatattctttcacacttcaccgaattctcccctcccccctcattcagggacacaacaagatcaaagttcaagagagttttttattcacatcatcattagattgcgcatgtgtccttagaagaggccgcctttagtttgttctaccttcctctaggtgtgccatatctggatccaccatggacttgggaggtgcaattgcttgccacacagccattcctgctctaccgaggcctcgggggcacttagtatggggccatgctaagttgcagtacgccgatagcctggcatgcctccgcacctaatccgcacatgcacgcgacaaacaaggattaccatgcctagctaaatatgggggaaccctgtcattgcctagcaaatggtagaaaaagaggtgctggtcccctctgttaagtggcagtcaaccacacgccctctgttaaatttctctgtcccgtgtcagaaccgacacatcatggatgcgaaaagggaatcaacatcacttgtcatcctgttttccacgcttcctatctgttaacgaccaaatttggtaagccatgaactagatttggcattgggattgaagcggatatgatagggaattgtctcctgggaacacagttcgcatcagctacgggggcatcggctgaagactgcatcggctagcatagattggacgaaagacagccgatgtagccgatctcgctaaggtggttatatgatcatctccgggattgattagcgtgctgcacaggtattgcaacgattgagataagctcacgagtaggcaattgtatctattaattaggatattttgaatagtttctttagagatatatctcggcaagggtctgccgtgaagattcgtttgtatcttagagtttgttagagataagagtcgtgtccggcaaggacctgtgatgtatctcgggtataaatatgacccgatctcatgtaaacatttaacaacagttcaataacacttttgatgcatcgccacctttttctacttttcttgtttcgacgagttcttgctttcgggttgagctgcatcgattttgatcttcaacaagaggtaaagcttatcatggcagcttgtgttatcgggattagtacttacatctttatgacactctaatcttggttatgtaaatcgtcgagttaacatatatgcttcataagctttattagtatcataatctaaccctacaccggccaatatctattattggaaggcagccgatagagttagatattgttggtaatctagattatatagcatatctaccatctcttagtgattttcatcaatatgtttggatcttgtatttattcttatgcttaatgctgcatcggttgagttcgatctattaagtaacattcataactgcaatatctagtttgtcttacatgggtcataggagatggctccccctacggcacgcctttaaaagaaagaagaaaattttcaatggtaagaaagaacttgggtctgcccctgagaatttgtccggagatcaagtacacaacatggtgaaagacattactaatgagtttgggtagaaaagaaaacgtagcaaggaggacaagaagaggatgtggaagaaaaaatccatattgcggctaccttactagaaagatctggaggtccgtcattgcattgatctgatgcacgtagagaagaatgcgtgcgatagcttgctagggctgttgctgaatatgcctagcaagacaaaggacgggttgaatgcgcgtcttgatctataggagatgaacatttgcagtgaacttcaacctgttacggatgagaagacaggaagagtgtacctcccaccagcttgccacacattgtcgaaggatgagaagatcgcaatgctctcatgcctggtagatattaaagttccttcgggctattgcgcgagaataagtaagtatgttaaattggaggatctaaaactggttgcaatggagtctcacgattgccacgtgataatcacacagatcttgccagttgctatcagaggcattctaccaccacaagtccgtcgcactatccaacagctttgtgccttcttcaatgcaatcggtcagaagattatagatccagaagacctagatgggttgcaggccgatattgtcaataccctgtgtcacttggagatgtattttccactggctttcttcgatatcatggttcatctcactgttcacctagtgaagcaaacaaaaatatgtcggccaactcttattagagaaatgtggccattcgagaggtacatgggaattctgaagtcctacgttcggaacagagcaaaaccagaggggagcaacattgaaggttacacgaccgaggaggccattgagttctgtatcgattacatggccgagactaatcctatcggagttcctgcgtctcgccacgaaggaaggttcgcaggtgttggcacaactgtcagaaaaagaattgttcccgatcaagcttactatgcgcaggctcatttcgcagtgctgcaacatatggctgaagtaaccccatactttaaggagcatttagcgaaggtccgatgggacaatattggtcaatcagatatttggatcaacagagaacatggtgctcgcttcaacgaatggttcaaggatcgtgtagcacggtcgaccgatggcctaagtgagatattacaaaggttggcaaggggtccatcttgggatgttgacacatggcaagggtacgatatcaatggatacacattttacaccgtcacacaagatgagaaaagcacagtgcaaaacagtggagtccgtatagatgcatatcagcatcaggttggatcaagcacatactatggccgcatagagcagatatggaagctgaactacctgaacttcaaagtccctttgtttcgttgcagttgggtgaatatccgcactggtgtcaaagtcgacaaggaaggattcacattagtggaccaggccaaggttggatacgtagacgaaccattcgtactagcgaagcaggtcgaacatattttctacataaaagaccccgcaaacaagaagatgcacgtcgttagggatggcaagcgaagaattgtgggggtggacaacgtcgtcgataaagaagaatacaacaagaatcttcatgtgagacctcagatcgaccttgacgatgatcccgaagatgaagtggcgtacgttcgttcagaccattcggaaggcatatcactgtaaatgatgtatttaatttgtattgaagccttaatgaatgaattgcatatgtttcatgccattccagttaattacgatttaaaactctttgaagaaatggatttgttaattatgtggttttaaaaagttatacttgttattttaaactatatgtgagaaaggcaattgtcaattatatgattttaaaaaattaataggaattttaaactatatgtgagaaaggcaattgccaattatatgatttttaaaaaataataggaattttaaactatatgtgggaaaggcaattgttaattatatgaattttaaaaattaataggaattttaaactatgtaaataagacatttgttaattatatgagataaatcaaatgtaatagcaattttaattcgcgtagaagttaattataaatgatttttataacttaaaaatattttaataagtcatctgtgacgggctttagtactatgcccgatagagattattccatctctatcgggcttagtgctaatgcccatcacggataggtatcatccgtatcgggcaaagtactaacgcccgtcacggatgagtgccatccgcatcgggcttagtagtctgcctgatagagatgaggattgactagggtttacttagtcaatcctcatccacgggtccttactctctcttactctctcactctctagatccaccgccgccagcgcctcctcctcctcctccaccgccgacaccgcctccttctcctccaagccatcgcctcccgaccgccaccgcctccctccacgccccccggttcatgatccaccgccgcctcctcctccaagccctcgcctcccgaccgccgccgtctccctccatgcctaccggttcaagatccaccgccgcctcctccgcgacgctgccgctgcttcctgcttcaagatccaccactgcctcctccatcgtcgtccggcctccccgaccgctagcgcctcctccacgcgcaagaccgccaccgccggcttcctctccgccaagtctgcacgccgccgcctacaagttccggaggccacgttgaccccgagcccggccacgtcaaccccgaggccgccgccgcatcaacggccccgctccctgccgcgtcgaccctgagcctggccatgtcaaccccgaggccgccgccgcatcaacgaccctgctcccggccgcgtcgaccccgagcccggccgccatcgtcaacaccgacgtcacctcttcttctccctggtgcgcatgtcctccctcttctttcaaatgccatgtgtgtagatgttgggatgaagtgggctatgttgccatgttgggatgaagtgggctgtgatggatgtaatttgtgatttttgggggaagtgccatgttgggatgcagtgggctgtgatggaattaatttgtgatttttggggagaaatgccatgttgggatgcagtgggttgtgatggaattaatttttgatttttgggggaaatgccatgttgggatgcagtgggctgtgatggaattaatttgtgatttttgggggaaatgccatcttgggatgctgtgggcagtgatggatgtatttgtgatgattggccaatgatgattgctcaagaacagaccatatacacttgtgatatttgggttttgtcaataagaacagaccatctacacttgtttgtttttttgggaggagtggcagtatgggttgtttttgcaagaatggatacatttttgggccggcctcactcttgttcttgttttggtttaaatgtgggtttttaatgcataagaacagaccctatacacttgtgatttttgggttttgtcaataagaacagaccatctacacgtgctcattgtttttttgggaggagtggcagtatgggatgttttgcaaaaatttatgcatttttggaccggcctcactcttgttcttgtttaggtttaaatatgggtttttaatgcatcagaacagaccctatacacttgtgatttttgggttttgtcaataagaacagaccatctacacttgttcattttttttgggtggagtggcagtatgggatgttttgcaaaatggatgtatttttgggccggcctcactcttgttcttgtttaggtttaaatatgggtttttaatgcataacaagagaccatctacacttgttctttttgggttttttcaataagaatagaccatctacacttgttgtttttttcaggaaagaaaatgagcaaaactgaggccaaacttattatatgtcatgacttgtgtactatgggctattttgggcaattttgagggaaatgggatggatatggatagggctgttattaaatgaagttagtgaaattatgacatttaggagaatacgaagtgttccggttgccaaatctggtttggtcgggttactgcctgcacggtaccgaccaagacaatttggtaaataggacatttcattcaaataagacatttctagaaatttgttatcgttaccaatatcctagattgctttcaaggtcatttctttagggaaccccattcccataaattcagtatccaaagctggttgctgtatctatgggaataagggttcctaacgaaatgatcttggatgcaatcttggattttgcggacgataacgttaggagtctagtgcaattgttttgtgacaagaataggaagggttttggttgcctgtgtgttctatctaagtccacctcgtcagcagatatgtaccatccatgttcctcaaggacgaagcagacggtaccacgacctcgacatcagtatcccattggaacttgctatcgttgtcactatcatatggtagtgacattgatagcaagttcgagtgggatactaatgtcgagatcgagttcccggctgctccggccttgttgagcatagatgctcctgttccgtcgacgaggcgaatgcaggtaagagatagaggtataacaaaccatcagagaatgtgtgtagatgtaattttctttttaaaaagtactttcttcccgtacaaaagtcacataggacaagccacagcaaggcgaaccaatgtcgacgactactactgggactacttcaagccggaatcctaggacccagaataagattcctaaggaagtctacaccataacacagatggacgaggttggatatccgacggctc

SEQ ID NO: 20066 - DNA, 11683 bp, Oryza sativa
ggcctggaggcagttcaagcaaagcttccaataccctacagaggccaaggcaggactcaggcggcagactctccgcaagatggggaattgttggaaaaacttcaagataatgctggtcacggagtacgtcctcaaccccgcccagctagaaccatttgggaaatacccattcatcacccgaaccatgtgggatgagttccatgccgccaaatcaacgaaagagtctcaagcaaaaagccaggcctaccgggatctacaggcaaggaaccttcacccgcaccggcttggcaccggaggctacacggggaaacaggaagaatgggacaaggaggatgaagctgcagcggaatctaacaccccgcaagtgcttgctgatatccttgtccagcgggcaaggaactgggcaagggcaagggtgaagaagaatagtgacggaactctttcgttcccaaatcccgaagatcaagcggtgtaccagaaaatcgtaagttgaacacatagaataagtttcattatgttgtatcgtattcttcatctaacgtgtcctaactgtaccccatgtcgaactgaatgctgagagacaggcctcccaagaggtctgctcacaaagacaggaggatgacatcctcacgaaagtgttgggaaacgaagaacaccatggatgaacaaggggcattggctccaatgttccatggaagtttgggtttccccaatacgtgtggcagtacaagaagcacaagctttcaaaggcgtagaaaactgcacgccttaaggaccaacttagagtggagcttaaagaagagcttagagaagagctaactgccgagctgttaggtatggaggctcgggtggaggcacgcatcagggataggtcgaccgatgccactcccggtcccatagtacaagtgagccccacgcagaggcgtagcagctgcgcatcaactgaggctccgccagaacagcctgaaggccccgccgcggtggatcacataacggtaaaaatagcttaataaggcatttattgtattagcaccacaaatacgttgcaacatattctaagaacactaatgaatctatcgcaggaacccacatcgtgtaccctagtcgttagggtgacaccaggatttgcaattcctgccgcagagggtcaagcgttcaagcataccacggagacccgagtgcatgtggcgcagctgctagctggcaatgccaaagttcaggtggacttagtgaagcccgattgggttggctactctatcccgcacccacctaatgacgagattctgacccttggggttgcacgtgggacctttattcaatggcccaagcatagcattgagatcaatataactccaaggccacgctaagttctcgtccgtcgccgacgcgtccccatccaactgttgtatctctccctcctaccgttgatgaaagagataaagatctccaattacagtatgatatagatttagaggacgacggtatgaaggtcgacagcaggccgcacctcccccctcctgccaaaaggagcaagagggcgaaatcttctccacctaaacttgacacacgcagaaaagctgctggaacagggagaggagtaggaaaggtgccattagccccaaagaagcttgatcttgtcaaggcgctagtagctcctccaaagcctccggccgaattcacattaggcatgccattggtcggagacgatgcattattcaagatgggccctgcatgcaaggagttgcatgggtactacatggagaagtccaacacaagaacgaaaaatagagagacctccatgttgggccatcacaatagtcagccgttcctcgggccttctaccttcatcgctgtagacttcaaagatctatgggacctctatagggtgcgagcgatcgacaccaacctccttaagtgctactcctcgtaagtatttctgggtacgtgatatggtagtaactacccataaattacgcttacccggactcttttcttgcttgtaggttaacctggaagcatgtccatcgtaaagtaccccatgttgccttactcgatccagctgtcgtcaacgagacaacgctgaaaaacgatcaagccaacatggtggactatatcaaggactgcttgtttgcttgtcaagacaaggacttcattatgtgtgcctacaatcaacagtaagcgtgtaccctacttatactaaaatgcgcgtcgcgtacaactgtagtatgtaacttgcaatttattaattttgcaggcgtcattggattgttctagtaataacgccgaagtggagtttggtatactaccttaactccaatatcaatccaaaaatatacgattggtcggccatcgaatctgccttgaacgaggcacgggaccaatacgtggcaaaaggcgagaggcataacgatgggcattccaaactcggctacaagaaagacttcccaatacgtcaacaagttggcgaccagtgcgggttccatgtctgccataacatgaggagcttcgcagataatgtgacattgctcgaccctaaggtgtgtccttcaattgtttatacacacataggatgaaaaatttacaagtatgtagactaacatggcgcctcacatgtagggaaaaatttcaaggattttggaaatcaacttcgatatcattagagaggagatagcaaaattcatactagatgatctcttgtcaccgaaagggatgtttagagtgaagtcctaggtatagctcatcttggaatggcagaacatttgcaatgcatatgcgacaaacaattgatttttgtaaatattctttgtaatacaatttaattctttagagtaaagtcctaggtagctcgtctctgtatatacttgcatttctaattacatataaatttgttccaatttataacttagttttgcagctttggagagaaaaatggatgtgaatgacatatacttcctccgtttcacaatgtaagactttctatcattgcccatatttatttagatgttaataaatgtagacatatgtatgtgtctagattcattaacatctatatgtatgtggctaatgctagaaagcctgacattgtgaaacggagggagtacatgtgatgtgaatgcatgtgttctgatggaatataaatgtgaatgagttgtgaattggctgtgaatgcatgtgttgtgatggaatgtaaatgttgtgatgctgggaatataaatgttgtgatgctgtgaatgctgtgatgctgggaatgggactatatatatgtgcttctgtcaattttttcagcgggcatggctagcaaaggtctgagtctagccaaattataaaattttattttttttccaaactcatccctgacgggcattttagtaatgcccgaaagagatatgtcatccgtgacgggctattagagtaagcccgatagagataagttatccgaaccgggactagtttgactcaacacgtggggtcaaaccaatcggtgacgggctctatctaaatgcccgattgagatgactaatcatccgtgacgggcttagtggtgtgcccgattgagattagtcatccgtgacaggtttctaactatgctggtttgattggtcatactcatctatgacgggctttgttttcggcccaattgagataacatccatccgtgacaggtttttgcccgattgagattttttctcatatcagtaacctttacctagtgacggaggctttactcgatagtgatgaggctttcagcccgtcatagataagcaatcccattgtagtgttcccgtgagaaggagttcctcagaattaaagtcagaggaacatgagttcctgaaaggtaagatctatcctcatgggcccacatgtcagatacacatgttcctctgactcaaattagaggagtctgactcaaattagaggagtctagtcatgtacgcactcagtcttatatacatattattatatgtgtgcatcttctgtccccgtccatgaattcctgtgttaacttatttaaacacttggacaactgggccaccacacacatgcacatcacgcttccttaatgtattattaatggtgttccatgcatgtactgcttatatatacaataatctggctgaccatacatctgcgtacgttgacctactaattaaccgtgtgtacgtgtacatgtcgcgtttcaagtttgtttttgtatgcaattggtgcaaccatgttcatccgtgtgctagttttattaaattaaaaccctacatgcttgttctcgagtgcacgtatgcctattccaaagcaaagaatataatggatgctagttgctagtagcactgtttattaggtgaattctgtgcaactcgtgcatgttcatgtgtatgctaattaaatacactaggtaggtagtattgcgcaggtaccgctatttttctagatgttaaattctttttggtgactaaaatttattactcgtaactacacatttttatataaagttcacatatgatgttcatatatctagtcagtgccacatcatttagtttgatagggaagagtttgatagggaagaactggaggtcttacttacacctatcaagtttgagatataatatactagaactgagattttggttaatacaaaactacctaagtaggatcgaattataacaactaagccaaccagagggggtgaatggttggtatgcccaaaaaccaaaacttttagcggaaataaaagttaccttcaaattcgacggatcgcggtctgaccgaagtagtagcaccgatctgaccaccctgaatacgttggtctgaccgatgtagatcgatcgtttgaaccgccgaaatcgactgctctctcctatcgcagcagccggtctaaccgtcgtgtgctcgccggtctgaccgctgcgataccgtcggtcggaccgccggtgtccagccggttggaccaccgtacccgagaaaacataaatcgaagaattcttaaagtagatgacgactttattgattctctctttgtttacaaagtgcaccaacagcactcctacaaaaatttcgactaaattcgaaaccctaactcaactatcaactcaattgctctcaaaagcgataccgggaagcctgacgctccctctctatttatacatgaggtaggcaacccaaagccacaaaccaaactcatactagaagtcctagtccccctaggaaaccttctcgtacaagacatgaactttacataaccaatcataccaaatttggactctttccaaattcgactccacatcccatacgcacacaatacctccatcgtatgccatatggaatcttcaccttccaggtgcattgaactctagccttagtatcccgcatgatctctgaccaccttggacatcgtcttatccccaagttgactcccggtccatcaccgcaaatactctcccggcatctcgagtcacctacagaagaaacaaacaaagaaaccatatttcgagaccaagctatccccatcttgactcattagtagcaaacaacagtattacatacacatagaatccatcaagaaatcatattcatgaaacaatcacggatatccaaacaaccaacccgaaatcgaaaccgacacagtgtcggccggtcagaccgtgggctgtgccggactgaccacgcaatacacgccggtctgaccggcagcacatgcccggtctaaccggaccacaaatccagtagtacctgtagatcacctgtaaaattcaaatcatctccaaaaccacttcgcaaataaatttcaaatatcaaaaccaataatctccaatatcaactgttcatcacaaaataataataataataaaacacttttgattttacaacctatttaatttttatgttttccttagggactctcgcgccttttctcatggttgatagtggttgcgaattgatttcataacgttaatatcaaattccgataatttcaactaaatatggagggtactgagtgatagaagttcagaagttccctatgacgacatctatacctcggttgatccactagtgaagaaacgatctttaacaccttatggaaactcctgtagcaactgtgacaagcaaattaggactaaagatggtaccgattgaaataaccggtactaaatattcataccaagtcaaaaaattatgtacaatacaggattctaactcaaaatctctctcttcagccctcacactcattatcatcccacctactacacatctaacttgaatagaaattctttatttttaaactaaccctggagacatctttagtccaattggtaacactaaccggtattaaaaatatctttagtctaggtagatactcgggttaccaaccggtattagaaatgaatttttagtccggattggtgttgctaaacgagactaaagatcatcaagtattagtctcggttggtgttaccaaccggtactaaagatgtatttttagtactggttggtaacactaaacgggattaaaaatgttccaagagacttggacttttagaactggtactaaagcatcttttagtagtgacatcagatatttgtgattttggagaccacaacaaaagataagttctatagtagtgacctcctatctatgactactcttgccgcttcaagtaaagatggcacaaataataatacgtagatatacaaagttaaaaagaggttcagtcatcgtaaattagttggcaagtcccttggaggtttgtcttggtggttcgttgtgacttttgccgggctcatttagtgcagtggttggttgcctagcaactagtgcaacttgatgctagtcagcacctctataaccctattcactttgcaatggctaaatacaacgttctaattaaaacactcactttttttttctggtaacacgtttgtatgaatattgttcctttagtatgtgatgacctagctataacatgggtacacgtataaattaagctataaaaattatctaacatctaaaatttaatagaggattaagtgtttgttgttttgcattttttttaaatgtgatctcaaatttgtcagaggctttaagaaatctagtaggagggttcgataacacgtttaatgcacttacaaattgactttttataaccatatgttctaaatattagtcattatatatttttgtttaattactgttacggcatatattactgagatttttcctaacatttaaaattatctttttggtggtattgtggacatatatgttttcttagatttgaagaaaatctcacgtgcgcatttagctatgtatgttaataaagctatatataggatgatatattcagtattgtcaatcatcacataatactttgtatacatgcacaactgagtgaaaattgaaccttactagtgaaattccagaaaattactaccgccattctaaaattgaaaattactatccccattttaaaacagtaataatcgaaaatatcaaaactactttcatgtatttgtattttattattatggatatattgtaataaaacatcaatcactaaatatcttacagtccaatatatccgttcatatggggttcagtaagtgatatacaattatatactatacatattatttgtttatttggaacttttatggttgattcgattgcatatgcatatagctaaaagagaactcgacataacacatttttacaacttaacgaatagttatatgggtcttcaatttttaatttggtctttcatctcatcaaaccaagaaggaaaaaaaatggaaaaagagggttcatacctattgttggaatagggctaggcccaatttattctcaattaattccattggtccacaattaatcctatgtaaaataatacaaccttgtacatttaagtgggactggttaaggtggtgtgggatagcaacacgctggcgcgcacgtgctgagccggcgggctgagggtgtgggcatgggcgtggcgagactggcggatgctgctgctgctgctctctctctctctcacacacacacacatgtttgatctcgcggattaactccaggcgttatcctcgcactacaattcctcccaccaacagacatctatctatgtttcctggagcactgcattcttcctcctcggttccccttcatgttgttcagctgcttctggcttccccgcgctacaattcctcccaccaacggacatctatcaccgtttcctgacgcactgtcttcttcttcctcggttccccttcatgttcctgagctgctcctggcttccccgattctattcacttgcgcgcacgggtgatcagtacgttccccttcctgttcctgagctgcttctggcttccccgtttctgttcacttgcgtgcatgggtgatcagtacgagaaggcctccagaactccgtccacttgcatacctgtatgggtaggcgagcgataaagtttctggggagcgctctcgggcgcgactgctcctgttcgacaatggttctgcaccgctacgtcttcctcctccacaccggcttctgcactgctgcgtcttcgccgacatgtcaatagacaacacccgtactggcactggagaaggcgagcacgacaaccgcaacagaggcaacaacaccaccaatgcctcaactagtacaagagcgttctcggggtatacttccatttccttactgttaatcatgctgctagatgtctctctgttaatacttatcacaatgttcgaattgtgttactatgtgaaatatgatgcttattctataaaaaagcatgctcatgttgctcatgtttagcaccttcttattgcagtgtcatgtttattatcttaatattctagattaaaatatgttgaattatgaccatatttccaacacctatgtacatgcacgtcaacaggaagatgtcagggatacggataaggcataccctccatcctacgacttatgaaatataccgataagatataccttcacgtacacggatcgtttccgttacgccgttaggaattcttctcgaattatcgaaaatctctacgagttaagaaactaccagagtcctactcggaggggatagaacctctaccatatcgtgccagtttacatatccctaagtcttactgggggtcaaggtattccacagtataaaagggacccctagggggaggcaaaggacatcacatctcatcgccagcacacccaccaaagtttacggagccggagtatgcggagccaactcgccgggagatcttgtcaaatccctcgattacgatcttgtcggtatcgcctgtttcagttactctctttgtaatctgttttcatcgtcatcaatctcatataaactagagtagagctattacctgataaggggcccgaatcagtataatccttgtcttctgtttgcttgatgtcgtactacgtagaccctcattccaatgtaccctaatacttaactcatccggtccgcgagtatccctcgtcgacagaagagatgtgggatttttattttgacaagtggggcttatagagataaatctaactgtgaaatctttaagatagatccattggtatatagggtataattcaacggttagatgtttcgtttgttttcaagattgttttagagagcgctacgtgacaatataggcgcgtttatagaaacatcacgtggtggtttaagatcgtttataggatgtttaatactctctccatgcaaacttggtcatcatatttgcctttttattaaattttcttttgttgtgattgcacggtcatgtaaactcttattgtgattccttcattctactacagttattcaaatatcccacaggcggggtaccatttagtagtctaatatacatagcaaacagatcaaatgtggacatttttcttgaaaactctttcgagacttttcaaataacaacaaaaatacactgattatttctggtccttgaatttttggaagtaattaacagaattcgaacagtgcaaatgtacactgctggccaaaattaatacacagtacaatacagtacgtacaggaagcagatgctaattgtgtcgccattactgcggctgggtggtctcgatctgtcgcaagaaagacgaccgagacaaaagatgcttgtcgcacgtacagcgccgcgcaggtggcaaattaaccggtcgatcgatcaacataaatgactagtattagattattaattaaagctgtacgttaaccatgttgtttggccggtggtcgtctcaagtgcagcagtgcagccgaaatgttggacatgtacgatccaatgttttacactggaagatcatgactaattaacaacgtcagataattttaagattttatgatcctagactcctagtacctaccggcttaattgtacggtggttgattctgtcgatgttcagctatgtacgaggtgtaaaagttaatggatgtacggagatacaaatatttagatatgttgagaccctttcgacaagaggtaataccaatataagaattgaatatgtcatgtgttgtattgatctgatgatctgattatagcttacgccttcaagaggatccctgtccaccttatataggttggaggatagagttacaatgagcaaaacttagccggaaacaacatcaatttcctaaactattatatggtagtatgcattggggctctatgctcttacctttgaacacaaggtaaaataatgacccactagtaaggatctaaacatcctcgacaagtcatctgtgtcgagctaatgtgacccgtttcggatgactcatctctaacagttcaaaaggtacgtcgtttaagacatgaatatcggggatgatccgtcaccgatagaagtcatctttgccaggttgtagtttgaacacgtcacggatgacatataatgagtcacaaccataccccgtcaccgatgttgggtcgtagctcgaaaacgtcacggatgacctataatgagtcacaaccatgccccatcaccaatttaaattcatctttgttgggacgcagttctaacacgtcacggaagacctataatgggtcacaaccatgcccatcaccgatttaaagtcatatttatcgggttatagttcaaacacgtcacggatgagctataatgggtcactaccatgccccgtcacagatttaaagtcatgtttgtccggtcgtagttctaacacgtcacggatgacttataacaggttacaacaattcccaatcacggataacatatcatccatgataggtgtaatgagatgacccttcaaacataacagcactcatccgtgacggatcttaattaacacccttcacggataacgttacgaacagtcatggatgaggaaaaattaaaatttttgaaattttcaaagaacctctgatagagacataccctatatggaagttatagatcttgatgagatctataactttaaaactgatagtatttgaatttgtgatagtttacatgcccaaatattcattataggtggtgagagctattttgaaatatgtaattttgaatttttcaaatgatctcggatggagacatggcctatatcaaagtgttacaagtgatgtgatctttttttttgaatttttcaaacgaccatggatggagatataccctacactaaagttgtagagctcgatgggctgcaggaa

SEQ ID NO: 20067 - DNA, 2396 bp, Oryza sativa
ggcgctcttcggctactaatgtcggttgtgggtggaaccgactgaaccactgacattagcaattggcattgagcactataaaagcatcttctcacttcactttcaacacaacacaactaaagtggagttccatcactttcatttttagtctactctctagtagagttagaatatggcgagagtgagggaaagcttgtcggaattgttggcatcctctccactcttgtaccttggtggatgcttcttttatataagcaagtattcatgattttttttgggtatttaattttcttatttaagtaaaatataatctcatcatcgaggtttcattgcttagtttttatattaaatgctctagtactaatactctggttaaatacggaagttttttgccaaggctagagtaataatcaatagcatagatgtggtctcttggttagaagttagcactgtttgttgtgtgctccacgggttctagatgtaggtggtaggtggtgatagccttgtccatcctttgtaatcctccacattcagttaatcatagagctacaagtcagacttgcttggcaaaccagggagagctggtgctggtagcaagttatatagttttaccttaacttaattcaagaatcttaacccttagaaatcttctctacatttcacctattatttagttgttgtccttggacgaacatgtttctaagattcgacacacgcgttccctgtgatttgatacccaaggaacactctaaggtgaagtgctataattgtatccatacgcctgcggatttatctgtgatcgtggcaaataccaataagcatttatggcatcgttgtcggggaacagttgttatgttatgtttgaacctagttcttcctctcatcctttattttatttcttcttttcttttcttttctaccatggagtaactatctagtcaaaactttttcactctgaatggcgagctctttgagccacccccttcttcaaaacctactctcacatctaactatgaactccgtcctggcgttatagccatggttcgggaacaatccttctcgcgccgttaggaagacacatggtgaggggtaactcaacaccaagttatgtcttccttttttttcccgttaacccatgttgtctctatacggatgaaaattgttaacttttggcagagtgagaaggattatgcattgtatcccgatgttttcaccgaaggtttgtttgcacagtagaaggtatggattgtatcctagagaacacctccttcatccacagtgaaactctccaggaaatcaagcatacccataaggagccctcaattgttgaatccaagcccatactttgtacatcacaagattcaccctttgaaccatcatctgaacctcatgaaccgaaggaagaagaaattcagccttcgaaaatccctttcgtgttcgaggaaggtctttttgaagactatagaaacacctcgaactattcctatcaaaagagatcacatgctcaaagggacagtaaaggagttaactaccatcatgagcgatgtgtggttaagggaagtggagccgtcttctgaagtaattcggatttcgcccccttacttagctattcaatgtcttgtgaaggagactgtggtgattgttctctataatcccactgtcggtgctaacatcctgtttgcaacttttgcgttaactttgttgacggtcgttaagtaccaatttctttcaccaaatagcacaattaataaaggaaaattagcatttcttacacgtatagcaataataaataatgtagttgtattatgattggagaatcaacctggtgttggtatttcttaacgacattactagaaatataattcccagcaatggcgcataaatacttctggtatattatggttacagagttcatccgcaagcgcacggatataccgttgtagcatttcacccgagagtattccaagggtatcgtatttattttatcccatgggaagatcatgtagagagaactcaactaatattttatatattacttgtgataatcatattctaagcatgggttaagataatccaagagtagagtgacacacaagcattaactactcatcctcataatatttcatctaagctaagtggaaagaaaagagaaaggaaatctattcctatacttataatatacatagtatacatacattctagttaactgttatactagctaataccctctatccgatgccctcctagtacttcgagaagccacccttgactgccgagttccttacgacagcccgtcatgaccatccaaccggggctaaatacggagaaataccctcccaggaaattaacttaggattatatataggcgcggaggaatacccgtactgagctgtcac

SEQ ID NO: 20068 - DNA, 5184 bp, Oryza sativa
cagcccttccgggttcccgactcctattctatttctattccaccagctagatactactaaactaaacttgagagaaatgagagagctattgcttgaggtgtgtgttgaagtgaagagagtgaagcctttatatagaggtggttatgacggttgtggaaggggaattgtccgaagtacgctccaaccgtcattgggatgcaatcctggatgtccacgccaaaacctggatccaacggcgccaggattggttcgactgaacctgggactggcccaatccagcccaatttcggctggtggcctcctctattgctccactccgcagacttgtaaattttggcccaattcattgtgtcagttctgagttcttggcccatttattcataagtctggttttcgacatcgtctgattgatttatcatctatgttgatgtcgattctcatctactttatgatcattctctgcaaaaaggttagtatacctaatactagtggaatattattattctaacatacttatgcattgcaaacatcactagttctctcctattttggtaatattgacggtcgaaactgatcgataacaaccgtcaacacctggatgcaggaattctacatctaagtgaaggagaaatcagggcggcatgcaaagaaacccatcaccggtgaatcatgtgtgagcacacggattaagcggcccacatattagaccaaaccgacctaaagtgtgaccaaacagccatgcaccgtcttaggggcccacatgtcaggccctggtgaaaggcggtggagagagaggtgggactaggggttcggccaaaccgccattgccacctctaatctccactccccacatgtcactccttcacccactcccgatgacaattgtgtgtggataacagcctccaaccgccatacaactgacttttggaggctacaaatagaagagagctgctcacttcacaacacaatcttaaggagcaattctttcttccactttgtattatctatagtttctattaggaataatgcttaggagtttcagtcctatagtcctctcggagttctgggtatgtctctagtaatttactcctctttgtattatcttctttatttatttatgctcatggcttatatttttgtttattgagttaatgttcaatgagtagtataaacttcgtatatctacttcatcttaggctaatcaatccatgctatggtaacagttcaatgacctttatagggtgagagtcccataggagttagtgatattatttactgacataagcgtaggctagataaatgccttggatgtaggtgtgccccacggaaagtgaggtaggcggcaggtgatgacagccctgtccgtcatttgtatttctccatgttcgggtatgacgtaagagtgcataaatgccataatcatgctggtagaccggcagggagtggtctctcggtagtacctggttgcctggaactaagtcctatgttgtaagcatctatatgccaagtgtatactagacctgattagtatatacaaaagtacacctgattagtatatacaaaagtacagatgaattgtagttacctaatgctaatttcctactagatatccttagataggtgaatctcctgtgtgtgtccaccaccttatcaattattattctaacccctgtttagactttggtgaaactaattataggtcaattaaggagatataaaaaaacacatctttatgccgccgccttcactgcgaaaatataaatacgatacccttgggaatactaatgggtgaaatgctacagcagtatccgtgcacttgcagatttatctcgaaacataagaaataccaacaaactttcttaggggacgagtcgttagcaccaaccgatgaaacgttccgaagtcccttaggtactcatagaaggttatgaggttctatgtggagtgcctctaaggcacgagatgttcctaatacatgttgtgcctaagaagtgaggcatgatgatcgttgaaaattccacaaacgacttgatcccacaacaaaccgtcataggatggaagatgtgtatagattacaaaaaactcaacaaggcaacttggaaggatcattttccgatgtccttcattgattgaatgttagagcggcttgcaaatcattccttcttctatttttttgatggttattctggtcatcatcaaattcccatccatcccgataaccaaggaaaagaccatgttctcatatccttatggaacatatgcttactgcggaatgtcatttgggttgtgtaatgcagctgcgtcattccaaaggtgcatgttgtctatttgctctgacatgatcaagaaaatcatggaagttttcatggacgacttctcaatctatagaaaaacttttgatcattacctcaagaatttagataaggtcttgcaacgatgtcaagaaaaagtacacaacatcctaggacatgtagagtttgactagcgtttcattaaagatttttctcaagtggatagacccttgtcttgcctgttagctaaagatgttccctttgattttattaatgaatgcttaaaatcatttaatactagtagataccccgcgctttgctgcgggatatatggattaatgcatgttatacattatagaaaaatgaaagatgtgtactttcaaataatattgagttctaaaaattcaacaaaattgaaaatgatatgtcatgttcgcttgatatttaaataatatagataataattcctagaaggtgatgatgtggcatactcgcatgttaacctttagtagtttgtgggcattaactttatagtaagatagggttctgaaagaatctctcatcttagcatcaagcattcaatccttaattggtcgctgtcgtttgaaatcatgtgtgatgctaatgattgtgttgttagggccgttcttggccaaactacccatgcaatcgcatatgctagtaaaaccttgactggagctcaaataaacttgttttgcatatccctgatagcttaggagaaattttaacataggactagaaccatttgaaattagactacataatctttccaacaagtactcatgagccccaagagtccttctagattaacagctaggtccaattgaagttgatgcttttagaaggcccgaatgtgaatccaaaacgtgcataaattattctcttgccttctgtgtaccaaaagtgatgtgatgatgtaggagtatatttggttaaggtcttagttataacacgcaaatctttcgcggaaaatatgcaccttggttcatcgataaataaggtagccatgatcatatctgaactagtaatgtcctcatcatcaaccataggcgccctgctccatttccctatctcgtcgaccacgaacgctccatgcctttccctcaattctcctgctaccttcctatgttatcgcttctctccctacgactacaggtgctagctctagctaccattcttcccttggtccatcagccagcagctaacgcttacaacgggggcgcacaaacccagcagagcaaggaccctggagggtttgggggtgaggattgattttgctccgttctgtgtaaaccgcataattgagcaaacggggtagttcctatccgttccaccttcgtgttacctcattgccatcccatagtcgatcaggaccaattgctcaccccaactcatagtcgcactcgctgcttgaagccctgttttgtgtcatcatcagctccacattattttttttcttatacccgtcactgagcttctattgttttgagcactgtatgaccatagtttcattgtatttcattgattatcatggcaaaaaaaatcatctaattaataaataattttgtagtataattgtataatatccactctttccgaccctttttgtcctcgcaacactctctccacattagcaaaattatatcaataagtttagtgaccagcaactaaatgtcttgtgtatatggcctagttttttccctaaagatatgaatggttgaatttgtgattattatttaagagtaaaaataataattagctatcctaaagttaaaaaaagatttaaaataattttaatttaataaatttatacttttttaaaaaagtaccattttaatactcagaaaatgtgtcacatcaattcagtgctctatttcttaaaaaggcacgatcgaaactactcctccatctctctgtcctgcggtttcctactagtggactgacacatatatggagatcgaatcctgcatttttcttttccttggctattgggccttgatctctaatcggctccaaagctttttcccgttatccgaaacgttcaagatactagcagtaggtttaaaatctcctagcacgtagcttgtaaaattgttggggtcaaggtagtctcaaggaataatcggaattaatatccgagaataatagagcactagctagttggggcctttcgtctgcttgctgggctgcaggctgtactagctagctagcctccaccgtatattctctcctcacacagaagactcgagtcgctccaccacaattgcatcttctttctacctttttgtgcaaatgcattcacagccgcatcatcggccactaccattaccactgagcccatgaccggaccaaaggaccaaaaggaaaaggcaataacacggtgcccagctatctaatccctccgtccaaagagatttggctgagttcgaaacgaggggttggaaaccaccactagcaagtaaaacggggcacggattaacacataatttcaattatatattagttttttaagaaaatgaaaatagattaatatgaatttttaaagcaaacttttttatatttttttagaaaacttatcgtttagtatttcggaaagtattcgcgcggaaaactaaggaatataaattgccaacatggagcaagaatacaaatattgttgtttaggagagctgatggttaagggtgaaattagtttgatatctctagaaatttacatggttgaaaaaaaaaggtcatgcccaaacaaacgtaaagtagtacttcaaaatcctctatgaaccaatagagaagcttctagggatcttatggctagctcgacaggagatgtgtagtgttagccggtctaggttcgaaatctcactcattttattta

SEQ ID NO: 20069 - DNA, 4848 bp, Oryza sativa
agaaaaataataagaaaggcaaaaaatatgccttccaaaaaagaacataacatttccgtcataatctttacctatctatcaatctatctattctttctattatatactaaaaatccattaaacttcctacaaacgctcctaaatcgacatgtggcatcctataaacgctctcgagtcgccacacgtcactctattaaaatagagaaatctgactgtcgattttcctttaaattggtggactcattaattttgatggaccttatcgttagatttatcttaaaaggaaatcaaaatctcgatccatccgtccaacgcaagtatgatccctccgtagcgtacgtactatccatgtatccatctgacctcctccgtttcccctttgtgtgtgtacgcttttctttcacttctcatgccggcggagaagagaagaaaaaaaaacacgtacactatttgacaaaaagaaaatatgtacgtacccagtcacatacgaaaaatatagagaaaaaaacacacacacgtacgtacccccggaaaaagaaaaaaacataacatgtactccctccatttcagtctccatttcacaatgtaaaactttttagcattacctatatacatatagatgttaataaatctaaacacatatatatatctagattcattaacatctaaataaatatgagcaatgctagaaagtcttacattatgaaacggaggaagtatactattagacctgtgttttgaaaataaaaaaacccagttataaatagcactctcaaaaattactcactccatactgtaaaaaaaactaatatatcaaaatgaggttagtaaatttattatgtattattttttctttatttatatattattaggaattaaatatcaaatatattatttttacatcgtgtcgttgtcatttatctcctactttaaacctcgttcgatcaaagcttattgggtgagtttatttaggcactcagaataatgcaagtcattagcacaggtttaattgagtattaaatattaaaaagcgaaaataaatttagttgatctttctaaaaaaaacttttatataaaaagtatttgcaaaacatgcaccatataatatactgtttagcaatttcaggaaacatgtttagcaatttcgggaaacatgttaaatataaataagagagtagccaatccgataagcactttagaacacagtcttaaatttgttacttagggtactaaacatatgtcctcacttatctccatatataattctatatacaaaccattgtccacaaatcgctaaataatattacttacgagatatccatgcacaatgcaccgaacgatagctgatatatgagcacgtgtgtcatccagcaccgaagataaagggtgatactaagtgcgcaaccatcaacaaattataggtaaatagaatataaaaacaatatactataaacaaagttgactacaagtacattacacctatgagtaatactattcctacacttctacagatactcctaagatgccacgtgatgctctaataaattagagagaatctatgaaaaattatataaaaaggtaaaatatttatccatcagtttacaattaaatcaatgatccattattttcaaccattaaattagatattctaaactaatccctatgtgttaaaaactatatagttctatgcatatgtacacaactcctacgtaagtatgtacataagagatataaaaagaaaaaaaaaagagtgtgtgtatattatccgtcccatctggtagttttctctttctttccagctctaagattttcctaaattgaagatatataaatgtagcaactactccaactgaggtggtaaaacaagccatgccatatgcaactgccttacgccaccctttgctccactctcttcccatcgattttctcgaaagtattctttttactaataatttaaaagacaatcatatgaactcatataaatatgtgcataagcacacttaaagtacacatgggtacatcctatccctatgttagaaaaaattttgtccaaaaaaaaagaaaaaacaaacgtatgtatgagagactactattccccccccctaaaaaaaaacgtacacgtaactacattatatctatttttttgttgttctcatccaaatagtgttaacaaattagcacaaattccaacgtatattagaccctacgtacatgcataggtgaattagatgtataatacaagtaaaaaaatatcaaaaccatatgtgttagcaaatgatcatcgcgagagcatgtattttttacgtgatcctcgccactgaagctattagatagtcgaatgatcaactgtgctaatcttttttaaacaatatgcctttactactaaaatttagtaccattcattaacatcataaacacattatgtctactctatacataaatcaactcaagacacaaaaaaaaacctttttttcattacctccatcttctttcactcattccctaaagggtgccgagcatggatctcaattggctatgttgtagtaagctatgcaggagtatgcattatttggttgaggtggtctgattttacaggttaccgttgaaaatagagcttaactggcttgaggagcacgactatatcaatacgagaccatgaattaaggcattagagaaaaacccttaacagctatagtcggcttcacccgattgttagagaggcattcttatataagtttaacggttttatcctattaattgatagaagcagtatttttaaatatttatatatagatttggacacatgtgagacataggcacttgggtatgatgtggagatttaactttttctggcattaatggtttattgggtttacttttaggtataactgcaattctatctattaaaaagatactcatatttcaagacaataataataagtaggggtgatagacgaatttacatataactggaacaaagtgattttttgtttggatataatacacattcttatcatttagtatatcaaaatctattatctatttcttatagtgaatatagtgagatagggcttcttttaatattctttttatagacaataaataaattgcccgcacatgtgcgcgggcttccttcctagttatataaattaaagatgattttatactcatcgtattttcgtccgttgtcctttcattttaacaaaccgtcctattccgatttagatccgtttttagcgttgtgaccatatttacgttttcctttttatatccacatccaatatgtttttgcacatatgggcctaaaattgtaaaaggtccaaattattgcccatctgttgacgcgaggctgtctcggtgaaaaacattgcccatcttctaagcatatgtcacatactatttatttcagatttgtttgtgtttatttcaataattttgcacacatgcaaatgcaaaacatactaaattttgtatgggcggctttcatgcatgtccatttattttgtgaaagattcatctaagcatgattctttttaacatcatttttcaacatatgatttcgttcggctatttaggattaagtgatttatattattaaaactgaagttgtttccaccgatagttttggtacgtcgtccgtatttaagttggttttaaaattcgttcgcttttaaaaatagaagggcttcagattggatatcaatctcaaaataaaaatcccatatactttttagacaaaaaaaatatatctaacaataatacaattaaaattagacttcacccgttgcaacgcacgggctttttttctagtaaaaacaaaaaaaaatgtgagacccatatatcattcacacaaaaaatgcattgtggaacccactaacacgtcgaccccacatgtcaaccattactcttctcctcctctctctctccacctatctaactctctcctcccgtcctcccaatagccgagatgaagggccggcgacggacgaggagaaccaaaggcgtgcggtggccctcgttggcagcagcgagacaggaagggggtggcggttggcggagagaggaacgtggtggctgacggcgacgatgctccctgggtagcgacagtgtccccacggcgaagacagcggccggtcgtcgggacggagaagggcacggagctcggacgatggagacgcgctcgatcggtcgagagaggcggcagggatccgaggagacgctactctccctaggcgacggtcgggtccccacagtggcgccggtcggcgagcttgcccgctcgtcggaggaacgccttctccgccctaccgtggccactgtgctgccgttcccgaccgctgtccccaccgccaccaccgccgccgctctagccaatgtgaagagaaaggccgagggagggaaagataagggagagagtgagggagggaggaggaagaagggaaggggagggaggatgacatgtgggtcccacaatatatttggtgtgaatgacatatgagtcacacatatttttttatttttgctttttattttaatgccacatagaacaaagacccggtcaagaccaccatgtaggcgccacgtcagccaaaaccaccaagaaacattgattgcaccggttttgatagttgaaggagtctatatacccgtttttgtggttggagggcatgattcatactcgagcgatagttgaaggagtcgaagtatactttttcccaacccagaattttcaaagtcatttttcaaaggaacaagtttactttaggttctacttgacgtggaatttgtcctttaaccgtaataatatatataggtccccaagcagtaccagttaaggatggaattcaa

SEQ ID NO: 20070 - DNA, 17035 bp, Oryza sativa
aaggaaaaaaagaggagaagaaaaagaaaaaaaagtaaaggggtcccatttgttagtcaaaataatgccacgtcatttctgcgtggcatgccacatcaagccacataggatcctgaaggagttgtagcgatttgggacctagatgacatactataacaagttatgggacttggatatgcattttgagagtttagggacttagatgacatacccctacaagtttaaggaccgcccgtgcactttactctataaaaaatgtctcaaaatagtacttcagtatataacatttacatgatcaatagcaagtgctcaaaatagtacttcagtatataacatttacataatcaacagcaagtgcatatcttctatagtgtgaccagtagaagtttatatggtatgcaaaccatagaggtttatatctcagttactcttaggacattgtctcataatagtactccagtcaattgttatcggaatagtgctcgacgtcgttgtcttaactgaagtgcaaaaaaggagatgtcgtgtgtgaacatgctggaaacatcttaaaaattgaaatgacaactatgcatttctggtatggacttacggaccccatgagcatgtccatcatcctagcagttgggcactggaagggatttcacactgcacatgtccatcatcctagcagttactgccaaaaaatactgctcaatctcggcttctagctaacttcccagccatccgagggtgacccatcgtaatgctggtttaaattgatttatgaaatctgacttcaacagaaatactgtaaaaaaaagccacatcctgtttctggaaaaaaaactgaagtatgtgttggaagtaatgtgtggatcagttgattttgttgaaggaataacaatattggaaaaatacggagcacaataaaacttcagatagaaaacatgatagagaaaaaggatcgcattacattggctggcaaatggaaaggtttatggaagacagcaatatgtgagtataaagctaactggatctataccacagctaggttagtaaagaaagccatggctgcatacatatagaaacaagtaaaaaagtggtagccattacttcattcctacatgtaaatgtaaaatatgatggcagaaaataaaaccaataaactgcagaagtgaaatgaacagtccagtttaagaaccttggtgtaagatttaaaaaaggcacatgattcccatcagggaagaaatatattgccaaatttgaactaaaaagtaaataaaatcattaaaggtggtccagatagtattatttgcacccagtaatcctagttatcagcaggtgggctattggaaatgagttaaagaactgaaattaaattaatggattagcatttgataacaagaaacgatgagaaagattgacagggatagttgacattcaataatacaagaaactgttagatggaccgatatgcaaatttaaaactcttttctagctatcttaatgtgtcttttctttctatctaattcctggacctgtttgtgaagaaataaaaccagtcttttatttttcttgttgtcagcctggatgcccttgttttcctgtaaaatattcgcttatttaatagaaatgggagaggctaacctctctagtttaagaaaaaaaatctaattctttcacatgataagaatagacacaaaaattagctgcaggggtaaacaagagaaaaatatcctgtggtgcatataatagaataagtggttgagccttctacaataaaaggttcagatatatggtgctgacaattaggaaaaaaaaatccagatattgaaacaaacacttatacaactttggtgataaatgtactctccagctccactgtccgaaaccagggattgaccattatctttgtttgtaaattttctaaattttaatctttgaagatttctctgaaatttcaggattcacatggtcttctatttttgtcaaaactattgcatgttcttctacaaataaaacttgattgagagaagattttctacatgacatatttgggagttgtttgacagtattaattaaaaaacattggtgctaaaacagaaccttgcaaaattctacaagcaacaataggggcaaagagtaaagactaagatttatgtatagaaaaacctctgagttattccctgcacctcatgaatcatgacggaactcctgatctatagaagcatgcaaaataacatacaaaagaaatatgattaggttaacactaattagttaaacagtagcaggaactacttctaatataatatgaagtaattgttacttgcacacatggcaacacattgtccttgacagtcaaagtgttggatcatgatcactgccttcatttgatctccaatcaaattcaatatccagatagtgtttccttcacaacaagctgaagcaattaatcaaggtccctcgattaaaaaaaatgtttggattgcgtaaaaataaaaattagcattcatgtcaagagatgcagaatgattaacacatttgtataagcattttgtaggcaatttcctgatatagatgctaatgttatccgtaaagcaaacaataatgttgctaaaatcaaatcataccagcacccaaaatcaatttgttagcaacaaaaaggattgattaatcaatttactccaatggttagataattacattcaggcacaaatagctaaatcttcaaactacatatgtaattctgtgagttatatattatataaatatattcaccgtaggactctcatacagtatttaccttaagaaaacagaagatcaatgctttgtccagtgcaaagcatctcttgccaatacattttttttgtgtgtagctcccttgtcctcttcaagggtatggccagattccagctaattaaagtacaaagttttatcctagaggaaagccaaacaatcatatgagcagctgaaattatgtttcaggaattatgcaatctaatatatatgcagtctagattaatttaatatatgctcctaggatatcaaagagcagattgatcagatctgtgacatacaaagccatagagcacatggagtgtgacatacctatcaaactctccaaagaatgaggatgggaatcatgtcactcctctgtgctctccatcctgcaaaagtttcatgaactggaacatgatatatttgatttctatccatgataaatggcatcaatccaagtaatatcacactactttggcacaatttaatttttaacgaattttaaaactataagttggaagtgtagctagctagtgtagcagccataaaggcacattcgctgtatgatgcaggaattccctgactgccacaaccagcacaggtttgaaagttgttaacgtcacaagtagatgcttgaaatacacctcgctagccaaccagaccagtggcccaggcgcttccttggagatggagtaggcagggggcagtgtcttgggtggctaagcaagccctgaattttctgctcttacggaatacacgtattttccctgaaaacacaagggaacctacaataacttcagacctgtaccataacacaaccagggggaggagattaaatgcaagaacatgcgtcaaatctacaatatttaccaatttgattttaactttttctgcaaatctacaaacaaatggttggggttacagtactcggattcatccatacgaatccaattcctaaccgtcagatttgcactatgatccaatccctaaccctcggatttgcaccattcactacaaattaaattcaccaaaatgaaggggagcttgcaatacttacatcgatgggttgggatatggtcggcggactggacgacagcgacctagtagggcaccttcactgcacgggggaggatccacacgccgtcgcggcgggggcatgcgagggggcgtaggaaagcgcagcggctgccgtagggactcgcggggtgtcatcgcgcgagggcgcacgtggggatagcgcggcggcgggcatcggggcgaggatagcgctagagcaggcgacggcattgtgatggatgggatcggatgaataggtgatactcggatggacggtacggataagtagatatgcaaatggacgctagggattgatcgggtgattgggcaggtaggattggaggaggccaactcctcctttttatattagtatagatatagatggtttattacttccgatccaaatagacctattttgtttggagaatatcagaatagtaataggtagcttttcaaggtaaattctttaagaaaaactgccaagatgaaattgcagaaattttacgagaaccttttcctgttcgaaatgtttgggccgttgcgtagtcatcattgccagtcaggtccttgacaaatggtctcgattaacatggtgcatatgctaatgatctcattgtttaatcactctaatgagcacacaatgagagggctaacatatcttgaaattaacgaagtaatcatgagcgccttactgtcaacggatacatcgtctaacactgtaaaaataattagctataaatatgagcacacgtgtctaagctaggactttaattcgagtaggctggtttcaccaaagggacctaaccagttcatctatgatcacttcatataacgatctcattgttgcgctaataagccctagaaagtaaataataataattgatgggtaaaatttttatattcacattcttaactatttaaaaaccaatactaaaactaaactatgacgaaaacctcaaaaaatttctaaattaagttggaaaatttaaattttggttacgactaataagccgaaaagcaaacgatggaactgaaactctcaactaggctgcataaaatttcctccatgttgccacacctgactatccttcctagcaatcgcattattaggcatatataaaatgtagagtcaggtatagtcttagttaatacatatcacttagaaactatactcctataataattgagataacaaaaactcttaaccattaatgcaccaaaatattttttctacacttctttctttttctccacgcccatacaacaaaattttctttaacaaatgttaggagtcaacttcgaaccattgtcatgtgtagcaaccacccccctatctctcttccatgtcatatattttacttacgtggcaacgaatagagaccgttattacacaccgttatacgtgcccttagttagccaattttaattctgaaatcccatgagatccaacaccctaaatacttgggacgttcaactttcacatgagacgaagttttcaaaattttgaactatcgaatcaatactgaaaagaaccaacagatcgataatccgttggagcatggtgacaaacacccttgatcacggacacgttgcttttgttgtgaaaaaaatgcgccgccccacatggagagggattatattccaggagtcatggaaagaaggttgtgacttgtgagagttgaactgagctgaaccaagcaaatttgccatttgctccggcctctggtttcttgagcaaacaagccttaattatatgcccacacaagtgatcaaatgtaacgtaaatacgccaagattttatactcctacgtcatgacctcaatcatgtacgaatcattgtctctttgtgtgctttgcaaagctgaaattgattttgaatttcagaatgtatttattttaagggttcttttgccactctcactaccaaagctctcttttcacgattttttttaagataatgagctctcttttcacgatggataagaaaagagagtaaaattcaattcttctaaaattattcttaaaagtcgaaatttagaattttaaaatagttttagcttttaagaaaaagctgatcagacaagtaggaattaatctttttttcatataatacctaatagaatcccatgaatattatttccttgatgatatatcaatctggaattctggatgcatttcttacatgttctctttcaaaagatatacactgcaaagtatagactgatctataacgacacaatacatgttgtataatcttatacacacaacacaagcagagtattcagtacacatcgatcctcattaatttggccacctcatcaaacttaagctacttacgctgcatgccccttctgtatgctctgcaccaacgacgtcgccgacgaggccgtcccgaccacggcgaggacgacgccggcggcgatcatcgccgcgttgagcgcgacggcgggccgcgacacccgcccccaccggatcttgaggtagaacgcgcaggggaagatgatcgagatggccacgctgacgagcgacccggtgaggctgagcacgtactggaagtacggcacggagagcgccagcgccaggatgagcagcagcgccgccgagccgacgccgccgcggacgagcgtgcgcgcgcgcggcgacatggccgccggcaggtggcgctcgagctggatggcgaagggcgcgaactcgagcgcgtacttggtgaccggcgtgagcacggtcgcccagagcgcgatcctggtgacggcgagccccggcggcatgctgagcgtgatctgggagctgacgctcgggccgaacatgctcgcgccgacgaacgccagcgccgtgtacagcgcggtgaccacggcgaagctcgcgacggacaccctggtgaacgccgaggggtccttcatggcggcgtggatgttggggaacacgatgtgccccgcgtagctgaacatgtacagcccggacaccgccgggatccgctccagccgcagcgccgggatgtaccccccgaggccgacgccgccgaacgccgccgcgcagacgacggtgccgaagatgagcagcgacatgacgatgccggcgaaggacaggaaggagatggtcgacaggtccctgagccacaggctggggagcgccaccagcacggcggcgacggtgagcagctgcgtggcggtgaggcgcacccacggcaggtggaggtgggaggcggcgccggcgaagacgagcgggaggttgtcgctgagggagatggtgtaggagacgagcgcgaagaagatctcgaggtagatgaaggcggaggcgaccacgcggcccttgccgccgaacgcgcgctcgccgatgtcctggtacgtcttggaggccgggtcgtcgtcaaggcacttgccgatgaggtgcgccgtgtacgcgcacatcacgccgaggccgacgaggaggaacacggacgcccacccgccgttctccagcgcgtacggagtcgacagctgcccaagtcctgcaaaatattatgaatatatatcattattaaaacctattaatttttcgagatattatcattttgatgtgaattatgacatcgatattgacataaaaaattaggagcttaggattctgataagcagcttacgagtataattaatgctaattaaaatattaagttggagtttgagaatatagagaaataatttggattatacgaagctgaagatttttgggtggccagaaacttgttgtacctatgagcattccgaccatgttgatgacggagtgggcgaaggagctggtcggcttgccatggtgaacggcctccacagccgcgaccctcccggcagccgcggcctccgtatgttcctcgccgcacttgcacggcttgccggcctcgacgtcgacgcaagcggcgtccccgccgccgccgcagcgcctggccgcggtgagccgctgcagcgcgagctgcgcgccgtggacgctctcgctcgccacctgcttcggcttggcgcacagcgacagcccgcaccaccacccgctcgccgccattgttcgctagctgccggagtgtgcgagctggagcttgttgctgctacgaactagaggtagcttgtttaggctttggctcttgctgcatagggatgccaagttcgtgcctatttatagtgtgctggagactggagtacgttgcaggaggctgcagggcaagttgggaggaggtcaggagggaagatggaatccatgagtgacaatgatgccactagctagtggtttcaggatttgggagcatacacaactacacaaacacaactacacaagtactcactctggattcagtgtaattggtggttactactactccgtagttggttagtttggttttcacggccagcatatatccacatcgatcccatccctcttccgttgaacacgtacgtcatacttatgatgtttcattaacctaaaccttagtgcatttgctagggtttaaatcttactgcttaacggatcagtgaccggtctatgtgtaaatataagcatgtcttaggctacgttcggttcggctcaacggctgagatgctttcccctttttttatgagaatgtttcctaaaatgttaaatggtgttttttttaaaaaaaaagatctagataaaagttactaaaaagatgaaataaataaaattttcaattaattatatgtttatggcttgttttatttcacgtgttgctgaatctcatattatcctctcattgtcttgtatatgctctaagcggttgcgagggagagggacggtaaaggacggacggtatcttggtgtggttaattggtgagtcgatgatggtaccactaaaacaacattaagggagatggtttgcggcgtggttaatcagtaggatgggtaggttgaaatattacaaagggaaccttgttgagaatatagacatataatgatttaatatattctatacataaatcatgacattacggacgtatactagcattaacgcatcattagatctacacatgtaaactaagcagtaaaacatgaacagatcaaatatgcgcaacatgtcgaacacgtactgaggtggcggaaagaccggttgctcggcaggaactactcgcggttgcgagcatcgacgaaggcgcgaagcacgcgagcggagagaaaggtgagccgtcgcggacgaacaaggagcagtcgcgcgaagcacttcccaaaaaccttattgtcgtcttctcccggtgcaggacgacgaaggcagaggtttcggagacctgctctcccgatcaccggtgcacgccggcgagcgggatggagtagtctacaagcgacggcgcagtacagagtaggaggcaaaccctagattgatttcgcgtgtgttgcgtgaaggcggcagctcggtttatatagagataggtcgcttgatcagggcgcccgcacgatctccactccgcgtaaccgaaccggataagccgcgcgtaacttatccggactccacgccgttttcacgcacaggatttttcggaatgtttccaacaacaaaacaaatccgaattttcctgcagcaaaacaaaaaagcaaaaggaggctgcatctgcgcaagggtgaggagctaattttgcggaccattcgacgcgtacgtcgtgcacgcgcgccgccggcccggcccggccaggcgagcgagcgagcacgcgcgtgtgttccccctcttctctccaccacacatgcttcaagtggctaggagggcatcctcccttttaaggaggtccccctctcctagaataagcaaggtggtactaaactccacatgcatgccatcccatgaggtgggtttttgtgattttccaaagaattaatcttcgaatgggccttagcccatctattaattccaacaatcccccaccaaatctcaaaatcccactgagatttgccttttccaatgtattgtttatataccagcagttcgatggagaccgattaaggttgaacaaccacctagaactccaagctacaattattcacaacttgaacaatggactacgccttgaattgcaagtcttgtgcaagcaagtttcactcaaagtcttatctggtactagaccgtctgtagactacccctcgggtggagcgtataagtcatactcttaggtctttagtaagcttcctagaagattcacccaaaatcttcatagactgcgaccaacagtcaagcttacaaaggtgagttctttcaagaatgctctgcaggacagcatcttcgctaattaaagccaacagaactcattaaggcatagccaacctgccttgcagctcacgagagtacatgcatcttcacttagagagggtatagattggtactctcctctagtttactaatggtttgttcttcccaggttctaattcacgggatctccgatcacatagactaggttaccaccatagtattactcacatgggtctcaaacccatctccttcaatgcattatctatcacatttcgtgatagtaccttcgtgaagggatctgccaggtttctagctgtttggatgtaatccaacgttataacttcggagtttctcaatttcctgacagacttcaatcgtcttttcacatgtctagacgatttcatattattcttagaactattcactttgacaattaccgtttgattgtcacagttcataaggatagccggcaccgggttttcaacaataggcaaatccattaatagatcacgcagccattctgcctcaacagtagcagtatccagtgccgccagttctgcttccatggttgacctcgtcaaaatagtctgtttgcaagacctccacgaaacagcaccaccacccagtgtgaagacatatccactagtggctttgatctcatccacatcagagatccagttagaatcactatatccctccagtatcacaggatacccagaatagtgaagccccaattccatagtacctttcagatagcgcattactcgctcaagcgcacgccagtgatcatctcccggattagaggtaaaccggctcaacttgctcacagcaaaggagatatcaggcctagttgcactagccaggtacatcagcgagccaatgatttgggagtattccagttgattcctagcaattctcttattcttgcgaagcaacaagctaggatcataaggtgttggagaaggcttactatcaaagtagccaaagcgattcaagatcttctccacataatgggactgcaagagtgtaatctcattctcacctctaattagtttaatgtttaagataacatcagctactcccaaatccttcatatcaaaattttgaaacaagaatgatttaacctcatttatcacctcaaggtttgtcccaaatatcagtatgtcatcaacatacaagcacagaataactccctcacccccaccatggcgatagtacacacatttatctgcctcattgacagcaaagcctgcagatgtcaatgttttgtcaaatttctcatgccattgcttaggagcttgtttcagaccatacaaagacttcaacaatttgcacactttgccttcttgaccttcaactacaaacccatcaggttgatccatatagatctcctcatccagctccattaagaaaagatgtcttaacgtctatttaatgaacgagaagaccatgtgaggctgctagggaaagtagcacacgaattgtggtcaatctagcaacaggtgagtaagtgtcaaagaaatcttcgccttctttctgagtatagcccttagcaacaagccgagccttgtacttttcaatagtaccgtcaggcctgagcttcttcttgaacacccacttgcaccccacaggtttacacccatagggtcgctctgtcacctcccaagtcccgttagcgataatggaatccatttcactatggacagcctccttccagtagtctgcatcaggagatgcgtatgcttctgaaattgacttaggagtgtcatccacgaggtacacagtgaaatcatcaccaaaagacttagtcgtcctttgtctcttgctccttcgaggagcttcactgtcatcctcctcagtgacatgttcatgtgtatgttcagtttgttctggtggtgtgattgaactgggaattattttagagggttggctagaactactatgtgtatccttcattgggaaaaagctctcaaagaaggttgcatcacgagactccataattgtaccaacatgcatgtcaggtacctcagatttaactattaaaaatctataggcaatgctgtggtgagcatatcccagaaagatacagtctacagtcttaggtccaagtttgctcttcttcgttattggtacattgactttcgccaagcacccccatgtgcgcaagtaagaaagtgatggttttctcccaatccatatctcatatggtgttttgtccttatttctgttaggaactctgtttaacacatgattcgaggtcaacaatgcctccccccaccatgccttaggtagtccgcggtgtccaacatggcattcaccaagtcagtcagtgtgcggttcttcctttcagcaatcccattagactcgggagaatagggaggcgtcctctcatgtataatgccatgttcctcacagaataagtcaaactcgtttgagaaaaactccccaccacgatcagacctaagtctttttatctttctgtcaagttgattttcaacttctgccttataaattttaaaatagtctagagcctcgtctttcgttttcaacaagtacacatagcaaaatctagtagcatcatcaatcaacgtcatgaaatatcgtttttcacccttcgtcaacaccccattcatttcacagagatctgagtgtaggagttctagaggtgccaagtttctctcctcagcagccttgtgaggcttgcgaggttgctttgattgtacacaactatggcagttagaacctttgacaatggaaaacttaagaattaaacacatgctggaaagccgagacatcaagccaaaattaatatgacataaacgtgagtgccatacattagcctcatcatccacactgccacaaatatggttcacagacttattgcagaaatcagaaagggaaaagcggaacaggcctccgcactcataacctttaccaataaaatatccatgtttagacacgactactttattagactcaaaaaccaacttaaatccgtctctagtcagacgggagccactaacaagattcctgtcgatagaagggacatgctgcacgttcttcagctgcacgatccttcgcgaaataaacttcagatctaccgtgccaacaccatgaacagaagcatgtgacccattccccattaggacggtgaaaccccgtgcgacctgataagaagaaaacaatgagatgtcagcacaaacatgtacattggcccctgtatcaatccaccaattagtagactgattaactgaaaaaatagtaggtaaattaccatacccgcttccatctccagtgttgccaatggtcacattagcagacttagagatctaccctgcaggtgccttcatccccttgcgttgtggacacttcctggcgagatggccaggttgaccacacacaaagcaagtcctctcatcctgattaggattgttgttgttgttcttcttcttgaagttggtggtctgctgagctttgtatttccccttgctcttgttctgggccttgtgcacaacattggcagtggactgcccaccatcgcccttagacgtggcatcttttttctgagctttctcctcaacatcaagagacgctatcaacccctcaacggagtattcctgtctcttgtgtttgagtgcagtaccgaaacctctccaagatggaggtagtttcgcaataatgcacccggccacaaatttgtcgggtaagacacacttaaggagttcgagttccttagccatggtttgtatctcatgagcctgttcgactacagaacggttgtcagccatcttgtagtcatgaaactgctccatgatatacagatcattgctagcattagtagcatcgaatttagtattcagtgcatcccacaactccttagcgtcggtcatatgcatatacacctcgaccagacgatcgccaagcatgctaagaatgcatcccacaaagagagtagtggcctcatcgaattctttctgctgatcagcattaagaatgcccataggcttgctagtactcacccagaagcatttcatagctggcagccacagagtgaccctgatctgccatctcttaaagtgcacaccggtaaatttattcggcctcagtgcatcggcaaaaccagccatagtaaaatcacagcgcctataataaggtttttggattgttgagaatataggcatataatgatttaatatattccataaataaatcatgacattacagatgtatactagtattaacgcatcattagatctacacatgtaaactaagcagcaaaacatgaacagatcaaatatgcgcaacatgtcgaacacgtaccgaggtggcgaaagaccggttgctcggcaggaactactcgcggttgcgagcgttgacgaaggcgcgaagcacgtgagcggagaggaaggcgagccatcgcggacaaacagggagtagtcgcgcgaagcgcttcccaaaaaccttattgccgccttctcccggtgcaagacgacgaaggcagaggctccggagacatgctctccggattgccggtgcacgccggcgagcgggatggagtagtctacgagcgacgggcagtacatagtaggaggcaaaccctagattgatttcgtgtgagttgcgtgaaggccgcggctcggtttatatagagataggtcgcttgatcagggcgcccgcacgatctccactccgcgtaaccgaaccggataagccgcgcgtaacttatccggactccacgccgttttcacgcacatgattttttggaatgtttccaacaacaaaacaaatccgaatttttctgcagcaaaacaaaactgcaaaaggaggctgcatctgcgcaagggtgaggagccaattttgcggaccattcgacgcgtacgttgtgcacgcacgccgcctacccggcccgacgaggcgagcgagcgagcgagcgcgtgtgttccccctcttctctccaccatacatgcttcaagtggctaggagggcatcctcccttctaaggaggtcccgctctcctagaataagcaaggtggtagtaaactccacatgcatgccatcccatgaggtgggtttttgtgattttccaaagaattaatcttcgaatgggccttagcccatctattaattccaacaaacctagcaaatggaccaggtatcatcaatctcagtccaatctatttaatttaaaatataaaactattttaaaagtaaaataggtaaacattttctaataatggataaaccatccaagacaatagctagagctcaaaggcatattagtacaatagcctaggctgtgtttttttcccatgggttctgacccatttccctcgtttttcgcgtgcacgtttttcaagctgctaaacggtacgcgttttgcgaaaagtttatatcggaaagttgttttaaaaaaatcatattaatctattttcaaatcttttatagttaatacttaattaatcttgtgttaatctatcgcttcgtttttcgtgtggagggaagggttctcaaccctccaaaagaacatagccggggataaataaagggctggttcactttgctattattttcaaccttaccaagttttggcattgccaaattttagtaaggttgccaaaattttggcaaaatttcatatgtatttactaaaatttagcaataaattaaatgtagccactttttttaactttgccaaaaaaaaaaggtaagattgaaaatggtagcaaagtgaacaagcccaaagcaacaggttcttagcaagataatcaaacacccagtctcaatttacacagtccggcctgttgctagaccattgttcgtataaatgctatatgcgccataaattcaacgattatcttgggataaatttgtatcttgagatgcaattggaatggtgacatggccggatattggcgctacgtgtgtgaggtgtaaacgtgtgagcttggattcagatacgccaggaatcgatccaacatagctaggatagagagctggtgatcgatcgatctctttagtgatggcgtatgaatcatgtggtcataatggaattggaggcggcatggcatacaacaccagttgcatacatatatacgcagtataatcaatttgtggaatcatattccacggagccaacgagcaaaggtacgattataagctattgtggtccgtttgttctagcaatgtggccaaaagggcatgggggatgagattaaccacttcattctagtgggagagagaggggcaagatcaattcaaaaaaatgtattgatagtcctagcccgggtagtacacatatataactagatgaataccccgctgcattgttgcgggaaattaagttgcataatatatacaagtaagataaaatatgaattaaaactaaaacaaattaattgatactcatgaattttgaggcctaaaaatgattgagattacttggtgttatgtgagaaaaaagaagagataatttgaaccatagatctatcatccaatggctacaaataattagggtgatgtggtttaacgagagaagagaaaaatagtattaaccacacttagtggggatgaactatataagtacataggattagggattggctgggtgggtggattgagaataaaatactggatcgtggtcacacacatacgaagtggcggacgatctcctacatggtagaaatgtgtaaggaatgagacgtttgaggaggacggcgcttttaaaatagttatagagatattttgcatgtctaatatatatgccttacatatttattgggataacacatatcacaatacatgacatatgacatatgtacgcatataatgatgatgcacatacacacgtttgtgtgattatacatgtctagcgcacggttgacacatgtcaaggcccatgttctgccacgtgtgtttgattatcgatgccggctacttgccctgtatccgttggaaatgcgattgtttttttaaaaaaaatttatgacactatagttttaaataaataatact

SEQ ID NO: 20071 - DNA, 7971 bp, Oryza sativa
ttgtatttgtattttgtattatttattcatacagttgaaagaaatctttatgtataaatgtgaggacaatattaatgaatatcaatagaactcttactaggacaagagtgttataagggagtttaacggcctatttttttttcctgattccatcttttggatttttgtttgcacgctccacgctttccaagttcctaaatggtgcttttttaaacaacttgttaactttctagaagttaattcattcatttataatctcaaatagctatcatataaataagataattcatcaattttagttgtcgtaaaccctaagtagtatatttttttttcatgcgagtcatggtgatcaacatataatcaagatcgtaagatgaatctgtaacaggtactgtaacgccccaggtagccacgtacctggagtgccacactaaaaaaacactcaaaccactaactttcaaaattagaaatttcagcagagtctcccctgtaaatacggacatccacgataggcaactgtaagttaaactaataacaatatcattcccacaatacgatccatccttataattcatggggaagaaactattagaaatctaaaagattattacaagaccaaaccaggatataatttaagtgtcattatggacctaagcaatatagtttgatagtgtgaaagtggatgtgtatataagggtgctacttcccgcccatgcatgtcggtctcaatatgtacctaaaaccaaataaaacacaagagtgagtataaaaatactcagcaagtacaatatggaactagaaaacacatatacacaatattggcaataaagcatgaacagaagtctttctttcgttgatacaccaagtcaaagaagatagtagttcccatctcgggcaggcatgaattgaaatagtagtttccatcccggacaatagtgaatacatcctagcatttgccggcaaagccgagtaagcgtgatcagcgcttacccataggaaattgaataaagaaccaaattgcactcccatgactacgcatggtacttgaataattgaaaccggaatcaaagaaccaaattgaaaccatattgcacatccatggcaagcagggaacttgaattatttatgcagaaccagaatccggaatattgaaacaagaataacgtcgtaaacataggataaacatgaaaacctaaatggcacgaacaacaatatgaatataagtggtcacatgtcacatagaaatatatctaaaataaatagatagagcaaacaatccatgaattacacaattagttcgtcatgcacttgcctccaatgaatggttggtatcatgcatgatctgaagtaccaccacctaatcacaaacaaaatctcagcaaacacattcaaacatgcgtataaaacaatgaaaaaaagtgaacctactgccctatcccatcacaacgcaataacaaggaacgccgcttggactataaacaagactgctgcttcaaacctttatatcttgaaatatgaaatggctatgaccgcaaataaatacattttggaaatctgaagaacaaggcctacaactcttatgtgaaatcatatttttattatgccatttaaatggtctaattagcgcttgaaagcaggcttcagaatctgtccagaatttcagactgtccacactaaaacaaccataactagagttctactcgcccaatcaaagtgtactttaccaatatggaaagctaagaaaaacctctacaactttgtctagaggcggcccaactgattccgctgtttagcccctgcaaaaacagtttttcaaaggatttttaagataccttaagaaaaatagaacccttaaattattacaaaataacattatccgaactttagtttttccttaatctatgagacaaaatttttgaacaaagaatacaaatcttacttttcaataatataagtgcccgcgcatgcgcgcgggccaccttcctagttataataaattttggctagaaaatatgagtatgacgcgtgtgccaaaatactaataaaatatgacttaacccaattatgacatttaatcaaacactaacctaataaattgtgacacgactaaggtttggtgtgcaaactgtagccaccaaccaaacatacccttaggcctatgggtccatgggtcctaaccaattaccatccttagttaggggatacatacgggggtgtgagtataatgttgtggctgtattggtatgtcgattttgctatacatcactcgggttattctttgcatgatatttgacgttttttctcgctgctattatctccagggtggggtggggcccatacggccaggataaagcaatgcatgcaactccagtgggatcattagaatccgattttgctatagcttttgcgattttgctatacatcactcgggtgattctttgcctgatatttgacgttttttctcgctgctagtatgtctgcgtgtgcctgccgtgcattcgaattttttttttgaaaacccagaaaaaatcgatttattttttcttgtgctcccaacggagcggaagctagaaatgaaatgccagcccagaaaaccaggtgggcttatccagagcccacgaaccggcccatattcctttcctttccccgccccggccgccgcttgcaaggtcgccgccgacgacgcgcggagaggagaggagaggagagaggaagagaaaatcttccgattccggcgaggaggggatggggtcggcgctgctgccgacgctgcggcggaagccggaggtggacgccgccatccgcgacacgctcgacaaggtcctcgtcctccgcttcggccgcgccgacgacgccgcctgcctccacctcgacgacatcgtgagcgaacctctccttttccctgtcgattccacgcgatgcgattgccgcttgctatgggggattgattggttcatctgctcgtgcagtaggtttttaggccgcccatggtcctggaagatttttgcttgctcgaacagtattatttacttgtgggaggctggtaaacctagcagagctagaaacgaaatcgacctacaattatgcatgtctgttagttacaactattgatggaatgaattggaagcatgtgaatggagaggaaaagagagcggtgcatatccttgttaggtattgttcgtttaatcccccatcctatgggactgaggggggatttggaggggattaattgcaaacctattatggtgtggaattattcccctcatttctctccaatccctttctcatggggactaaacggacaaagccttattgttccagtcttacactatggggtgggatagtgtgtgcaaatttgttatcaatccttttatttacaaaaaaaaaagagaagaaaatgtatatgggagttgcatggcttctgcgtgctggttaattatatttccctgtttttccttttttaacagctcgctaaatcttcttgggacatatcaaggtttgcgacggtagcattggtcgatatggattctgaggagatgcaagtctacattgactatttcgatatcactttggttccagctaccatttttttcttcaatgcccaacacatgaagatggactcagggtataagtttgttgttttgtgtttaccttagtggtggtataatgttatttggatcattggatgtggccttattttcaacttgcttgagttccttaccatcgttcaagtcttgtctcttaaattctagtagtccaccgtgaacataatttcttatcagctatttatgtacactatactatcgctgcagttactaatacttggttttcacatgtcatccataagtcatatcaacaaaggttgaaaaattagtttatactctactctataaatttatgttgaaagtgctagcttcaggaatagctatggacaaaattataaatagtatgaatttataaaagggttactggtcagcaaaaagactcagtggaacatatcgagcgaagagtaagaatcaaccagtgtctccttgcttcagtaattaagctctactttagcgtgattactgatgaccaagactttttgaagttataggaaaattttttgagatcttaagatctattaacaaaaatatgagctacagttttttttgtaagttttaatgctctatgggaattgtgtggtgaacctaaatgacaccgtgaacatgtatttctttctaaaatttgaatatgcttgttagaaaaaaatgaaagctactgacttcggagttttgatgaatatttctgcttccttttttaaagtcaactttaagtagtactctaactcttcttttttattatgaaacgtatggaattaaattttgtgaaaacaagtgaataatgaaataatggctgcaattcagaacaaattcagttcctttgagtcaattcttaaagaatgttgttttctttgatattgagtgatatgcaccaacaaaaatatttttctcattgcacttttcttattagttgttttagggtgtactatagctgcatcacaaatatgccaaacttattgtaatgtatatacgcaggacacctgatcacacaaaatggattggctctttcagcagcaagcaagatttcattgatgtagttgaggtgagtgggccaataagcttttcatgggattaagatttaagaacaacctttttctttgtcaattgaccaatgttgtaaatctcgactttgcttttttccttctactttgtcatcccggtccaggttaggccaaaaaaaaaatgtgatggcgtatgaatgaggccaataaattaatagttgtgaaatttactttatcttcaaaatgattcatagagtacataactaaagaatatgggaaacaataatggacatctataaggtgaaggaaaattgagatggttcactctaggggaatcaatttgtggttgttctaggaggccaaattttctttgactgcctttcgggtcacctcagtactggttattccaggatgccccctttacctgcccaagataattcacaaacctttgaaagttttaatttggtctcttgatcttttattctttagaatgttcttgtttatagcagtccacaaggcctaaggtacaaccatacagcagttagatgtatgctttggtttgtacttgttcaccaggaaggtcatgatgtgccatagtgaacaatttggcaagggtatggattgctttctgtctgaaagcaatggccagttacaatacagcaagtggtccagcattcccttctgttttatgaaaactacaactcttagatcctttcagatctcatgtgtcatgtgagatctatattcagcactgtctgttttggagccggaggaatattttctcactgtagcgtatcttttggtacgattttcctgttcttgtaatccttacattttaaagtagttcagcagataaactgtcaattttaacaccgctatcatatgggatttatcatcatctgtgccattcctctccactaattcagctaagtcaattaatcgcagctgtgctgtcttgacgattgacatttatgaagttcaactcctgcttaatttagcagtttattggttcatgaataacatgttaaaacagtagttcacttctgccttctgatatcttaatggcaggcaatatttaggggtgcgatgaaaggtaaactgattgtttcttgcccacttccaccagagaggatacccaaattccagctccttttcaaggatgtttgagcaaggaaagtgctcatcacatgcgcatgctaaaagagtgtcttggtcatggtaagcaaagtaaaaacatgcgacaattatttaagtataaacaaccacctttgctaactacctttgtgcttacttttgcacttatgtgcgacagatgacagaactatatgaagctatgttcaggcagaagagtttgtgaagatctcgtctctccaattggtttgtctcgactactttcatttatgtagtagtatatcacatgctgtgttgatatgtaccaggcatggtagcttttgttctgtacttctataggaggcaaactgaatcgatcaagaaaagtgcatatctgacatggtgccgcatagtaagcttttagtaattaacacaagttagaatgacactttgcatgtagtttgcattgcactctaaatacagagaagggtataaaatattattgctcgttaattgtgaggtggtaaatcaataatccattttacatgttccccagactatccatttcaaagataccgggagtctgggagacatttctggtctggaataatgtgtgagctatacctgaaaaggtgctaaacacatctcctggagcctagaaacctcagtttccgaggcaactgaatcataaccactgcaacaaataaattatacagtgaaagaattgcaccgtatgcaccacctgtaattccttccctccatctaaaactcaggcctcgaatctaatctctaactcatccttgtcaaccatgaggtagtgagaccctctgtcgatcaccttcttgccgtctttccttaccctgctgaagtgctcacatgggctgatgtcaaacctgatgttggccttctcccctaccttgagatgctggctcctgaaaccgatcagctgggttgtcgggcggccgcccttagcattcggccaccggaggtacatgagcacagagtgcttgccatccatggggccatggttctgcacctccacaaccgccgggaacttgagctgctcacagccgtcagtgccgatctcttcaatgtggtagctctcatcaccttctgatgttgttgttgtcctcagactagcaagtaggttggtgtaggactctgctggcttaccaccagagaccagctgacgtgagtagctggagtagctgagaccgtagccgaacttgtagacggtcttgccctggtagaagcgatagctccggccagggtagccggtggctgggtcggcacgcatccgcatgtccgtcatgggcaccttggtgaactcttctgggtaccatgtcactggcagcctcccaccggggttgtggtcaccgaagagcaccctggcgatggcgagaccaccagcttgccctgggtaaccagcccacaggatggcgccgatctttgggttcgtctgcgcgaacgtgacgtccaccgggccaccggtgaggagcaccaggatcacagggcgcttcgccgcgtcggctacggcggtgatgaggctttgctgctccccggggagcaacaggcttgtcctgtcgcgcccttcgctctcctgcttctggctgagccccatgaacaggaagacataatccgaagagctcgctaccgcagcagcttggtccgtggcggctacgtcgcaggccgccgaattgcaaccagcgaggaacctcacgttcttgatgtaccccagtatgccgttgagcggcgtcgtcgattcacacggcgggccgaaatagttgccgatgagggccaggccatcattggcattggggccaatgactgccgcggaggccaccgccgtccggtcgagcgggaggatgccggcgtcgttcttgagcaagacaatgccgtccatcgccgcctcgagcgcgaggctcctgtgctccggtgtgcagatgtcggcagccccgagcccgccgtacacgctgttgctcctgggatcgccgtcgaagtgcccgagccgcatccggatggcgaagaggttcttgagcgccttgtcgatgtcctcctccgtcagcttcccctgctggatcgccgccgtggcgtgctgctgcatgtaggtgccacagttcatgtccaatcctgaaattcccaaatcacttaaaattaatccaaatctgtccaagttatttttggaacaattaagcttctgatgaaccgaattgtttctctgtccaattggcgttggttaaatgaatcagtccagcttt

SEQ ID NO: 20072 - DNA, 2394 bp, Oryza sativa
ccacttatccaaaaatataaagcataacactttttaatcatgttccgtaatatataatattgggtgtgcatacataaatgtaattaactagcacttcctactctcttttattttattttttgaaatctttcgccttcaaaatctctaattctattaggtacctttaaccgtgaaattcggtaagcaccgaattcatcattggcctagagtcagtatcagcttcagagtcctgtaatcgaccgttggaaattatcaagttgccaatagtcggattcttgctatattcggttaaaaaaattaatctattcaaggaaacttatccagaaaagacaaagttcaaggaggatgcggtatggcaagttatctactaattatgaagagtatgttagtttccttttatcgttaggaaagcgtgtttagtgtccccaataaagactttatggttttcttttatcttgaggaaagtttctttcttgtccaataagaactcgtatctacccatcggtataaatatgtacacccgtggtcattgtaaactatctcaacgatcaatacaactactctcaccgcatcgccgccccctttaccgaggttttcacttatcatccggcaaaacttggcacctaacatgaggctgcatcggctttcgatctccggcgaagcggtaagtcctatgttttgctggcccttgcaattgtattggtttcatcggcgtcgttcaaggctgcatcagtacattcgacctcttggatcgctctggttcggttgatatatttacctacctatttatcacataactttgttaatttagtttggtagcttgatttacttgtatcggctgagattcgctttagggtttataccggtatcggctaaatcgctttgccagattaaattagctaaggtatccaccaccccaaaaatcagtcaaaggcttggttgcctagatattatgtttcttttcatacttagtgatgcatcagttaagtttgatctactaggtcaagtttagaaccataatctctagcatgtttcttgattgccaataagggtttcattggagtttcagctgatgagttatctggacattgcatcggcttataaggattacatacaagttggatttagccgatcgcgataaaggtttcactgtttattctatcgtggatttaatgacatcggacctccaaccgatatatgctttaccttcgaatcagtgcttattccattatatcattattagccgattggtttctactagattatatgattgttatattacattattatcagccgattgtctttgtatcattatctacattggatatataaccgattacttaaaaccctgtcactatcggctagtatcggcatcggctggaactactccatcggcttgtcagtcgatcggctcattgatctactatttgcatatcttgtcggttgcagaatcaaactgactggcacgcccgtatctcatcaacctttggacctgcactggagctaaacacatctcccaggccgttgtattcgtcaacttagttcgtgccaacacagtcccggcaccatcggccgagcgcggatttctcgtcaacaggtatatgcattgtatttattgaagtgatctaagtaagtaaggatgtgataataattgttttttagtctttgcgttggagatggatattccttatattttgggatggaggcaataatcgtcaatattgaccaacgatttggcaactataatcactaataaattttaaatgattagatgataaacaaagtttaatacttaatgtaatacacttcgataagatgaaatttatttaagtatttagtttttttttgaaaaaatatgaataataaagtttaaatttgaatagtgctaagtgacaagtataaggaaaggagggagtattagaacataaaagtcgagaattttctaatgcagcaagcaaaaatgacataatcagtacgccatgatcgtgagtcatgagaactttattacggaaaatgcggatcgaatttgcacgatattttgcaatagaagataactctcgtggagcaatccgatgaaaagcacacgcaataaaatgttgtgttgaatgaataaattggttggagtaatgcgaagaaccgtagcattcatgattaatatagaataaattagaagaaatatacgagataacctagattcaggagattcgaacgcggccagagcttcactcctgtcagcagcatttcagctgagccattcttaaatcaagttgcaggtagcagccttctttcagctaagccattcttaaatcagattgtgttgcactgtaacgattgatttttaagttgttgtagtgtattgcgccggcccgtcaaattattacacaaccataaaca

SEQ ID NO: 20073 - DNA, 4726 bp, Oryza sativa
tatcctagtacaagataagatatattgtggggatggtaaacaacaactacgagggtataagctttagggtataagctttattagcactttatgataggtcccatcttttttttaattgtggcatgacttatgttcgaagatgtttttagatgcgtcttactctattacctactctacacatacatacattatggtctctctaacctactattaccacctgacacgagcccaccttattactatacgtagttttgcaataaacattacggatgccctaagagttttgatgcaccgatcatctgatttaaatctgatataggttttaataggcaaacaatattatattgggagtgtcatatggtgacatatttattatgggagtgtcgattttatttggagctagtgctctatgttggtcaatttagcattgtcgtaatggtatagtttttaaccataaaaaatgcctaacatcatacaggttatcttcatgtgttccaattggcttcactcttggtgtatgatgctttcacaggaacaacaggaaactatgcgtaatggtgctacacgcttgaaattgatagccaaggaacttttattccagtttggatgacgtagtacctacaaaatttcacgatagaatctacatgattttaaaaacattattttagtagatcatattattggcagaagttgagggtttgtctcatctcgcctttttaagctcttttcttttcacttctggactttttggctgtgtgcttacggacagaggccagagatgtaacccatttccattatctaaaatatttattatgggattgctaaatcgcattcccaaaaacttgggagggggggatttctttcaggtttcgagccctacaattttctttgcaattcttgctcctacgaccctttctcccccacttccagcgatgccaacttagggttctaggttgcttataggggtaggaggggtgaggagagggggaagagagggagatcgtcatcgccaggcttagagggatgacgatgggaagtgtatacatgtgggcaatggggcgccaacaacggcatcggaaccatgaggatagaggagagtggtaggttagcattggtggtaggggcaaaacgaacttgtagttacaaggtgtcgaccaaggacagtggacccaacaggatagggcacctctctgtcaccggcttgaggaggaggaaggagaagagacggcaagggggcacttgccagcgccattggcaccttctagccagctgccaaggctgggcggtggtgtcctagggtgggaggttgtagaggtggtgacatcgatacccacattgagaagaggacgggaagggggaaataaggttcagttgttgtatagcatgagtctcaaacaaatctgtgacgtccaaaaagtgactgagatcagagaggtttttctatcatatatgatattcactccatcgtaaaaggaactaactgctggatctgaatctgcattattttcagctagaaatttgtttttacagaggatgcagatagtccttatttatttataattttcagtcaattttacactggccattctaaggctatgttcatcacgaactttttccaacttatattctctcgttgcccccacgcacacttctcgaactactaaaaggggtgttttttagaaaaaaaaatatctataaaatagtttctttaaaatcatatcaatatatttttaatgttctttttgttaatacttaattaatccatacgctaagaacataagagaatccacaatatgctaaatagtgttgttgtaattcgatatcgtagaggtaggtagtaaagtggatagtaataatatcaagtagtagtctaccaaacaataattactaaacaaatattaatctctcctctctcttctccatccattcatcatatcttactatataaagttgatgctcactaactactaaagtttaacatgcaagtgggccacatcatcacccatagcaattattatctagattatcttaaatcatatgcaagtatgccacatcatcacccactagcaactattttctagattattttaaagagtaaaataaatggcaggttcttaaacttgagctcacttagtccgtaaacttgaaaattgcacattaaggttcatgatcttgttttaataaaccatagccggtctaaagcgcgtttgaccagagctgaccatctatgtggctctccacataggcagcattttgcatctagccccctccgcatctcgacgtgcccgtaaatttgtacttactccctgttgcaatagtagtcgccgaaatccccccaaatcccttcgtccctttgcattccttatgatcgccatcatcatcctcgccctacttaggcctctccctcagaagtgcttggcggatgcaaagggacgaagggatttggaatattttgggggatttcaatgactactgtagcaatagggggtaatagggggtaaatacaaaattaccaccacgtcaagatgtggagggggctagatacaaaatgttatctacgtggagcaccacgtaggcggcaactatgatcaaacacactttggaccggctatgctttattaaagcaagttcatgggcctcaatgtacaattttcaagcttacggacctccccctcgctatgttaagcctccatgcgtggttacaacatgtccctctatttaagaggaatccgaggatagagtccgagtcttactctattttaaccgactttatacatatattcgatacaaactctaaccgcttgcgtaacatcttcctcatgtgtggatgcaagtccatagtgctgcaaattacatttacacagagaatgttgaagaaacaaacattttcaaacccgaaaagaaaaaatcagaattttgtactactgctactgctagtactgacccaggaattcgtatcgcacggatgagcttggagacgaggccatcggtgacgggaggtggcttgtggaccttgaggcgagtccccatccggacgaggtcaaccttgttgcagaactccctgacgaagtcctgcggcttcttgatgggcattgccgtcgtcctggcaatggcactgcctcctggcggccttctgctcccggctcttgacagcccagtcctcgttcaccttcctcttcctcagcactgtctcctgcacgtacagcagctgatgcgtccccttctctgccatcatcgctgagcgagcgaggaagccgggaagggtcgccggagccgaagtcgcagcgttgggcgtttggttagctcggtggttggagaggaagactgagcgatttaggtcgtgatttcctcttgggtcattggcctcttcacaaggccgcaaaaggcataactcaacccgaggtggggcaggaatctttgggttgctaacagatactgtctccataaagaatatctaatctaatctaatttagcctacttcgataaaatgagtaactttccgatcgtcactcttggctttttttttctctctgttcgcgagtccagccacgtagctggagacacgagagacatcatttttggatttcttaagagcaagatagtatagccaactgctggctgcaaatcatctataatcaacttaacagtcaattcatacaatagttacctataaacatatactacataattaatatctggtcctacctgtcatacatacatataacttgagtgtttagagctgtaaatctataacccgctgcccttctctcttctattttatctcctcgaaatgtgtttagagctggtttatagcctgctattgtacatgctctaatccggatagaaacctcttgatccatgtgtgctcctcagcaccatggcatgtcaaacacccatgcagcctattgttaatggtcgttaagtgcaaaccataaccataaaaaatacaaaatatacgatcaaagttagtggtagagatctagtactaaccatttccactagtattggtaaatattagtatcctaatcaatatcagctttataaaattaacattgcaagttattttatcatcgttcttacgaactagacaatttcgtgtactgtactaaatcgtatccacctaacaaatttgtataccaccaatacaagttactcataaatctgctgctgcgctttaggatcaaggggcaactatggacgaaggcaaggacaagacgaacggaatcaacccggatttatataatcttgccacgaagttaacaaatatcacacatggcatgcaactttgaggtataactatcgtgctaggtctgacttattaaatctactacaataaaattctatgtactccctccaaaatgtttctatgtactccctccaaaatatttaacgctgttaatttttaaaaaatatttgaccattcgtcttattaaaaaagtttaagtaattattaatttttttcctaccatttgatttattgttaaatatacttttatgtttacatatagttttacacatttcacaaaagtttttaaataaaacgaacggttaaatatgtttaaaaaaatcaatggcgtcaaacgtttagtaaatgagggagtattaaggaaatcgactacaatgccaacttttaggaagcaatttaacatattatgccatataaggtttctctttaaccaccacccatgggcatggattacaggtgagctcctgattgcacctgtaa

SEQ ID NO: 20074 - DNA, 1833 bp, Oryza sativa
cagctaactacatgtcgttgttgacatgaggtttctttttctgctagcactagtatacatatatgagctgcatcaggaagcacatcgatgagctcaatctgtcaaaactttgagacgtacatgccaacgtgcaagcacatatccatgaccctgatatgatcatatctggtagagctgttctggccatttggggtaagcgcgtttgtaaaggctcatgcacacggtatcatgctgctggacgctgctattgaatatgcatttcatagcacctgttaagcaagagcacggtgagtgaaggatcagcgatgtatcagacatgtcgaaatgggtctagcaaacgtaccatgagtgccaacagtctccttgattcggccacgtcgaccatgtttcgtccacaactctacaggctgcaaaacaatggtgttattgacgttgaatatatatggagcagtgtatgaattagctgtaaaacacttgccttaaaccacttgacatcttcaggattgtagaacatgtatcgcactactgctttcagttttgagacccgttgaggataactgcatgagatgtgaagtcagaaacatgaccggcataagaaaggacctaatcttttcctctttctcaaataatgtagtagaataacactcaaacaatcgacactttaagcatcaacattatgttcataacacaactttgagaactaacttcaattacatataaatatagaacattctaaaatcataatatgcaaaagaatttttcaagacaaatctacaccaatgatttttgtatgttcatcataaatatcaatagctaaatttgtacagattttgattggaaatcctgagtagttgatattttgttttcctagatattatataatctctgtcagaacaagaaaaaagagaaatcaaactggcacaaattgttgtagaaatccccactcccccactttggcaaatctgccaagtcagaacaacaaataccaccttacagagcacaagcacttgtcctcaatcctaagttctctcttttcattaattcaccaacacaaacaactggcaaacagctgtaagacaacaaacattttgttgcgaacagtattatattattccttcgaataacgaaacaacttttgaagactatacatgatgggatgttatagcacctatttgaagactgtgattggatgttatacataactttttcgatgcaaacagtattgtcatattttcttccaaataacaagatagattgtgtgaacattattataagaaatttttatccaccagcagtaattatttcctagaaaatatcgatagagcacatcaacataaatttattggaccaaaaaggcaaaatgaaaattgcagaactgtttgcctattaaaggataattcgaaacttacccagtcaaaacaattttcttaagaataatccggtccggatccacacttttcagtgaaccaacagcagcaatggcaggctgctccccatctctgctctttagaacaataagagggagtggaggaaagcaaattggagcatatacagaggcaacagaaaaccgcccatgatgtagaaacctctccatcttatgcttattgcaattgatgttgtcagttgaaaacaatggcctgtgatagattcataaataaccaatgagacatttctcaatgaaaagacgagcatctgttttttctgcattagcatgactgagcttccactacctacctagcagtaaactgccggaacccaacattgaaaattaaggagtcctttgatttgataggagcttcataggagtcatgtttctttatgctgcagcaaaaa

SEQ ID NO: 20075 - DNA, 621 bp, Oryza sativa
agataacttagtcattgattattatgcttattatgatactaaatagcattacttgcatcagatcattctaatgtagttgtgaacagtataattcagtttgtaaaagtgaatttatgatgtataacaacctgaataccactatcttcagaaaccatggcattggagtttttcctctcattaataggaaaaggatccttgaggatatcaatttgacccaactgaaaatcaccaacacctgacagatggaccttttgagtggcaaaggtgttagaaaataggaacagaaaatcataaaatagctcactagaaataaaaacatagatcacctacaagctggttgacagaaagattgtgggcacgtaaatatccagacataagcaatgtgcacagccctgaactgtcatcaggttttatgcaggcctgaaaacaaacatcttatgtcaatcagttttaaactgaaagaaaaggcaaagccaacatgacttgtaacttgtgaataatcaccactagcactgaataatgtaggttcaaagccaacttaatatatcattacatggaaacctaaggtgatgtgatgcatgtgctcacaatctcgcatatgccttgtcaaagattcaacac

SEQ ID NO: 20076 - DNA, 16168 bp, Oryza sativa
attcctgcagcccagcactttcttttgcatacaacaaatgaaggaaacatctgacctagacaccacggctacgttatcgattagtactctagtcttagccaataattttcttctttatccagagtcttaatactagaacacttactagagcaatcattataaatactaagtgacaaacctacaatgacgagaagctatcttacttaaataagaaaagtaaacaccataaggaaatctcgaatacttactttgttgaagaaagcattcgccgaggtacacaaaatgaagtcaaccactaacctatacaccacgcctaagtgattctagcctcacgcaagaacttccttctttatctagaatattagtactagagcacttaataataatactaagtgatgtacccgcaacgatggcaatatatcacacttaagcaaataaattaaattccaaagggaaatctcgaacacttactttattaaagaagcatccaccgaggtagaagagataagagagtgccgatagctccggcactcctcaggaccttctcctcagtctctacttattttctccacactactaaagtgatgcctaaaatatgaaagtgaattgtactccactttgttgtgtgttgagaatgagagcttctccttgtttgatagggtggttatgactgttgtggaggtagattcatccacaaccatcattagggagcaatcaggagctgccacgtatggggtggagatgagagccggccatggcggttcagctgacccttgggtcccactcttctccaccccctttcaccaggggttgacaagtgggccctatggcggttgaagatgctttggccacacactaggtcggttttgactaacatgtggatcatctaatccttgtgctcgcatatgattggttggaggtacattttttttacggttaaagcaacaggagagctgttggaggtacattttgtcgcatggtagttgtgttttcatccagaattcatcctcacacctcccacgaccgcgtcgctcgccctggatgccgaggcccattcccccactctgcccacattttcccctcggactcaaattcgaatcgagcccacgaccgccactcatccccactaaccccacggtgctagtcgtttctacacttcacggccacacccgagcaccccgaggcttcaaaaccgctccctgagctcctctctttctttttcaacaaccactgccgctccgagccgctcttgcagcatcacacctagcaccgccaccactttactgctaacggttgccgctagccctgctagagtctctgccgggtagcaccgtcgcctccatcggcttcgcgaggtcgaggagcactgatgaggaaactaggtcccgatcttccgataggtattgataactcttgatttagtggaaacttgacacacacgatctagcttccaatcaacacgatccgaatgctgtgatcgcagcaccacgtctcctttggttatcaactgtgccgaaaccggttgaccttgcatagaaggctaatccttgcatgtgaatcaaagaacaaaagcaagaacaagatagattgcaacacaattacatatgaatgattaagctctcaaatttggggttccacaaaccaatctagcggtgaaactgcaatgttgttaacaacagaatttggcatcagatttggagaagaaggaagaaggtcgaagtggatctggtgttgaatctaactgaacttggagtcggattgcgcatcggctggataccgtatcggctgaaaacaaagtatggggttgatctaggttgatgaagctgatggccgatacaaccgatatgacatgacttgggctcggtatgggcctagatcaggataactatcattgccaataagagatagagctcgattaaggcaattgtatctattaattaggatattgagtcggtttgttagagatttggcaagaggctgccatatatggtcttatttgtatcttaattttagaaaggtttgagtcgtgtccatgatggactaagtttgtacttagggaataaatatgaaccccatagcattgtaataagggagccaatccaatacaacttcggcgcatcgccacccttttacttttctcgttttccggtgagttcttcgcaaaaggtaactcgtctcaatggcccgcgctaccgggctaacatgtcgctttagacgtgttaggctcgacatcgcgagtcattgctatcatatgtcttagttaatctattcttagcttctcaatttagctctatcggctgctgctcgctttagggtttatgctggtttcggttaaattgtcttgctagattagattagctaaggcatctaccgtcctaaaagtgcctaattgcttgattgtctagactgcatgtttcctttcatactttgagatgcatcatccctagtcatgcttagaaccatgcaaactagcctgcaattaggcataataaggatagtatcagggtttcagctgatcttacctaatatgcatatttcaccccctgtttcatgtatattcgctacttatatagatagatcattttatataagcatatcaagctttagtcagtatcggctagattcctacacctgcatgcttgatttttgtttaatatgtttatatggatcaatctatttatataagttgttactagagtattagctagtacgttatctttctttctctaaatactgtcacgtcagctactttcataatatcgttttaaatcaatctgttaaactacatagatagtattacatccgattggacgtgtttagggtttattattctttgatatatccagtccatagccgatttggtctaactccatcggctgagaccataaacgatacactatcagtcgactaattctacttttattctttcttgccgattgcaggaccaaatcagctggcacgcccttgacacactcggggctagcctaggacctgcactggagttaagcagatctcccagggcaccgtgttttcacatcaacaaatggcagaaataatctaagcaaaacccgactctaaactataacaactactgaataaatatgatttaggatgtcctagggttgccctagggcacacacccccttgggcttagcccatgacacaattacatggcccaagacccatatcagattcggactggatgagatacgtggtttgtttcgcagattcctgatagcttggtgggaattttgatgtggtaccaaaaccatctgaaactaaacttcataagctttccaacaagtactcatgggtcccgagattccttatagatcagcggctaggtccgtttgaagttgatgctgtcaggaggcctgaatccgaatccaaatccaaaatgtgtagatctttatttcttgtcttctatggaccaaaagtgacgtggtgaagtaggaattgacttggagaaggtcttggtttagtccccaatcaacctctgcaaatgaaaacacacgaaactcattgtgtagcaatgtttgttcaaagatataacaagtaaatataatatagaacatatgcacctttcgttgatgaatacataaggtagtcatggttatatttgagctagttgtatcctcatcaagcacctcggccaccggttggtcgccattcctcaacatgggaacccgcctccctcgttcgccagtgagctccaccattcccctctcctccggccagcaatgctcaccaccatgcaccctcattccctctccttccctaggtgccgccattgctgtccgcctcctcattcgctaggtaaccattgtcatcaccgtcctctcctgtattggccgctgtcaatccccttctagctcccttcccatgcgtgtcgttgcctctctggatgcatcgctgccttttgtgcgcactgccagtcgtcgtcgcgggtggctgcactgccccgtagccattggatcaacctcaggccaatctagattgtcgattcccgtggactatcccagtggtcccggtccatagtggaaaggcccacttgtgtcactgttgggtgggccccgcttgctggtgccggccttcccctcactaatgtcagcccttgggctttaatgtgcaataattcattaaggtttttttattaatagtaaaaacacaatgaatcttctaaaattcatagtaaattcattcgagcttcgtttaagtacatgcaaattacagtaaattcataaaaatgcctagaatcgactaaaaatgttgttgtctctattttagtagacttatagcctatttgctttatgtgctttgtttgttgcttatattcggtctatttcgaagctcccatttacttcgaagtggttgagaggttccaacatcactagagctaggcaagtcatggatcctaattgatcatgttgtacctattttacatatatctcgctttctattaaatactgcattattttacattgtcacgtgggatggtttcctatgcacttagccattgcttgttcaccttgtatcattgataacatgggaattaatatgactagatgttgttcaggaaatgcttaaccatgcttagatcaactagctcaccacgggaatctcacatataccttatatcttggattagtgataatgacattggacatggatcaccatggtattaattcaactaaaatatacctactggagggctatgggcacatagttttgatagacgcacccatgcaattaaggaccggttcgcagaaaatctgtggaagacttaccgtgtgtacaacataccaacgtgggtgatggttgggcttgttgtatagctccaccctctttgacgtacccaggtgagggtgggcgtgatggagttcggttggccctagatataagggttgatcaccttccatattcaccatggcacaagaggaggctacctactttagttttaagggtaggagcaaaacctgctgtgtggtgcacttgtttggggggagttatgtgaagggtcctgtcatagatcctttccggtatgttgtggggctgtgtcttgtgggtacatatgtacacttttggcaagagtaaaactattcgaatagccatgcccacggttatgggcgatcgaccagctttaccgtgattagtctcgtcattaataatttgacttaattgaattggtgtagttcaggtggatggttgggcctatctcaatgtggtttaacgttagacgatgatgattaatatttcttaatatacttcaacagttttaccgctttcgaccactgctttataactgctttatgcaaaagaacccctagcctcctttgaaatccttgcatcatacttcctcttggtatgacttgctgagtacagtgggtagtacttagtcttgctctattttctccacatcagagttggactactactcggatagaggtaactcagtggagtaaacttcgtcactaccgccaaggaaccttgtggagtggagtcaccgctttgctagcatcacttatccaagttttgctagttttaactttccactgcatttgtaagactttttgttatgttttgtaagatgtggatttgtatgtcaactttgtcatctatataccatgggcggtcctgaacaggggtttaatgcacattctgcttataattctggctcgtgaatttctgggcgtgacagttccccgccaaagcaagataccgatgagaaactactattggagaaggagtcggcagacaacgaggacgagaatgccattgaggatggcaacgacgatgaccgtttaagctggagcggtggaagaggaggccgaggtcgctgaggtggaggtggcagcttgcggggacgatgtgctaatgcgggcccaacaccgtctagacaaacattttgtatagtagtgtatgcatgtctggtgaagttgtgatctagaggatttcttggaatatatgccaattgttttgcatgattttttttccacctccgatgaatacaaatgcaatggtaaaacattctagctagcaaatactggatcatttattgtaactatacataaataagagtatttcacaaaactaaagatagttgtataaaattatcataaaactgcatatttagcaccaaattgattatgaaactataggttaagttggggtatagcaaaactacaattctactaatgaagttatctgtagttttttgggtacttatagcaaaactacaaatctaatctacaaatccttttttgcttgagttctgaatattgtacttctgtgattaaattgacataaatctatagctattgtgataccttcattactagatctgtaattatgtgatactccaccttgaatttgtagttttgtgataaatttggtatagaatctacaatttttcatacactgccttaaatatgtattgtttgatagtttatgatgtttcgaccaatttaaataaattatatggatgttttggtaatatgttgcaactaggtataaaaaattctccaatgtacttatttatagattaaattaaactaaaatttctgctaatgattgaaaacagatgaagattcaattccccatagatacagcaatgaacctcccgaaaattttataacttttaaagttcatttggcacctcgattagtttggtcaatgccgtagtcaacatattgagaatccaaaatccaaactggattgaaatgtgaatattcataattaaaatgcactacattggacgaccaaagcttatacaggaaattaattagattaacagtgaattttcataagttgcactactatacatgcgtataaattgttcgaatgatctaaaaattggtttgactcgtttgcactaaattatatttgcaatcaagtttccccctgtcattaaattctacttgcaatcatgcatgctaggataccgtaccatattgtttctctgctccatgccaggctaaaatatgcttagagtaaatttcatataaaactatacgttgttcatactgttaaaaaactatagatttaaggtaaagaatcataataacatatataaatttaacatcaaatttattagaaatcttcatattgaaggcgacgttattttgttcaaaattgaacatttcgatcggttacacgtacttgcgcccatccaatataatttatatatgagcaccgttcatttccttcagtttacattggtgtacaatatatcgatctttaattagttatttacatgcatatgatgtgacacgtagttaagcttaattaccatatcttattattattgaggcgtcctcaattgaaaggccggccatttctgtatagtagtgaagctggtttaaaattttggcccccaccggcaagcacacatctccctgaaattttcgggtttgtttgtcaaatatttgtaaatttggttaaaatttattcaaattcaataagatatgttaaaaattcaaataatttcagtcagaaaagtccagaaataacggaaatttcaaattttcggcaaccaccgaaatttcagtggcaaccgaaattgcaaaccctaatcaagagctcgaacttaatttggttagatgtttacttgttttgctctttaatttctcccccttgaatcttgatcgatccacgacatgaaatagtacaactatacaactgtaaaacatgcgtacagattacagatattaattagtggacgcttcaaatccctagcgtctgcagccactcgcctgcacgaatcgccgccatctgccacctccacgactccaaggtcgtcgtcgtcgccgacgccgccgcgccgccgtcgaggaggtgatttatgtaggcgtcgaggtcgtggacgcacgccgcgtggctggccttgaagaaatcgagggcgacttcgacgccgacgtgggtgtagcacgccttgctccacggcagctcgacccggaaaaccctagcggcggcctcgttgagcaccacgccgggcatcctcgtcaccgggtcgcgggcgttcgcgacgcggagcaccttgacgcggagctcatcgcaccgtctcttgaactcgaggttgccgacgcgcgggccgccgaaggagaagacggtgatcgggatggcgccgccgcggccgccgcggccgccgcggttgaggcccagctcggcgaggtcgtagccgaggaggatcgccagcgagctccccatgctgtgtccggcgagggtgatgctgacgtcgtcgtgcttgtacttgtcgatgaggcgggtcacctcggagaggagctggttccggcagctcccgcaggtgaacttgccggagaggtcgtcggaggtgtagagggagaggaacccggactcgacgcgcacgtcggggcgcgggtcggccgggtcgaaccgcgccggcgacagcgcgctcatgaagttggccagccactccgatccggtcaccgtgccgcggaaggagacgaggatgtcgcggcggccgaggcgggcggcctcgcggttggacgcgacggcgacgtagccgatccaccggctcttgccggcgcaggagcagcggccgccgacgccgaagggcagcgcgacgtcgggggcggcgtagatgtacctggtgaccgtgtacccggcgccggccatgccgaccgccggcagcatctgcttcttgccgtgcttgcagttgaggtagcgcttcgacgccgggtcgaggtcgaacgcccggtagcacgccgcgacgagctccccgtaccggaccacctcgtcccggagcagcgggtggagcggctccaccatgcccctccagtcgccggcgccctgcacctcccgccacgcgctcgccagcgccgccaccgccgccgcctcctccacctcctcctcctccgccgccgtcgccgccgccgctctcttctccaccaccacaggagaaccaccactactcgtcgtcgtcgtcgccgtggcggccgatcgcttctgctgtggcagatcacccagagtgacggtcaccggcgaggcagccgacgtcgtcgcggcagtgaccgggccactgacgcgcatccggcacgtcgtcgccgcagtgagccgcgccaccgccgctgccgccatcggccggcgatcgagcaggccagggttaggtgaggcggacgcggccgcagtggcgtgcgcagctagcgatcgatggatgagtacagtgagtggcggttggcggtaaggtgagcgcgcgtgcgtacatatttatagggaggcgacggcgacgcacgcggttggccacgtaagcaacttgaggagagagagagagaaagagagagatgtatggattatttgactagcgagacgaggaaaacgggtggagatgagatgagcagagcgttttcttaaatggaaaaagtggtcggttgcgggtctgaccgggggtacgggcatgcgcccgaatccggttagggtggagaccacctgtgttggatagacaagtactgcttgttttgtggggcagttagcatagcagatttgcacgtgtagtgtacatccggaatgatgcactgctgataggttatgagtgtctaccaagttgagacgatatcgttctcacgtatcctaatttttaaagtatcttaattttagtattaattttcacacgattctacaaaatcttatatatcatcatgatactaagattcggaggcggaccatggaaagttttcgaataagtaggcgaaattcgctatcatcgtaccaagggcttgtttggtagagctccaactactaaatttagctctagaagtttggtctggagtggagttatggagatgcctaaacccagctctatatctcttgttcattttgtgagagagctccacctaactccgctcctattctaggtagagctgaaattgttcggctgagttccagctccaggagaggtagagctagagctgaagctgtgtcaaacaggccccaaatattattttaacataaggtggattgaaaataatttaaataaatatgctgaagtttacataaaacaattaaatttatttaaatcaatgttatttgctttaatttatacaacatattatgtattttatataaaatatatattttctaaaatttcacaatattctgatcctatgttagtgtcatgatactataatattacaaataaaaaagggttaattggatcgatgccattgtaatttcttcagttttgaaatatgccattacaattcattaaattggaaccatgccattacaatttgtgaggtatttgagacatgccactacttaccctttcaaagcagtggcacatatctaatatatgttaaattgtaatggtatgtttctaacttcgtgaattgtaatggtatatttcaaaacaagcaaatttataatggtatggatccaattaacccaataaaaaagatcttacctaatatctccttgcaaccaactaggtactcagcttagtacaaagaaaaagtcacacatactctccaaggagagcgtaaacacatatctgaacatgcaagtttctaagcatatatctgaacaaatgtcaaatgtttatcctgattcaatccaataaattgatttttgaagtgtgtaataagtgggtatacatatataattacagctaattatgctttcggtagtagcacatcactagcaaaaatactcgtggtgtctttgccaatctcaacgtatgcgccggcgattttatcaatctcaaaatatatcggcttagtctttttgaagtgcttatacatacatggtgtataaatatatggtgtataagcttgagtgatcaagcacgcagacgatatcgtttgtgtttatatgtgttacgacaattaaagtccaccgtttaataatcagtaatgtgataattaagaaaattaatgtggttgttataaagtataaattcatacttgtgttttctaacctttgcaagttgacaacgttctacttactcttttttcatctgcacgcttccgaaacttcttcacaatacattttgaaaaaaaatagaaaagtttctttaaaaaattatataaatccattctcaagttttctctctaataattaattaattaattaattatgcagtgagataacttgttttccatgcgaggagaatgagtagccaatcatactcctgatcagccttttgactaccatataatggtaacatcattgttttccaaatcataacacatatatgtagttatctttcaattataatctctattacaaagctcaaaacattcggccacttcaactaatattagaattaaagtggcaatatatactccccagtcctaaaaatatataatcattttcagactttaacactcttttcaagatgctactttgactatcgatatctatgaaagtaagatgttttaaataaaaaaagttgcatattatgatagtttatttaatgataaatctagtaatattagttttacatgattgatcttttttttttctattaatagtctaaattaaaaatatttgacttgttactatatatgctaaaaatgcttatattttgggatggaggagtatattgcatgcatgtaaactttacatcttgtttatttatttggcaccagtagagctcgtacgttgtgctgtagtatcttgtacctcacgtcgactttggatgatgagtagtcgatgtttctgacccctcgtgattacttccacatttgtcttcgccctacgtggttgtgtgtgctatactccctccataaaaaaaaaaactcaacttctatagtttgaattttatcctataaaaaaccaacttctattatcctatatatccttagcacgtaaaataaaaagttttattccttcaatacctttacgtacctatcactattactactttttttattgattaatggtatttcagtcattctttatctccactaattccacctcaaaatgctaggaatgtatttttttgagatcgagggagtacgtatgtgtattaatttttggtttttattacgtggtatgctgttaagctagtgtggtaccacgaaagcttgcatttttccatgcatgacctacttgcagactacatctccatcgagcatatttataactaatttaacagaattcgtaaccgttgtgtcacagaaattgaaggagatttttctctcgaattttagactacgagagatccacactaagatttctgttggtctctttctcctccaacttggtctggtgagtcatcgcagctcgcggttaggattaattctagtaggttgagttccaggtgggaggggtaggcgagggagagattgggtttccccttgagagatagccgtaggcaacggaaggaccgacgatgtatagtggacttgagtgagtagggaggtggaggcagagccacctgaaactgcgagaataaagaaagacggtgggctggtgtcgccgacaacagcttgatgataaggaaagagaaaaatatgggatgaaacattcatacctcaattgccttgggggctggctaatgggcgatcgctcgagcgatcgatccccattcacccctatacacttctctcctcccttcctccttcccttcttctcttcctactacaccataaatttttaaaaaataaaaaaacaaaattgaaaaaaattatgtctagaaataaaaaatatttgaatttaaattcaaatttgaaatgggtatgtaaacttttgaattataaacttttggtctataaaataatatttgaattcaaatttaaatttgaatcgagtatgtaaactttggacttataaactttgggtcaataactttagatctataaactttagatgtatagaaatactatatataaaaaatatttgaattcaaactcaaatttgaatcatatataattcaaattcaaatttaaatcgggtatataaacttttgacttataaactttgggtctataaactttaggtgtataaactttagatgtatagaaatactatatatgaaaatatctgaattcaaattcaaatttgaatcggatatataaacttttgatttataaactttgggtctgtaaactttagatgtgtaaacttgaggtgtacaaactttaggtacataaatttactaaaataggaaagtaatacggtgccaaaaaaagaatggagggaggggggcattcggatctgatcgctaggggcgatcgatcgccccttagcaatctcgattgccttgtaccgttcatgtgtggtatacgtcttgccacacaaaaaagtttttaaattattaagtcgattggttcgtgtttatttctcaaattatatactactcaaaaaatattttaaaagtaccaaaattctctgtgtggtcaatcgttagcacggtgtgttaaaagtaagtagttcatgggtgcatccaaagatagtgggtatatatataaattattaagtcgatcggttcgtagtttattaatttctcaaattatatactactcaaaagtattttaaaagtaccaaaattatctgtgtggtcaatcgctaccacggtgtgttaaaaacaagtatttcatacgtgcttccaaaatagtgtgtatatatataaattattaagtcgatcggttcgcagcttatttctcaaattatatactactcaaaaatattttaaaagtatcaaaattctctgtatggtcaatcgttagcatggtgtgttaaaagtaagtagttcacaggtgcatccaaagatagtgtgtatatatacagtggcggagttgagtggcggacaactccgggcgcatgtggttgtgctcgttgcggtgaattcattgtaaaatttcatacaatacatgattgaacataaaacttttgtagcaaatacttactgtagatagatctgttcgaacttcaaaaattttctagcttaggcactgctatacatatatatggtgtagatcgtcattggtgtgtttgtactagtctcatcatagtgagaaacaaagcaacaactataaacaaataatgcgcaaaaggaacgctgcttcggttgacaaatactcatcgacacatcatcagtgcatgcaaaaccaatgatcagtgttagcaaattcattgacaaatatatacgactccaaaaatctaattggcacttctgttgttgaaacaatattttccactatcctgtatttttcaggcctcttagggaatccacaatgtaaatcaaaagtgggtgttatacactaaatgcacctatatgggttgcctctatacattgtagatgtggtctttatagcattaatggctaaagtagtccatatggctatgggctgcccacaagagaatacaatatattactttattactttttgagttcactatttggaaatgaatataaaaacaaaagcagttgattcatgactctgcgacaggtatccgttggttgaaggttgaacgttgaagttacttttgccttgagctctatgttggctacaaaacttgctcgatagcttgagctccatgttccctataaaaacaaaatagacagagcttcatattacacctcctcattttcatcacggattcatccaacagaagtttcaaaaacctcctaaatcaagaatctccaagcccagaaaattctaggcaccacaaccctcctccccaacaattccccaacagttttctcccatctcagttttcccaaagcttcaacccaaatttcttacatagtttctacccatttggtgccctaggcaaccacccacaatatggtcattctcctccaatctttcaagctactcaacatcaaggaaattggatgcaagctaactcaccaaatcaagtgtttggagctgcaagcaacaaagtactctttgcgcctcatcatttcacctcagttttttttaagaaccaggaaatatattaagtattataagcatagtacatagttgagcatacaattggaggatctgaaacagtcatttaactgcttggcataacagcttctttccggataggctaagtgagctatgttttgacaaatgtgagctaaacccctcctgggggaggatttagcttcctttgctagtttacctgccattttgttgatttcccttgggatccagcgaacctgtagcaagtcaattaatgggaaaaacattgatgatttgaacaaaaaaagggttttcaactccaatctcctaggtcttccatgaaatttctcttcatagtcgtgtctgcgatggtggcattgtccgttaggaaggtaacccctgcaaaattcagaaatatggcaatttccaaagacaactgaagggcaagcagttcagcttgaagagagctgtgagctttatcagaggtggccttaataaaaataacagtatgattgtgtggaaaatgaaagaagattccaatgccagttctaccattgtcccatgtagcatccaaataacacctgattccatttgggatactatccatctttcttttgcaagcctcagattggacatcatcctgcaacacaggttgagaaaggatttgggaataggaatttatcatagcatctgctagaaagcagacctgagagggttctttgaaaattccataaaacttgagatcatttctagctttccaaagttgccacataactatgaggagcctgctcagattagttttattaggatcgttattaatcacaaaagcaataatcagagccacatgagagttgatagggaatctgtcaaaatcagtcctgcaacctgaaatcatccaagtaagtctaatgaaagggcaagagaaaaacaagtgaaaatcactctcaggcatgccacatctgcaacaactttcagagatatctttaattctatggttgagcctaagcgcagagggaagagcccccctaagaagtctccaagcaaaaattttactttaggaggaatgcttttatctttctaagacactttatttaaagcaatggattgtgagtccacctgttgagtattctgatgctcacttttgtagacttccttgtaagcactttttgtgttgcattcaccattttttgtatgcttccaataaagtttatcttcagtgttagcctgcattactggtacctgcaagattttgtgaacaattttctctacaaacaaagagttcaacttttgaacatcccaattcggctgcaggaatt

SEQ ID NO: 20077 - DNA, 2790 bp, Oryza sativa
tccagcaatatagtacgggagtatatataatactctctccgtattttaatgtatcacgccgttgactttttaacgaacatttgatcattcgtcttattcaaaaaatttatgtaactataatttattttattgtgacttgatttatcatcaaatgttctttaagcacgccataagtatttttatatttgcataaaaattttgaataagacgattggtcaaacgttggttaaaaaatcaacagcgtcatacattaaaatacggagggagtactagagtctatagatagcgttgtgcatgcaggatattaacatttggagtatgatgtttaattgttttaagtacagatatttttttcttaaccaagatagatcgggttattagaacataattttaaaaatgaaggaaaaatcatacataataatctagtttagagtttttgtagacctttttaccaatagtttttttactggttcaactaggttgttttttgtacaatcactcttttatttcgctaccctctttgccggatactagattgaagaagatgaatgcaaaagaatcatgagtgatcaatgtgtgcatcactcgtgtacaccactatttacctctgaaaaaaagcatcaaacctcacacgcccacaatcttgcataatactagttagtagttacaacaagttactgcacacatatgcatagccaagagagaaaatataatatataatatatgatctctatatgcagtgaggtgtgaaggatctaagcaagcctcatcacacagacagaggtagagaaaggaaagaacataaatggagcaagaaaagaagaggaccaccaagccaaagcaacacacacatacagtcacagacacccatcaccacacaagaaaagctcataagcatatactctctccgtattttaatatataatgccattaacttttttaaccaatatttaaccactcatcttatttaaaaaattatataattatcatttattttattttgacttgatttatcatccaatgttctttacgtctgacataaatatttttatatttgtacaaaaattttgaataagacgaacggttagacgttgataaaaaatcaacggtgttattcattaaaatacggagggagtatatgctcatgcttccttcacaaagtatgcactgtgctgaatcaatctacgcatctagctcacctcacaggaaacacaaaagaaaccagatatgtgcgcaccacatcagcaagcacacagatcatcacacacacaaagaaactccagcaatttctttctcacttgctagttgctactaccccccagaaagcacagaagttacaacaagacagttaattaactgaagaacatatatgagtaatagaaaagaaggtgagattgatgcacatcaccatatacatgcctcctctttgtcacaagaaaaggtagcaactaactttctccaattaggacaagataacatatatcacatggattaattcaggtttctagaactgaagagaggaagaggaatgcagtacctgttgttggagtactcgtagaggcggccgcggctggagaagacgatgagggcaacctcggcatcgcagagcatggagagctcatacgccttcttgagtagcccgttgcagcgcttgcagaaggtgacctgacggtccgctgtgtcctcgatgcttgagccctctgagctgccggagccgggggaagcagcaggtgctggttctggcatctaaatttgagtcacaaaaaaattccagagatatggatcagtcctctatgcaacaactcaacagcactgcataagccaacataatcaagaaattgcaagaccggaagatggatctatggcaagaaaatcaagaagtgccatagacatcatggccatcatctctcttaaaaattaatatatgcaactacagctcctttcgtgagttgtataattcttgtagatcaaaagaaaaaaggagagatctttggtcctgtggtgatcaatctctttgatcttgtgccttcctttcacctttttttcttctttttcttgttttgcttaaagagtaaagatctctagctatatctccccgtcttcatggccatctagctattctcacacatcagctagcagccatgattctacttttctactttcccaaagctcccatatgcatacaattaaaaaagaaatccaaaccctcttgcaaaatgacactgaaaaagaggaggaaatttaggagtttccaggccaagaaaagcaattaccatcaggccagtggatggttcagcctcctgctctttgtatatgtgcatgtttgctaaatcctctctataatgaggaagagaggggtgtgttcaaggagaagagaaaggttggggaaggatgagatgaaatggagtggtggtcgctgtggatagagtccatctatatattgcccttgttgtttttcttcctccttaacgtactttcctcctttcccctcttggctggcctacctgcacactgtaaccattaattgcatggggtttaataaattctttgaaggatcgaatagcaaaaactaagccaaccagaggggagtgaatggttatagtacttaaaaaccgaaacttttagcggaattacaagttaccattgtatctgatgtaaatcgatctgaccggtgttcatcacccgatttaaccgctgaaagatcacccctgcctcctgtcgccgccgccgccggtttgaccgccgtgtccccgttggtctgaccagtgcgatgccaccggtctgaccacc

SEQ ID NO: 20078 - DNA, 654 bp, Oryza sativa
attcgggaaacagctttgaaaccatcttcatcggaatcggctacatcatctttatcggctgtatcggctgtcttttgtccgatccatctcagccgatgcatactctgtttttcgaatcgatctctttcttgaatctgcctcgatcccaatgtcgaacctggttcacaccttaccaaatttggtcgtcaatagaatcaaagcagaacaccagaggccagcagggctactgcagtcgctccgaatcccggagtgaaaatgggaagagataggaatggacttcatcaccagcctttgtaacaaccctccctcaagaaccgcgtagccctgcccaactgacgggcgggccaacttacacacaccaccccgcttacactttcgtccttgataaactagcaaggtggtactaaatatgcgcacacagctcacatgggccacacaggcttcatcctaattcggccaagatgtcatagccttccccgcactcaaggctgttatgattccatttgggtcgtggtgaaccatgtgaccaaggtggcacacttcattcctgtcaagaccacttaatccggcagtaagatggcataactctacttcgcccgcatggtgtacccactaaccggtacccagctcacctctatgttttggcagaaactg

SEQ ID NO: 20079 - DNA, 631 bp, Oryza sativa
atagtattttgaatgtgagaaggggtgttcttactgaagaaaattctatatttgtcccaattaggagtttgccctgatttcctacaaaatcatcaatgatattcttgatatgactagcttcttcaacagatgctaatcatgtaatgataaggtcatctgcataaataagagaatgaataacaggaccacactcactcaactttatccctttgatgtgctggttgtgtaaggcctcatttaactgtttagaaagttcattcacagccaaaacaaaaagatagggggaaagagggcagccttttctaataaccctattagcattaaaagcaccataagattgaccattgatattaatagcaaaagaagaggaattgatgcaggacaacacaagattaataaaatggggatggaaaccttttctttgaagagcagcagcaataaagtcccattccagtctatcaaaagctttagaaagatcaattttaagaaggaaagctttttgacagtaagagttgagaccaaaagaatggacaatctcttgagcaataatgatattattagcaattcttccgccaggaataaaagcatgctgtgattgacaaatgagatcaggcagtttacctttgatcct

SEQ ID NO: 20080 - DNA, 23202 bp, Oryza sativa
  unsure (1)..(23202): unsure at all n locations
caatttttttgaaaatttttcataaccatttagatgacatgcaagaaatgggtggacgtccacccgagtgtttaaaacagtttccctcgaggtcccaggtagtcgtagcgaaccaacaacaatgacgcgatgtagaaagtgagcggcctctgcatgcttctcccctctccgtcatcgcaccagtaggcagtagtcaaggccacagtcgcggccctcgtctcatcagaatctagaggaggctgcttcaccctcctgggagggcctcctcactgcctctccggtccagcttaataatatttgctcccttagcttaataatttttggactccaatacttcggctccaatacttcggtcagcctggttaaagaaaatgggtcaacatagttgaaaatcatttacatattccgaagcacttttagaaaagtaacatgacaaggtgaaacttatacctaagtatgagcaaaactttctccattgtataaaggaaggctacatgattcaattttttagcagcattttgttgatgcggttctatatgtttaccatggtacgtgcatatcaattttcatttcagcaggttgtccatggtagtcaaaccttagaacttcatctgattgttcctaatggggtaaaaaaggaacctgatattgcgcaattcagccagatgagaaaataagattccctaatggggtagaaaggtataaaaatcaatatattgccacccaccctgataatgatgttattggcagttttcggaacactggaaaaaggattcatgatagcagtattctgaacatactgcacaaaactaattcatgactgaacggatgtgaattcagatgagtgcgtgaaaatgaggagcttaatgccttgtaaaaactgaatgttgtcagaagaacaatgaaccaagaaccaccaaattaagtcaagtactaattggataatatcagaaactactagcatgtttacttatttcactaaatattctactccctccgcttcaaaatgtttgacaccgttgactttttagcacatgtttgatcattcgtcttattcaaaaaaaatttatgaaatatgtaaaattatatgtgtacatgaaagtatatttaacaatgaatcaaatgatatgaaaagaataaataattacttaaatttttgaataagacgaatggtcaaacatgtacttaaaaaaatcaacggtgtcaaacattttgatacagagggagtaataaataatccattacagcaatataatgacagatgaggacatgaacatgagactttatacaagaacagtggggtaaaccggggatgaacagcttcagaaaaagacggattggaaaataagaaaaaaaaaactatgaagcaggcatgcagctacgaatcatccccaaacatcacatataacaaatgttcatccggcattctgatcgttaccatgcaggcacacagcagctgctcacctctctgtctggtacatcgacgtcgcaccaaactgcagccagatacccgccatcgtcgaatccacgacgcagcaagcaggcacgtagctgctgtatgctcgcctccccacctgaccacctcgactgccatgaagcaggcacaccacgtacgtcttcgctccttcctctccccttgcatcccggcgtccctcgggctctagccggcgagtggatctagcgagacgcaaaccttcaataatggtcacagcattaactggtcgcgatctgacgcaactgggcgtggggaggctcgatctggcaccggggatagatgcgccagggccaggaagagtgtggcctcctgatccggcgacgatcgaggagacggacagccacgacgcgacgacaatcccgggcggcgcccccgaacggcggctaccaagcgacgggagagaggtcggtggcggtggtgcatatccatgggggcggagtataggacggcggcgagtagcgtgcgccgcacacggaggatgaccggggctcctctccatcgccgcctggctcgagcacgaacctcgcctgccatgctagatccgaaattcagaggatgagaggcgacaagtcgagaacacaccaatttgttgacagtgtatgtattccctttcgattttgctaaaggttatttgacgtttttctggccgtccgatcgtgaaggatatggttttgtatctttaagtaacacgaagtgcttagctaacctgctgctaccgtcggccttggcttgtcgtaagctttgtgcagctcgctgggtagctggcacattacatatcgtatatcgattttgctcgtgatttttttctgacatttaacccttttttttcagctcgtcagccggccggcacgtcctatataactaaatttaaaatatagaaaatataaaattacagtctatataactaaatttacatttgtaaattcagttgatatgacatgtaagcgcactgtaatttcgataaaaataatatgtaagtaaatatgtatttggtattttctttaaattataaaattacagtcctatgtaactaaatttacatttataacttcagttgatatgacatgtaagtgcactgtaattttggtaaaaataatatataagtaaatatgtatttgttattttattttgtagtccgttggatgtaaatctaggggtagaaaaaatctaggtgattttttattagaaatcacccgacaaatggatagatgctccccctttagggcacgtataacggtctttattagtggtctctctctattgctatgcatgacaacggcttagagtcgactcttagcattttttagagcaaattttgttgcatggtgatgaaagaaaggaaaaaatattaagatttttttgattcattaatgtttagagaccatattgtctctaactattgtagggtgctagtctctagataacgtagagctcatatctgacaaaaattttcacaatttgaccctttttaaaaactatttttacaaatgaaccgtcaccaaaacttatttaaaaaataacccttggcactgaatttagacacctcagcgccaaatagcgtagcgctgaatatgcgttggcacgctgacttagtctcccatccgcggtggcacggcattcagcgccagttgacatagcgctgaggtgtctaagttcagcgccaggtgatttggcgctgaccaaaagagtcatttttgaaataagttttggcagcggttcatttgtgaaaaaagtttttgcaaagggtcaaattgtgaaaatttcagcatatctgactctacctttgtacatgcccttagtaactacattactgacccttaaatacgttatcatatactccagtaactacattactagtaacaaccaatcattataacaagtgcggatcataaaggaaggtaggtgggtggggtgggtcgccccggttggaggggggagggtagggggttgtgttttaatacagcacaacccatctgtaatatagtatatgtatgtatgtatgaatgaatgtatatgtccttggtattggaaaaaagaactgcatgagcaaaatgataccacaaaaagtctaaatacaagcacaccaattaagttatatatcagtatactccatatatatgacagcacaggtacatcatcacatcacaggacacgtacatacatatagacacacaaaggtgcaggtgatgactcacatgatagcaagtcacatggcacacatacgcaacacgaaacattatttagcatgcatgcatgcatatgcatatatatgcacgcatgggcgcataacggatgacacactggattgtggggccaggttgcagaggatagctttgttcatcacttgccgcagttgcagccggcgcaggagcagccggtggtgcacttgcacttgccgtcgttctcctcgtagccgacctcctcagccatctcgaagtggctgcatgtgttgcacagaaatatatcacttacatctaaatttatcgttcaatatttatttatatgattcttaattaagtggaagcgaccgcgatttgttcgagttatgatgtttgcacgactttaattactttcacagaagtgtaagattcatgtattggggtccgttttagtttattcactatattatagaaacggatatattatttgctttgagcttcgaaaaatatgttttctccgaaacttggttagatcacatgttttaaaatatttgtagttataatattataattagcggtgataataacccctcagaatctaaatcaatcatcaggctagtagtatggctaaagctgttgagattataggcatataatgatttaatttattccataaataaattatgacattacagatgaaaactagcatgaacgcatcattagatctacacatgtaaactacgcagaataacatgaacagatcaaatatgcgcaacatattgaacacgtaccgaggtgacgaaaagaccggctgcttggtcgaaacttttcgcaggtgtctacgaaggcacgaaacacgcgagcgaagaggaaggcgagccgtcgcgaacgaacagggagcagtcgcgcgaagcgcttcccaaaaaccttattgccgccttctcccggtgcaggacgtcaaaggcagaggttccggagacctgctctcccgatcgctggtgcacgccggcgagcgggatggagtagtctacgagcgacggcgcagtacagagtaggaggcaaaccctagattgattttcgcatattttgcgtgaagacggcgggtcggtttatatagagaagggtcgcttgatcagggcgcccgcacgatctctactgcgcgtaaccgaaccggataagtcgcgcgtaacttatccggactccacgccgtttgcacgcaccggatttttcggaacgtttccaaaacaaaaacgaatccgaatttgcagcaaaacaaaactgcaaaaggaggctgcatctgcgcaagggtgaggagccaatttttcggaccattccattcgacgcgtacgtcgtgcacgcgcgccgcctgccctgccctgccaggcgagcgagcgcgcgcgcgcgtgtgtttcccctcttctctccaccacacatgcttcaagtggctaggagggcatcctcccttttaaggaggtccccctctcctagaataagcaaggtggtactaaactccacatgcatgccatcccatgaggtgggcttttgtgattttccaaagaattaatcttcgagtgggctaaggcccattcattaattccaacaaaagctgtactccctaaaaaaaactgaacagatcaagatatatatggtataatatagtacaacgaatttgggattatgtcacatctccatttaatttgggttttcttagatataggagttgttgtagagttaattaagaggtattggggatgggaaggggaggagaagccagtatgtatgtacctcttctcggcgtcaactatgacgacgccatagctggttcctttcttcctgcaaattaatcaacatgtcaattatattaatagattcgatcagttgattcagttcgcatgcaggactgaaaaattagtaaatcttaaagagggaatcgaattcaggagtggcagctagctagctagctggggtgtgtacttacacgcactggctcttgtcagcgcagtcgcagttgccgcacttgtccgacatgttgatcgatcgatcgatctgcgatgaactgagcttgattaatttggtgtggttgatctcgattagctttggaaggcgaggcttgtgatgaagagcaatggccgtggcttccccccgctatatatagccgcgccaggatacggacgaactgttttttctatatatttttttctcatcaaggtgtccaattgtaggtggtagaattttctaaagtatttttaaacaatattcctaaaatgatttttttttaaaatctgaagagccaagttagctaggaaaagtagtgccattcatataaaccatatatcgctacaaaatggcattgcctcagtttcaaattatttttcattttagctttgttgttactaaaacattctaaactttgaccattaatttttgaaattttatatagtttaaaatcgtaaggttcatgtatttagatttaccacaagaaatgctttcatatgtaatatataattcatatgttgttaaaatatatttatttctaaaaattgattattaaagttacatataattgatttacgacaaaaccaaaacgacatgttgctgcaccaattaatttgctttgcatgcatgcacagaggggatgtgacaccgttttggctggtgtggcaatgctgatctaattagcaactgttatccctaggatttggatattttccatggccttagtcgccacaatgaatctcaaatatatgcactataggttttaacccaacaaatgaataatatatttatgcttgatactactttctacgaataagattcccataaaagagatttcgttgttatattaagagcatgtgtagtactaccttcaatctaaaatataagatactgtacgttctaattaaacgtcatgtaatcatgactggagggaggatatatataagataggttctcaactggttttatataacttttctaaaatatataagcatttttaggtatatatatgtatgatttatttgcatattactttatatatatgagatttgttgtactcttctgtcccattttaaatgtagttgtgggtttctatatccaatgtttgatcatccgtcttatttaaaaaatttatgaaaaaataaaaaaataactcacgtataaaatactattcatgttttatcatatgatagtaataaaaatactaatcataaaaaacattcaaataaaacggacaaacaaatattggatatgttaaatttacaactccacttaaaattggacagaggaagttttaacgtaaggatatatagggggtgtttagatccaggggtgtaaagttttaacgtgtcacatcggatactatatagggtattgtatggggtgttcaggtactaataaataataattacagaattcgtcagtaaaccgcgagacgaattgattaagcataattaatccgtcattagcaaatgtttactgtaacaccacgttatcaaatcatgtagcaattaggcttaaaagattcgtctcacaaattagtcgtaatcagcctatatttaatacttaatataggtgttcaaacactggatgtgacaggtgcaaaattttgggtgggatatatacatgcccataatatatatggttgtgcattgaaatgtgtgaatcagataccatgttactccaggacgagcgatagcaaaagaaaagctaatttctggcttaggtggttcccacggttgcacagctcgcacacgcttcccactgaaggcacacgcttaattggaggagccttatctccacccataactcaaacgaatctatctcttatcactaatcaattatatcgatcattgatctctttttatctccatctcaaaaaagaagaaaaatgaaagaaagattcaaaggaaaaaaaagataataataaaggaatcttacaacagtaaactcagataactttgccatgtctttcacttgtggaacctgctatagttatagctgcactctcgatcaaagctttttttttccgttttggcgccacgctgaaatttatttgttcgatgtaggacacacgctaagtcgctacctagcctagcctgctagcctgtgtgtgaacttcaattctacccccaattaaggcttactcattttccgttaacacgttttccaaactgttatataatactttttataaaaaaaatctatataaaggttatttaaaaattttaataaatctgtttttttaatttataattattaatacttaattaatcatgtgctaatgaaatttctcattttatgtgcatcaaaagatctctctcaaaatagagagattgaatgcagccttagctggatatgttttttatccctcgagggatgtacctgtatttcttgcatttcatataattagtaattgaaaattttaatacaagataataagatagattaatatgagatagcatgtaaggttaaatttgacttttacaagttgtagaaaaagagaaattaaactaaaactagttaatataaatttatagttatatttgttatttttattacaacttgtagaaatataatttgaacttaaatatttgcatagtgatatatcaaactttaatcgaactagtcaatttttttagttaaactttttaatgactatttaggtgacaaataagaaacaagaggatatcacataactggtaaaaaaattagtgaaatcgtacttcaagaacaaactcaattttatataaaatctttaaataattctcagcaaaaaaaaaagctctcacatattagagcatgaaggcgatccgagaccaccacataaaatttcaggaaaaaacttaatttaatttgtggaatattacattaagtttaggcgaagaaatgagaatcatatgtggtaatgatggggagttaaatatatatggatattaattgcgctcttgagtgttgattctatgattgtgctctatgatattagatcgatctcgggggtgatgggatgatagaatctgagagttgaaggggagttgtttggtgcattagctcgattcgagccgatgcatatcaagccaagttttttttcattcctggaaccttaaaggtgtctgctcctaaatcggcacccttaaatcctcaaaggtgccggttaggaaacccagcacgtatagccagttcctaactagcataatcgccttttgttgtatcagtgaatggtttctcaaagcaaattacttatctagcctttcacaaaacaatacttgacccatagtttaaacacctttttgtttatacctttcatcttaagtcgttagattaagaaccatccctatatagaggcactttgcaaactataaaatgaggccttacatgtactcgcgacacttagagcaatagcaaagaagctcggccacctatgatgatctagctaggtagaagaagaattgttacagtttttcttactaaataagtaggaaaatgaaactattattgtttggaacacacgttcatatcatcgtcacgaagtatagttctttgtagctataattgtcatcgaacacttgttgaagctcagaaaaaaaaatcttgttctagtaaaaaatcaatgaagcataaagagataaactaaaaaatggagtgaagagatccaaaacatattagaacgcattggtataaattaaatatataatattaggactatttttcatatacggtcgcgcatctcgcatatgcccaaagatggccctggttagattataagtgattaacggccttcttatatcccaagcatcttagaaaatcctgaataaaattacatttatctattgcaattcaccgatatttttttcaagtaatatttaaatatcgatgtgtcccttcatatatttatcttagtccgggacactaatgttgacagattctcaggtgtttcaatcttcgaaaagaacataaaatatttcaatatgaactacacaatttcgttacaaattaaagcagaggtaaatagagggtaattaactatactacagatacttgctagggccacaataatttctgtaaaactatggccatacatgtcgctagtagacagaccgtaccttatcgcctaatttggtcgcttctcaagattttacctttgccgtagcaatcgccgtcattggcatcgtgtcaaatctgtccctaattaattcgccacttacgaaaagtgaagaacatattaaattggaggaatattaataatgaagtcaaacgtcagcaaacttgtttttccatgcatgtacaatcaaacttattctttggacctgctcaacttcacctgaactaaaaggggattggctattttttatgtgatggaaattgctacgaattttagtaatcttcagcataacaattaatcccctgttgtagtggtaggagagaggagggaggacgagacaaaggagaggtagcttgctggcgatagtgacgatggtcttctttcgatgacagcgagcttcttctcttctccagtgagggcaacaccataactccggtggagatacggattagggtttgaagttagctagggttaggatgggagggggtttagaggaggggaaaaaggggcttatacctaggcttggagggcattgggtgatggccggaccagtagtggctagggttggtggtgggggtgacaccaacaagtggtttggagacggggatggcgaagatgggtccgggggtggcttgccccggagaagaggaacgaccagcttgacgggagcttcacatcattggacttggagaagaaaaagagagggaggtaggggcttcgtgttcatgttttctggctagccagtgaagccagggcagcaaggtcgagcgggcaaagaacggtgccggtgaacgtggtgatgttgccgagataactacgcgtcggacgttcgaggaatagcgaaaaatcggacgcccatgcactagtctttctgtctttacggtctatgccacatgcaaatgcgctttctagctgtctctagttatagctctctgctctctctgtagcatgcagtcatgcatacacactatcacagttgctctctcttccctcatgcagtatgaaaatctactaactctaaactattttttatcctaaaatatttatccgatgcatgatccgattatatcactatatttatcgcaattaaatctttaaaacaagaccacacatagatatattccaacgaattctttttagcttattattgattttttttgaaatgttgcacaacgttccaccaagtatttcgggattgtttcactaagtagatcgaaaatgtttcaatcgtttaaatcgggtgttgtttcaccttatatgaaaacaatgtttcagcaaatagagaaagaatgtttcagttcactgcaacattagatctatacatagtgaaacattatgagtacactaggtgaaacattttttgtgaaataaaaaatgaaacgaattcccttaatagagggtttccaaaatatgtgggtaatttgttgcaaaagaatgtttcggttctctgcaatattagatctatacacagtgaaacattgtgagtaccactaggtgaaatattttttggtgaaacaaaaaataaaatgaattcccttaatagtgagcttccaaaatatgtgggtgatttgttgcaacggagtatgtggtagagacacgtagcaggtagacagtgacacatcgtggggcccagggcgcacgtgtgcgcgcgcgcgtgtcgtggggggaggggggagtgaccaatttttaccctaccccgggcgaccgaggcgtaggacaatcgaatacttattaaaatatataaataaaataatgtgaaacactgaaaaaacatttattgcaataaaaaaataaaaataaaatatttcgatcagaatatagtcatgtgatatcttattatgaagatttaattaaaatgaatataatggtataatcgaatcacaaatttgatagttgattattggaaaaaaaacatttgaaacttattaaaagaatgcatgcatgcgtaggggagagagggcaagagtagtacgtgggctatctgatgtgagagagaaaggttttggtattgaaaaagagacggtatgcatgctggctcataatatgagaaaagtgttatacggtgcatccgccgtccgagtatccgatagttttcgctggatcggacgtccgatcgtaagcattttcgtgatgccgcccgtgcgtgaggtcgcccgtttggaggtgaaaaaggaaatgagtggatagctgtactgctgttgcaccaatctcgagataattctagccatccaaaactttgactgaattcttttattttagtcaccttagaattaattagactgtcctaaaaaacttgaaaaatctgcttgtttacactatcgacatggaaaccagacaaatatacagccgtaacgtgtcaaggcacaaaatagtcatctagctattgacgtgaaaactactaccactgaaaaccagtcgaaggtgatacttttatcgtgtctgaaaatttaggaatgacaaatagccggaattaattcaaggcgaaaatttggatccatagagttttatggccatttttttctttttgttttttacattctcactcatatttttgtctctctaaaacgacctgtgcatgtttccccttctcgccaaatgtttttcgttggccccgctttcactatcatctttttgtataactttgtgttctagctatcctttgccctgtttccggaaagtccaaaccgttccaattcaaatttctgtaaaattcgtcacaaaaaagttgctgcaaattttctacaaagttcagaaaatccacttttcagtcaactcccctatgttgggccaaccttcttatcttgatccatccagtgtgagccgctaactagaagggcccactcagcctatccatcttggaataagttcatctgacgcccctcaattgtacgccaagtctatctaagccgtaataccagaaatgtgtacccctgaagtatgtaaaaccgtccaaataaaatctcggggttgtggagcgccggcgacggcagcggcggatgagcggagtcgtcagcgcctgcctctccccatccggagccacgacagacacgttgcccacggcgttggggatgaagctcctccaagtttacgtacctgatcgatggagcacacgttgtcatcagctactctagttcagttttaattttgttcatcactttcttgtactgcctcatctcattcggactagagctagctttgatctaatctagggccccgtttggcacagctccagctcccaactccaacttacctaaagccggaggtgtgccaaacggttcagatcctttattttatagagcggagttggcagagctactccacaaatttgtactacgggggtggagctaggtttttgttgctccacagctccactccactccaaaagacccactaccctttaaaattttagtgtatttacatgaaaatgccactgaactacctgtaccaacctccccctcccgttctctctccttctccgtctccctcccgagccctaatagatgcagtaggcggcattggcgtcggcgtcaggcggcggcgttggcggcagctgtggtgggcggcggcaccgtcggcggcggcgtcgtcggcggtggcgatggcaggcgccacggcggcggggcgcggcaagcacgcgggaggaagatgggcggcacgaggccggcggcgggtggcgcgtgcggcgacgacgcgcaaccgacgggggacggcgcgcgcggccaccgggatgtgcactaccgaggcgacgaagctcggcgggcggagggcggcgcgcggccggcggagggcagggggaggtgggcgggcggcggagtgcggggggaggtgggcggcgcgcgcaggggacggggacggccggcggagggcagcgcgcgcaagggatggggacggccggcggctgggatttttgtttttttttctttttcttttttttttgcagatctggagctaaaatatagccaaacacttttgatgagtgtccaactctaactggagctagctcccactagagtaggagtttggagttaggagttggagtatggagccctaccaaacggggcctagagtagcgagcagcaagtgtctgttgcgacgtcccgatagatccggccaaatcttaattgctgttcattggtcagatttgacaattaagctgcggatggggggaggcgggtgctgacgacttccgctcgcctgctgccacgcccccagcacccctcgcccatctgctccgcgtgggagccgccgccgacgaggccgagcggtgcggagtcggcgccagcctctcatgtcaggaacccacactctaacctcaataggtagtatccaatacaaaacattggtgaatcggtgtgtaattgatggtggagaaattatagaatacaaactgaatagaaggttatagtagtttctagacaagtagagaaagaggaagggtagagaagaagatcaagaagggtgccaagcccggccacccaagtagccgccgccgtcgtggccgaagccgcctttgccgattccaaatgtttgatgcctccaagtgcttgctgttgctgctcatatatatatgctgctagttgtgcttgtttgggccaggattgaaacatgactaacttagcccatctgcagcccaactgtgttcctaacaatcccctctccttaatattcgacttgtcctcgagtcgatgcaaattattgccagtgccaccaggatcccaatgtgtctgaagttcttgcatataattagcaaccctctaaacaacaagtgattgtagattattaccagcaacacttcttaatttcatcttctggttatgatccatcaaccaatgcaccaaaagttctacctcccccaatgtgtcattatctttacctggatcgaatacaagtataaagatattccaatgaaccaccagcttattagtctcaattttcttctttgttgactctagtatcattgtcctttcgtcataaaccatggccttgatagacaacttaacagccacccttcccattgcattcttaatcaagctgagcttaggtacaactagattgacaagtatcagacctacttaatggttcatgacatgcaaagccctcatttccctcattattatagtagcccagtgtagccagtgaggcaattgactgctaaaatttcttccatgaaaatcaaatatctagccaacttcaatataacatgttggcactctgacttctttcaatcaataagcccaataaagagaacaacggacatgttgacagcccatgcattctataccttctttatcatgtagaccaagaattttccaattgaaatcaacatcttccaatcttattttgtccttcagcccagcaacccatttctcttctataggggagatcctagtgatgagtgtcctttgatttgtctctagcagtagcttttgttgtgccacaatggaaggtgtctttgttgagataaactgtggccatttcatacatattaaatactgaaggacatcgtaaattccaaggtggacaatagcatgaattgcacgactcaagttcagcacacatagcgcagtgactaagattgatccatctgcagttgatacaatccaaattgttctccataaatttgcacttcgtccttgattcactaggatgtgtgtgatttcagtttcatggggtgggggccaagggttcagctcagcccaatgcaagtccatagccctcatctcagtaggaagtactttgataattcgaaattgcaattcaaggcaacttactttagttggtggcggccgaggtgcctttagttctacaaaaatctgtaatgcacccagatttccagaactagccagaacttcaagatcagcattaagacttctaaacaagcactgacaccatataacaggcggtggccatggcaatggcttcactagcatgggcaattgaccatatctaaatgcatgccatattagaagattcagcacacctttgtttcatcggcttactagtgaatcagcccgctgttttagctccaccttggcacacagatcatgaagggtatcttctgtttcctcctcaacctgagtcatgtcgccttcggcttcctcggtctcaatcgaaggcaatgttgttgccctagcagctgagataattgagggcgcgaacaaacttgtggtacccgggaacacacgttctggtttagtaggagtgccattgagcactgccttggtggtagcgtancttggtcccggcgtcgaacactgggtgggcactaaagtaggcaaggtcgaaggtggtggttgccctgatgctggcagaggactcctcttctctcttcacaaaggcctcactcctttcttccttacaccaaacattgtagtaaccgatcaagtttatcatcaaatctgcgctgggattccatcagctcaaagtcctctagtaaccaatggattgcctcatccctggttaacatctcctcgttcatgacgtgaagaacatctccctcggacaccccatatcggctagacatttcattgaacaggtgatgggcactgctctgatgaacatcttccctaccaaaattttcctccctcttgcaatgctgagtgatacaagtgctccccaaacgcctccatactgtgaatcccacggatcgtgaggctctgataccaaattgtcagaaacccacactctaacctcagtaggtagtatccaatacaaaacaatggtagatcggtgtggaattgatggtggagaaattatggaatacaaacggaatagaaggttatagtagtttctagacaggtagagaaagaggaagggtagagaagatcaacaagggtgccaagcccggccacccaagtcgctgccatcaccgattccaaatgtttgatgcttccaagtgcttccagttgctgctcatatatgctgctagttgtgcttgtttgggccaggattgaaacatgactaacttagcccatctgcagcccaactgtgttccaccgctgccgctccccctctgcaggaagaacgaaagaagaagggaaaaaagaaatgagaagaaagaaaagagaaaggaaaaaaaatgatgctaacatatgggccccacatttcttccttctcacgtacatgtgggtcccacatatttatttttttattttttgctgactaggatgccatgtcagcgaaactatgcatctatactgtcatcgtacttttttttggacaattttatatagcacaggggtacacatttatggtattgcggttaggggacctcacacacactcatcatacaactgagggacgtgaagtgaacttattccatccatcttcctcatcgcgggccagtcacccagtaattaactcctatggcccagacagcatggaaacgctaatgcgcgcggctcatcacgcgattaatttccttacgagttcgtgtatatataattgtatatgtatatgcaaatgtttatacgcatatgttataatatatacgtacataatttatatacgcaggggcagaattaagcatgggacagttaggcgcgcttgagctccattaaatcctaactccatgattcccattgattatagtcgtgtttagatccagggtgaaaagttttggcgtgtcacatcagatatacatacacatttaaagtattaatcgtagtataataacaaaacaaattatagaatccgtctgtaatctacgagaagaatttgttaagcctaattaatccgttattagcaaatgtttactgtaacactacattgtcaaatcatgaagcaattaaacttaatagattcgtctcgcaatttacacgcaatctgtgtaatcaattttttcgtttatatttaattccctatgcatgtgtctgaacatatgatgtgacaaggtgaaaaattttaccagataatctaaacatgcccataggctgtgttcttaccccaagtttcccaactcatctccctcgttttccacgtgcacacttttcaaactgttaaacggtgcgttttttgtaaaagtttctatgcgaaagttgcttaaaaattcatattgatccatttttgaaaaaaaaaactaatacttaattaatcacgcgctaatggaccattccgttttccgtgcgcactatttcggttgggaacatgctggagcgaacagagcctatagtcttgaaaagtaccacaatttttaaaactacttgagatcccattaattcagccctatgtatgtatgtagtttttttttctccgccagtatatgctatgcaatgaacttatttttggatggactttgcacaccacagcgtgtttgtaacccagcaaccgccaattattagatagacataggcaagagttgagtacagattcagaaacacttatttacaaaacatcatgcacctatcatcattacatatgtactctactacagaagctaattaaatgacctgtaaatatctgaaagaggaatgaaatgaaataatacaccataagatattcctggtactacaaacatgtggatatatagtactagaaagtgtcttattctatactatgttctatactaggttgcacagattaagtaaactatatcaagcatatgcataatatacgacctatctaaacattacaaaatgtacagtacgggaagatactattcccttttttctgaatgtttgacgctgttgatttttttaaacacgtttgaccattcgtcttattgaaaaatttatgtgaaatatgtaaaactatatattaacgtaaaagtatatttaacaatgaatcaaatgataagaaaatgataaataattactgaataagacgaacagtcaaatatgtttaaaaaaatcaacggcgtcaaatatttagggacggagggagtacaaattaatactcatggcgccgtgggtataaaatgacaatcacgctaagaacctttgctggcagctgagtgtcctcgccatcgtcttcgccgcccggagctggtcgtggcacgtcgccgccgccgacgtcgacgccgtcgtccgccggttgaagctcctcctggcgatgtccctcatggagccggcgagggacagcttcgggttcagcctcgtcgtcgagttgaagtccctgcacacctccatgtgccaccgcagcgccgcctccacgccgccgccgccgccgccgccgcgcatccgctcgcgcacggcctccgcgcagaggccgcacacccagtctccgtagtgcgccgcccggatgtggcggatgtaggccgccgtgcactcctccgtcacgctgcagcacgcgcaccgcaccgtcgtctccacgtccgagccgctgccgccgccgccgccgccggaggcaccgccggaggaagccactgccactactccggcgccggcgacgagatgatccgccgctctggtggtgttcgagtattccgagtacgatcgccgcagctcagtttgatccttgttctgaaatagagacacagatttgcatcaatatttcaccatctttcatatacttcaaatttattgtttcttgaataagaaatactctaaatatatatattagcttaactttataaatttcatgtagctttgcatatatatttatttttaaaattttaaaagattgacttcatattaactctgacaaatttttacaagacgcaaaacaagttggtactaattatagtgtgacgactataccttggacagcagcaggaagcaatttgttggttccaagcttgtgtttactgccatgatctgcatgcctgtctctgatctctctcgtgtcaattaagctaaatttcgatatgattttggacacccaactggctaattaatcaaagcagctaccactacatatgcctactgcatcaagtactgatccaatttataggcatatctaaaggtgcatggtaagtactgcaacttggatgtcgctctgcaaccgaacgaaaatgacagatttaagtgcagattagggcttgttgcaacttgttctctgaaagacaaacgtgtgtgtgagtgacagttagagagagtgtgagatcgaaacgcacttaattactcgagaggcattcagacatatatccatgaatttaattaggtttgctcgatcttgtgacggttagaccgttacatgtcctgttcaatcaggatcgatcaatgatgatcttttcgtgcaaaatcattgcatgatgtgaactccaacttaaacctcctacactgcattcgggacagtacatatattggtttacttaaacgtcataggatcgctgagaaattaggcacgccacgtcatatgttttttcaaaaaaaacccgtcatattttgtgaaataacacacacacccaaattcgcgtgtgccatccgatctcggtgaggcagggatccaactgtacacgtgtcccagcgtggcggctgtttcatcaccgtaggatcggggagacagaaatgaacggctcagatctcctcaaccgatgctcccacataaaccctagctagcgtcgctcctcccttcccctcgcgcgacctggcggcggatgcgccgtcctgttgcgctacctccgtccctcccggtgcgcctgctccaccgtccctcctcccctcccggtgcaccgcttccgctgctccccctcccctccacgctgtgcttccttccttcctcctctgcacctcttcttttccatcgttcaaagtcagcgagtcatggtggaatcgatacgacctgatggtgtttgtcctgcatcccagcccttgcctcggcatggatttgggccttgctgccgccgcaagttgcatgcattcgattcaaaaaaaaaaagttgccagcgttgattcattaccagcatgagggcctgtgctgcgctggtttactgctccttcgtcatcatcgtccaaagcaccatcagcgactaggtaggcagcctaatttcctcccattcaatttatctttggctaatagactcctgtgtgtcttggttgtaagaagaggaataaataattggggtgtcgccagtaaaattattagaagcaaatctaagttcattctcaaaatacatttgttcctgcaactttgttaattataatgtcctatatatttcttttatgtcagttaacttcagcgtagataacttctcactaataatgacagaatattgtcagggatgtacaggttaaagattcttacatggtccttagcttcataatgaaatcctgatgtacatcggttcatgtacatgccaattttttctggaatcctaacaaatttggtctacaagaacatatgcttcgaaaaaattctgattttttgttattctcagttacactgattcaagattgtagatatgagtatatggcatggtactacatggcagttatggtttactttcccaagatatgcacttcataacatacaaagttattggagagtacaagttttgatgttcttggctccgctgcccttttcctgtaggagtagatgctaatgagtgaattgtgtagtaatgtcaatattccttcattgtttaccagggagtaacatttggtgaatatgtcagcgagttttcttgcagcaatggaactttcctgaagccacctttctgtgcttctgtttggaggtatgaatgttttcttattgtcttctcttggtgatatatgtggccttcagatttcttatcacatatttttagtttttgtttcatgatagcatataatgtttatactatgagtaggttttgcctcaatttccttcccaatgcaacaaatcatattttatttttgaatttgttgagctcgatatttttacacacagtagaaataaacatgcattgatgatatcctttgtagacaatattatattggtaatagtgatgcatacatcataaaaaattatctgtagacctggcaacttggcatatgacccctaaatttggatcgtgcagttctttttctaagacacaaaccaaaaggtctttaggactcagtatagactgatgattgtgccaatactaaggtaatgatatgatttcatggcgcaagtcttttatcctcatatctggagactccattattctacgagtcatatcttaatgtataaagtgggctgatgttggctctataagtcaagacagtaatcacaaagtatgttgcacatctagcagaaaaaatctctctccgttgaagatttcagtattggtaagaaatttactaaaccacagtaactacatttttaaatcagttcaggctctattgtaacaagctaacaccttttcttccactataaccatttctaagctactaatattgaatatttaatggaacattaattccatagattagcgttgtttgcagggtgtttcaacgacactctactatttacccgaaaggattaaagccataggtacttctaagttctaacctacatagtaccatcctcgcttgatttgttagtccatacagaatgacaatacatatgtgccaccccaaaggtccaagcctccatatctctagctatgtgtactcttttcttctttgatcataaatttttattttaatttattggtgtgataaagctatatgcacttcaaacaattttagatgagacatgccatatgttctaataaggacgcagtgggatgttatttctatacaaacattattcctgcttttgttttttccagctctgtatggtgttggaattttctaatgacccatccttcaagattgattatttgttttgaaaatattcttatagagttgacttcaagatatgatttcattaatctttttttatttaattgattaaatgttctgtttgcccccttctaggaagacagatatttcaatatggtttctttgatgagtgttttgttctacctgccatatatactcatcacgtagcaatatatggatgacatccaagcatgcctgcccttagacatgattatgtaggggctaccttagtattcagtggcactatgcaaaggaggtatcacttcctgtactaaactgttgcaagtacgtaatgtgatgcattgttgtttttacagaactaagcactaaaattttatttgcggtgaagtgctatatatatatgtgaaagattcaattagttaatgatgaagatctctatgataaaaaagttgaaattctctgatcacctaataatttccttttgtcacactgtttcttctctaatctataccctcacattatgtaagcaccattgtcctctgtgattgttatttttctgtaaatgagcatgtttgtacaaacaattatctgagcaaacggattatattcatatttaaatcttggtgatatatagttgtaatgtgtattcatatgtaagtatgcttctgacataatgcttttttagataatgtttggatatataatgcttaaaagttgcaactatatacacgttgttttgattatgatatcacagcttcaaacatt

SEQ ID NO: 20081 - DNA, 1069 bp, Oryza sativa
tgtcctccaactgtcatcaggaagtaatcaggagcgtacacgtgtaaaaatggtgatcaactatgccagaacgggatcggctggactggtggttcggccgaaccaaaaaaccctcctcccggccctcctttggtcgggaggttgcttaatgggcccgcaacatcatgtactattttttggaccaattctaagtggctttggttgatgtatgggccccctaatctgtgtaaacacgtcttgattgtccagaggtgtattttgttgcataacgggtgtgttttctccttaaagtacctgcatacacatatttcaccaatactagtggaaatgattagtaataaaccctagtactaagttggataccatattttatttcattataagcaagtattgacagtcagatattatgatttgaggaccgtcagcaaccatcttctttgtcggagattcaggtctggctgggtgaagatgtacttcaagctcttgtggtcggtgtaaacttcgcaccggttcccgatgagataatgctgccatattttcagagcatgcaatatggcggccaattcgaggttgtgggtggggtagttgccatcgtgcagtcgcagttgtcgcgaggcgtaggccaccacatgcctttcctgcattaggacgcaacccaaaccctgacgggacgcgtcgcaataaacctgaaagtctttgttaacatctagcagaacgaagaccggggaagatgccagcttcgttttgagcaattgaaatgccttctcacatcccagtcaaaaaaaatgccttctcacattgcagggtccacatgaatttttcttcctttttcaacaactgggtcatgggccaagcgatctttaagaaattttcgatgaaccggcggtaaaaccctgccagcccaaggatactatggatctgcgtgatgggctgcctccacttggtgactgcttcgaccgtggcggggtccactgccactccttgtggaaagataacgtggtccaaaaacttcacttttgacaaccaaaactcacatttactgaactctgcatacaactgatgttccctg

SEQ ID NO: 20082 - DNA, 4639 bp, Oryza sativa
ttcctgcagcccattaattggtcatcccaaagaatatcattgtgcattcatacaaaccttatcgggtggtgaaggctgtcttggggatatcttcctcgcgaattcgtagctggtgatacccggatcgtaggtcgatcttggagaaacactgtggcacccttcaattgatcaaacaggtcatagatgcggggtagcgagtacttgttcttgatggtgacctcgttgagagcacggtagtcgacacacatgcgcttggtcttgtccttcttctcgacgaacacattgtttagtagtttgggaaacgtgcgtatgaaaaatatagataatagaactcagccgagtatagaacttagcacacctgtaaatgtggtcaagcactatagtctaataagcactacatttttttaaagaagtttatataaaaaaatatatatgagctatatatcttttcttttggtatccctccgtttcaaaatgtagcaacttaggatgttgttagacccatcctaaattactatatgttgaaatgaagatcgcagtttctttcctaaattcatatatgtgttacgtggtccttttcttaataacagacttatccatcttcgcttgtaagaacctagctataaccagttattatagagtttacaggttgaacgactgtgaattacaaaatcataacttaattaaaaacaataaaactacttaaataccagcctaaagacaaagataacacctattgctaaatttctatatatctatggttggcaaaaatctgcacagtggctagcgagttgtgcatagtagtccttgtatttctcaaatcagcagctgatcattgtgccgatcaaatttcgcgttcgtcaccattaatgactagtgccgaactaaagcggcagataacgtcggacggtaactgagttataaatcaaccgttcacatagatcttgctagcaccacggccatcgaagctgattcattggggacatcttgcaccctgccgtcgtggaccgtggcgaggtagcgtcttacattttcaacatatgtctatctaataagctatcctaagcttaattcaagtttaatcgtaacagtgaaaattgtgatcttgcacacacttcagtattccattttattatttgcataatttagttttccattgtgcaattaaaacgagaggcggatctatccattgggtagggtgggacacccccccccccagcctctctcctcctcgtcctcctcatagtagtgatgggccatcaaaattaggtatagcaagttgtgaaaatccaacatatcatcccgcatcaagcatcaacgtagctagtgttggtctgcctcttcacaacacatgcacgcacgccacataggggtggacattcggtctaaccgaaaaattcggttcggtttctcggtctttttgaaaattcggtctttgtaatctcaagaccgatcggtctccaacaaatcttaggactgagcaaatcggtcttcggttagttcggttcggtctcggtcatagaccgaactaacagcaaaaacaaagcaaatcaacaaaactatatgtaaaaacagcaaaagcaaagcaaatcaacaattagtggaggcggcgcccggcggtggagccggcgtagggccggctgggggtggcaccaggcggtggaggcgaaggagtgccggctagaggcggcacccggcggtggaggtggcggtgtgccggctggagacggcgcccggcggtggaggcggcgcaccgactggaggcggaagcggcgcccggcgatggagcgaaggaggacgcggatgggatggagacgggagtcgggacggcgccgctccaggatggatggggatgaaatgatgcgtcgatgcctgtgacgcacctgcccctagggtttttattagtgggcttattgggccaactagatctattgggcctaattcggttatttcggtcaaatcggttaattgaggcccatgaccgaataaaccgaacatatttcggtcttttagtagttgagaccgaattacagaccgaatttttcggtctcggttttttcggttcggtcttattctgcccacccctaacgccagaaacaatgatcgaggcagtgattattcttcgtctttgcttcttcgcgtctttgcccgatcatgggatggcatgaagttgatgaactggtgcttttgtaggccaccaatataatttcatgtaagagccaagttttgggtttgaattaaaaagagaagaaaatactgaaaacgagctcaacacaacaccatgccttgccctgttctttctgttttcggttaatttcttcagtttactgtttacgtctgaaaagaaaagagtcagaacgagcaaattcagagagcgtgagttcagagttcgaagtgattcctgaaaaaaccgcagctaacgaaacagcacttatatgtatacacaagatattatcaccaatatttcatatataaacataggaagggtatgaagtattttaatttcacaggttgaaccaatacttaggtacatcaccttgatagtgccaagcctgaattatgggataaagttaattattcatgcatacaagagttcacacataaaagttctactgacacagtgtaatatctaactgatcagtctccttgaagaaggcacatgcatgattgagatagttgcatgatacggatccatatttatctttcatctgcaagtgcaaggaatgtaaacagtaaaacaaaattagttacgcgttgcatctgaacgtacttgcacaaacttgtctcgaccacattatttgtctataacttatgcctccgaattccttctataatttgatgcaagggaaatttgagttataattcttatggttgcaagcaaatccaaacaatacctagaatgtgagataagccctacacatttctgaccctgcaatataatcctcccaagaaaactcttcattattttttatttttttattttgaaaaacttgatgtctctaactacgactcagatgcttacaatgagaaggtaatgaacattcaaatttcatttgttgaactatgaactctgactatgttacactgagaatattttttacctgacataaaggcctttcggtcctcctgttcaggataatactgaggctgatgcatgatgttgaattgcaggaagtttcttggatcataatggatcatattttgcacgtactcgctcgtagatgctgaacccatcatgttcactgtttgcagtcctctttcactctcagcaaccttcacaataataattataattaattagtatgatgacgtagaatttcagtcaattaggtatgatttgctatatatgtaggttatttcagtaacttcaattcagatttaccatgtagctaggttaatctctttttgaaagcgaatctcattcttttttttttgcaatgtagaacagaatacttactttgctctttaagtacatgttgtcattctgcagctccgtttcctgaaaagattatactcgtgctgttatcttatgatgtcaattaactagaccaaataattttgcaagaaagaaaacagtggtattttgctgatagtatttacccttctctgcatatactcaatttcagcacacagcaattcgttctgcaggatatggaatgcttatcaaattagatgaattaattaacaatatgcccttttcaacttggaattctatgtaaatgtagcacacaattaatataccttccgtgctctaatctttcctaggcctttgtccagtctgccttccagctgcttaagttctctgtggttcatggtggtgatattatcacctactagggtcctaattcattaattaatggagaatttagttataaccagatgaactactttgtcaagttgaaaaaaattctaagcagctgagtgaaataatgaacctgttggagttctgcaggttggtgatctgttgcttcagcttagcagcttcctgctggtagtgctgcaagtttgtaatttgattttttttttagtactggtagttaaaatcatgacaagttgtgtcagtttgctaactggaatgtttgactcttcatgtttattttgttcaaatgtgcatcatcaaatcataccatattaaactgtgtaatcaacctgcatgcatgcatatgcatgaatgaatgacaaaagtgccaaaaacatgcagtgagccatttcaattttcaagcatggaatcatgaagaactttgtccagtggacaaacacagataggagtatgtctgttggtcaaaactatatactactactatatatatagcatcactggaatttccattgtgtaaagcactgtagcttctattcaggatgtccaatctgaagattttggtcagagaactcattttttacagcatagaaaccattggttaattacaaggaatgttgcattgttgctgaatgataaaagctccagagaaaactactgcatgctgcatttgtactgacagatgatttttttttgtttgagaattcagatgatgttacctgggcattgatctctgcaactgtactggcgttggaggtgtcactgttggctttcttgtacctctcaatagtttccttcacgctgcatttgtgcatagtagca

SEQ ID NO: 20083 - DNA, 3881 bp, Oryza sativa
attttattaaagtactttttatgactaatctatacatatagtcatcatatttaacagaaaaatattttaaaaatgatttataatcaaatattctaaagtttgacttcacccttatctaaaatgacataagtcccgtgagagtagctagataaccacacaacggcaatcacgtgtgcgatagggaaatcacttttagtttgacatgcatgctgttcaagttagggggtgaatgacttgacataacagaatttaagtctcgattgattggcgccttacacacgtgtgggtgcactttaggagtttaattaagcagtaaaaattaaacttagagtgagctcacagatattactggtctccatttcatgagtatgcgtgattctgataaacatgtaggggctcctttggatggaggaattatatactattaaaatgctacatacatagattttttttcttttctatttggttatttggaagaaaagattgggctttcaaaatccgatgaaattgattcggaatgcctcatttcataaagattttaagaaaagtcaacatgagttctaacatcttgaatatgtttctatgtctatctctcaaatccaaatttatatattttaatttctttcagtctatccaaatcgttattcacagtggcaaagctatattatctttggggggggggggggggggcacctattcatatatttttttcatgtattttacaattatccattttacgtgcacatttctataaaatttctctcttttcactgggtatatattaactgttttccattcctgcattcggaagtcggaagaaagctgtagtgtgtgtatcttctctaatcggaaaaaggctacacatatgcgccgtgcgccgccggaagtagcacgcaaataacccgtgcataggagcaaaagaaggtggacgttgagttttagctagctggggaccatgctattcctaggacggaaattaaaaggcgatttttgtgtatgtgacggcacaagtgattcactaatccgtttcaccttttaattaaatcgcaaagcagagagcaattagagatccacaccatccataacccgtgatcgccgcctatgcatactgatgatgccatcttgatgtccaaaagtcacatcatcacccactagcaatagcaatagttatatatttaacctcatgcatacatacaacatcgtctacaatttatttaattctataaatcaacatacaattatatctaatcatcacctctcatatcatttgtataatattttaacaaatctattgattatttttataatatgttccacattaaagcgtgtgctttgttttatagtaagtattgataaacccacacatttcattattttttttttgtttttaccctaactcgatggtcgaaaatatatattaaatattacttagtaattcctgcagcaaagcatgaggaatcacctagtgtatagaaaccgcataccccagtaccttacagattatcatcgtattcatgtacaattttttttaaagaaaagtgttcattggtatttcacataaaactttttaaaatcaatttaccgattttctaaaaataattcttttgtgccctcaaataatgtcatatataaactcggtttaataaatccatcatgaaaaatctgttgacaacgcaccaaagcgtattctccattttagtttacttttcccttttgaccacgattcgaaacatgatcgtttgagtctcaaatactacatcattttgtattatttcttatttgccaacatttatcactttcttttcatacttcctcacttgttaaatagataaaaatttaaaatatgcacaaaaatatcactaagaatatttttatgttaatattaaatgtgtaattagaaaaaaaacaatggtaaacatagtgatcataactcaactgattaggttacttattatggagcctactcacctgattgcaggtcctaagacttagcacgagtgctcgtatttgtagttaattattcttttagtagtaaaccatgtatccatcgatagcggcgtcattaatctcaaaatatactggtctaatcttcagaggtaattataatgtatgatacatgtgtgtacatttatagagataagtatataagcatagtagtatgagcttttttttagaaaaaaggaaaacaatgatattatatgaaaagggtataaattacatgcccataaattcattgtgatttggttaggaaaggctggtgcggttgaaaacttcaattctagcccattcgcgatgttggccgctaggtcgattaggttgaaactccggattgatctattgtttgtcatggttatattttacaagatcgcagaaaccaagatttataagaccgtgtggttatcgcggttatcacgtgtggtaaccttttcagtttttaaaaccatggtatatctcgcgataaccgcgtagttatcgcggtaaccaccgctactacggaattctaaataggtaccagcctaaagatacaggtttaaagcaaaactggcacctattatcaattattaagtgcgggttagagacaaaaccggcaccaatactttaggttctggttattaacaaaaaaagaggcatctatagttcattcggccactacgggacaaacctatatgtaccggtttaatttaaaaaccagcacccatatatacttaggaccagtacctatgctattaggcattggtaccgctaaattagatctgactaggaaaccgattagagtttatgcagtagtgagccaaactgatgggtgacggtgtaaccccaccaccatacaatttgttaaaccctccgagcacgacaacctgcttgtggcaaacaccacgatgaatccggagctgccttgcgctggactcggctgttgggtactttggttcgctggtggttaggggtggatgccgagccagctcggctcggcttgactcgctctagctcgtttagtcgtttagacggctcgttatctaaacttttgaattatgatctaaattcatttgcacttaataaaagccagcttctgctgtagtggtgcagaggcccgtcaccgatgtagaatacatgtctagagttccatattctagtgctgttggttttttgatgtatgtcatggtttgctcccgtccaaatttatctcatgctatgtgtttggttagtagatacatggctaatcctggtaaagaacattggaaagctgttcagtggattttcgggtatcttagaggcacagctaatgcttacttgaagtttgacaggactgataaggggcttgttagatatgtggattcagattttgctgcagatttggataagagaaggtccactgcaacaggaacccccctctagcaatacatacttggcaacacattaagcatgcgttgccaaaatgcgagcctaacaacgcttattagtgggtgagcctaatttgcaatagataatatgtgttgtagaacatgtgttgcagagattgagtatcttgcaatgcctgagtccactttacaatagataacattcgttgcaatggtctcaatgccctgtaaaaacttttggactaagcaaacttattgtttatttttataaaataattgaaagagatattcttttttttacatttcggacatctagcgagctggtttttttttaagaaatcatcaagtgagttggttttttgccatgtaaaaacttttggactaaagcaagctttctttaaaaataataataattgagcgagctgtttatttacattgtgtactgggcgagctgttttttttaaaaaaaaaatcaagcgagtttatctttttttttaaaaaaacgaatcggcctgtgttaatcga

SEQ ID NO: 20084 - DNA, 1175 bp, Oryza sativa
ttcctgatggctgttctcaaatatatccaaatgtgtaaactgtgccgaaggaaaaattcatgggctcaagacacatgattgccatgttctaatgcaacaatttatgccaattgctttgaggggtattcttcccgatgatgtcacatccgtcttgtttgacttatctgcttacttttgaggaatatgttcaaaagttcttcatgttgatgagcttgaccgtttggaagaagcaattaaaatcacattatgcagaatggaaatgatatttcctcctggattcttcacggttatggtttacttggtcgtccatttagctactgaatgtaagattgctgggccagtttgctatcgatggatgtactttattgaaaggtactttattaaatatattagtatacaatttataatatttgtcatatgtcatatgatatagtcgtaacttattaattttgtgtcttgtatatatattacaagtacttgggtaaattgaagtcgtatgttcgcaacaaagcgcgtccagaaggttcaattgtagaatcatatttggcagctgagtgtatggcattttgttcacgatatttggaaggtttccctaccaagcataacctaccatcaaggaataatgacaaaccagatcagtttgagactcccatgagtaggcaagaatccactttgtttcctccagtaggaaaaccattgggaaaaccatcggtgtactccttaactgatagagaaaaattgcaagcccatagatatgtgctatacaactgtgatgctgtagtaccatatctaaagtacgtattcttttatatgtggcataaagtgttttgcttagccttttatgtttatttgttttgcagagaacatgttgctgatttaaaaaggaataagcgcaaaaggttaactccaaaaaacattgaggacatgcaaaatgaacaatttcctaattggttcagagatcatgtaagtatcaaaatttagatttttcttttcaaatatgagtaaaactaatgcatcttttggtgttgtgtagatcttgcagttggagaatcaaagaggtatcgatagcattgatgaggatattagatggttggcacgtggaccaattgaggtagcaaaacgacatagagcattcaatacccgtgggtacaggttcagatcaaagcgttatgaca

SEQ ID NO: 20085 - DNA, 20921 bp, Oryza sativa
tcctcacttggcgagctctttatttttatggtagtaattttggatggagatttactgggatcaaggcttcttcaccacaatagctttactgtgtcattagcagatttccttggattgtccaagtgattgagccagatggatgcattttttttatttgcatatatgctttgtgtaataatgttctacattagttatatacagaattggtggttagatcttatttttcaatatataagatatcatattgtttatatgatgataaaatggaatggccgactataatttttgcatctatctgtgttgtgttattctatttccatcttatacaaatacctggagaaaactatttacattgtcaatggcacctaacgtgaataaataaataaaacagacttctccaacgtgaagtggacatagcctagtggtacttggctgcttctactgaattgaagactccagttcaaatactagcaaatgcatatatttttttcatttcttctctagtgacgatttttcatttcttctctattggcgattcctaaaactttttaaattctgtcggctcagattttttaaaatttcttgaacttttttatttctaaattttaaaataaaccatccaaaaatatatttttagaatatgtggtttttcgctcgtcctaacataatttaaataactattaagaaaaaaaatatgttacgtccaaatttcacgcggtctatccgaatcaggtcgacaacgaaataacacgtggctaagacaaaatatgttacatctggatttaatctgcggtgtccggaccacaagtgttttttcggtagtgctagcataatttaaataactataattttaagacaaaattatttatgtccggaatttattcggtctgtccggaccgggtcgacaatgaaaaaacaagttattgtttggtagtggtaacataatttaaataactataattttaagacaaaaattatgttacgtccggaatttatccggtctgtccggaccgggtcgacaatgaaaaaacaagtgattgtttggtagtgctaacataatttaaataactataattttaaggcaaaaattatgttacgtccggaatttattcggtctgtccggaccgggtcgataatgaaaaaacaagtgattgtttggtagtgctaacataatttaaataactataattttaagacaaaaattatgttacgtccggaatttatccggtctgtccagaccgggtcgacaatgaaaaaacaaaaattatgttacgtccggaatttatccggtctgtccagaccgggtcgacaatgaaaaaacaggtgattgttttgtcgtgctaacataatttaaataactatatttttaagacaaaaaatatattacgtctgtttttcatgtggtatgtccggaccgggtcgatgatgaaaaaacgcatagtttttcggtcgtgctaagataaattaaataacgattattttaggacaaaaaattgttacgtcttgatttcatccggtctgtccggaccagattgacaaaaaaatacgttttttcggttgtgctaagataaattgaataactactattttaagacaaaaatatgttctgggccgagtcaacaatgtaaaatcaagtggttttttttttgtcgtactaggataaattaactaactacttttttattaagacaacaatatgttacgtctggatttcatccagtctgtctagaccgggtcgacaatgaaaaagcacgtgatttttcggtcgtgctaagataaaataactaactactattttaagaaaacaatatgttacttccggattttatccggtctctcaggaccgagtcagcaatgacgcggtttgtactactagaaaataatttttactagtgcatttatgaagttttataactacttcttattgatccgcacaaaaataaattagctgaactagattagataactggaggttaaatctgccctgaaaaaatcgagcttaaatttacttgatgtgaatttaacattttgtgtatttgcgcaaattattttgctctccctccattctttccctcttttttcagtcttattccaaatcattccctccaaaaaattgagcttaaatctacccagtctgaatttaacattatttttatctccgacaaaacgtttgctctcgctccgttctttccctcttttttttttcagtctcacgttattttccaaatctttccttcgaaaaaaaatgagcttaaattattttgctctccctccatttttttcggtctcaatatttttttttctcacgtctttcgttgtcgcgccatttattccctccattttatccctccaagaaaatctaattgcccgtgaaaaactctatcccctctctctccattctccaacaaagagatcgtgggtgggttttcttctccaacgaaactctatcccctctcttcttctctccgctccgcgtgtccactcctctcccaatctgtgttggctgccatcctatgcacctacctacacctccctgccgaccaacaaccctgagcaggcgagctcccccacggccgctgagggccacgcggcgacgcctcgtgcccggtggccgtgcactgcagcgctagtgcggttttgcctccccagcgcctacgtctacaccgcgccgcgcaccccacggccctgccgccatgctcctgcatctccgcctcccttcctagttcctacatgtttcactacttagctgtgttgccaaatcacactcgggcctaattccatttcagcactatactacattactaatttgatatatatgttctgtatgcaggttttggatcagatgcagtgatgaatcctaggtgacagagcctattaggctagaacagaccagtaagcaatccaatgtgtgatctttttatattcctctgtcctggatgttgcaatctagccgaataaaccacttttgcttttgatcgttcactgtccatctatgcattttatctccttgcgtcaaattaaattttgttctttctatcaattacttgtttcaaattgttggccaattaaaatggacaaaggaattagtgactggcaaataaatccaaattggaattggtaaatttattgttcaatttttaatgtgttgacacctctatttgaaaattgttcattagctaacagaggtatctaataacctgtaggctagcacctttctcatcaatacaaaccatagtggtacttttttggacaacagtagagtaaaatgcctaaagttttagccaattctgaaattattcttctagagcagtagagaaaagtggtactcaaactgcaatacataggtttatgctatttttgttttggtgcagcagatatggcaaggagtagaaggcggtgcattgttcaaagccatgaggaatatttgtcagaggaacacattgcagaagaaaatgcccctaaacagcttgccacaccatctgaacaagaaacaatatgtagtgatgttcaagagggtaatgaagatactaatgacgatgttggagaagccaatgaagatactgatgacgatgctagtatgaatgctggagaaggcaatgaagaatctgatgatgatgttgaaattaatgttcgaggtaaatactaaatcttgatggtaagaaataatgaaattattcttcttatccttgcaatttaacattgaacagatgaaaatggaacaattgaaacacgtgggaagacaaaactgaaagatatttggaaccttccgaaaaggcttaggattgtggttcagtgcaatgatctcaaccaggcagtaggagatgaagctggaattttgtctaaatttcttggaatggtagctaggaatggtactttgtgtagcttaagctacacagactggagatttctaataggaaagagagagagaaaaacaaaatccctagatgagtttctttgttggtatccagatgagattcctttatgctcctcggatggaagaattcatattaaaaacaattagagagagatggaggggacataaagcaaaactaaaagaaaagtattttgatgtgaataagagcaaagaagctaattgcaacaatgtcccagctgatgtgcttcctgaccagtggattgctcttatcaatcattggatgagcgagaaatcgaaggtatataggcattgcatattcactactgtgatgttcttacaaatgagactatcaattgaactaaacaatgttgtgctcatgtatatttgctaactcttatgatacgagaacagaaaataagcaagcagaacaaggaaaattgtcgaaagaagaaggcattacacacagcagggacaaatagttttgctcgtacaagagaagagatggtaaaacatgtcctggaatagcatttgtccaatttccattccaatcctatatagactgtgtaggatttaatgatttgttcacatgttccatagagacaaaaagatcctgcaaagaatcctcacagagctattgtgtacatccaaacacacaagcgcaaaactggcaagaatctaaatgggcatgtggtatactatcaaatctaaactatagataatttaagtttcaactttttttcatatgttctattcatattgttcctgtgtttaggataatttgaagaaacttgtagttgaacaaccagctttagcagacactagtgaaggaaggactgcttggaaaggagatgcattgaaccaaatacttggagatgacaagcctgggcatgtgcatggtcttggactagttccaaagcctaaacaagttctcgatgtgccaaattcctgacgcttaaagaatataaatgttactagactggatgataactggagtgaagatgttgtggctgctagactgcagttggaaaagatcgaaaatcatgtccagaatcatgatgctgagcttttggaattgaaagcgaagacaaacaagttggaaaaagaacaaatgaatcaggtgagaatttgaagaagttgtcctaaaatgtttgtaactcactgaatgtatctaacctacctagttggtgttacagggaggtttagatcgagtatctacaaacaaagaagctagtgttgatggccctatttcgaaaaggagggtatgtatctctatggaagattaccctatatagtttggaaaaaaatatggtctaaaactccttttcttttctactgttgacagagagtgtattctgaccatcccttgcaagaaatttgtattgctgaggaggaaaacgatatggttcaggaggaaaacaatatgatggtaatatactggaattgcactattgtaaagctaggaatagttgcactattttgtaattgagaatatatggtccctttcaaaacagaatatacagagccatgttccaaatgaggatttgcaaccaaaaaccaagcaatgtgttgaagacaaggtacttgtcttaccaactatattattattctgaacccaccatgattacttaacattatatgattttgtactgtttgtagctatggttgtttactatagttcataatcttatgcattttattttagaacaaacaaaattgggaacaacatgactatgggaaacaaaggaaggttatttctgcacaggttagttttcattttttttattgattgcaactcaccatgtttgtgctattttaatgcaacaattgatgaaacaatccatgtcttagagttttcgtaatgtttttttaccttcttctatagaaaaaaaaaactaacaaggaaaaccatgtgatgaatgcacgaaaagttgttgaagcatccaaggttattttttattcatcatgtctataaatttctgttttttacaaaatatagcatgtatgattgactagtagttttgattacattgcagaataaagaaagagaaaaaaaatgctcagagccatgttagactaggccaaaaccaaccaactgctgctcctaaggtttgtactgtttattctattatattttgcaagggattgactttgtgcacagatttatgttttgctttagcacttcaacatttattttgactgtatgcagttaagttgcagactcatgatcgaaacaattcttatttttacagaaaagacagtgcagcacaacaaactttatcgctgacaattcaatggaggtaaaccatattaaagttttactgtacagtgcttcataaatatatggtatgaatctccatttggtttctactattgttagagagtgtgtgttaacggtcccttgcaagaaaattctatggttgagcatcaaaacaatatgattgagcatgaaaacaatgctatagtaaagtataaaaattacactgtttttagctgggaatagttgcactattttctaactagtaatattgtctctctttcacatcaggacacaaatatccatgttcagaacaaggttttgcaactaccaaccaagcaatctactatatataaggtcattctcttcttatttgttatgtcgaactcactacatagcattatatgatctcgatattgtttgcaactgtcaacgtttattgtagctgttcattacaatcttatgtcttattttattacagagcaatcaaacttatggccaaaatcaccttgagaaacagaggaagattatttgtgtgaaggctagtcttcacttttttattgattggaactcacagtgtttaattataaaaataactagattattgtagtttgtgccaatattttgatattccatgcagaataaaggaaacatgaaccagaatgatcacatgcaacaagggaagaataattctaatgcttataaggtaaatttttacttctggagccacctaatataaagataagctatagaattctatttggtataatatgtttgtactttatagttaaattattgaatcttgatccaaataactttgtacataaacaacagtgcaacatagtgaacattatggatgccaattcattggagataaaacttttaatatgatgttcttttccatacttaattgctctttatgtagagataatgctcatggacatatatttatgcaccagattggaactaatgtattcttgaaaagctggaaaaatcgaaataagaatgtggctgttgcttcaattgtaagctgtgatccaacacgcaaagttgcaggtgttgagctaggaactgaatacttgatggtgcatgttcattttccattggcaaaatatgaagaattgatcaggccatacaaaggctacaaaattattagcaatgtcgtaaaacttgatattgcgtggccagcaatttttgtacggtgctatttctcaatttctttagatgtggtcttctttcttccaatgttgtatcaatggttgtttttttctgttacaggttgacaagataaatggatcatgatctggggcaatatggttactgcaaggtggacaactgtcatctaaagatcccttgtgaatatgatgatgactgtaatatggaagatggtggcaatgatagtggcaacttcagatgcatgtttttttttctatagtttagtttacatttgtgcatgatgttctgaacaaaatttaatgtcatgacttatgaggatgattttccatgtaatacaaaaaattctctttaattacaattagttttatgaatgacttggtttttctcatgtgtacatcatttgagtttatgtgcctctaacccaacaagataattgtgcaaaggcatgctggaatgaatagttgcctatattgcaatacttataagtgttggtgcaacttgattatagccgttgcaaggattatatagaattgttcatcaccgaaactaccaacgcatacaagtatggctgaaaactatttactttgttgctaactagcaacgtttattcttacatgttaccaacgattgtgtatgtgttgttattggtgctagcaacagcagcataggcaatgcatattaaatgcattgatagcgcatattaaatgcattgatacagaccctagcaatgcttattttcactttttgcaatacatatatgtattgctaaagggggttcctcttgtagtggtcactcacaggttatgtgtttaccattgatagttgtgctgtgagttggaaggcaacattgcagcctgttgttgtctaatctaccactgaagcagaatatatggctattgctgaagcatgtaaagagtcagtttggctgaaaggattatttgctgagctttgtggagttgatttttacattagcttattttgtgacagtcaaagtactatatgccccaccaaagatcagatgtttcatgaaaggacaaagcacatttatatcaagtaccattatgttcgcgatgtagtcgcgcaaggtaagctaaaagtatgcaagataagtactcatgataatcctgctgatatgatgacaaagcctattcccggtgctaagtttgagctttgctcaagcttagttggtatagtggtttagcccaagaggctatttggcgccgaaagtgttttatgtctttgttgtgttcaggatgaaggattgattcatgctacaagaaggaatttgtctcaaggtggagtttgttgagttgtgatacaaatttatttgcacttaataaaggccagcggagcccccgcgaaacggatcgttatcccttttagggttccaccatatatatacctcatgtaagccgctgtgtggcgatataaactccccagatatagtgaagatattttgctggctggcgcccgtggttttttctctcctgttttggaagggttttccacgttaaatctcatgtcttatataattgatatattgttttttatcgattgttcgcatatcatttccttaacataaacgaccagaaaacgcagctcggctcggctcggtcagtagctcgagctagctcgttttggctcgcgagctggagagggcaagatatcagacatcgagattagaagagctaggacaacgaaacgtgtgccgacgagcagcctgcagcggcgaggacaagcacgacggtcgacggcgaggcaggcaggtatcccgcagcagcgagttcgagtgcgacgaccgacgacgcaacaatctgcagaggcgaggtgacagcgcatgcgacggccagctggggcgacgccgcgacgactgacggtgctgcagccctcagcgcaaactggcagaggctcgcggcagagaggcggcgacggcgcaagcaccagggaccgagaaggaaggggcagcgcggcgtggctgcgaggtccgcgcgtgcaccatgtggcggcgctgggcgatgagcggcggcgctgctggcgcagatggattgtgcgcgatggtggcggactggcggcagataggcagagtgaagacgagagatcgagactcgagagaggcatatagggtttgtggtaagtagtagtactactggtactttccatgctctgatgggcctcgtggccttgtggcttgggattgttgttgcctgctgggttgtcaaatgtcaaagttcgtttcggctcgcgaccagctcacgagccagcttaacgagctaaaaggctagctcggctcattagaaaaataaaacgagccaagccgagcttgtaacgagtcgagcgaactaacgagtcacgatcttttatccatttctactggtggtcaccacccgctgggacgacgccgacgccaactgccctcctcggtacgtgttgtgcacacgtggctaccagccatagtgcaacttaggctgtgtttagttgctcccccaaaaaaaaattttgacgtatacggatgcacatttgaagtgttaaacatagactaataataaaacaaattacagattctgcctgtgaactacgagatgaatttattaagtctaattaatccatcattagcaaatatgtactgtagcaccatattgtcaaatcatggcgtaattaggctcagaagatttgtcaagcaatttacatgcagactgtgtaattggtttttttcgtccatatttaatgctccatacatgtgtctaaatgtgacggaatttttggaagtttgaagggaactaaacacagtcttaggccttgtttaggcatggtttagttcccaaatttttttcccaaaaacatcacatcaaatttttagacacatatatggagtattaaatatagattaaaaaactaattgcatagttatgggggaaatcgcgagatgaatcttttgagcataattagtccatgattagccataattgctacagtgacccatatgtgctaatgacggattaattaggctcaaaagattcgtctcgcagtttccaggcgagttatgaaattagttttttcatcagtatccaaaaatcccttccgatatccggtcaaatatcttatgcatgcgacacccagaaattttctttttatgaactaaacaggcccttagttcccaaaacagaaattttcacgctgtcacatcgaatgttttaaatgtagagaaaaaaccgattacatgtaaattgcgagacgaatcttttaagcctaattgtactataatttgataatgtagtgctacagtaaatatatgctaatgacgaattaattaggcttaataaattagtctcgcagtttcctgacggaatccataatttgttgggactacctaaaaaactgtcgagtgtttttaaggtgaaaactttcaaatctaactatagtgtataatttcactagaactatactataataataataacttatatatatgtattaaaataatatatacaactttatatctaatttatatagagataacaatatagttacaatgtaattatagtgtaactacaatgtaactagcatgtaactggaatgtaacttagatgtaacttaaataaatctaccataaacatgtgatgatgggactagcttgtgaaaagagggtttagatccgataacaaaatatctcagtacaaatcttagagcggaattgatggccaaaaaatttgacaattttcacagaagaaaactgtcgacagtcatctagcagttccgtaatttgttttgttattagactacgtttaatacttcaaatgtgtgtccgtatatccgatatgacatccaaaactaaatattttcccctactaaacgaggcttaattagatcgtgcggcgcaatcaagccgcctgtcgcgcagccctgctccacgcgctgccgcctgtgtgcgcatgcatatgcaggaaggctctgcacacgttcagccgtccgcaagtcgaacgcgacttgcccgctcctccgctgtgctcccatccgttctcccgacgcatcggacggacctgattcttccgcgatggggactgttcttctttctcctaagtcctacgtactcttctgacctgcattggatctttacctttttataccttggtcctcttccatgaaaataactgaagcaaagggatcacggacaattcagcgaggaattgaacgaagatattggttggaatagatcgactacggaggtgtgtgacgtgtttgtcatgagttagaatggtgacaagcggcggcaagatttcttatttgcttcggcaaaccggggtggaggtagagtatgggaagagggtgcccagtaacccggttaagaaaattttttagctataactcaccgattttcaccatgtgtacagcccctaaatacaaactttggcagccgtatcagtttaaacttgatctaaagtagagtaaattaagcaagagccaccctcctccattttgttctagctccgctcctggcaaagcgatatatcatatcatcaacactgaggatcaagtgtagattgttaatctgaccttgattatcgctgtaattaacaccgtgcagcaaaatagcagattaggatattttctatgccaagcatccctaaatacaaacttgggcacccgtatcagcttaaacttcatctaaagtagagtaaattaagcaagagacactctcctctatttcgttctagctccgcccctaacggcaaagcgatatatcatatcatcaacattgaggatcaagtgtagattgttaatctgaccttgattatcgttgtaattaacactgtgcagcagaatagcagattaggatattttctatgccaagcatatgttgccctcatatctgaggtcattacctttgatttctttcgtaggagaagaatggaatggatcattaaggagtagttctagcatacacttcacttttcgttgaagatatttcttttccttttggaaaaatgtcgtcgttgatttggaagggcagagaagaagctgcaggacccaccgctggagaaacaaagcggttcgatgtatcgggagcacggatgggagcaggcaagccacgtccgttttgtgggtggacggaaagtttaagggacaaacctataaaggaattttgtgcgtcgcaatgaagacggatgatttacagtgtaaatagatggataaaattaaaagaactaggcaaaaaggtatatgcatattgaaaaaaaaatgattcaattggttaattgtgttgaaagtgattgtgtttccaattaaacaggccttggcccttaaaatagacggtattgcctcctataggtactcatctatattcaatttgagatagagagatcaattggaattcaaaatttgctttggacttggactcaatcggtctgaccggccacgtatcgccggtcaaactagccccatgtatacaattcaaaccataagccatgcaccttgaaacagtactcaactgaaggggttgttttgtgaatagtttaaagatgtgaaatcactgatagggtgcggaatcatttgaattcaagagggcatttcagacttttttttactagaaaaaaatgtccgtgtattgtaacaagtgatggctattatactcttattattgttatatggtttatttaagataaaattctctattaaattcgcttggatatatattttgttagaaaatcatgagctgcattaggaatccgatcgtctcaaattagcgtgcgagtttttttaagagatttcctatacaattccttttatattttcaaaagcgaacaaacttaaaagccgactcaaattcgtatttatattttcaaaagcgaacgaacttaaaaatagactcatacacaaataacgtatcaaagtaccgacaaaaataacttcaatttataatagtagagatttcttattataatggagacaaacatgttcctcatacatgaacaccacatgcacacatatgtggacgtccctcttaacgcaggccacaatgctatgatggtttaaactaagaagccgagttatggaataacaattccttgaccacaccaaagttttttctttatccgaacgcacgcaaatgacatattctctttttacaatattgttttaagacacaattatgtgtgcgctttgatcagttggaaatttgtgaggttcacatatctatataggttctgtctcctaaacacgtgtttaaagtactccctccgtacaccgttgacttttcaaccaacgtttgaccattcattttattcaaaattttcgtgcaaatatgaaagtatttatatcatgcttaaagaatatttgatgatgaatcgagacacaataaaataaatgataattgtataaattttttgaacaagacgaatggtcaaatgttggataaaaagtcaacagtgtcatacattaaaatatggagatagtagtatatttaggtttgtaaatacatcagcacggtgtacaggaagtacaggttatgtggtgtggtagagttgtgagtgtatgatttcaccctttaagatatcatacatacgtcggtgtgttttcaataggtttttaagtcaaaatatggattaatttagaggacttttacggtacattctactgctagtatatactaccagtatatttgatctaacggtgtaaattcatctgatcttcctcccaaatatcctgtagtataaattgtttagggtatatttgtctttttatctatttgtgtggggggtaattttttaaattcgcgtttcctcacttgatctgatccgatcgatagccgcccgcccagtcgaagccctttttttctcgatgttgcgtgcatgggcgaccgtcgccgctcatttcttctgcgagctgccgacgaccacaatcggcgccgccgcgccgccgttctttctttagtaagttcaatgaattaaggacttggtatgtgttagggattcagacacttagaaactgatcgaaccaagaatgtatgagataatccacttcattgctgtgaacagatcaaatctatttacactcttatgtggtcttatgcaaatcatgcccattgcaaactcaatctactagattaaatccgaccgtcgaaggaattgctacgcctccactcgcgccgtcgccacgcacgatgggagcgctacaacacccggacgacgagatccatgaactcccgattgaattaaatcgcaagaaataaatctcaatttcaaattactaaacagccattttcagagttttaacaaataccaaatctaccctttaacatactgctagtatatactagcagtagaatgtactgtaaaagtcctcttaatttatcgttggtgtccatatcatgttttacagggggcatttgatttgtgggtgtatttgaaggtggtgtgcaggtgcgtgtagcgtatacgttttctatgtaatcacaaggaaaaatatatgtggggtgcgcctctacggtgatatctcttaatctttatgtctttgttctatgtaattataatagaaaataaattaattatttaatgacttatgaacaaataggtcaatgaatggattcatataagtttatgtgagatcaatatttatttttgcaacacatggtgtctgcccgggatcaacggcccgtcacatgatcgatcgtgccaacgtgccacacagacaaacctgagctatcagacgttatggatctagtatttctcaaagcacatgcgtgcacgattcatctgtgcgcaaacaattgcataaacataaataatatctgaagttaaaacatagtcccaagctcagtacaggcgttcaaattttggaaatgcaagaaaaaaacaatttgaaacctaaacagatttacctaaacttgaacagtaattttttttctaaattcaaacaattttgaccttttgcaatatgcatgcatatccagctatggcctaccgattgctcaaatccgactttgtatagtttgcaactgtgctacgaatatgtaccgtgcaatagtaaagtggattacgggactcaaccgtaaacaacgcatagtcggagtctcgaagaacaccccccctctcccgcacctcccctcttttcctcctcaacacatacaatagatacaggggtgaaaaatatcattttgaataactagatgagatttgtcatatatacttaaataggatttaagtttagcaactagaagtggaaacacactaaagcagggccctatcaaatgtagaatgtttcaagaaaaagcttggaaacagatagtgcagtacttttcacctttaatcgagatgatggcatccgatttgatctgtcgacgattccccaagttttggattctcacccgatggaacatatgcacacagcctagctaccgcaatttggccacacatcgatcacaagagggaataattcgattccatttcaaccttcaaaatatttgcaaccatacaatcatcgtgtggacggacgatctcgatcgatcaaacgtaatcaaacgaaggactacgaaatgtacattgtcagcaacctaaaaagtctcacatatggaaaaatatttcaccatcgtccacgtacacattgactagcaaacgaacactaccttctaatatatgttcttttagacttttacacgatgaattaaagagtaataaaatgtgacttgatatctagatgaaccaaacaaatcattagaagaggctaattaagcaggaaaagtaattaaaagtttacttgatttattcttctagctgcgagcggcggcggcgtcgtcttctacggcaatgtcggtgacggcggcggcggcggcggcctcgatccgctcggccatgcccttgccggcggcgtcgaggtaggcgagcaagccgtcccttgtccaccccttcacgggctcgcactcgaacgcccacacgagcttgcaccctgcggcggcggcggccgccggcgccggagcgttgacatccacgtcctcgccgtcgtcgtcgacgagcgtcatggtggcgacgtagcggccgaaccccaagttgctgccgacgacggcgtagacgaggcggcgccgggcgtcgtccctctcgagaagctcctcccgcgcccacgtctccaccccggcggcggcggccgccggctgctggtcgtcgtcgtcgtcgtcaccaccatccttagctcgcggaggtggtggtggcgggcgggaggcgacgtagcggacgcagccggggacgccgtcgtcgccggcgacgcgctcgcagacgtcgatgccggggttgtagcggtgcagcgagcagaaggcggcaaggtgcggccacgccgcggcggccggtgtcgacggcagccgcgcctccaccgcgccctcccactgctgctgaggctgcgcccccatctccggctccggctccggctgctgctgctgcggctggtccgccattgtcgacgtggcgttgaaggagagctagcttagcttagcgaggtagcgagagtgtgaagtatactgcttggagcgtgaaattagatgctctggtggtggagacgaagtagtggagagggtgaagatatattatgaacgccttccactcacgttaagtttagaccaccccgcttttgggggagagatggcatgcgaaaatgtacagcgtcatgtgcactccagccatattaatcccctttttttaagtaggtttgtttaaattaagtatggctcggatgccgtccagtggccactctgcagagatagggccaaactccatagtaattaattaagtattaccagtacctattataaattttaaaaataaatttatttgaattttaataaaaaaaacttaagtaataatttatttcgaaaatgtactgtgtttttaagccgttcgataagcttgctaacggaaaatatgagaaaaatgcagtctatgtttcggatcactactagatcatccctgccggttcgatagtgttctaattttctcgtccaatgtaatcccatcatagtatgacactattacagtttggaaaaagtacgaattacccctcaaactatcgcggtcgaccgaattaccccctaaaccataaaataggacattcctcaccctcaactatgtaaaccggacaaattacccccctcgacccaatccgcggtggttttggtctacgtgtcgcacgtgtggcagtccagtcagcattctattcattaaaaaatgtgggacccactctcttgtctctctcactcttcttctctctcacgcgcacagtggcgaggacggggccggaggcggcggcgaggacggcggcacgcacggcatggcagcgcgcacgcacgcacgcagcggcgaggacggcggcatgccctgcacgctccgtcgacctccctccgccccgcgctttctcttccttccctttcacctccccctccatcggatcggtgccgccgccgcaggagctcaccatcacgcggcccgatgactgacacctccacctctgggaaggcgatgtcctgtcagccgtgctccccacaggttggtctgctcggctcggcgtcactggctcgttttactggtgccgcacgcctagtgttcgatgttatgtctcagtgaggtggcctgactgcttgcatgatcgtgtttgcatgtttttgggcagcgcgatgcatattgggaggccgtaatgcccaacttgaagccaccggtgaccacaacagcacgagctttggagtactaggaggagatcctcaaagcgctgcgccgccgcctccgggccctatccacgtgcgtgtgcgccgccgtgcgcgtctcagccacgccgccgtcctcgccgccacctccgtcccctggccgcgtgcgtgcgcgccgccgcgccgtgtgtgctgccatcctcgccaccgcctccactccccggccacgtgcgtgcgcgccgccgcgccacgcgtgccgccatcctcgctgccgcctccggccccccgtccttgccgctgtgcgcgtgagagagagactaagagagaaagagtgagagagaaagtgtgtgagagagaagacagagagtgagagaggagagagaagcgaaaaagagagtggccccacatttttttttaatgaatggaatgctgactggactgccacgcgtacgccatgtagaccaaaaccaccgcggattaggtcgagggaggtaattcgtccggtttgcatagttggggtgagggatgtccggttttgtggttcaggggggtaattcggtcggtcgcgatagttcgtgggggggtaattcgtactttttccttacagttttggccttctacgatgaattttctttgacactttgaaaatgctatagatcactagtaatagaacatttttttccaaatgggtcaaaagtgattttcgcgtacggaccttcagtcaatctgcccagaaagatcaatgaaaaccactatttttccacgcaggtggtccacccgcacacaaaaatcggtgtttcgggtacgggaccttctgcccgaaaagacatgcgaaaatcactatttttccatgcgggtggcgcacccgcacacgaaaatcggattttcacgtgtgggtgcttatgtagtccgcacgcaaaaataaatatccgaaaaaaatcgcaaaaattcaagggctcgtctgcccgctgccatcttactcctcctgccactgccgccgctgtcgctggatccacactgatcggggatggccaccggatccgagcgggggagccgccgtcgcctcctttaatgcgtgggggagcctgccatcggctgtgcctcccaccacccgctgtcggcggtgcctccagccgcctatcgcgaggccggtggaggtggatccgcttgttgcccgccgcctgccatcagctgcaccgtctatcgcctgccgcccacggatctggtcgtcgcgggcccggccaaggtggatccaagcgtccaaagaccaagccgcgcgccaatacctctcgtccagagaagatgagagggaggaaagtgagaggcggggaggtgagatgttgtggggaaaatgaaaaacgaaccaacccaatccccttgccggagcgttgagaatgggcagatctggccaaggcccttcatcgagcggatctagctagcgtccacctagccggagcgtgacagcatgtgagatggccaggacttagccaatccaccaaggcagtaggcggccttgaatagtgggcaactgtgtgacaacaacgagggcgtgacgtcgagactcgttcggggcgctctcgccactgcagccagcacgggggcatacgcacgcaggtgcacggtagctcatgatcccccttggcccgatcgatggagctggaggttcgggatgtcgtgggagaacgatgatgggtcacttggaggacaattaagcaggccggatgacagcggccttggacgtcagtgggcgccaaggcgtcacccaacagccttctcggtgatagcaaatgatgtgcgcacactgtatattgtctctcatggtctcttgggctaacctaaaattttgtactatcaggccttttagccgctcgtctaggaaaaagtacaccgaagttcggtccctcaacttgtcatcgagttacaaattcgtccttgaaccgcaaaacttcaacttataaaaccagtgcaaactatatccctcggcgatgttaactccagtttcatccgacgtggaagcttactcagcgtgggacccacgtcggtcccacctatctgcctctccacctctcttcctcagtcctcttattttctctcacttttctcctctttagttgggcagcgcaggatgggtgggggaggtgggagtccggcggccggcgacaggcaacgaggcggcggcggcaacaacacgggagcaggagggcctcaccccacgccaccgctaccgccgccgctgacggcgcgggcgctagatccagccaccacgggcggcggtccatggacacgtgcggtcggtgaacactaaaccgagggacacgtgcggccggcgacaggcgacgaggcggcggtggcaacaaagcgggagcaagagggcctcacctcacaccaccgccgcgccgctgccaccaccgatggcgtaggtgccagatcccactgccacgggtggcggtccatggcggcttgtcgatggcgcgggtgaacatgtccttcactccgtgctggcaaggtcgccacggacgtgccgcgtgagcgcgtacctcctcatcgcctccccatccaccagctccaccgccaccgcctgcttaaagtagtcatccgcgtcaccggcatggcatcatcgttaatggcaaaacacgtgggaatgcaacgtcgatggcgacgatgtgtgtgtacctgtcgaggtccttgtcaaactggtagaggagctgcacgtggttggagaggatgagcgagttgacgtcagcggcagtggcgatgatcctctcatatgtcgccttccatcggtggacacggatgatgtcgatgatctcctgcaggccgccctcgtcgtcgaccaactccaccagctcaggcatctcgacgtcggcgtcctcgatctggtccatctcgccgccacggaccaccactcgtggcggctggatctggcgcccgcgccgtcggcg

SEQ ID NO: 20086 - DNA, 8771 bp, Oryza sativa
gggagggggtgggaatgagtcctagggttaggttttgggtgtagttatttaggttaggattaatctgtaccgtccattcgatcggacggctctagctgctcccgcgttaggccgccgaatagaccgtgtggtcgatttcaggaggatgcaaaatgaacttcaacagagaaaggaaacaaggcagatacataaaatagacgtaagggtttagaatataagctttctatattcagcccaaacctgaaagggaggatgttgattccttttccaattaaataattgttaaatgaggtttgtattattaaaattagcaattaagctctgaaatttctaataaaattacaaagaacgtaactaaacatgaagaatttaataataaaattaaatttaacctgttattttatttctcacacttgctttacttaaattgattttttacacaagggagggaatataaactttctacacaatgtaaatttttcttaactttccctcaaatttctggtctgtacacttcctgttgcaacgcacgtgcacttttaatagataatgtatgaatcggtaaaaaaatgaagagcaatactccctgcgtgttgcaatactcgagcgaggaagctagcatcggcggcaagtagcaatttccacgacaggttgacaggcaactttcaggcacacaccggcgacgcgctaggcgtggataactggacacaccctcatctctcccgatttataatcatctgtaggtagtcccggtaacaaaccgagagagggaattcggcactaaagatgacaatctttggcccagattcaaatacccagaagtaaagaaatatctttagtccactaaccggaactaaagggggttgcgccacgtgactggcacaaccatctttagtccactaaagattttttttcttttcctttatcattgtttattctgtttgaatattgatttcaaaccaaactcaactataaaaacatcctcattcacaaaatcatccacaaatcaacaataaaatcatccacattcacacaaacacctcaaaatcacccacaaatttacatcacaaaatcatacaaaaaacatctaaaaatccccaaatttacaacacaaaaacatctaaaagaatccccaaatttattcccgcagccccactgggcgctgccgcccacagtcgtgatggccacggcgccgccagccgcagcccaccgcgccgggcggtgccgcctgccaccgacggcgcgcctaccgccgcccgccgcaccaggtgctgccgcctgccgccgacggctgccgtgtcctctcgcatccggtcgcctgccggcaacagccgacaaagaggggaggggaggaggaggaggagtaggagggacgaggagaagaggataagaagataggagaaggatgagcactagtaggcgataaggttgagggatacacacacacacacacatatatatatatatatatatatatatatatatatatatatatatatatatatatatatatatatatatatatatatatatatattggcctctacgcacgtttttttctctctctcccccgcgcgagtttttttaatgtttagtcccagttggtataagtactaaccgatgctaaacatactagggtgcatgccacggcctgacactaaatgaactgggactaaagatgatctttatcccatgtttagtcccggtcgagactaaagaccatctagttttaaactgggactaaaaataatttttagacctgatttttgggtgaaccaggattattgtggtttttgggtaacccacgaaagatagtttctccagtagtgtccctcgctcgcttgcgcgcacacacgcatgcacacgccggacacattatggttcgttctgatctcgctcgcctcccggtcatcactcctacagaagaagagcgtcaccgccgcagcctcagcctctcctaaatctcgtgccgccctgctgctgccgagaaggggacagagagaggacgtagggaaggaagaagcgagagatgatgacacatggatctcactgtacttttttatttttgtgatgaatatattatcacgtggatgttgtatcagcgaaaaccactcgtaaaaactgccgagggagctactatgcatggttttagtgattgaagaaattgttatacctgatttgattttacagttaagagatacgaatcagatccgacctatgttgagagactctaaaagaactttttcctatggttcagtgtcattaggccggcccatattcagcccaaactagctgtgagaacacatagactgaaaaggaataaattcaccggaggtccctcaacttaacagcgagattttttgagatcccttaaccacaaaaccagaaatctccacccctaaactatactaaaccgttcactcaaggtccctaggaagtatatatggatagtttcgctgacgtggcatcctagtcagcaaaaaaaaatttaaaaaagtatatgggacccacatgtcagctgcacttttttttttcgccttctcttttcttttctctcttccctcttctgttcttcagtgagggagaccggcggcgatggcgacgtgcttccgctatgcgccgtccgcggcggcggtgtccggccccgcggggcccagcctggtggggcccatgtgggccccacatgttatctccctcaccacgccgcagcatgccgacgaaggaggagctgaaggcgctcctgtcagcgctgggctattctgcgggcgactgccgaccaacgccgccttccgccagtgctctagctgaaggtgcacacagcgcagcgtcgacgacttcggccagtctccggcgttcatcgcgtcagcgttcgaggagcaagggcagcgcggcgtcgatgatggctcgctggacgcgaccgtggcgggagcgcgattctcctcaactcctcaaggaggccatccatgtcgtcagctacgcgttcgaggggcagacgagatgggccaaagaggtcgcagcctcgccgatgatcacttcgccttctgctcccatggatcacaggaaaaatttgagaaactaccaatgtttcaattaaccatgatagatttatgctagaaattaaaattgagtatttcatgtttcgtttctttcttccatcgagaaaagctgctgctgcccccacacgtgagtgtgctgtgagcgtgggtcatgctagctgttgtctgctgccgatcgacttatgttccagtcgccaaatgcaggctcaccggaaggttcggcgccgtggaagccctcaacgtcagctagctgccgtcgctactcgctcgatgagaaacttaatttacacgaatacacaacgtacacaaacgggggagtgatgggccagtgggagtgcgctgggacggggtacgctacgtactcgcggttgcggccgccggccggcacgaggcatgcctcgccctaccgagcgctccgtcgctggtcgtcggcgtactgctcgccggcgaggccggcattcaggagctacacgcgggccagccccacggacgtcctcgcgggggcgtcgcggcgagcggtggcggccatggagatcctgctgagccggcggcacaccccgtctggaccggctggggcggcaggcgcctcggactcctgtagctgctgggctacgtgacccgcgtcgcctacccgcttgcctccctcccgctcaccgtctactgtgcgctcccggccgtctgcctcctcaccggcaagtccacgttccccagcgacgtgagctactacgatggtgtcctcatcctgctctcttctccgtggccgcgtcggtcgtgctcgggctgaggtggagccgcgtgccgctgcgggcgtggtggtcggacgagaaactctggacgcacgctctccagccggcagcgacgacgaggactccggcggcaacggcggatctcgtgtcccgcggtcgaggcagggacgggagcagcagcagggagaagagagaagaaaatataagaaaataagatatgcagttgacatgtgggctccacgtgttttgtttaaatttttttttgctgactaggatgccacgtcagcgaaatcatccatatatactgcctagggaccttgagtgaacggttttgtatagtttagggatagagatttctggttttgtggttaagggaccttaaaaaatctcgctgttaagttgagggacctcgggtgaacttattccgactgaaaaacagggaaactgggccggaaagtgtttatccgtcgatttgacccagtaaatattactagcatccaaaaacccatttagcgcctacatccctgctagtacagtttctccctcgatgcatctgatcatctgattagtatgcttacaaaagaattactacatcactagctactaattgagtagtactaatagatatatatatgatgaaagcgatgatgaccacagccgcatcaatcacttccgaacacagccaaactgtaactgtacctacatttatttgtcggacaagtagttctgactttttacatatagtgatccatacatatcacctgacagcatcagcggagattatgtgcattattgactctgcaataacagcaactaacgcatgacctactccctccgtcccagaaaaaacaatctaatattggctgggacattttataggaccatcttctctagctacaggccaagcacgcacacgaagaggcacgacgctcaggccatgtctagcagagcagcccatcggtgctcacgctgtagagatggaggccgttgagcgcgacgagggtgctccctggctggacacgctcctccagcatgtgtgcagcgcagagctcggtgtcctacctgcggagttccttcctgagcaaccatgatctcgtatcctccttcttcagccccgccgccccgttcaacaccgcaaaacatgcctccatctcggccgtggcggcgataagagcatcaggtcgcttcggcttcggatctggcgggagggacctaagtgtgtcgaagcggccggctgtcggggtcagcgttaaggggatctattgtgccgcgtggaggatcacttccacctccaccttgtcgccacaggagatagccgtcttctggccatagcggaatggagcggcagccatggcagtgacacggaggaagggatgggcgcaaggaagggatgggtgtggtttagcggatgaccaccatgtggattcgtcgccgtccacgaccatcagccagcatacctggagctcgctggccggccgtcctctggcgcaggctcgctacttggagatgaagatgactagtattgactgaggatgaagatgcctacgacaaaagtgtgacggagatgacagaaatcctgatggaatggtatggttctaattttagaagattgtagtggaatctactcaacttcacgagtagtactgtcatttttccaatatgtggcataaatcaaatcaaccctttagggtactgtagtagtggaatttatcggtttatttcaagacggagagagtaaggaggatttgttttccttgcacatgattttaagaccggtttatttgccagccacttgattctgctccaaacaagaatatgtatcctctacagtaccaagatcatatgcatgccaacggtggtggccatccgatccactattaacgtatcggatcaaatgcccaccgttacattacaaacagtgacaatgtacagtaaatctcaagaaactattgctacactgtgatgggtacagtaacaaaatggtacagtaatcctgttcaggcaggcatcgatccatggatggctaactgcgtcacagctcacaagacagcagctgctgcatatccttcagacacacaggtagctgaaacagtagtagtgaggttgatgatccaaaggacacattgctttctcctctctgttctctgatttgcgacctgtcgactcttgatatagttaattagtttttgtcatagtacaaggccaggtgatgaacatttccctgtctatagccctgaagtatgagaggatgaacagtagtgtgagttggaaacagatggtaggagtacgtacgtatatatagctgtgttctgcgctacgtacagtaccatttccgaatattcaattcacacagctaatgtactacagtactacgatctatttatatatgatatcttgcgatttccagttattgtctgacactgtttcatgtgatgtgttgtttctcaacgtcaaagaaaccgcatctagcttgtctccctcctctttgggaggaattacttcttgttatagttatatgtattctctctgtccacaagtcaagaaattctatttttccaatattacccatacaaaaatactatttttccattagtgagatagaaacgagcctaacttggttatttaaacaagagagtaaaaacataagctcagctatcagctcgtttcttggctcaagctggcacgcaagctagcctcccaacaatgattatcggagaggtgatggatgacaatagaacgacgacgtgagcgaccgaggtagacatagacgtaggatttcaagatggatcattaaagagtgcaagaataataataaaaaaaaagttgcgagtcaagaccaacaagataacaagaggaagtagatcttccaacttaatgtactcttattttgagtggctaatatttgagctccacagcttattggttctcagtgactcacgtcagagggcagtacgtcagaagatccctctccggtggcaaggccgccaggcaccattcacgtcatgctgtatctcctgatgcggcaaacccgtgacttgcaggccatgtccatttaggaaaataggcaaactactgggttacaggggaatgagggttagtttttttttccttcctagcgcttcagcttgtcatttggccaaactaatgggccataccattagctccggctcacctcattttaaaaacgagctgtggatgaggcttgggcttcattagttaggctctcgagtcgaaccgagcccgtgcgaccccgatccaagcccgagtaatatatttttccacccatagtgagaagcactttggtgttttttttcctctttactacaattaattaactattttatgatatgttaataagaagggttgattttggacagagcaagtatgtataataatctagtcaaaattttcctcttctggtatttgctaaggagagaaaggttatacctgcacattttgtcagccctagcctttggtttgggttccatttattgcgagctagctagaacacggggagttaactattttttttttgacatcggagttaactaatttcactgcaccatgcatgttataagagtaccggtattcaccaatttaatggtgtacacatgtatgcgcgcgctaatatatgcttcgtagcagcttgatggaaccaacattatggaagtatgttcatcagaggacagaggatgtatacatatgtttgcgcttatagattgtttaattatcatttctaatgcaacagattatatagatttataccaccatccaaatgattagtaatagaatatatagtgatattgaaactcataaatcaatggctgatatcacttttaatagtgatagaactaatagtagaatactaccagtagaccgccaatagatttataccaccacccaaatgattagtaatagaatatatagtgatattgaaactcataaatcaacggctgagatcacttttaatagtgatagaactaatagtagaatactaccagtagaccgccataagatactcgatcaaacttctaaattatcgtaagtagaagacatattgtgttttatgtgaaaaaggatgaaataagctaaaattaaaaacaaaataaatggccctataatatcttacaagttgtttaagaggttagttgtcaaacatggtaggtaagtaatatacagttacgattgcccgctgttaatcaaaaaataatcactacctcctcttttcctcttaagtatcatgccaacctcaataaatatatatgaatcctaaggacatgtataatggtgatgaacagtagactctcaacttggctaattaggaatattcactgacatggaaaagaaagaaagagaagagacaaaatatcattggtattgtccaagaggctgtactaggctctatcattgtacatgtccaaagctatgtctaccatagtaccatcattaaatttgactgaaatgtttacagatttctccaagtatgacatgccatttatctccacatatgacatgctatatattgccaaattttaattaacatgagagtatatcacagctgtcctaataataactgcagaaacatttttgtcatatcaatatgataccatacagtaaaaaaacatagggctccttcccccctacaaacaaccaaatgaacaacacaacaattaatacttgatacgatataaaacagtgcaataaaaccccacgaaacagtaacgccaacttggttgatcctcaaacagcaatggacgttccaagcttgttcacgtcgccggagttggcggcctccatcgccaccgcggcggcggcggcggcgtcgccacggcggccggcgagcgcctcctgcaccctacgcgccatgccgtcgatcccgtcctgcagccgcgcggcgagcgcctccttggccgtgccggccacgggctcgcactcgaactcccaccggagctcgcacccgccggcggcg

SEQ ID NO: 20087 - DNA, 11144 bp, Oryza sativa
tcatgctttactgagaagacgatggttttggtggatcagaagagaggacaatgaatggaaattggagatccagaggagattgggatggatgattttggagagcaaaatggacgattgggaagcaatcaagtcaccattgacaaaatcaggtcacatccggcctttcgaattaacgcgaatttatgggatcgagctctagttctattagaccgacttcacactactgctttattgaggtcaccacctacgccgtcgttcatctggttctaacacatcttctaatgacatgcaagagggaaagaggcaagaatgggacaaggtagatggagatgatgccatcaatcggctctccctatgaaaagaggaaaggaacttaggacaaagttagatagagaaaagttctccatgacaaaaggtaggacaggtggtcagagagaatgtgtaaggagggagaagcggtggcaatagggggtcatcgctggttgtggcaaagaaagatggggatctacggagaaagaaagcatggaggagaggaaaaagatgtttagagtagctgacagtgggtccttctcatgaggttaatcctttttcttttgccatagtaggatttaaaatatataaaaaaaataaactatgggtggtgtggtctatttatgaccacacaaagatgtcggtttttagatttagaagtgacatatgccaattaattaatatatcaaggttagatagatttaaccatacggtcttgtctgagatgcgctagtttttgttaataatatcttgcacgaattatatatatcatacgttggaactttgtatgagtttcatgtgagttacgaatggtactcatgtgtgaacgggtgttacgtgtgttcatcttctatgtgaccgtaaaaggtttttcgatatagtccatcagaactgataataaatgtcatgtgcataatttgattaggggatttaattaaaccgaaatttgcaccatcaaatttctgctgcatgaattgcatgtgttactctccttctcaaacaaccattgaatggactatgtgtctctaacaaaaagttggattgtggcttgagaccttgggttaaggttcatgatcgaagttttatagaattaattattatagtgataccagatagggttcagagggatccaaaagtggtagcatgagtatggtagttggctcttggctgtgggggtggtaactgataagagggagacaattaaggaacaaaaattttacaaggcaatgagagcatgcacatcgacccatggggtataggagcctcctgaatcctgatacagatgaggatgttagatggggtgactcagctagactgatcctcaccggagacaggtcagtgaggcagcaccatgtgcgaaaggctatatacacataattcctacaaaagtacaattgtagttaatttcagaatcactatattgataaaatcgaaagtaaattaaaaaatatcaagacaggttctttctgcttcgtaatacaagacatgcatgtatatgtgtaattaactaacacatcttataaaattatttttttaaaccctccacactcaagatctctaattccataggatgcatatgcattgttttattaggattgttcaaacgaggaactgataataattctttcttatcattacattaatgatagttacgcattatatgttggaatagatggagtacaaatttcgaagctactttaaactaaatttatttattatgatcttaatttagaatcaaacatcagaaaatagaattcacttgtatatgaatatttactcagcagattatatacaaaatttaaaaagcattaaatgcattatttatataaatatatgtaatatcactagcatgtacaaatgcacagattaatatctatgttaccatggttttcctttcagctaataagtcgttgtcaatatttaaattttaaaacgtattttcgtagttgattttagtttttcatcataatttattttactgaattactaagtacacaggttttccgtcaaaattatattttcgaccccctttgattcaaagaaatttcatatgaattttaaaggatttcattcctataggaaattttttctatatagcactttgtatcaaaggaatgaatcctatggaatgcctcttcccatgtaagttttggaggaaatttaacatgaggtaaaacctcatagaaagaattctttgagtctttatctctcctcaaatttggtgctatcaaatggtcatttatatgtttttcctgtgctttgcaatcctctgttttacacttgtattcctgtcagaatcctatcattttcctattcctctatttttttccttcctgtgattcaaagaggcccttattttttaataagcctttttacgggttatcctcagctgtgagctagatggtcaagttccttatcttaaatagtatataatatcttcaaagaaagtgctatagttgttagcatgattacatacagaagttttgtctccatcctaaaatatatgagaccaagcatgcatctctaacatactacataaatcagactttccaaacacctatatagccagctctgcaactgatttgtcaagccaaacctatggttcattctaacagactctccatttcgaatctatgacaccaggacccatttgttagcttatactactctcttcttcttccttctctttctccctccctttctatcttccctggggcgggaggcgacaataggaacacatggcggcaagggcgaggtggggactgaaggtggcggcaagggcatggcgggcaatggcgatagagcaacgggggatgggagccacgccaatgacacggggtggcagcggccaccgtggatggtggcgagtctttggtgatgctgccaagggaagaattaggggaggaggaggaggtggtagcggatggtgaaggctagcagctctgcgacgacttcagccagtggcgaccatcgatgggagaggcacgtgggcggtgctgctgctcctcgccgttgcgttggatgggtaggtagtggggggactcgcggtggcgatggaaattggcacatggaggagctgtgccaaggagaaggagcgactgaaataccatcaagtaaccgccgctgtgcccctctccatcgatctgagtcctggcccgtcgtgacgacgagacagtgcagaagagggaagagaaggtgggaatcacctttggcaagccaagaaggctggctagatttagccaatcggagagttgattcagacagcaaggtggcttggatagccagatagcaagttttttggagtgtgctttttctcttcactctccaaattttagcttggagagtcaaatagccattttcttggaaatgctcttagaatgcaaagtgaaacctcataagcttaaatgattactatatgaaaatattagaaatcagagtaaattttacaaaactatatgtattttgatcaaattattgaaaaactacatatttaacgcgttgtattacaaaactacagatttaaggctaagtatcacaaaactgaatatttagtattgaagttatcacaaaactatagcttttagagttcatatccctagcactattgtaatatgtttgagctataaagattattgttttgtgactaaattggttataaaacatgtagttttgtgataatttagtaactaattaaacatgtagttttatgacacttcatcttaaatgtataattttgtgataaatttgttgttaaatatatagttttgtgctgcatcgagttaaatctgtagtcgtgcgatggtttggtcatactatatgtagttttgtgaaatttattctagaaattaatatgtaaaaatgatattaatataattataatgaaaatactttctatagttatttttaataattattaaataaataaatagaaaagtaatgacataacatgcgcagtggggatattgtattagacattcacaacgtcaagtaaaaagatatagagcgatgtagtatttcaagaatgtattttgttctcttagcaagttaattatctatgagatattcaatatatataacacaagttaaaattaaggcttttgtgttctctcagttaaaatacacaataggacaaaagctgaccaaacagatcccggagtgggccacgggcgatctcacaatcagtcccaagttactagctgtggaccttgaatcaacacatggcctggatcggagcttacaaaagtcaggattactatttgatgggtcaagaactgaagatgcatggcaaccgggaccagccgattccatttcagggctagctcacttttgtgcgctcccaacctcttacatatcgatgctggacctggtaggggccgggtggtaggcctacatatattgcttgtctaattgaaattaagtttccaaaattttgggtttacttgtttgtcccggtaggatatgatgttcttcaggtgaaaattttaatattctttaattcagcaaaatttattaggaaaaccactcatttatttatttatttatcctacattttgtaattttctttctcaaaattatattaccgcattccgaaatggtgaaccacactagcaagtctagttaagcattcgatgttagagtcacgatatagcttacgtatgacctagaaaagtattaaacgggaatgcaggaggtgtcaaacagcagaggtacgaatggccgcataatatatcacacagttagggggccggtgtttttggttgccagtcacattttgccacaatttgccatgcctaatgttaggtacgtttgccaacatgggcagtttttcgtttgcgatgtgcgtgctacctattgatttgtcgcggtgcggtgtagtgccaactgagggttgagggttaaggggggaggctcactaatgagctggctgaactgccatggtgtaggaggaattgcgactcgggacatggtagtgggtagtgtctatgattgatcacatactcacattagtgtttggtacgtgtaggtaagcctgagctctcgatctcgatctaaagaacagtaaatgaattttggctaattttatgaacacatcaacatcataattgataaaaaagaaatatctgttttgagaataaaacaaagaaaggttaattagatcgttctccaacatgtagaaattctctttagtgagaccaaatctgctataggatcttatctgatgggtctatggtggttacaggcaggcaaattaaagcaaggtgtcatgggtgcttgctgcaccaggcatgctgcctgcaggctttagggttgtgtgtgatcagtttagccagagccaccatatataacactggaccccggccccaacctatcacgtcattagcaatattgcttgcatacaggattcctcccattaatcatgaaataatgcatgctgcaatggtcggggccatcctaaaccctagctgtgtctctgcgtcgtcgtcagattggctcgacatataactgatctcttccataattcatgtgctatgtaccaggcactgtccctcacctttgattcctgatgagtcaatcggtcgatcagtcgaaggtgtgtaacagtgatcaccatgcatccatggcccctcacattccggccatgagtgacaaggccagacaatatggctagcatggtcacaggttttgatacctagcgatagcaggaccatccccttcgcgaggtcgacggcgatcgatggattggtcgttaaataggcaaaaatgtggacatcttcaccaatagtgaaaaccggcaaatgtcacacctatggctaaggctagatgtgacaattttcccactggggccagtccccggcggataccaaccccaacggggtcatggtcgggtgggatttccctcccatagtgagcgggagtagggcctcataaatttgtggggtggggacgggggagagaattcacccacgggtgatccggcggggccccaaggtttgggctctcagtaaaatatagctaagttcaaggtccatctaacccatttcaatggagggatatataaactccaggatggagcactggtagcacagatctgtgatacgccggtagcctgcgcaagtgagtacactggtggagaaaccatctttcctcccggttggtaacccccctttagtcccggttttccaaccgggaatagcaatccgggactaaagatttctatctttagtcccgggtgaaataaccaggactaaagatggaaagatccatctttagtcccggttggtaacaccaaccgggactaaagagagggatctttagtcccggtcgttgttactaaccgggagtaaagagagaatagcggcggtaccaaatggtccccttttcttttttttcctttttattttctcccgaatcaagtggcatgcaaattcccaaatcaaactctaaatcccaaatcagagtaacatcccaaattcacatcacaaaacttagagttacacacaaatcaaatacatcataaatcctaaaaaattacacacaaatcaaatacatcacagatcctaaaaaattacacacaaataaaatacatcacggatccatacaataaatcacaaatttatacatctcagggaatcacaaattatatataaaaaatcacaaagccgctcgccacggccgctgcctgcggccccgctgccgccggccgatgggcacggccccgccacccgccgcccgccacggccgccgcatatggccgccgcgcacagtgccaccgcctgcagtggccccgccgcccgccacggccccaccacccgccacggccgctgccgcccaccgccgtgcacggcgccgccggccgccgccccaccggatgggaaggggaggagggggaggagaagaggaaggggaggaggtggaagagatggaggagaggggatgaggaagagaggataaatgtgagttgagatctgtgtgagaggagaggaggagaaggggaggagattcgatctgtgtgagttgagaggataagtgataggaattatatactacgcgttcaattttagtagatgatctttactcccagttggtaggaccaaccgtgactaaagtggtaatctttagtctcggttggtagtatcaaccgggactaaagatccacggcaccctgacatgcctctgacaggggatgaaccgggaccaaagatcaaaatttttttaaccaggactaaaaagactaaaaattatttttagtcccgatttttaatggaactgggactattgtggaatttggttgaccgaccaaagatggtttctccaccagtggtattattaagttatgctactgctgtagggttgtgattcatgtctgattgttactcgattaatttatggctgctagttctcggttatgttaatagattttctacattctaaacaggaatttgatcatgtcatggtttgataaatttcgatggctgatggcaccaacaattaaggttgaggaaatctgccaatagaatgcatgcttaaaagttaaatcaccaaggtatgaccatcttgactttactgttgtttgccttttgattatcatacaaggttaaatattctggtgtaatgtaatgcattcttagttcagaaaaaaaaagttagaagtgcttattcactcagaacgtttatgaagcaagtttttcaaatgtgtgtccaatccctacatttgaactttttctgtccacagtcaaaactgtagaaattcctaaaacttcaaattgtactgctcagaaaccttacttggaaaataaccccaagatgtcaagcagtgttattcaacaatgttcattgctgcttttaattactttgggcataatctgacttgtcatgtgaattaatcgtatcagatagctatctaaatcaagtatagctggataagtcgtacatttttttagtaacctttttcagaggtcttataaaagcttgttgcaggacagtgatacattttatggagtattgttaaatctacagcatgacttgaagttggggagcagatgcaccgatatctgcgtggaaacttagcagatgtattccaattagtcaagaaaatgccttttgagaacttgtagcatgcatgtccagtgcatttgcactttaattttgatgtaccattcaattgtaaactattggttataaataatattattgacatttttccattgctacgttattttcttatttttgtccaatataattctagaaaaaaggataactttgtatatttatctaagatatataaagtatttgataaaaatgttataatgttacgtgaagttcaccaaaagtgcttttagcttaatagagacaaagtaaagcatgtctccaatgatgtagggatgatatttgcagcgtctcaacgggtgtctcatttctggtttagacgcttaaatcgtctctatggttttgagacggtccaagcaaagacgttcctatgacgcttttttttaaaggtgtctctataatcatgtggagatgatctaaaatgtctgtattgcataaataaagtgtctccccaaggttgttttgttgtacgttgccccagtctaccgtcactgcactttcaagtttgaggatgttgcagtggttgtctcatggatggatggatggtgaaggatgaatcgatgatgctggatgaaaatttagtgacactgtgattatgtcaatgtttgagaggatgttgcagtcactactacagaaatacataaaagagatggcactatagatactagaacaactaaaactaacacctatagcgcttttgccatccaaacgcgcacccacggggcaccaatggctagaattggcatctttgtggataaataggtgccggttttaaattggaacttgcaccacactttcctatcagataaaggtgtcgattccaactgaaaaccaacacatatcataaacttataggtcacaatttttaaaaagaaaatagacatttgacccaaccaagcagagacgagcccattcaccctgccatccttattggcgcacagcgggaggtccaggcgcgtggatccggcggcaacgggcacccttgacccttttcctccccttgcgctctctcgcgactaactctctctcggctcgagtggatctggaggcggcgaggcctcgcgcgcgtggattcggcgagggcggatgccctccttcgggtggatccaacagcggcgaacgccctcctcagcgaacaatggcggcggcgagcgcctcctcggcgagctacggcggctttccccaccaccaccaccgcacgttctcctctccctccgagttcttgatttcttcgctgagttggggatggttgattttgggattaagttgtggcttgttcgagatgttcttagtttttgttgaaaactgatactgttgcttctgggattcagttcttggctcgaagcatcgaataaaatcgagccgatacatcaagccgtttttttttgcattcttggaacctcaatggtgtgttcgaaaccggcacctttaatccctcctcttctgtgacacctgcaaaatgtcagccgggaaatacgatacttatgtgggattcccaaccaacacctatctatgtttctgtagaagtgagtagttgtcttaattatttatgtgattatttccatgtgtgatactatggtgagtccatgtgggctgtggctattgaaattttggtatattcttattcaggatatatgttgtgttgtttcaatagagtattaacttcaatcgtgtgctgcggggccccgctcaccctccaggtcctttgcagggttgaggaaggttttccacccggtggtcaatgtggggctggggacgggggtgttccaatgcaacccggctccgcccgcctcgccttgccctgttgccacccctaactaaggctaccctaggagcgtttagaaagcgaaggcctaacgtgaggttttctgctgagaggaatggagacctcagcctaagaggagagaaacgacataagtagaacacactgcaacaaaaatgagttttgccaggcaccgttcgactgcaaaagcgataaatgggtaaccgcatgtgcagtacgccacgggcgccctagtcaaagaccatcaatagacttattttcatatgtaagcgacttaagtgaccgtttgtgataacaattattggcatcaatcttctgatctatatactataatgaggtgcattttttttaataatgaaaacggtttagtctccttcctctaccattgggcttacacccaacaagtctttaaagtaaaaaaaggaaagggcaacaaggacaaaccacccacctcgttctaataaaagattagcgttttcaaaatcacattggtacataattttttttgatgtaaggtaatatgcaatttgaactgttataaaagatccttgactataaattcaaagtatatagcaccatcgcgtgcagtatcatattgttcctacgaaaacatcatacaccaaaataatgaggtgcatgttcaatagaaaatatttgattgctacgcatgcatacatatatatatatatatatatatatatatatatacatatatatatacatatatatatatatatacatatatatatatatatgtgtgtgtatatatatatatatgtgtgtgtatatacatatatacatatacatacacacagatatatatgtatatatatatacatatatatatacatgtatacatatacatacatacatacatatatacatatacatatacatatacatacatatatacatatacatatacatatacatacatatatatatatacatatatatacatatacatatacatatatatatatatatatatatatatatatatatatatatatatatatatacatatatatatatatatatatatatatattggcctcctacgcacgtttttttctctctctcccccgcgcgagtttttttaatgtttagtcccagttggtataagtactaaccgatgctaaacatactagggtgcatgccacggcctgacactaaatgaactgggactaaagatgatctttatcccatgtttagtcccggtcga

SEQ ID NO: 20088 - DNA, 676 bp, Oryza sativa
ttcttccatgccggagaatcagctggatgtcgaagcgcaccatcctctaagcgctcttcatcatgccaacgtgggagcgatgctgtttctctgcatatgaacaatctttttagcctatcctttattggaaaatatcgtaaaactttgcttggcgttgctttctttctttctttcttcgttaacttggtttctggctttttatctttccatctagaagccttacaagttgaacaaaaatcatcattaaccttatctttccaaaacagctgacagttattgggacatgcatgaatttgttgataatctagaccaaaatttgaaaccaccttcttagcctcataaaagttttttggcaattcttttccatttggaattgccatgtgaaggatatcaagtagatctccaaatgatttatgactccatttgttcatggatttcatattgaacaaaagcactagcagagataagtgtgatagttcacatccatcccataaaggcttctctgaatctttcaccagcttataaaatgcttgagcttctaaatttggcccatcagtgtgtgtacacgatgaatctgcatgatcactcataggcacatcgtcaaacacagtcctaagtgcatcattaattaattcgtgcatgttagcacgcatattttcattgtggggctgtggtt

SEQ ID NO: 20089 - DNA, 638 bp, Oryza sativa
attcctgcagcccagtcgggcgcttccaagcgttgccacaggtgcagcgggcggtaaaacccctgggtgcgcatcagcaccaccgcggcgatggcgatggcgtaatcgaccagcagcgtggcccaggcgcaaccggcggccccttgcggcgcgatgccccagccgccaaaggtaaaccagatcgacagcggcaccttcagcaccagggcccccacctgaatccaggtgaccagctgcgggcggcccagcgcttggttgagtgtggtgtacaggcgaaagaacagcgccgagggcagcgcccagccgacgatgatgaggtaatcgcgcacgctttcgcgcatcgcatcgggcacctcggtcaggcgcagcagcggctcggggaacagcagcacgcccatgcccagcacactggcagctgcggccaggtacagcgactggcgaaacgattgcccgatggccgccgtctcgccgcgcccgtgctgctcggcccagaccggcagcagcgcctgcagcacgcccatgagcgagacatagacgctgacgaacacggcgaggccacggacaaggcggccagcgcatcggcagaaaagcgcccggccacgatggtgtcggtcacgccaaaggccatcacggccagt

SEQ ID NO: 20090 - DNA, 11971 bp, Oryza sativa
  unsure (1)..(11971): unsure at all n locations
aaaaaaaaagtgcggacgggaagagggaggggtgcgggaggggggaggagggacgggagggggtgagggggtgtatctgtgagggagcgctttagctattgcgcaccctagacgtggtttagcgtgtccccatacatacatacatacgtacatacatacataacatacatatgtatgtacatatgtgtggatggatggaaaagcaaatgtgaaccaaggttcatttgcacctataatctaggacgttggtgtgttccaagatgtgtgcaagttaaatgtttcctagtatgcatttgtgaaggcttactatagtgacaaaggacatggatggtacataacatcactgtgcctcatggtcttattttgcagccttcctactttacccctgagccttaataatatcgatatgatatatatatatatatatatgtatatatatgtatatgtatatgtatatatatgtatatgtatatgtatatgtatatgtatatatgtatatatatgtatatgtatatgtatatgtatatatatgtacacacacacacgttgatcttttttaaatgaattgatgcatcgcaaaagtaataagaactcatgtgaaatcaagaccaccggtaaatatcatttgtggtgaaccaccgaaacataaacatcatacacttaggcaattaagagctaggagatgttattattggtattactttcaagtgatttgtactccctctatctacttttgatagtcatgacttaattatgtacaaggtaagtagttgtttgtatttcttgctgagaaaggagaaaaagttattctgttataaaagaagtcatttaattaattaattctcaattcacaaacccagcgttatgttagatgttactaactttgaaggagaagacattttcacacatttgaatacctatcctgattatcttgtactccctccgtttcaggttataagttgttttgactctaatcaaagtcaaactgcttcaaatttaccaagtttgtagaaaaaattagtaacatttcaacccaagacaaatttattatgaaaatatatttaataattgatttgataaaactaatttagtattgtaaatattaatatatttgtctataaacttactcaaacttgaaacaatttgactttgataaaagttaaaacgacttataacctaaaacggagggaccgggacataaatagccatgaaaaagtttgtaaaatattgtaacatagtacatcttatactagctctactacaatctctgtcccaatatataccagggattttggtaatacaaatatataggcagctaaaatctctaatatttttggacggaggtggtaactcttatattactttagagtggcaagtctgctttttcaagaaaaataaaaaaaaacaaatagccttttctatgctgttggtagccaatcgatttttttctcaaatcaaatttggagtctagatttataaacattgtcaaattatttgtattaaacttttttgcacaactgtcgttattggttgatatttcaagagtgagaaactattgatgtaaaaacacgaggcctgggagatgtgcttaactccagtgcaggttcaaaagccagcgtttaggtggatgagcgtgaccatgttgatgttgatcattctatcaccaagcatctcttactgtgtaacgtcggttaaatccataaacgatagccgatcggctagttgccgatgacgtatcatttatctttgagccgatgtcatatgttgatcgattggcagtaatgaataagtaagaaagaactaatctattcgatcggctgtagatattaacgatatataatccttatgtcgatatatacttaaatcaggtgattgggatagatcggtcgccatgccgagatagtataaatcacttaggtcgaaatatatattaacaacaagactatatatattcatagcatagccgatcagatagatatagcatgtatcggctaatactccgataccactctatattaagatatcaaaggcaagtagaatataccaaacaaaaagcctaatatacttaaatgcaacaagatcttaacataaatagcagatttaacatgtcaatcaagtatataagataaagataattaaatcaggtaagatcggctgaaaccccgatactaccctaatcggcaaccaaagacaggctagagattgagattctaatatcgactcataagatcaaactcaactgatgcaactataagtatgaaaagaaggacaatatctagataatcaagccgttggatgtttcatagagtggtagatatcttatataatctagttcaatgtcaatatataacctaaccggctgccttctagtaacagatgctagccaattaaaggttagatagcgatattgccgaagattatgtaagatatatgataactcgatgaatcacataaacaagattagagtatcatgaagatggaagcactaatcccgagaacgcaagccgccataacaagttttaccttttgttgaagattgaaaccgatgcagctcaacccgaaagcaagaactcgtcgaaacaaaataaaagtaaaaagggcggcgatgcgccgagattgtattgaacgtgtgttagtttgattacatggggctcggggtctatttatacccgagattacaaaatatgtccatatcggacacgactcttatctctaacaaactctaagataccataagtctttgcggcagacttttgcccaaacatatctctaaggaaataaaatatcctaactaatagatacaattgccttctcaggattctatccatgcgtggccatcctcatgaagctcattaacttaacccgacaacatattccttgtcatattgtcgaattcggcttgatcggctaaccctgtccaactcggactctgccgatcctggtcgcagccgattcggacttcagccgatcccactctgtttccggaacgatctccatctcgaactccgctttgattccttcttcatctccgatacttagattaccaaatttggtcgttaacggaaacacatgagatcatatatatgtgcctaaggtataaaaatccacatccagctgccattaggatgtaggtgaaaaacatgaaatcctaagtgcttcctctagtcataaatattggatatttaggtcaaacttttaaaactttgaaaattaattatatatgacaataagtttataaaacctaataacttataataggatgattgtactttgtcaagacccaacggtgaaatttttaaaaatttgatcaaactatatcttaaacgtcccatagggagtacatatatgatttgaggtgaataatataatgtacactacattggtcctaaaataactgccattctaaaggcgaagggatgaattaagaaaaatataaaataacctatatgcccctcattctaggtgaatggagatgagatgggacaactaattctctaggattacacttattttcaagcggaggtagtgctttaccaacatgagtatctgatctatttctcaagagaaatagatgcatggttggaaaagaaatagatatatatccctctattttgtagtgttataatataagatcggtcgcgcaaacacaaactgaactcaaccaacgccatatccacaaatcggatcaaataaagaacatatatatatacatatgtacgtagcaatgttcgcatagatagaagagagtaacaaatttgaggggattaaattaaactacataattacacatgaaacgatcaccagcaacacacacatatgatccttccgcgaaactcatcgactgatcgaacaaaaagaaaaaaaaaggagatccaagaacatcatcacatcacatatatataaatatataatcatcatcatcagcagcatgcatataaatacaactaatcgattaataattagccaatatataataataatgcatcacacacacatatatatatatatatatatatataatcgatccatccatgcattcaccgaccgaatcaatggattggacgaattgggaattggggaatttggatggacaatgatgtgatcaccatcatcatcatcgtcagttcatgttgcgggagcagcgggtaatggcggagcagccgcggcggtagggattcgccgcctgctgcgacgcgcagttctggtagtaggtctggcctcgcttgttgcacggcaccttgttcgcgtccagcgccgagtagctgacgtaccggttcgtcggcttcctcgccgccagcgcccgccggagcagcccgccgtcggcccccaccgccgctgagcactgccgccccagcctgccgccgcacgacgaggaggagatggcgccgaggtgggccgtggtgaccagctggctgtagccgaggccgccgccgctgtaggcctcggcaggcgacgcgcgcaggcaggagaccaccagcgtggccgccaccaccgccgcagccgccgccgccacgccgatgccgaggcgagccatgggatggattcacgccgaattccgaggtggtggggggctggggaggttggcgtttggagcaatttggggagggggttctttgagcggggtgggtgtctctctctctttcaagcgcgggaggaggagacgagcggcggtgagagaacgcgggggagacaaacgcggccattcgcacaagcctccacggacggtaaaatgcataccattagactcatctggtcagaaaaaaatcggacgtccaatctaatgtaggtgcatggctaagcagttcgttaagagtacaagggagcgtgcatgcaagcatgtttcaaaacttaaatgattttttctcttaaactgtttatccagatttcaatctaattatattactggattcgttacaattaaatctttataacaagatatcacatgactatattgcgacaacttttctttttactttttaaatgttgcacatattgttaatgaaatgttccaacaagtatttgttgatgtttcactagtgcatttgcaatgtttcatattatctttttatatgttttggcaaatactttttttatgtttcaacgataactataattcgatgtttcaagctaaatataaaaaatgcttcagtagttgggacataatgtttcatgtaataacgattactgttgcagtcaattgcatcactttttatatgttgcacagtttatgaagtgcgttgaaacatctccacaggtgatgaaacattatatatatatatatatatatatatatatatatatatatatatatatatatatatatatatatatatatatatatatatatagtgcaacataagtttgatttttccagaatgcacatatatattttcccaaaaaaaattggatggtccaatgttagttacagttgaccaacaagtgaaacattatgttatatatggtgaatctaaaaaatcagaaactgaaacatttaaatatttatgaaacatagtgaaaatacatgttgaaacatgtcgctataacataagaaacaacaagtattaacagactgaaacatatgtttttctttcatcaaaatataatcatgcgatatcttgttctaaagatttaattacagcgaatacaatggtgtgatctaaccatagattggatgcgcaatttagaagaaaaattattttaaagcttgctaaaatagatgcatgtatgcatggatgagatggagagaggagagagggtagtagcacatagttttagaaattttgtgaaacacaatgaagacacacattgaaacatatcgctatcatgtttgaacatttagttttgacggtttgaaacacatgttttttcttttgacataatataatcatatgatatatgttgtaaagatcgatttaattgcaacaaatacaatggtgtgatcggatcgtatatccgataagtaatttaggagaaaaaaatatttaaagataggagaaaaggagaagaaatagttacgcatgcatgtgacagtgactgacaggtgctgccatgtgtcagtggcatgctgccatacatgtaagaagccgtgtgtgtagtgcttgttgcctggcttggcgtccgatatttggtaggatatcggacgtccgagccatagcgctttcctcacggacgacctcgtgcgtgttgcttttttgcttgggccggcacaaggcccagttcctatctgggttgggcttagctaaaactgggctggtgggcagcaggcttgaatgaataactgggcaaggatatagcttgaaaaggttactagtagggatgtccactttggttccctcaaatataggtctgatcagattaaactctttccatcgtaaaactggatatcaactattgcaattggtatagaatgactccattagcgtttctgaatgcggttttcactgatgtggctcgttggcctgatccaaccggctaaatcaacatgtggggcccacatgtcagcatccccttctcttcctctcctacttttctcttcctttctcccatctctttccccacacgtgcgaacaacaattagctcaagtggggactacgacaccggcacagtggtagcacagcctcgtggtggacattcattggtggggacatcactatccatatctctactcttccttcggcttctggatccacgaagatggccgcaaagggagtagtcaatgtgcctctctgatcctgctctgccttctggatgcaagaggccaaggtcgaggcaaccacagttgctcttcctccacgacaccctcgactagatctaggtcctcgcctcactcacttttcgctccctgtcgctgctgccctcactatcggggcctaccccaccnnnnnnnnnnnnnnnnnnnnnacagccacaatgaccctcttctagcatgaggatggggcatagcgtgtggtaatcgcaattggtactttacttttttcacatgtaattacacataagcattgcatgtgtcatgtgaggtaaaggccaagtcaacatgccacatagacgtttacatcattgaaaaccatcttcaaaactgtcaaggggtcattctacaccagttttaatagttgagtagtggatatacttggtttcagggatgcaagagcgggagccgtatctgatcgaatctatattgtgggaatcaaattggactttctagtaatagagaaaaaaacagacgaacaagaaagccagaccagcaaaagtgcccttattgggcctaatttcgagtggacctatatgacttctagtccaaccatgacaacaggaagctttgtgtaggtttgtgacacgtttctgatctgatcagaaacggtgacaacagcaacggcgggatggatagatgaatcaccggccgaccggccgcctatctacttgacggcccagcactgggtgccggcgtcgaagacggccggcgcagtggcgttcgccggcggcgggaaccatagacaccttgtacatgagcgtcagcgccacgctcaccttcacgtgcaccgtcccctccgcggcctcgcgctccagctccgccgccgtgccgccatccaccgccaccacgccgcggaacgccgggtgcagcacctgcatatccgaaaaaaagtcaaattaagaacatcatcagaacgtggagctagttaaattgtaaagaaaaaacgtgtaggaaattaattaatgtacggaacggttgtgttcttggggttctggcggaagagcgggagcgcgtcgtcggcggggccgagcttggtgtcgaggtagcggatggagaggcggcggtgcgcgttccggaagctgaggtccacggcgaggtcgtagacgagctgcctggagctcggctggtcctccgtggcgttggccgccggcggcggcggcggtgaggtggagggcagcgaggacggcggagtcgatcctggggtggaagcgatcggggccggtagagaagccatagcaggatgaaggtgatgctgaactgcgtccagaactgcacgcacatccacgcgcattcgatcatggacttgcagcagtcccacggcgacggctcgccatcgtcgtccattttctttgtttgaaactatgtccttctcggttgatgattagatcatactctacattgccgtcgtgtcctagctaagctttatcggacgtttggcgtgcaggtgattgatggagatcatagcaggaaagaaagaaaaacaatgactgcgtcgatctcgatccggcttagatcaattaatcttgtttcttgacccggccggactctccgctcaatatatgcagttcgtttactttgttttttttatataaattaggaaggaagctcacgctcaatatatgcacgggcaacttatttattgtttataaaaaaaagctaaagaaagttgtttgttaccttattcactataagaactatatagtactaccttataataataaaagaatgaaataactatatcaaaaaccatttacttgatatactaaatgataataatgtcttctatattgaaacataaattgttttatcatggttatatgtctatcaccactaattattatggtatggaaacctgaatgcatttttgatagatggaattgcatccataccaaaagtaaacctaatacgttgtaaatactataaagcgttcatttctacttcataccactgcatttctaatcaatagaatctgtatataatattttaaaatacctttgataaactaataggttaaaatcattaaaatatatatcaatgcacctctaacgggtgaaaccgaccgtagccacaaatgctttcttttcttatggcttataattaatatgggtctcatactgacataattgtgtctcttaagatcaacgtagagcacaagtttaatgtcaaattcactaattgccaatggtgacttctcactgggcatgcccagtgagaagatggatgtgatgcagatattcttttaaaaagttgagtcaaattgtgatatagaatagacaacggtacaaatataattttcccttttgaaaataagcaggagtgatccttcgacactactttaaaaaatacaaatataatttttccttttgaaaataagcaggagtgatccttcgacactactttaaaaaatctaatagggttgatggagccgtttgtaaatgaatataatgcccgctattaattatttgaaaaggatagagtaattgttaagaatatttgaatgagattgaaaaaaagatagaatattgttccacataatattttttaaattaaaatatatagttattatgggatgtaacgatatacatctaggatatatcctagtcaaatacctagtaaaacaaaggggagcgaaattaaaggatccacataggagtggactgaaagttaggagggaaggattcatagttttttcgcgattagtagtctcccggcaaataatagtctctctaccatatatagatgtatatatgtacatatttttttcggacgaatagtacaaattagacaggagattaggaggaagggattatttacttcaggagatataatctaataattgaaaataataagtttactggtttaagtgtaaattgatcgctccatgttttgttttcttccaatttttttagattttattgatcctaaattatcagtttaactacaaattaaattgagacattaaactgcattaaattgcttgcaattcctaggaagtagagagaagggagagagaggaaatatatgtcctgcacgtagcccatgtacgtatacaggtatgtacgtatgggttcgttacgtacaggggggagagagaggtggaggtggaaggatttgtttcggttaatataatggctgaatataatgggtccaccaactttaataaaaattaaaggttaatctaatggctgaatataacggtttttttctcagaatttcttggatttctctatttctatagagcgccacgtggcagcctgagagcgtttataggaagtttaatggacttttagtatataatagatagataatagatagatatggtatgaacgctcacatatggagtacatgacatgatcgtacacacatactttttccttgtatatcttgagattgatgaaatcattacaaagatcaacataaactacatacgtatctctatcgatggatacgtcgtctatcactgaaaaataataaggccctttttagatttcactcaaaaattttacaccctgtcacatcgaacatttgaacacctgtatgaagcattaaatataggctgtcgacgtttgatgtcgcgattccggtatttgcatagtatggggatcgttggtactaggatatatgcgagactgaggtaaaagagatggagacagggatttttatacaggttcgagcccctgaattgtcaggtaataaccctactcctgttggtcgaagccggtcgttgctcttattcaccataatcacaccagtataatatttggggtagcctatctaactgttgtcgactttagcggactgaagtatcatcacgtagtcgacaacagggtagtcttcctcctcgaatccgtatccggcgagatcagagaccgctagatccctacagccggcctccgtaggtaccggatagggtcgtccaggcatatctttgatgtcgatatccggcggcttgtcttggcgtatgtaggcttgtgttggcttgtggctttgtggtatctatgttgtccgtctcccctctcctcctagggggccttgtatttatatccataggtatccccttgtccaagtagaactagggaaaccaatatggatataatccgagtagtctttatcgtttccatgtagaactctagttgtctttccttatccggaactactcctatatccgaaggttgtttccgtataagacatggtatgtggtgggtcttgctgagattcagtcaactactatttggtatgtggtatccatagccctgacataggctaagaaacaattaattgcacagattacaactaatttgcgaaacgaatcttttgaacctaattactatatgatttaataatgtggtgctacaatatatatttgctaatgacggattaattagagttaataaattcgtctcgtactttactaacggattctgtaattatttttttattagtgcccgaacaccccatacgacaccctatataatattcgatgtgacacgataaaactttactccccgatctaatcaccttctaagttgtaaatgcgtctaccgtactggttaggtttttttttttaacaacctgtccactcaggttcaattccgagcggttgtttatttgacggctctgatcgactccagtctccggtccaggtcaacgcttcgttttcttgaaggaatctcagcagtctggatctaacaggtgatagaaattgatagaggagtttagttggagattagatcattaataaaagggtttgttagaaccatgccaccttaattttgtaaaatttaagatatgctacccgtatctcaatgacatgtagaacccacatgagtcaatgacatgtgggtcagggtggcatatcacattttctgtaaaatttatgtggcatggttcaaattttcccttaataaaaatggttgctgagatttgcttagacaaagtagaggaggaattcccttttaattatctgtccctacccaggtattaaaaaagagggagttccttcctcaattcctcatccccatcccactaaaattttcatccccatccctaccttgacgtgagggtgaagacgacgctgacgtacaggttctggcccaccaagaccacccactactacgagtacgactgctggctgcagttcgcaccgccgccggggaacggtacgccggcggtcaccggcggcgtcaagtgcggcaagcacaagtggtgcatacgctatatat

SEQ ID NO: 20091 - DNA, 6081 bp, Oryza sativa
ctttattcgttcaaaaagaatagttacaagaagttgccgaatgaaggcagggggatcacccagggttggaaattttggaccgaaatttcggtcatttcggcgaccccccgatacgatattaattcggccgaaatttttgaatttttgaattttttcattaatttgggtaatatttgtttaaattcaattaaattttgttcaaaatttcgggttagagtgaaccctgggatcaccacagaatatgtttatgtttagggttttacttctgtgaaataaatccgtcagtccatcataaggtggtacgatgggaataagcgaaacaatgaaaagataagcgaaaccgcacgaatccatctccttcctcgcgccgccggcctgccgcattctcatctcttcgctcttttttcctcccttcgcatatgtgcccccacggcggtggaaccaccggcgcacagtctccttcaccggtggcggcgcatgcatcatcgagtagccatcccgcacccacgcccccgccgctaccgatttctttttctccatccccgcaaccagtccacatctatctgcccaggagcgacagtgccatcgctaccgaggtgcctggtacaatctatccacagccaccaacgtggcaacgccgcccctcgccggagggaggcggataagtcgggtgctagggaacacgatagagctgagtgctcgacgagacggaggcggcagctccggatgagtgcgaaggtggaggtggtggcggcagcgacaccgatgccaggtgtgcggcaaggcagatgcgacggcgtagatggcacattggcgaggctgtcggcgagagcacggccatccgagataagaaaaggcagacacggtgagaggaggaagaagatagaaaatttacataattacctttttcagttagtacctcctttaatggttaatgaacacgtgggaagtactaccatgtaccatttttccccagccgttggatggaatgaaatggatggcctggattgcatgtaccggcaggtaccaggaaacatgatgaacggtaaaaaatctcttatgtttatgttcatgagtttatatgaatgaagtgtcgttgtgttccttgaatcgagtgaatgattgacactgtatatcaccttaacttttatcagtgggactagctctatatatcacgcggaagacttttaacacaatactcccttcgaattgataatacttgtcgttttagacaagggtacaatcttaaaaaaacaactttgaccactatttttttattataatacgtatacaagtgttaacaaatacataatcttattgaagtattttttaaaactaatctatatatatagttaccatatttcaaagacaaatattttagaaattattcataattaaagattttatagtttgacttcacccttatccaaaacgacaagtattatcagcccggagggagtatatcacaattttcactgtggcaattaaccttaaattaattaagccttttgatatctagatcagtgattgcaatttcacttggaaatttccgaaatttcggacccccccccccctgcaagtgattatctcggccaaaatttttaggtttttctcaaatttttgtgaatttggtaaaactttagtcgaattcagttaaattatgttaaaatttcaaaacatttcggtccaaaaagtgtcgaaaataccgaaatttcgagaattttggttgaaccaaaatgtgcaaagtcgaaattgaaaaccctgatctagatagattataatgttgagaacgttaagaacatatacctaattaattgtagcggatatatatatgatatgatcacttcacttgaaatcaaagttggtcatggccgtggtgtcgaagctttgctgcggtgtgagtatcctggggtgcggcagcagcgcggcggagacgtcgacgtcgccccaccactcagcgccgtgctcgacgtaccactccgccgtcttcttgatcccctcctcccatggcgtccgctccgaccaccccagcgccttgagcttctagtcgtcgacgaaatacttgtggtcgttgaacggccggtcgctcaccgtcgcgacggcctcgccggggtcgagcccgaacacgccgcagacatggcgggcgacgtcgatcaccctcggctacgccgacctcccccggtggagcacgacgtcgaacgcctcggctacgtcgtcgcagtagaggtagctccgggcgtggcgggagccgtacgtcgccgtggacggggagctcgcttgccgccgcgcatggcgaggaggatgagcttggggacgagcttctccgggaactggcgcgggccgtacacgttgttgccgcgcgtggtgatcgccgggaggccgtaggagctagcgcacgtacgccatgacgagcatctcggcggcggccttggacgcggagtacgggttggtggcagggttttaaatctcccgttatagctgccgctatctcccgctatagctatttgagaaaggttctagttattttctcttatgtataatttagcagctatagctttagcccgttatagcgggtatagctgattgagaagctaactgctaaatgcctttgcccgctctttaaaagattggttggtggggagcagccgcgcccgcgacgcctcgtggttgcccgccgtggcagcgtcgccgtagacctcgtcggtgctgacgtggacgaagcggcggatggcgccggcggcgccttccggcggcatggctcgaggaggacgtgggtgccgagcacgttgttcttggtgaactcgaaggagttgtcgtcgacgtgggtgtgggcggcgaagtgcatgacagtgttgatccgctcggcgaggaggaggtggaggacgaggtcggcggaggcgacgtcgccgcggacgaaggcgaagttgggcgacgccatcgccggagccaggttgttgagggtggcgcagtagtcgtcgagcttgtcgagcgccaccacccggtacgacgggtggtcgcgcaacagccggttcgccacgtgcgacgcgatgaaccccgccgcgccagtgatcaggatgttcctcggcgtcgtgtacgacgccgccgccgcatctgcggccgcggagacggaggcggcggcggcgggcgccatgattaatttctcgctagcttgtgattaataattagtatttgttaggttatactgatactgatactaatctcgagtttcccactagatccgtatttatagccagacgcctacatctcatcacttcatctgctttcattttttcttttctgaagaagaaaaatggtgatttttttgttagcacaagagaaaatgttgttgaaatttcatcacgtatgtatgtagtaccagatcaaattgcttccatcttaaaagttttggggtgtaaaaaacttgcggaagttttctaccaaatgcgctctccaataaaaaaaaagtgtaggttatcaactgtatatgagcccatgcatggttgtaaaaagccaagtccaaatgcagcccactgagaagagcccgagggcctcacacctgactggccgatgatccagctgattcataggcccacctcaccgacacacacccacattatgactactattataaaaattaaaaatatttttgctagtatcttgatatgtcatccacggtttttaagtttgttcatttttggaaatacagatccgtgtttgaattggattttaagtttttttcctttgggaagtataaaaggagtcgtataagaaatattttgaaaaaactcacatgctaacttgagacaatatgggctcctaattgcagctcatgattttctgaaaaaatatctaagcgaatttccacagtggattttaccctagctaaaccatataacaataataaaattaaaatagcatttacctgttgcaacgcacgggtatttttttttaagtatataaacattcttaaaaaaagttgtgatggtgaggtgggtcttgtctaataagcactattattttaaaatatttttatgtaaaaaaatatatgagctatatatcttttatttggtatccctccgttacataatgtagcaacttaggatgtaattagactcatcttaaattgctatattttaaaatgaagatagtagtttctttcataatttcatatatgttacgtggtccatttcttaattacagaattaatttccatcttctcttctaagaacctctatatatatatatatatatatatatatataaccagttatttatagagtttataggttgaacgactgtgaagtacaaaatcataacttgattaaaagtaataaaactacttaaaataccagcctaaagacaaagataacacctattgttaaattcctatatatctatggttggcaaaaatctgcaaagcggcttgaaagttgtacatagtccttgtctgtctcaaatcagcggctgatcgttgtgccaatcaaatttcacgtatggtaccaaagcggcagataacgtcggagggtaactgagctataaatcaatcgttcacgtagttctctagctagcaccatggccatcgaagccgatctattggggacatcttgcaccctgccgtcgtggaccgtggcgaggtatagcgtcttacgatgctcaacatatgtctatctaataagctatgctaaacttaatttaagtttaatcgtgacagtggaaattgtgatcttgtgcacacttcagtattccaaattattcttttcataatttagttttctattgtgcaatataaacgagaggcggatctatctattgggtagggtgcgtaggtcgactggcacaactacgacccatattgccaccccccctcgggcggagccatgtagggccaagggggttcatgggcacccgactgcaaaagaaaaattaacggtcaataccacttgttggccatatgggcacccccccaatcaaagcttggtgtacccccacccacattagaaaagagatggaagcacagacaacccacaaacccacatcatgagttgtgtccaagcctgacctagcaaatgtattgaaggccaagaggagcccaatacgttgtagcttgttgttgtcgcgaggacgcacacgcgcatgtctctttgccttcttccttttattttctttctagcagcttcctgctgctctttcctcctgaaagtagatctaacctcctttgtgggttttggtgattaatgactaaatggttaaagggactaatttgtttattgagtttatatacggataattagagcctgtttggttgctaccctgagcaaaccagcctggcctgagcccaagcctgtaatctgcctgagacgtgtttggttgctaccctgagaattttagcctgaggaatcttgcctgacgaaacttgcctgagtcaggcgtagcaaaaaggtcgcctgagcaagccacagcatttcccccaacatgcttgagtagaatcacctctcttctactacttctcctcctcactgtaccaccgtagggttaggaggagaaaaaaatccccatcgatccatccatggctgcagcagcagcgaccaaggggctgctccaccttgtagatccggtggccgtctacttcctcttccactaaaatctggtgccatcagttggagctcagctctatgcgtgagagctactagaaaaaagagagcactttttcagatctgaaagggaatcaacttttcaactctctccttccctgtgcatgtgagattgcaagtctccactagtttttccacgatcttctgcagcaaggtgagaacacactctcaagttctcttcttctttttctttcttcttctttttttttttgttgcttttcccttctattgttgctttgttattccaggatctgtcaagagcatgtctgttagaagaaaaatctatgtgaaccattgcaatatttgtgtttttctccacctatttattattatttgtcatgtgatgctcagatggatttagatcatactcatgaatacattatccaacaacaagctagaactttggccattttagctaccgtgttggcta
